United States Patent Application Publication US 2006/0134663 A1 - sequence listing, part 66

SEQ ID NO: 170606 - DNA, 737 bp, Homo Sapiens
  misc_feature (56)..(261): n is a, c, g, or t
agttctccccttggtgggatcttgctctattacccaggatggagtacctggaatgnnnnnnnnnnnnnnnnnnnnnnnnnnnnnnnnnnnnnnnnnnnnnnnnnnnnnnnnnnnnnnnnnnnnnnnnnnnnnnnnnnnnnnnnnnnnnnnnnnnnnnnnnnnnnnnnnnnnnnnnnnnnnnnnnnnnnnnnnnnnnnnnnnnnnnnnnnnnnnnnnnnnnnnnnnnnnnnnnnnnnnnnnnnnnnnnnnnnnnnnnnnnnnattacaggcgtgagccaccatgcccagcccaaaggttccataccttaacagtcaaacttctctcagcctatggatgctgtgggaaactgaggctatccaatttgctatgttgccagcctgggtcaacaaaggtgtctttgacatgagcctccaaccagggggctgggctctgctccatggccaccaggctgaaccaagacacaccccagccccaagtccctgtgccctaccttcctggatgctgttctgcaggtggttgacaatggcagccaggatggtggagagactcatgacctgggcacactgggccaggccgagggtgaagagctcattccagcaggcccgcacaaggctggtgttgcagtcctgcctaggaatatagaaaggagtctgagtgtggtgtgtgttggcatttctccaaggttgtggggcatccaggcactaagtcccagcatttcccaacaggtgaattcagc

SEQ ID NO: 170607 - DNA, 738 bp, Homo Sapiens
  misc_feature (61)..(61): n is a, c, g, or t
aagcctcctgagattctcactgcccaaggaaaagtctagccttccttcttggcctggcatncaaaaccccttggttctctcaaatctcatcagctcccactgccctcccctagctagtccttaggtcaagtgtggaacacccaagtcctgggatcccaccgtaaggttcattctgcattcacaggttaaaggtcttgacaagtcctgcagtaaagagatccgttcctcatttaatccagaacttcccagatgtacttaaccgcaggacccattttctcccaacagcatgacacacatagccttttttgcccagtgcagcccagtgcacaggtcccgatattgcctctccccaagtaggcttggccttcttttagtgcccgtgcgtggaaggccctccattctcctctccattctccttggccttcaaggctctaccttaggcctccctccaggcagctgttctccatcatcccccctgggctgcaggccctctgtgggcagcatttagtgtgtggtttggcctccccttcccattgcccactgtgagcaaatacctgtgcgtgaatgaataatgagtgaaagatgtcccaggggcctgtcggtcacttctttgccccgaccaggccaatgtcatatggaaggtggcagagagcccagcaggaagcagaagtgggcggccctgggctgtacctttgagctgctctcctgaaaatctctattatttcagactcccagacc

SEQ ID NO: 170608 - DNA, 345 bp, Homo Sapiens
ctattacaaagcagtactgcagtatgtcttggacctggaaagttggacatgtgtgtggctcaacagttttctcgggggagttcagtgaccttttggtggccaccctctgttctcacctgtgagttcttgcaggtggcgacttcatctgcaaggtcacttacatagccccactcagctgcttcggaaagcgtgacgaagcagtagtcctcagtgtgtgtgtaagtgaagaggaccttgtggtagcagggaccatgcttcattcgtggctgtgtccccatctgagggcctggtatgcagtaagatcaataaatacttgtggaatgcatgactgctggctgcctgtgt

SEQ ID NO: 170609 - DNA, 161 bp, Homo Sapiens
agttcttcccttggtgggtggcggtaaaactactgtaattaatacgcttctgactgcttcagataaagtttaagccttatattttccattttgattttgaatattcagcttcaagtttggattaaaagcatggggtgggcacccaatgggggaagaaactt

SEQ ID NO: 170610 - DNA, 172 bp, Homo Sapiens
ccccttggtggtagtatagtatctccttcctccatcttctgacaaaaacctagctctggaccagcgggggcaaaattcccagccaaggaaccactgcactgacctacagctcaatggtctcccagttactaccccgtgagacagcaagtagaaaactgcctcctctttctcc

SEQ ID NO: 170611 - DNA, 592 bp, Homo Sapiens
  misc_feature (529)..(529): n is a, c, g, or t
  misc_feature (535)..(535): n is a, c, g, or t
  misc_feature (554)..(554): n is a, c, g, or t
cccccttggtggaggatgcataaggaaattgcatttttggtcactattgtatcctcagcaactaacagaatccagcatagagcgggcattccagttctgaatgaatgttagaattatctgatgtttaatacagtgtatgagtacccaaaggtagtcaatgggaactatagaatgggttttcctgaaccgaaactgaagtagaatacagtcataatgaacaaaattgcacctctgattgctcaggatctgactttttacttactcgaactgagtattattcgatagcaccaacaacctaagttaacatttaaatgattaacactaaattatcaattacgcaagcattatttttaaaagcacatgtaactaagcttcaggagtctgattagtttaatccaagaaaacataaaatgtgaagccactgttttcatactcactcaatttgggcatcactggctacaagcaggcttaggcacttcaggcttccaacttttgctgcttgtggtagtggagcttcttctaaaacatncttaanggaagaaggtgcatttaanagtcttccaaacactttttgggaaaagttgatgaagtg

SEQ ID NO: 170612 - DNA, 269 bp, Homo Sapiens
tgcgggccgtccgtgtgccatcattggagtggacgagccgctcagtcttggtaacagtgctgacagcagagccatcagctgcccgctggctgtgcctcgtggtggtctcagtggctgtgttgccgcgcccctcccctggccggccccgtgcctcctgcagccgccgttcccgctccttgtcccgctggtctctcttcctttgtcggagctcacgaagtgcagcccggatgagcttccgctcttcaaagtccgtgctctgccaccaaggg

SEQ ID NO: 170613 - DNA, 237 bp, Homo Sapiens
gactgccagccacggccttctacgcagggactcaaccccctgtcatcggctacctgagcggccagcagcaagcaatcacctacgccggcagcctgccccagcacctggtgatccccggcacacagcccctgctcatcccggtcggcagcactgacatggaagcgtcgggggcagccccggccatagtcacgtcatccccccagtttgctgcagtgcctcacacgttcgtcaccacca

SEQ ID NO: 170614 - DNA, 663 bp, Homo Sapiens
  misc_feature (44)..(44): n is a, c, g, or t
  misc_feature (105)..(105): n is a, c, g, or t
  misc_feature (114)..(114): n is a, c, g, or t
  misc_feature (604)..(604): n is a, c, g, or t
tactcatcttcaaaagcccccctgggttctccttcctcaataanaaaatgtttgtaacagccgaaaaaggctcaaggaacacccagggtgtggctgaagctcctnagtgtctgnaggctcttggcggacagcttctcgcagttagtcaggtacagctccaccaggtcctgcttgcggatggcctccaggtcctggtcctgcaccaggtctcacggaggtggatccgcgtgaggcgggtgctgcgggggtccgaaaagaggctgaagaagctctcgtgtggctcgaagttacaggcagcgttcaccagctccacatactcattgacgagccggtcacagatctcgctgggcaagaagatgtccggatgtagccgcagggtctccttgtccagcaggtagcccagggtgccatccaggttgcgcaagcagaagtcagtacagagggccatcagcgactcgggagtgtcggacgccatgctgggggcaagcaaggtggccactccaggacaaggatccccaggggcaacagtgattctgaatactcacaggatcattggcagagccactggctgtcgggcttcctttggcccttcggttgcaacctncccttgttggatttcctatactttgtgtcatccttttgggagctgatccaaaatccaac

SEQ ID NO: 170615 - DNA, 431 bp, Homo Sapiens
  misc_feature (351)..(351): n is a, c, g, or t
  misc_feature (365)..(365): n is a, c, g, or t
  misc_feature (376)..(376): n is a, c, g, or t
  misc_feature (392)..(392): n is a, c, g, or t
gcagggactccacagggacccaatcaatcatgattatcaagttgaggaagcggaggggcatgaagccctcgaaggtgaaatccttaaccagcacctggcaggtggggttgacgaggtactcatcttcacagccccctgggttctcctcctcatagaaaatgtttgtacagccgaagaggctcaaggacaccagggtgtggctgaagctcctcagtgtctgcaggctcttggcggacagcttctcgcagttagtcaggtacagctccaccaggtcctgcttgcggatggcctccagggtcctgggtcctgcaccaggtcctcacggaggtgggatccgcgtgaggcgggttncttgcgggggtccnaaaagaggctnaagaagctttcgtgtngctcgaagttacaggcagctttcaccagttccacatatt

SEQ ID NO: 170616 - DNA, 987 bp, Homo Sapiens
  misc_feature (52)..(61): n is a, c, g, or t
gctcatggatgtgtattttaataaaaataattctgtcaaaatacaacagagnnnnnnnnnngtctctcaagtacaattttaataagatgttttgtgttagagttctctctccatcctcccacacccacaagtttcatgctaatgccaagtatcaactcttgaggacaaaggcaaaaccagtgtgcacaatgtggaggatgtctgttgcagctgtagttactaatgcaggaaaacccaatgcaaagaggaaaatgcctgaggcagccagaggccacaatctggccacaggtctgggtgcatgagactggcagtctagtagggctccgctgcctggctgccacatgggtgcatacctgagttgtgagcaacccaaaggaactttcagctctgacaattcttctgcctcatcttctttgtgcttgcttaaggagtgggaaggcgctagggggccaggcagtccccacttctgtctcgtggtgtccattttgatggcctgcacccagccacagacccatgaggatggggatgggggttctggcttgctatgagtgccagtttttgctctggaaggaggtgaccatttggtgccgcaaggggaaagtgagtagggaaggctgctccccagggccggacaaaccaagaaagccaggtcttcctcctgcctccatgggtcaggtccagcccttcaccagggctcccccaggtgcctttcccactctaggctcctggaagcaggctggtaggactggatgtgcataaggggcacctctggctggcaggcaggcaggcctggactctcagcaagagagtgggcgcaaccagcttggttttggccctagccacagcttgtggggcaaaggcttatgtcacaaaggtgagctgcccaactgggacagagagcccctctggagaggaacagagtaaacaacttggactcagctgaaacagtgagataaggcacagaaaatggggaggtggccatgggcc

SEQ ID NO: 170617 - DNA, 1019 bp, Homo Sapiens
caccatgggctgtatgccacatacagagggtaggcgaggggatggatctagctatactctgggcatggagcagggaaggtcgtccttgctatggaggataggagagaggaaggacagaggaagagtggtccctccatctcatctcgacaatctcacaagacaggagtatatcgggacctagctaccagggagggatggatgcaagaaaggattccaggatctaacagatccttgacactctggatctactctcaagaaacaacctccctcagagaatctggatctgggggaaatggtggtgtcagccaatctcctttagagaccccaaagcaacaccagtttggggttccctgacacctacacaaaatgtggaaatgaagagtttggcaatggtgagtagatccctttgggaagctggtaagtccctgttctacctaactagactgctctgaagcagagcttgctcactagcggccattcgcaggctcaaagggcaagtgtggcaggcagcacaaagcagtattagagccaccagtagacactagagggaatatggggtttatcccatagataaaattccttaaaaagtttccctggcacaggatgcccttagaccttccatggtgttctaaagtttgacagcaagcaagagtgtgcttctctagataaatgtatgagccatctaaccaagaagtctggcaacagatcagacttcctgttgggaaagtattcagagcccaagttaggagagaaggggtgcttttgtgttaagaaaagctacaaagtgttaggcagtttgagatcctgacatccctgctgtctaagaaagtagaagagggaatcctatgggctctgtcaggttccactgggtcctacaggatgcaatggaagagtgggtctgaggttctcagggaggggttcctgcccaccccagctctcccagggccagggagagggtagactgcttagtactcgactctcctacagacccggccaaggagaccctgtgtgcaggatca

SEQ ID NO: 170618 - DNA, 451 bp, Homo Sapiens
  misc_feature (63)..(83): n is a, c, g, or t
ggtaccccttggtcgatcactgtactccagcctgagtgatggagtgagacttcataatggatnnnnnnnnnnnnnnnnnnnnntacctaaattttctcatctcctactataaatgtatggaactggaacagattcacatattactaaaataattaatatatttccaagagaatgacagttatttatctcttaccatttgtactaatgcacacagcttgatcccgctgcagagagtcatatccatcctgtttttctgcacacactcctatgctatctcttctgtctggctgtcccacagtttcaactctgtaaatgaagtagaaaggtcatttcatacttttaaaaatataacatgaatgatacttaacagccactagcttaaaaagagcaatctcaccacaattgtttttttctgaatagtacagtgatcgaccacgagatcctgtgacga

SEQ ID NO: 170619 - DNA, 2148 bp, Homo Sapiens
  misc_feature (80)..(80): n is a, c, g, or t
  misc_feature (149)..(149): n is a, c, g, or t
  misc_feature (319)..(319): n is a, c, g, or t
  misc_feature (922)..(936): n is a, c, g, or t
  misc_feature (2076)..(2076): n is a, c, g, or t
cgcgaggacatagagggtgcacgtgggataattgtctcgcgcgccgcgtcagcagagaggcgagaggtacagcagaccancttggagctatcgcgcactagccccgtgcggcataggctggggctatgcgccgagtcggatcgtgtacnccgtggcggcaacgcgccagggcgggagcgttgccaaccttaccgtgacactcagaaggtggggcgttgtgtacactccatggccggcgggcgtgcgaactagcaccgcggcttctgacactagggagcctggcgcgcgcgcctccgcgcgacacaccagcgcgccgctncggtacgcgacgcgtccttccagggccaccggagcgcttcggcgactcacctcaggagtggtgcggtgcacgcgaggggcggcccctcctcccatggcgccacgcgcgtgcacatcggccgcggcgagcgagcaatatcctctcgcgcgcgcgcgagggcgcgctgcggctaattctctcccgtgcgcgagggcgcgcgacctatccgtgcggcgctacgcgcgcctagggcgcggggcaacctagcggcgacgcgcaccgactgagtggtcccttcggcgccgcgagctggcggcaagtgcggcggggcgccacgccgggcccacgcacgttcgtgtcaccaccacccgggactcgacgtggctctcgaagccacgggccgtgattgaacgcctcggggaggtcgtgcccgcaagcgggcgccgtgaagcgcacctccccgctccatctcggtcgggggggcgcgtcacccggggctccggggtcccccataaactgccatgcgtggtagctctggagacatgggtcccctaccccagtgccgggtggattcgcggcatgttccatgcttggtgctgtgcacccagtaggggactcgtgtgnnnnnnnnnnnnnnnttgagtagcggccattatccaaggggagcacaagcctgcccgcacacagcctccagcatcatgctccagcaggccaagctcagggacaggcaattcagtaacaaaactcacagctctggacagttctggcacaaaggtcaagtctgtctgtgggcaactcaagattctcattccacatgggatggaaaaaatgggtctccagccacagtgtgagaatgtgtcaagaagtggactgtgcatggagtccatccccgagcagcaccacagaactgcatgcttcagacaggcctcccaggtgctgcccctgctggtctggaaagactgagcgagacagcactgcctcagcacagcccaggatgcatcgatgaccctggaagagtgggcccccagtgacccgtgaagttccatgtgccaccctcacctgcagacgcttggccacatacacacacagagacacaaacatacaaaggaaagatccagacattcaacgtagaaaagatatggatgtgctaaaaatcgcacagaacccgcttaatctccaaacctcagaaatgttaaaggccctgtgtcaggcaacaaaaccactgcccaggagcaggcaacagggtccgtcaggcaaaagggtgccaggaagggcccccagcccctgcgctgctgaggaggggccgggaggtgtgcatgcggccgctgggcactgagctgcagtagtggcggtgatgtaaggagtggactttaaggagatagatgcagcccaggatggtggtttcagccacccctcctgcaatgaagcaaccctttatggcacaaatggggccgggggcaggccaggggcaattcaacaggaggcaagagcccagggctccagagtggagagacaggaggcagctcagtccccagaccccagcagagcatctggggcctcggcaacttccagagcttcttcctgagggagccatgcacagcaatgctgggagagggactgatggggtggggtcaggcctcctgccacagagctgggctgcagagcccagattgggaaagacacagtgaagagctcaacctccttccaagctcttccttcttcagggctttcaggttccagagccccaggggagcttccagccaggggcagggttcacnttgatttttcacaatttgggttttttgggggcctttttcaattgcaaacctttttgacaaattcaaggggtt

SEQ ID NO: 170620 - DNA, 578 bp, Homo Sapiens
  misc_feature (531)..(531): n is a, c, g, or t
  misc_feature (540)..(540): n is a, c, g, or t
  misc_feature (553)..(553): n is a, c, g, or t
gattcattcagaccgcacatgttagaggcagggaatgaagaaggtactgtgggccatggcacacctgatgcgtttttggtgggcttacttggtgcagtgtgctgtccagagagacctgctgacccagtctgggacaggcacagtgggagctgccacagtgccccttgctggccgccctcaggagggggcctctggaccgtcagtgtggcgtaggcagtgggtctgcttcagggaggcagcctcttgactttgtcacaacggttgcactgaagatggcccccacaagcccagttgtgaatatcaaggtgaccctgcccctggctgggagctcccctggggctctggaacctgaagccctgagaaggagagcttggaaggaggttgagctcttcactgtgtctttccatctggggctctgcagcccagcttctgtgggcaggaggccttgaccccaccccattcagttccctttcccagcatttgctgttgcatgggttccctcaggaaagaaagcttttggaattggggccnaagccaagnattgcttttgttnggggttttgggggattgagctgcct

SEQ ID NO: 170621 - DNA, 807 bp, Homo Sapiens
  misc_feature (71)..(119): n is a, c, g, or t
  misc_feature (544)..(732): n is a, c, g, or t
  misc_feature (744)..(762): n is a, c, g, or t
acctggaaagaaaaagcaataacctcaaagtgactattcagttttcaggatgatacactatgaagatgttnnnnnnnnnnnnnnnnnnnnnnnnnnnnnnnnnnnnnnnnnnnnnnnnnctctatgcaatctgagtagagcagccacaaccaaaaaattctacaacacacactgttctgaaagtgactcacttatcccaagaaaatgaaattgctgaaagatctttcaggacttctacctcatatcagtttgctagcagaaatctagaagactgtcagcttccaaacattaatgcaatggttaacatcttctgtctttataatctactccttgtaaagactgtagaagaaagcgcaacaatccatctctcaagtagtgtatcacagtagtagcctccaggtttccttaagggacaacatccttaagtcaaaagagagaagaggcacccctaaagatcgcagttgccttgttcaagtggctcacacctgtaatcccaacattttgggaacccaaggtgggtagatcacgagatcaagagatcaannnnnnnnnnnnnnnnnnnnnnnnnnnnnnnnnnnnnnnnnnnnnnnnnnnnnnnnnnnnnnnnnnnnnnnnnnnnnnnnnnnnnnnnnnnnnnnnnnnnnnnnnnnnnnnnnnnnnnnnnnnnnnnnnnnnnnnnnnnnnnnnnnnnnnnnnnnnnnnnnnnnnnnnnnnnnnnnnnnnnnnnnnnnngacttggtttcnnnnnnnnnnnnnnnnnnncttcagtaagtacgtgttatttttttcaataaaattctattacag

SEQ ID NO: 170622 - DNA, 332 bp, Homo Sapiens
cacatggtcgaggtcaacgacgagctcatccggaaaatcagcaacatcagggcgcagccacagaggcacttccgcgtggagcgccagccagcccgtgagccagccgctcacctacgagtcgggtccggacgaggtccgcgcctggccggaagccaaaggccttcagcccgcggatcgtggagaacctgggcatcctgaccgggccgcagctcttctccctcaacaaggaggagctgaagaaagtgtgcggcgaggagggcgtccgcgtgtacagccagctcaccatgcagaaggccttcctggagaagcagcaaagtgggtcggagctggaa

SEQ ID NO: 170623 - DNA, 273 bp, Homo Sapiens
gtttcatcctccagtgaacgccggcgcggtccttcccggcagacttcttccacctggcgtgttgtgctctgctcacgggaaggaggctggaggtccgctcctgtgccaagggctctggggccctcggccagcgtggctgactgatcttagaactgtaggtcagtggtgagtagtaggagcccaggctttgggcatcaaggcagttgtgtgtgccgtattacaggctgacacctgttcgttgcatcggtttgcattatccgtgtgattactaag

SEQ ID NO: 170624 - DNA, 470 bp, Homo Sapiens
gagaatcagctcggtacctttccaaagcggagatgctgtagtgggaggaagaggtgggccaccgctggacactcttgggccgaggggcaagggtggacatagcattggcatggcagcaagagacttggctgagggcaggggtggaaggatgtctactgctgaagaccaaatcccttgccactctgtcggttgctactaagtcaaacgcaaacagaaacaggaaaagacagcaggagcacagaggccagcatctccgctttggaaatttccaaagcggagatgctggctctgagggtccgctgatgtgagcccaagagaggaatgaccagtcagcctgtaaccccagctccagtgttgttaatgagtgtcaccgatcaggtttcagacgttagtcagtgtcctggctccagtgttgttaatgatggccacggattgggcttcatgcgttagtcagcatctccgctttggaa

SEQ ID NO: 170625 - DNA, 640 bp, Homo Sapiens
  misc_feature (90)..(125): n is a, c, g, or t
  misc_feature (201)..(211): n is a, c, g, or t
cccgggggacatttgggaagccccccgggggaaaaaaggggacccttttcccaaaaggggttttggggggaattaattcaaaccccccannnnnnnnnnnnnnnnnnnnnnnnnnnnnnnnnnnncttaaccggggaaatttggccccttgggggggaattttccatgggttctccaatgggggggtttaaacccaagacnnnnnnnnnnngcccacaagcgggagggccactagagggcgagccttcttttgaagcctggagcatactcagggctggcggagcccacgcctggcacctggctcacatggcataaggaaaggggagatgctggcctctgtgctcctgctgtcttttccggtttctgtttgcgtttgacttagtagcaaccgacagagtggcaagggatttggttttcagcagtagacatccttccacccctgccctcagccaagttttttgctgccatgccaatgttatgtccacccttgcccctcggcccaagagtgtccagcggtggcccactttttcctcccattacagcctcaacagtatgtaccatttcccactgtaaatagtcccagttagaacggaatgccgttgttttataactttgaacaaatgtatttactgcccttctc

SEQ ID NO: 170626 - DNA, 1697 bp, Homo Sapiens
  misc_feature (200)..(234): n is a, c, g, or t
  misc_feature (1033)..(1041): n is a, c, g, or t
  misc_feature (1054)..(1054): n is a, c, g, or t
  misc_feature (1124)..(1124): n is a, c, g, or t
  misc_feature (1134)..(1134): n is a, c, g, or t
  misc_feature (1177)..(1177): n is a, c, g, or t
  misc_feature (1278)..(1287): n is a, c, g, or t
  misc_feature (1413)..(1413): n is a, c, g, or t
  misc_feature (1429)..(1429): n is a, c, g, or t
  misc_feature (1493)..(1503): n is a, c, g, or t
  misc_feature (1614)..(1623): n is a, c, g, or t
cccgcccccgtccctgtccctcctcccccctccaactaaggtagcgagcctgggtggcgaattcggcacgagggaagattctgttcccggacatcatcgcaagggccgcagagcatctgcggtatgtctttggttttgagctgaaacagtttgaccgcaagcaccacacttacatcctgatcaacaaactaaaacctctnnnnnnnnnnnnnnnnnnnnnnnnnnnnnnnnnnnatggccccagattgggtctgttaatgatgatcctgggccttatctatatgagaggtaatagcgccagggaggcccaggcctgggagatgctgcgtcggttgggggtgcaaccctcaaagtatcatttcctctttgggtatccgaagaggcttattatggaagattttgtgcagcagcgatatctcagttacaggcgggtgcctcacaccaatccaccagcatatgaattctcttggggtccccgaagcaacctggaaatcagcaagatggaagtcctggggttcgtggccaaactgcataagaacgcaccgccagcactggccagtgcagtaccgtgaggccctagcagacgaggccgaccaggggtcagagccaagggcccatagctgatagccagtatgaggggcccgggccacgcgctaagggccgggcatcccccctcctggctgagggtttgcgtgaaaaagcttgggcccagtgggggtcccccccgggaagcgaccgaaacttacttggtcccttgaaggtccattaaaactacactattgggcgcttggggtgccccaaggcgatccctttatatctttcctgggtaacaaaacaattccgatcgcttgtaaccctttctttaaaccggtgattctcttctaccgaaactgttctctgggagtgactgccccctataaaaacgtgggtgtactttagtgcgggtgaaaacaaccagaatttgttttgctcgaataatgttatgaaaagtggttgcaacaaccccttggggggggcttcctaccacagaacnnnnnnnnntagaggggcggcnccctccccgcggaggatccgctgtttgtcggacgttttataataaaaacctccttcttgcggacacattnacacttattntttcggtggggggtactttccttcgtttaaaaaacttctcgantgctaattagctgggaacggccccccacccggtgtgaattaaagaacggggggaaaaaaagttttcttcttcccacccgaacaaagtgttggcgtgtgacnnnnnnnnnngaagccgctcgtttttcttttttctggcgcacccctcgtggtggaggctgtcgttctcttggttggggagccaaaaaaccaacaagaaagtagggggggaaattattcgggtggctgaaagttccncaaattagatcttctntttcttgcgcggcatcaatttttctcttctgtacaataaaccctttgcgacgcgggagaaaacnnnnnnnnnnnctctcaaacaaccccgcccggatacgccttgacagttcctcccccgaaacgcagcccattttgtgtgggaaaaaaagcgtgaaataaaacgggccttttcttttcacaccnnnnnnnnnnatattgtgggctgtttttggatcaaagggggacacttcgtcctcgacgactgggctaggcaagcaggagaccct

SEQ ID NO: 170627 - DNA, 854 bp, Homo Sapiens
tttcctctttgggtatccgaagaggcttattatggaagattttgtgcagcagcgatatctcagttacaggcgggtgcctcacaccaatccaccagcatatgaattctcttggggtccccgaagcaacctggaaatcagcaagatggaagtcctggggttcgtggccaaactgcataagaaggaaccgcagcactggccagtgcagtaccgtgaggccctagcagacgaggccgacagggccagagccaaggccagagctgaagccagtatgagggccagggccagtgctagggccggcatccacctctggtgagggttggtgaaaagttggccagtgggtccccgtgaggacgaactactgtcctgagtcataagtaatatgggtggggcgagggtcttatttctgtagaaatcgtgtgactttaaggatttagattttgtatcttatgttttgtaacatttaataattactgttaaaatgctgtttgtaaatgagattggtctactttttcctgtaggattttattgtaaagttttgctggttttgtaaaatggatggaagaactttgtatttatactgtgattttgaacagattatgcaacattggaaggaaggctgtactttgatggtttgaaggaactcagcagtatgatgatctggttccaggggaaaaaaatagctggttggtgtctagccccccaacacttttgtctgttgtgtataaaaggaagaaagactggcatgtaccttcatttgcttaactatttgagtatctagagaaaaattaaaatgcaatgagttagcagtataccctggcacacttaataaattaaacattttgtggagcaaaaaa

SEQ ID NO: 170628 - DNA, 507 bp, Homo Sapiens
  misc_feature (405)..(405): n is a, c, g, or t
  misc_feature (425)..(425): n is a, c, g, or t
  misc_feature (444)..(444): n is a, c, g, or t
  misc_feature (449)..(449): n is a, c, g, or t
  misc_feature (485)..(485): n is a, c, g, or t
  misc_feature (491)..(491): n is a, c, g, or t
tttccaaagcggagatgctgggcatcctcaggctggcggccaaggcctgcccctggaggcactagaggagggcatctgtctgtgggagcccagaggctgcagggaggaggaggagggaggtatctggtgtgagcgttgcccctgcgacacttgggaccacacaggtgggcttccttattccctgacaaagcctctgtttccagctcttccgccctctctggatgagggaacagaagtggaggaaacaaaagaagcagcagcacgcacagtcctgtcgctgggtgcggagacagcctggcaaagtcccactcagccatggcctgatgcaggccccaggccttcctttcttgggtgtcaaatgactgtgtcctggacatctgatgcaccacctgccctgcctgttgnaaacgtgatgctcccgggtncagttggagaaactgaggngactngggacaagcaaaaggcttggaaatcaacccagaagnccatgnctgagaagacttggag

SEQ ID NO: 170629 - DNA, 608 bp, Homo Sapiens
acaggcgcttatgcattgtcttccaccactatcgcagtatctcggtcctcacgatgtccctccagtcaattgtgtccatgtcacaaagcatatcgttcttctcaatataaacaccccctgacagaatctctgagggagggaaagaagtgacagggttaagggccgcagcggaacgcctcttccttacctctccacccatccaaaaggacacctgagactcaggagtgggagaatgaggcagacagataggtccaattaaatctaagctgcagagaagactccctttataagatgaggagtcaggccaaaagaaactcctgcctcctcagtcacctgtccagatccggtttagcgagtgggggaggggaagggagagagggagagatttctgactcaacattccctcccccaagccctgcccatatgtcttccaactgactgggacatggagaagcagaagatggacaggtggtatttaaccccctatattcctccagctcataggggtaaggtttaggagagtaaaggtagaattcctagggaaggagggacatccaggtatactgtactttggtttatttcttttttctataggggagtcccgcttg

SEQ ID NO: 170630 - DNA, 675 bp, Homo Sapiens
  misc_feature (643)..(643): n is a, c, g, or t
  misc_feature (653)..(653): n is a, c, g, or t
aatttgcaacctccgctgccgtcgccgcagcagccaccaattcgccagcggttcaggtggctcttgcctcgatgtcctagcctaggggcccccgggccggacttggctgggctcccttcaccctctgcggagtcatgagggcgaacgacgctctgcaggtgctgggcttgcttttcagcctggcccggggctccgaggtgggcaactctcaggcagtgtgtcctgggactctgaatggcctgagtgtgaccggcgatgctgagaaccaataccagacactgtacaagctctacgagaggtgtgaggtggtgatggggaaccttgagattgtgctcacgggacacaatgccgacctctccttcctgcagtggattcgagaagtgacaggctatgtcctcgtggccatgaatgaattctctactctaccattgcccaacctccgcgtggtgcgagggacccaggtctacgatgggaagtttgccatcttcgtcatgttgaactataacaccaactccagccacgctctgcgccagctccgcttgactcagctcaccgagattctgtcagggggtgtttatattgagaagaacgataagctttgtcacatggacacaattgactggagggacatcgtgagggaccnagatgctganatagtggtgaaggacaatggca

SEQ ID NO: 170631 - DNA, 941 bp, Homo Sapiens
cgcgagcaaggccgccagatgtgcaggcagcggaggaggagaaagagatggacctcccggactcggcctcgagggtcttctgcggccgcatcctgagcatggtgaacacagatgatgtcaacgccatcatcctgtgcccagaagaacatgctggaccgctttgagaagaccaatgagatgctgctcaacttcaacaacctgtccagtgcccgcctgcagcagatgagcgaacgcttcctgcaccacacgaggaccctagtagagatgaaacgggacctggacagcatcttccgccgtatcaggacgctgaaagggaaactggccaggcagcacccagaggccttcagccatatcccagaggcatccttcctggaggaagaggatgaagaccccatcccacccagcaccacgaccaccattgccacctcagaacagagcacgggctcatgtgacaccagccccgacaccgtctcgccctccctgagccccggctttcgaggacctgtcccatgtccagcctggctccccagccatcaacggccgcagccagacagatgacgaggagatgacgggcgaatagccctgctgcccggtgccttgagggggtctcagggcagcagcatacaagaacatctctattctgcaagacccctctgccatgccagggcacgcccattccagctggagtcgtggggctgggcacaggggaatttttcagagctgagcctgacgtctgctctgaaaaatgcttagaaggttcccagacaccagagccagatggcccccacccccgggtcaggaccctccttgaggggcacaagcaccggcctccccctgaagttcacccccaggcccaccccccgaacccaaataattccggctttttcccggccccccttgcctccggtaaaaagaatccaaaaaacctttcctccttggga

SEQ ID NO: 170632 - DNA, 906 bp, Homo Sapiens
  misc_feature (872)..(873): n is a, c, g, or t
cgcacgcaagcggctccagggtacgtccccgccacgcgcgctcgcaggatcggtgcgtggtgacgtttcgccggcgcgggcgccatcccggaagcgcgagcaaggccgccagatgtgcaggcagcggaggaggagaaagagatggacctcccggactcggcctcgagggtcttctgcggccgcatcctgagcatggtgaacacagatgatgtcaacgccatcatcctggcccagaagaacatgctggaccgctttgagaagaccaatgagatgctgctcaacttcaacaacctgtccagtgcccgcctgcagcagatgagcgaacgcttcctgcaccacacgaggaccctagtagagatgaaacgggacctggacagcatcttccgccgtatcaggacgctgaaagggaaactggccaggcagcacccagaggccttcagccatatcccagaggcatccttcctggaggaagaggatgaagaccccatcccacccagcaccacgaccaccattgccacctcagaacagagcacgggctcatgtgacaccagccccgacaccgtctcgccctccctgagccccggcttcgaggacctgtcccatgtccagcctggctccccagccattcaacgggccgcagccagatcagattgacgaggagatgacgggcgaatagccctgctgcccggtgccttgagggggtctcagggcagcagcatacaaggtggcagcgggtaaccctgccttgttctgtcatccagggctcctttgctgccccgttctgtcacccagggctcctagggggacaaggctctctcccgaggggtggtggatttccctggggggggtcttttaattctgggctccttccnnttcctcagaaacatctccttattcctgcaagac

SEQ ID NO: 170633 - DNA, 898 bp, Homo Sapiens
  misc_feature (696)..(696): n is a, c, g, or t
gagcacgggctcatgtgacaccagccccgacaccgtctcgccctccctgagccccggcttcgaggacctgtcccatgtccagcctggctccccagccatcaacggccgcagccagacagatgacgaggagatgacgggcgaatagccctgctgcccggtgccttgagggggtctcagggcagcagcatacaaggtggcagcgggtaaccctgccttgttctgtcatccagggctcctttgctgccccgttctgtcacccagggctcctagggggacaaggctctctcccgaggggtgtggaattcctggggggggtctttaattctggctccttccttcctcagaacatctctattctgcaagacccctctgccatgccagggcacgcccattccagctggagtcgtggggctgggcacaggggaatttttccagagctgagcctgacgtctgctctgaagaatgcttagaaggttcccagacaccagagccagatgtcccccaccaccggtcacgacctccttgaggtgcacaagcacggtctcctctgagttcaccccaacccacccccgcacccactaattctgcttttcctgccccttgctccggaaaagtatcaaatactttctccttggtatccccaggaggtttctgagatacgtacaagccttgagacggaagctggccatccattcnaccctgagcgtgctgagttctgtgtttctctgaatagaggtgtggaacctgaggggccaccaagcctcttctgaggcctccatggagcaaacggaagccccttcgggaaaaaagtttaatgaaaaattttttgtacccgaaggtttaccaaatgcttggttggggaaatttattcaataaaaaaagaacccccttttacctt

SEQ ID NO: 170634 - DNA, 368 bp, Homo Sapiens
taactcagctcggtacctttcaaagcggagatgctggctctgagtggtccgctgtggggagaggctgatgatcaggtgccccagtggatgggctgcacccagcccaccctggcctcaggttcctagaccaccccagatgcaggggctctggctgtggatgtggcgccatagccacagcaacggtaccaagttcctaaatagtgtggccgagcctgctgctgtgtgaattcaggccttgtggaaaacaccgccccataggcacaggctgtgtgagggtggacgtgatgagtgtatctggggtctgctcccacccatcacaagctgtggaccctggccccccggccactgcagcatctccgctttggaaa

SEQ ID NO: 170635 - DNA, 596 bp, Homo Sapiens
  misc_feature (581)..(581): n is a, c, g, or t
ggggaggactacctgaccgtgaagacgggcgaggagatcttcggcaccatcggcatgcggcccaacgccaagaacaaccgggacctggacttcaccatcgacctggacttcaagggccagctgtgcgagctgtcctgctccaccgactaccggatgcgctgaggcccggctctcccgccctgcacgaacccaggggctgaacgttcctaggcggtttcggggctcccccttcctctccctccctcccgcagaagggggttttaggggcctgggctggggggatggggagggcacatcgtgactgtgtttttcataacttatgtttttatatggttgcatttacgccaataaatcctcagctggggtctggctttgtttcctgggggcaaaggaggtttggggttcctttcgcaggtactgcagtgccagcctcagcagtggggggaccggccttggcacctgctggtggctgccattctgtggatctgcgtctcccgtcccccgtctctaggcctcttgctccccttccttgggccttctcggggtccctgtcctccacagctgtctctcagggtctttgnccaactcttttcatc

SEQ ID NO: 170636 - DNA, 737 bp, Homo Sapiens
  misc_feature (648)..(656): n is a, c, g, or t
cggccggaggaggagtaggtgcgggtgaagatggcggcagccgaggccgcgaactgcatcatggaggtgtcctgtggccaggcggaaagcagtgagaagcccaacgctgaggacatgacatccaaagattactactttgactcctacgcacactttggcatccacgaggagatgctgaaggacgaggtgcgcaccctcacttaccgcaactccatgtttcataaccggcacctcttcaaggacaaggtggtgctggacgtcggctcgggcaccggcatcctctgcatgtttgctgccaaggccggggcccgcaaggtcatcgggatcgagtgttccagcatctctgattatgcggtgaagatcgtcaaagccaacaagttagaccacgtggtgaccatcatcaaggggaaggtggaggaggtggagctcccagtggagaaggtggacatcatcatcagcggagtggatgggctactgcctcttctacgaagtcatgggctcacacccgtggccctatgccccgggaacaattgggctggcgccccaatggggcctcatcttccccaaaacggggcccaccctgggatgggaacgggcccattcaagggacccggaaggtccccaaggcctttccaggaatcccccttnnnnnnnnnaaaaaaccggggaaaggggttttccaaacatgggtctttgggccttccaaaaaaatgggggggcccccttttaagggggcc

SEQ ID NO: 170637 - DNA, 1315 bp, Homo Sapiens
  misc_feature (1203)..(1239): n is a, c, g, or t
ggggagggggggtcttggcggccggaggaggagtaggtgcgggtgaagatggcggcagccgaggccgcgaactgcatcatggaggtgtcctgtggccaggcggaaagcagtgagaagcccaacgctgaggacatgacatccaaagattactactttgactcctacgcacactttggcatccacgaggagatgctgaaggacgaggtgcgcaccctcacttaccgcaactccatgtttcataaccggcacctcttcaaggacaaggtggtgctggacgtcggctcgggcaccggcatcctctgcatgtttgctgccaaggccggggcccgcaaggtcatcgggatcgagtgttccagtatctctgattatgcggtgaagatcgtcaaagccaacaagttagaccacgtggtgaccatcatcaaggggaaggtggaggaggtggagctcccagtggagaaggtggacatcatcatcagcgagtggatgggctactgcctcttctacgagtccatgctcaacaccgtgctctatgcccgggacaagtggctggcgcccgatggcctcatcttcccagaccgggccacgctgtatgtgacggccatcgaggaccggcagtacaaagactacaagatccactggtgggagaacgtgtatggcttcgacatgtcttgcatcaaagatgtggccattaaggagcccctagtggatgtcgtggaccccaaacagctggtcaccaacgcctgcctcataaaggaggtggacatctataccgtcaaggtggaagacctgaccttcacctccccgttctgcctgcaagtgaagcggaatgactacgtgcacgccctggtggcctacttcaacatcgagttcacacgctgccacaagaggaccggcttctccaccagccccgagtccccgtacacgcactggaagcagacggtgttctacatggaggactacctgaccgtgaagacgggcgaggagatcttcggcaccatcggcatgcggcccaacgccaagaacaaccgggacctggacttcaccatcgacctggacttcaagggccagctgtgcgagctgtcctgctccaccgactaccggatgcgctgaggcccggctctcccgccctgcacgagcccaggggctgagcgttcctaggcggtttcggggctcccccttcctctccctccctcccgaagaaannnnnnnnnnnnnnnnnnnnnnnnnnnnnnnnnnnnncacatcgtgactgtgtttttcataacttatgtttttatatggttgcatttacgccaataaatcctcagctggggaa

SEQ ID NO: 170638 - DNA, 322 bp, Homo Sapiens
acgctatcgagctcggtaccttccaaagcggagatgctgaagctggtgaacggcaaccccgtggtgatgaaggacggcaagtgggtggtgcagaagtatattgagcggcccctcctcatctttggcaccaagtttgacctcagacagtggttcctggtaactgactggaacccacttaccgtgtggttctaccgcgacagcatctccgctttggaaaccaaagcggagatgctgtccgcttacaaaacttaactatagggttagggccccaggttctgggttgacaaatatcaagacgttggcagcatctccgctttggaaa

SEQ ID NO: 170639 - DNA, 282 bp, Homo Sapiens
accgagcggacctttcaaagcggagatgctgctgtcagtcagtaggagactgtgcatatcctcattctcatccagcaggtaatcaaatataatgaggcccccacgggccatatacttgaggttgttcttggtgagaaaaaggataccattctccaggctctggatctgccgaatatcatcactgccattgacttgaaaggatgagtagcgctccaaggctgggccaaaaaatgaagtggcatggcccccgtggctccccacccacagcattcgctttgaacg

SEQ ID NO: 170640 - DNA, 366 bp, Homo Sapiens
accttcaaagcggagatctgtcagtgctggacatggggacctcttcacattcaggtaccacgtctggacgaaaggccacgcacccacaaacttcgccaagtggcgaaccgccaccatcgccttaccgggttgagtgggaggccgattttgagccgtatgttgttgtgagacgtgactgcccggagtacgaccggaggtttgtaggctttggctggaacaaagtggctcatatcatggagctggatgtgcaggagtatgagttcattgtgctgcccaacgcctacatgatccacatgcctcatgcccccagcttcgacattaccaagttccgttccaacaagcaatacagcatctccgctttggaaa

SEQ ID NO: 170641 - DNA, 579 bp, Homo Sapiens
aaccttagagcgtctgaagccatatgtggctgctcaactggatgtgctcccggagacctttaccttgggggacaagaagaactaccggggcttctacaaccggcccctgtctccggacttgagctaccagtgctttgtgcttgcctccttgaaggaacccatggaccagaagcgctatgcctccagcccctactcggatgagatcgtggtccaggtgacaccagcccagcagcaggaggagccgcggatgctgtgggtgacgggtcccgtgctggcagtcatcctcatcatcctcattgtcatcgccatcctcttgttcaaaaggaaaaggacccactctccgtcctctaaggatgagcagtcgatcggactgaaggactccttgctggcccactcctctgaccctgtggagatgcggaggctcaactaccagaccccaggtatgcgagaccacccacccatccccatcaccgacctggcggacaacatcgagcgcctcaaagccaacgatggcctcaagttctcccaggtatgagtccatcgacctgacagcatctccgcttgaaaggtacgactcat

SEQ ID NO: 170642 - DNA, 335 bp, Homo Sapiens
atagtggtacctttcaaagcggagatgctggggaggatgaagatgaggctgggggctgaggtggacccgataactccaaagatatcccggatggttggcacacagatgacaaggacattgaccaaaacaagcaggatcagagctatggccacatgtcgtggccagctgaaggccttgcctgggaaaagcagctgctgcagggcccggcggatagggaacagcacgactggcacagtgagggtcaccgcgagcagcacggccaggcgcacacagaggatgagcgggtccttctggctgtacatgtgcagcatctccgctttggaaaggtccggtcc

SEQ ID NO: 170643 - DNA, 273 bp, Homo Sapiens
gagatgagccggaccttccaaagcggagatgctggatgctgcctgaaccacacagtgcgcaggagggattcacatcacagccaggcggattgtgctgttccggtgaaccttcttggaaagaggaacgatgctgttgggtcgaacaagcctccgcttcttacagctcagtacaggacgtgtccgggctgccacacaggtgccatcagatgatgaagagacgagattcagtcgttgcttcttatgtaattgttcctcagcatctccgctttggaa

SEQ ID NO: 170644 - DNA, 174 bp, Homo Sapiens
aaggccggaccatcatgcggtgagcatctgcattaacccctcccctgctgtgctcagctatggaaatgccaaagtccctaacactcagttccataaactttacctcaccctctttatccccctaataaaatgtttgcatttgggtcaaaagcgattgctcaccgcttattcaat

SEQ ID NO: 170645 - DNA, 324 bp, Homo Sapiens
atcaagctaagacaaattggggaagagcattccagggagagggaggagttgtgcaaaggccctggggctccttctagctggaggaatgcaaggctagcttgtctggagcactgagaggatggcctgaactgagtggagagagacagaccaggaccaaaccatgcagaggtcaagggccacattcaccttttcagagtgactcaatcaaatttgtagtttgtaaaagtattttaacagctctgcggcaaagtgcaaatgaaaagtcttgatggcatggactggagcggggacagtggggatggagcgtggagcaatcataggtac

SEQ ID NO: 170646 - DNA, 198 bp, Homo Sapiens
gtgccgagtatttcgatgcacttgtggtgtgagccatcgcacctgttcccccttccttcatcttagccaatcctatgccacctcttcttcctccagtcccctcacctgatggtcccgacacttcatcatccaccacctcctggagggggtaccctgaggtgctccgctgggggctccgctcttcctggggctgcggtt

SEQ ID NO: 170647 - DNA, 1108 bp, Homo Sapiens
ggcctgggtggcgaattcggcacgaggggcaggttcagaacctcatggcccgagctgaatacttgaaggagcaggtcaagatgagggaatctcgctgggaagctgacaccctggacaaagagggactgtcggaatctgttcgtagctcttgcacccttcagtgaccctagaagaatgattggacagatgtgagccatctggagcagaggggcactaacccaggctgacgccaagaatgaagtggcccactgcagccctggcgagcaggcttcttggatggacagtgctgagacccccatatcccagagtccccagcctccctcaggttactctgcaccccacagatggtttgatggctgtgctgtatactggaggggagggcaggactctgggagaacagcacttctttcatgagacctttgttactcggtggttactgggtcctgtgcctgtccgttttggggcatgcagccctctatcatttttggctccgagaagagggcaaggggcccccgcagggtacttctgtgcttgccctcgccctgccagcaggcagctgtgcccctggcctgcccttcccgggaccccttattccaactcagctcctctttgcactggaatggggcactccaacacccctcagggaccacccctccccacagtatgcactcagccccacagaacccaccagtctttctgggaactcacacctgccccgccatcttggtactttaggttaatccctcaagcatgaaagctgggatcttttgggggtttaagaagcccaagccttgttcctgcccctggcctagggagcactcaggaggggttccttggtcctcatctctcccacctttcgtttccctctggggccccacactagccacagcgcgggcccttggggctgggagtttgaaccctgggaacaggaaaagggaaggctttgaaaaaagtcttgacccaggcccctctaggcccacccacttttagaggcctgccctgcccgccgggggaaccccggggacagacttttttccccctttttggggcctggggtctccccattttctttcaggggggggtggattactttccacaggccccagga

SEQ ID NO: 170648 - DNA, 860 bp, Homo Sapiens
cacgcgtcgcgaccacgcgtcgaatgattggacagatgtgagccatctggagcagaggggcactaacccaggctgacgccaagaatgaagtggcccactgcagccctggcgagcaggcttcttggatggacagtgctgagacccccatatcccagagtccccagcctccctcaggttactctgcaccccacagatggtttgatggctgtgctgtatactggaggggagggcaggactctgggagaacagcacttctttcatgagacctttgttactcggtggttactgggtcctgtgcctgtccgttttggggcatgcagccctctatcatttttggctccgagaagagggcaaggggcccccgcaggtacttctgtgcttgccctcgccctgccagcaggcagctgtgcccctggcctgcccttcccgggaccccttattccaactcagctcctctttgcactggaatggggcactccaacacccctcagggaccaccctccccacagtatgcactcagccccacagaacccaccagtctttctgggaactcacacctgcccgccatcttggtactttaggttaatccctcaagcatgaaagctggatcttttggggtttaagaagcccaagccttgttcctgccctggcctagggagcactcaggagggttccttggtcctcatctctcccacctccgttccctctgggccccacactagccacagcgcgggccttgtgctggagtttgagcctgggacagggagagggaggcttggagacagtctgacccagtgccctctaagccacccacttctaggcctgccctgccgcgtgagccctggggcaagctctttccc

SEQ ID NO: 170649 - DNA, 128 bp, Homo Sapiens
tgcggtgagccatcgtacccggccaaccttgggttacttgagaccctactttcatttggatctgagctgtcctacccactcactgcaatctggcttttccttctttgagtataaagtcgatacgggat

SEQ ID NO: 170650 - DNA, 532 bp, Homo Sapiens
cgtggcccggctgggtcggctgaagaactgcggatggaagctgcggaagaggccctgatggggcccaccatcccaggacccaagtcttcttcctggcgggactctcgtctccttcctggtttgggcggaagccatcacctggatgcctacgtgggaagggacctcgaatgtgggaccccagcccctctccagctcgaaatccctccacagccacggggacaccctgcacctattcccacgggacaggctggacccagagactctggacccggggcctccccttgagtagagacccgccctctgactgatggacgccgctgacctggggtcagacccgtgggctggacccctgcccaccccgcaggaaccctgaggcctaggggagctgttgagccttcagtgtctgcatgtgggaagtgggctccttcacctacctcacagggctgttgtgaggggcgctgtgatgcggttccaaagcacagggcttggcgcaccccactgtgctctcaataaatgtgtttcctgtcttaac

SEQ ID NO: 170651 - DNA, 130 bp, Homo Sapiens
ggtaccatcattgcggtgagcatccgccccggcctcccaaaatgccggatcacaggcatgagccaccgtgctcggcctgcaggttttaacaagaggagcatgaactatcattttgacacaaagacagctt

SEQ ID NO: 170652 - DNA, 965 bp, Homo Sapiens
tccagtgctggtacggtccggaattccgggatatcgtcgacccacgcgtccggtggtggggacagcccacttcagcgacgacagcaagagggacgttgtgaagaccatccgggaggtgcagcctgacgtggtggtcgtggagctctgccaatatcgtgtgtccatgctgaagatggacgagagcacgctgctgcgggaggcccaggagctcagcctggagaagctgcagcaggccgtgaggcagaacgggctcatgtcggggctgatgcagatgctgctgctgaaggtgtctgcacacatcaccgagcagctgggcatggccccaggtggcgagttcaggcaggccttcaaggaggccagcaaggtgcctttctgcaagttccacctgggtgaccgacccatccccgtcaccttcaagagggccatcgcagcgctctccttctggcagaaggtcaggctggcttggggcctgtgcttcctgtcagaccccatcagcaaggatgacgtggaacgctgcaagcagaaggacctactggagcagatgatggccgagatgattggcgagttcccagacctgcaccgcaccatcgtctcggagcgcgacgtctacctaacctacatgctgcgccaggccgcgcggcgcctcgagctgcctcgggcctctgacgccgagcccaggaagtgcgtcccctccgtggtcgtgggcgtcgtgggcatgggccacgtgcctggcatcgagaagaactggagcaccgacctcaacatccaggagatcatgaccgtgcccccgccgtccgtctccggcagagtgtctcggttggccgtgaaggccgccttcttcggcctgctgggctacagcctgtactggatgggccgccgcaccgcgagcctggtcctgtcgctgcccgccgcgcagtactgcctgcagagggtgaccgaggccggcacaagtaggagactgtccc

SEQ ID NO: 170653 - DNA, 318 bp, Homo Sapiens
ttcagatagcggtgagcatcccatctaggctgccatgctgcacttgcctccatgaggctgctgatgaagaagttgttctgcagtgtcgagacgccctgctctgggaggatggacgtctgccggcatactggacaggatagcgtcaggctctgggcaggcatatagttttggagacatctttcacagaaggtgtgcaggccaggaagaaccttggggcactggtaccgatccaggcagatgctgcataccaggaactgcttgtccattggctggacctctgggccaggtctgtcctccctctttgccatggcgcccaca

SEQ ID NO: 170654 - DNA, 187 bp, Homo Sapiens
gaccatcattgcggtgagcatcagtatgtactgaggaatgaatgagtcatgtgtgaatgcttgcttgcaatggtcatcacgtcaagtatgatatgagaaaagaaagagtcgtgatttattatgcactgaggaaccagaaatgttattgaaagatgtctaaactaagagtcaatagggggacgggcat

SEQ ID NO: 170655 - DNA, 210 bp, Homo Sapiens
gtaccattcaatgcggtgagcatcatgcccgtcccctattgactcttagtttagacatctttcaataacatttctggttcctcagtgcataataaatcacgactctttcttttctcctttctacttggctgatgaccattcaagcaagcattcacacatggactcattcattcagtcagtacttactgatgctcaccgcatgatggtccc

SEQ ID NO: 170656 - DNA, 282 bp, Homo Sapiens
agacccgaccatcaatgcggtgagcatcagtgaagccaatgaagacccagagccagagcaagactatgatgaggccctaggccgcctggagcccccacggcgcagaggcagtggtccccggcgggtcctggacgtagaggtgtattcaagtcgcagcaaagtatatgtggcagtggatggcaccacggtgctggaggatgaggcccgggagcagggccggggcatccatgtcattgtcctcaaccaggccacgggccacgtgaaggctcaccgcattgaagt

SEQ ID NO: 170657 - DNA, 223 bp, Homo Sapiens
atctgatcctggtgaacacaggagctgaatgtgacctacagctgggccacatgtggcatcacccccgacgcaaggagtgagagccccagagacctcatctgacatgtggcaggctgtgatggctgccgatataaatgaggctgtgtgtgtccaggtcctattaattcatgttaaaaaattaaggagggctgggcatgatggctcccgcattgatggtccggcc

SEQ ID NO: 170658 - DNA, 186 bp, Homo Sapiens
attgtaccactgcactccagcctgggtgacagaacagtaagactgtctcaaaaaaaacctgaaatgaagtttcatatctttatgaaagtaaaggaagatacttctgtctgaaggacatcagtgaatctaaattgccatttaagaggactcgggctgggcgcgatgctcccgcatgatggccggctt

SEQ ID NO: 170659 - DNA, 281 bp, Homo Sapiens
cagagtatcacgatgcgctgggtgtgagcatcacgtctggccctcgtgtcacactctcttgatttaagattgtttctcctaaggcagaggttctctgagacccatgaaaaggtttcagggaaatccaggaaccccctgaaaatccgtacaaaattgtgtcattgtatgtgcagttttctggtgagtagacccagagctttcatcacatttccaaagggtctgtgcccttcaccctcacctgccaatcagatgaagaaataataccagtccctaaggaggca

SEQ ID NO: 170660 - DNA, 201 bp, Homo Sapiens
gtgagccatcgcacctggccccacgcacttatttaaaacaggacaaaatatataaaagaaaatagtctcttctgtgaacaaatgtcccccctgacataaacaaagaaacagaactcaccttgacctagtatgagtgtgctgccttcaaaaagaaatttcaccacagaagttactaaatataacaggctctttacctagaat

SEQ ID NO: 170661 - DNA, 239 bp, Homo Sapiens
atttcaatgggtgagccatcaccactaaatggacatacaaagtgccaggtgagaaatcagcactgtctcttaaaagcttttcctaactttgccctagggaagcaagagggattcaaaaagtgggaaaatctgtatggcgatcgctctcacctgattcaaaatacacactagacgtttctaagaagtgtcattgtgccgggcatgatgctcaccgcaagttgaatgggatcctctaggcg

SEQ ID NO: 170662 - DNA, 486 bp, Homo Sapiens
cccttgctggacatatataatacttgagaagaaaataaaataaaaagggaaatcatttcatgacacaaaacagttatatgaaattccaatttttgtgtccataaataacattttctgggcccacagccacgtgtattggtttgcgttctgtgcgtggttgtgttcacccaacagccatgttgagaaactgcaccagagaccgtatggcccacagtgtccgaaatacttacttttttttagagatagggtctcttgctctgttgcccagattgaagtgtggtggtgtgatcacagcacaccacagtctccaactcccgggcccaagcgatcctccttcctcagcctcctgattagctgagaccacaggagtatgccaccatgcccaagcccactctggtatatgacagagaaaacttgccactgccttctctatactgtacagttatcctaatatggtctttcagtatccaccacagagggttgggg

SEQ ID NO: 170663 - DNA, 199 bp, Homo Sapiens
tcggtacccagttgaagttgcggtgagccatgcaacagtaatcctgcccagatgagtattaaggtaactccagtcctggtgtgatcgcagtcacataagccattcaaagtaagaatcaccagttgagttcagccaacagtcatgggcaatattagaaatcactgtactgccaggtgcgatgctcacagcgaaattgaat

SEQ ID NO: 170664 - DNA, 280 bp, Homo Sapiens
gagggtcaagagctgaaatgaatatttacactaagaactccagcagggaattaaaatgtaccgtatgtttatgcctttcaaagcatgattccctttcctgtttccgttattctgaaattaaaaacatttggccggtgtgccaggcagcaaaagcagcagacagcctaggtcaccaacacccctcatgccatgccagcagaaggcaatcaaaacatctctgacttcagatcatggctaggctttgggcttgacaacaaattaatgtatcaccattacatat

SEQ ID NO: 170665 - DNA, 205 bp, Homo Sapiens
atcccattcaatagcggtgaagccatcacacccagtccagatttagtgtaattcctaagggcccataggatttctggaatcataaagtcaccagctgcatttagaccctaacaggagagtcagcctgtcctttgaagctttgaagctaggaaatgatttctcctctctagctataaaaatcctagatcgctcaccgcaatctaat

SEQ ID NO: 170666 - DNA, 180 bp, Homo Sapiens
tgccaaagcgtagtacccaagctcctgtcaaagttgtgaatgcgactttggatgagattaagaaggcccagtggacggttggtcttgaagagtggcagtgtgtggatttgaggacctctgcagaccatcagatcaaaggagggagagctgttttgggtactacgctttggcaggtaccgg

SEQ ID NO: 170667 - DNA, 159 bp, Homo Sapiens
tgccaaagcgtagtacccaacagccaacccaggagttaaacccacagcagcctccctcccctattactatcacattctgtgggtaaattaaccctccaagcctgcttccctccctgcccacatcccaaaggagattgggtactacgcttggcaggaccg

SEQ ID NO: 170668 - DNA, 144 bp, Homo Sapiens
tgccaaagcgtagtacccaacacccacatgatgaactcggtagtctctggacatcctgtcttgacctccgtcatcctgaaaaccctttgcccacagtttgaccaaccaggccttgggtactacgctttggcatgccaaagcgta

SEQ ID NO: 170669 - DNA, 241 bp, Homo Sapiens
tgccaaagcgtagtacccaatgacctgagccaaaaatgaatcaagttaaatgaaaactgacatctgatatgagcatatattattagtctattcaagcacagttttgaagttagcaaacatctaaatcctcacatctctacaaggtaggtcaaagtatgattcttctcagttgtacaagataaatggctgtataacatgtctagtcatagttaagacaacaattggatactacgctttggca

SEQ ID NO: 170670 - DNA, 837 bp, Homo Sapiens
  misc_feature (612)..(612): n is a, c, g, or t
  misc_feature (712)..(712): n is a, c, g, or t
  misc_feature (787)..(787): n is a, c, g, or t
gggttctggagatggagcgagctgtgccgctcgcggtgcctctgggtcagacagaggtgttccaggccttgcagcggctccatatgaccatcttctcccagagcgtctcaccatgtgggaagtttctggcggctggcaacaattacgggcagattgccatcttcagcttgtcctctgctttgagctcagaagccaaagaggaaagtaagaagccggtggtgactttccaagcccatgatgggcccgtctatagcatggtttccaccgatcgacatctgcttagtgctggggatggggaggtgaaggcctggctttgggcggagatgctcaagaagggctgtaaggagctgtggcgtcgtcagcctccatacaggaccagcctggaagtgcctgagatcaacgctttgctgctggtccccaaggagaattccctcatcctggctgggggagactgtcagttgcacactatggaccttgaaactgggactttcacgagggtcctccggggccacacagactacatccactgcctggcactgcgggaaaggagcccagaggtgctgtcaggtggcgaggatggagctgttcgactttgggacctgcgcacagccnaggaggtccagacgatcgaggtctataagcacgaggagtgctcgaggccccacaatgggcgctggattgggatgtttggcactgattccgactggatggncctgtggagggggccccaccctcaccctctgggacctccgatcctccacaccaacaccatcttccccatccgggnggccacagaagcacgtcacccttctacagggactgattctggtcgctggc

SEQ ID NO: 170671 - DNA, 193 bp, Homo Sapiens
cctgccaagcgtagtacccaacactatattcagtttgtaagaaattaccattatcacatttcctgtttgtcttggagaggttgtcctatctcgcaccacatagtagggaattgtgaacaacactggacagaaagttaaagccttggattctgtactcttcattcctgtaaaccttgggtactacgtttggaca

SEQ ID NO: 170672 - DNA, 293 bp, Homo Sapiens
ttccaatagcgatacccaacgtgtcccactccatccatcccccagtcaccattattctgtccgcatgaatttgattattctaggtatctcatgtaagatggaatcatacagtatttgactttttgtgattggcttatttcagcttagcttaatgtcctcatttttacccacgttgtggcatgtcgagaacttatgtcctttttaaaggctgaacaatattccactgtacatataatacctcattttgtgtatccattcatcgttgatgaacacttgggtactacgctttggca

SEQ ID NO: 170673 - DNA, 397 bp, Homo Sapiens
tgccaaagcgtagtacccaacagacttgtagaaactgtcttgaaataacagtttattacttatagttcccaggaggagaggatacactatgcaatgcagggccacatgagaggtactagggttgatcaggaggaagaaagaggaaagggaaaaagcatgggcacaggcctttactgtggtttccatggaaaaggcaaggcaggaaactgttcaggactggctagcttgaataatttcagtgggttctgggcaaaagtagtggtccctagtcgtctcttacctgtccctggggtgacttagggcaggagaaatattgactggagaaatactgacttcatgtgtaagggttagataaaggaggtggttgggtactacgctttggcagggtaccgagctc

SEQ ID NO: 170674 - DNA, 183 bp, Homo Sapiens
tgccaaagcgtagtacccaatatcctcaggtgaccttgggtccctcaaagaggaagcttcggaactgaaatggagttgtcccatgttcagtcaaaatggccaggcctttaaagcccactcagtttcaacgtggtccatacccaaaaggaagtgaagttgggtactacgctttggcaggtaccg

SEQ ID NO: 170675 - DNA, 380 bp, Homo Sapiens
tgccaaagcgtagtacccaagacaatgtggtattggcaaaagaacagacaactagattgatggaacaaaataaagagaccagaaatagacccacgcaaacacacttgtgtgactcacacaaatattcaaattgatcttagtcaaagatcaatcgattgatgaccaaggagcaaaggcaattctaatggagaaaggacagtcttttcaacaaatactgctggaactactggacatccatatgcaaaaagtgaatcaagacacatctaacacctttcacagaaaccatcaaatggatcatagacctaaatgtaaaacacagagctataaaatgacagacagcaggaaaaaacctgtgtgaagttgggtactacgctttggca

SEQ ID NO: 170676 - DNA, 429 bp, Homo Sapiens
tgccaaagcgtagtacccaaaggaaaataaattgttctaccataaagacacacgcactcatatgttcactgcagcactactcacaatagcaaagacacggaatcaacccaaatgcccatcatcaatacaccagataaagaaaaggtggcacatatacatcgtggaatactgtgcatccataaaaaagaacaagatcatgttctttgcagcaacatggaaggagctgggggccattatcttaagtgaactaatgcaggaacaggaaaccaaatactgcatgttctcacttagaagtaggacctaaacattgagtacacatggacacaaagaagggaacagtagacactgaggcctttgtgagggtggagagtgggaggaggctaaggatccaaaactacctattgggtactacgcttgcaggaccgccga

SEQ ID NO: 170677 - DNA, 221 bp, Homo Sapiens
ggactgacaagcgtagtaccaatttagcaacaattaatataaaataagccacagaaaccgacagtgccaccgcattctcctcccccactcaacccagcgaaacacacacataaaacaatgagagactgagtgacctcttcgagaccctctgtctgtttctcattagacctactgcatgtgatctgtgcttggccttggacgttgggtactacgctttggca

SEQ ID NO: 170678 - DNA, 247 bp, Homo Sapiens
gctcggtactgccaagcgtagtacccaaggcagttcagactgtagtcctggcatctgggaagttctcaattgtctctatctacagtcaaccctgtcctggtagcctagcaggtcttgcccaaggatgagaccacaggcagtgctggtggtgcagccttgtcaggctggtccagcatgtccatatctactagatagattttgttgtttttccaaaaattgtgttattgggtacacgcttgaggaccgg

SEQ ID NO: 170679 - DNA, 139 bp, Homo Sapiens
gacctgccaagcgtagtaccaaaatttatcatcagtggtcacctcagagcacctgaattcaggcctttaagtgcaagtaggatgcagaattctggaagagccagtaagtctgtggctccttgggtactcgctttggaaa

SEQ ID NO: 170680 - DNA, 117 bp, Homo Sapiens
ggtactgcaagcgtagtaccaagcccggctccctgcgcacccttaccccgagtgtcagtgaccacctgccttcaaagcctccatcctgggcaaaggcagaaagaatgggtatcttag

SEQ ID NO: 170681 - DNA, 245 bp, Homo Sapiens
tgccaaagcgtagtacccaactcacttgcagcatttttgggggggaagaaaaactgtaaccaaaaggtgtgaagagaacgctagggtacaaaaagttacagggatttaaaatgaattggtttaggctaagcacttatggacccgctcaagacatccaatgtaatctgttgatttgaaaggtaaatacgtatcttttaaaaattgatatttatttaaatgctttgggactacgcttgcagaccgct

SEQ ID NO: 170682 - DNA, 337 bp, Homo Sapiens
tgccaaagcgtagtacccaagtgctttctactcaaatatgttttgatagttctgggatttaaaaatattacttaaatactatttatattgtcaaagtaatagatgtttactgttgaaacatttaaaaatacaaagaagcagagaaacaattacccacaattttactgcccgtaggtaatttctttagcatttagtgtatttccttcttgagaatatgtaggggtgtgtatgtgaatacacacacttgcctgtgtatgcatatatattctgtgtgtgtaatatgtgtgagtactgcatgtgcatctgtataatacatagtgggtcctctgcatttttt

SEQ ID NO: 170683 - DNA, 369 bp, Homo Sapiens
gtccgccttccaaacgtagtacccaatatgtgtagaaaaatgtactgaacaatgttgacatgcttatttttgtaagagatgggtacttcttgttccccttggatttcggaagcaaagcaatgggaccctacgcttcagagtcttaatggggtggggcagtgtccattgaggtgtcctgtcgggaatgacaagtccagggcagattatgaggcaggcatcctttggagttcttctctcaggtatattttaactaaaagctatcatttaagttgaagaaatcaagtcttgtgaattgatacgattgtacttctagagtctttgatgataagttgtctttgggtactacgctttggcaggtaccgacagatt

SEQ ID NO: 170684 - DNA, 177 bp, Homo Sapiens
tgccaaagcgtagtacccaagtgacctaggagtccccagagctggggggtgtggccttcatgggacaaggaggaagacaggaggatccaaccccagcatggaggggggagtgggcagtctccccaatttggcccctctaggtcagttgggtactacgctttggcaggaccgagctga

SEQ ID NO: 170685 - DNA, 411 bp, Homo Sapiens
tgccaaagcgtagtacccaaaggaatataaatcattctaacataaagacacatgcaaacatatgtgcattgcagcactgttcacaatagcaaagacatggaatcaacctaaatgtccatcaatggtaaactggataaagaaaatgtggtacatatacaccgtggaatactaaaaaagaatgaactcacgttctttgcagcaacatggatggagccagaggccatcatcctaagcaacctcattcagaaacagaaaatcaaaactgcatgttctcacttataagtgagagctaaacatggagcacatatgaacacaaagaagggaaaaacagacaccgggacctacttgagggtggtgggtgggaagagggtgagactgacaaaactacctattgggtactacgctttgtca

SEQ ID NO: 170686 - DNA, 209 bp, Homo Sapiens
tgccaaagcgtagtacccaattgacacttcaatttccagaaaaataaaatcatgaaggcattgtgtaaatattctgaatttggtggaatgagacaacgcgtaagggggcgggcctgaagtctcgggtttggaactgggggtttggggtagtgctgggtaggcagtcctggagcgcgcagctattggtactacgcttggcaggaccggcc

SEQ ID NO: 170687 - DNA, 205 bp, Homo Sapiens
gatagtgagattgtgagagttgttttagatgaggctagaggggacagcaggagtcagagcacacaaggtctcataacccatgttaaagagtttagactatatcctaagagaacagggaagccattgaagggcctcagtcaagagaaatcaatggctaacatcctctacatgttaaaataagcagattgggtatcagctttggaca

SEQ ID NO: 170688 - DNA, 417 bp, Homo Sapiens
tgggaccaacatgcgaacggactgatctgcctaaagcacgcgagatgcaggcgaaaagcagccacacccctctgccacaaatgaccaacagctggtcaggacgttacacgcggtgccttgtaagaggcaagaaacacttgccgaatctgcatctggcttccagtggtaagcacattcctcagcaggatcaagccaaacagtaaaaactaccaagagaacacgaggaaggcagaaacgatgtttagcaacagtattctgcatggttcactgcttaagaaaatgccttctggaatatttgtaaactgaaattctgtatgtgtaagagatgtttaaatatgtttgggtcctaaacagctttttaaaattatacttgggaataaattcagcatcttttcaaataaactctatgaaagacaa

SEQ ID NO: 170689 - DNA, 265 bp, Homo Sapiens
cggcagtgcacctgattctgatagtcgatctagagtatccccaacatgcgaacggactgatctaacactctggatgcctgtgactgagagagggaaggagactttaactggcccgatgagagagaagaggcattagcagactgcagggagtatcttgctggtgcctgggacctctgctctgacccaagcccataagaccttccgtttccacttggaagtaactgctttacagactgagattgttggatcagtccgttcgcatgtt

SEQ ID NO: 170690 - DNA, 844 bp, Homo Sapiens
  misc_feature (629)..(629): n is a, c, g, or t
gggaagaggctgactatgaagatgatttcctggagtatgatcaggaacatatcagatttatagataatatgttaatggggtcaggagcttttgtaaagaaaatctctctttctcctttttcaaccactgattctgcatatgaatggaaaatgcccaaaaaatcctccttaggtagtatgccattttcatcagattttgaggattttgactacagctcttgggatgcaatgtgctatctggatcctagcaaagctgttgaagaagatgactttgtggtggggttctggaatccatcagaagaaaactgtggtgttgacacgggaaagcagtccatttcttacgacttgcacactgagcagtgtattgctgacaaaagcatagcggactgtgtggaagccctgctgggctgctatttaaccagctgtggggagagggctgctcagcttttcctctgttcactggggctgaaggtgctcccggtaattaaaaggactgatcgggaaaaggccctgcgccctactcgggagaatttcaacagccaacaaaagaacctttcagtgagctgtgctgctgcttctgtggccagttcacgctcttctgtattgaaagactcggaatatggttgtttngaagattccaccaagatgtatgtttgatcatccagatgcagataaaacactgaatcacctttatatccggggggttgaaaattttggaaaagaacattcaccaccggattccagaaataagggttacctttctccgggcttttacccttggcctcctaccactaccatacctattcccggaattggtacccccgcgcgttaagaattgcccgggt

SEQ ID NO: 170691 - DNA, 475 bp, Homo Sapiens
gtgtagtgggactgcggcaagtacctgattctctgagcctcagtttccttatgtgaaagtgctggaaccaaaatggagtcacttatgccaaactctaataaaatggagtcggggggccacatagaagccctcacacacacatgcccgtaacaggatttatcacaagacacgcctgcatgtagaccagacacagggcgtatggaaagcacgtcctcaagactgtagtattccagatgagctgcagatgcttacctaccacggccgtctccaccagaaaaccatctgccaactcctgcgatcagcttgtgacttacaaaccttgtttaaaagctgcttacatggacttctgtcctttaaaagcttccccttggctgtggccctctgtgtatgcctgggatccttccaagcactcatagcccagataggaatcctctgctcctcccaaataaattcatctgtttgtgtaggtagcact

SEQ ID NO: 170692 - DNA, 1689 bp, Homo Sapiens
  misc_feature (914)..(914): n is a, c, g, or t
  misc_feature (1623)..(1623): n is a, c, g, or t
cccgatgcattgtcttccaggaggaagacgaatcgttaaacatctgaaagggtcaggccagcatccttcagaaaaagcatccccgaggaggaagacgaatcgttaaacatcttaggtcagctctagcctctcggaatttgtcttcttcagtggaaaccccgagaagactgatcagttcttcagttctaaaacaatggcccagggtttggtgacgttcgccgacgtagccatagacttttctcaggaggagtgggcctgtctgaactctgctcagagggacctgtactgggacgtgatgctggagaactacagtaacttggtctcactggatttggagtcagcatatgaaaataagagtttacctacagaaaaaaacattcatgaaataagggcttccaaaaggaattcagatagaagaagtaaatcccttggccgtaactggatatgtgaaggtacgcttgaaagaccacagcgctccagagggaggtatgtcaatcagatgatcatcaattatgtcaaaaggcctgctactagagaaggcacccctcctagaacacatcagagacatcataaggagaattcctttgaatgtaaggactgtgggaaggcctttagtcgtggctatcaacttagtcaacatcagaaaatccatactggcgagaaaccttatgaatgtaaagaatgtaagaaggccttccgttggggcaatcagcttactcaacatcaaaaaattcatactggggagaagccctacgaatgtaaagactgtggggaaggcttttcgatggggctcaagccttcgttatttcataaagaggattcatactggtgaaaaaccctatgaatgtaaagactgtggaaaggcctttcggcgtggtgatgagctcactcagcaccagagattccacactggnggagaaagactacgaatgcaaagactgtgggaagacctttagccgtgtgtataaacttattcagcacaagagaattcatagtggggagaagccttacgagtgtaaagactgtgggaaggctttttatttgtggttcaagcctcattcagcataaaagaattcacacaggtggagaaaccctatgaatgtcaagaatgtgggaaggcctttactcgagtcaattaccttactcagcatcagaagatccacaccggtgagaagcctcacgaatgtaaggagtgtgggaaggcctttcgctggggttcgagcctcgttaagcacgagaggatacatacgggcgagaagccgtacaagtgcacagaatgtgggaaggccttcaattgtggctatcacctcactcagcacgagagaatccacacaggcgaaaccccgtataaatgtaaggagtgtgggaaggctttcatttatggatcgagcctcgtgaaacatgagagaattcataccggggtgaaacccaatgggtgtacagaatgtgggaagagctttagtcacggccatcagcttacacaacatcagaaaacgcacagtggggcgaaatcctacgaatgtaaggagtgcggggaaggcatgtaaccacctaaaccatctccgagaacatcagaggatccacaaacagtttgaagagccttttgaacgcagtagcccgctncgtatctatggttttcgctttccacagtttgttacctgcagttcaactgcagtttcaaaatattaa

SEQ ID NO: 170693 - DNA, 228 bp, Homo Sapiens
ggccggtaccaacatgcgaacggactgatccagtcccgggttggtgaactccttgcccgcgccgttcatgtagtcggtcagcggcaggatcttgccgtagcggtagtgcgtgccgatcaggtcggagtcgctgatccagccgtcgtagatggacttgcccgactgcatcgaggtctgcagcttctcgaccacgtcgccttcctggatcagtccgttcgccatttggtg

SEQ ID NO: 170694 - DNA, 244 bp, Homo Sapiens
ccaacatgcgaacggactgatctatgcaaaaccttccctctttgatatactaactccagaaagagccactctgtcttggtgtcagctttcaaagatgtcactgcttcatcagtatgaaatatttacctaggctatttgactggtggtgtctagacaaagaaagcatggaggcacatatggtttgattcaaataatgtagagtcttctctgaaagcctcagatcagtccgttcgctgttggtccg

SEQ ID NO: 170695 - DNA, 174 bp, Homo Sapiens
aacatgcgaacggactgatctgtccactaatcaaggtcatttatttgacaattttcctgtcaccagtgtgtatcaaatttaatttaaagcatgatcaacattcagccttaagataagggaaaaattttctaccaaaccctcacaaccgatcagtccgttcgcatgttggtccag

SEQ ID NO: 170696 - DNA, 366 bp, Homo Sapiens
  misc_feature (302)..(302): n is a, c, g, or t
  misc_feature (322)..(322): n is a, c, g, or t
tgaagtcctgtccttcaattgttgtgggtggggactttgggtggagcccctgaaataggacctggcccttcccgtgatcactgactggctgttgcattagatgatcgctgggtgtttggctgttgcattagatgatcgctgggtgtttggctgttgcattagatgatcgctgggtgtttggctgttgcattagatgatcgctgggtgtttggctgttgccttagataatcacttgtctgtttggctgttgcattagatgatcactgggtgtttggctgttgcattagatgaacactgggtgnttggctgtgccctaaaaaancacttgctggttggctggtgcattaaaaaacactgggtggttgg

SEQ ID NO: 170697 - DNA, 484 bp, Homo Sapiens
gtgttaatacgagaccattcccctccaggtctataacttctttacctgtgtttaaagtttcagactaatcataggtctacttgcaagcatggaagggataggatctggttcaataggatggtaccactggaggttcacatatctcagagcggcccttccctgaagctcaagaactgaaatttcctccaggctaattgcagtgttgagacttccgcttcccccatggggaataaagaaggtgtaaaccaaaaagtgtctgagactcaatccatttagaagtttattttgccaaggttaaggacacatgcccgggagacagggagacaagtctgtgcccttctacaaagatgattttgagggcttcaatatttaaaggggaaagggcagacactggggaaagagggagaaatgtttaaaaggtgtggggaggtaagaggcaagaggtcgcattcttctgagtttttgatcagtccgttcgcatgtt

SEQ ID NO: 170698 - DNA, 701 bp, Homo Sapiens
ccatgcgaacggactgatcaaggagtgagctggctggaaagagggattgatgtgccagtgtttgccgggagacgttggagagccccgggggagaggcttcatacttggccctggaggacttcacaggacagagatgggcagggagggggcacacccaggcgtggaggcaagtgcctgcttggtgggctctgaaaccagcgtccgctgtgcgttgtcctacgcacgggaaggaagtgcatccttgggcgggtgtagtagggggcaggctggctccagtgtgtgacaaatggccaaagtctgcagggctatgctaagaaatccacttcattctgcaggcagttgggagccaaggattgcttgtgagcagaggagggacacacactgtctgcaaggactgcagctgtggcagagtctgaacaatggtgtgtgtgagggcaaagctcagaagacagggacaacaggagatcagtccgttcgcatgttacccatgcgacctcatgggtgcccttacttctaccaggcagtcccagctcattccctaaacaattctctttcccagacaactgttcacacctttctcctccaacttctgtcttcactctcaaatgatgaccgtttccccttcttttacaatactataaaaagcaacccaaggagaactttcatgtcttcccacctcctgatcagtccgttcgcatgtt

SEQ ID NO: 170699 - DNA, 385 bp, Homo Sapiens
agtccacatgcgaacggactgatctaaaattccatgtctgtatagtatcaaggattgcatttaaacacacacatatgatggctaaaagtttaggattgtttaggaaagtaattcacagttctggttttacaatcgtcaaagatgtgttgatcttctttaaggggcaccaatgaattccacaaaaattgtcaccatttcttcactgtttttaaacttattccatacaacacttttaaaaaatcaatgatcagtccgttcgcatgttaacatgcgaacggactgatcgatgacgaccagcaggtccagcttgtccatcgccttcttcatctcgagaccgcgggtctgcgagttcggcgcatggccccagaagatcagtccgttcgca

SEQ ID NO: 170700 - DNA, 161 bp, Homo Sapiens
ccaacagcgaacggactgatcacatcaggaatataaggtgcttctaggtttcgtatattttcccaatttagaccttcaaaaaacgcatgctttttgaaatcctctattccattctgccccagccggcgttctctactgcagaatcagtccgttcgcatgtt

SEQ ID NO: 170701 - DNA, 395 bp, Homo Sapiens
ctgactcattgagtatccccgccttgtcgaacgacgatcagtgcatagggcatggctgttggatcttattacattacctattggaagcgatggtgtggattagatcagtgatagggcatggtgtggatattactacattagtattggaagcgatggtgtggactagatcagtgatagggcatggtgtggatattactacattagtattggaagcgatggtgtggactagatcagtgatagggcatggtgtggttcatgttcagaaacattcaagatcccagttcccttccatcttgtcctgccatcccataggccatgttaatgtggctgcatggccaatgctgagtctctaccacatctcagcttctgggagggggcaggagcagaagtgaaaa

SEQ ID NO: 170702 - DNA, 174 bp, Homo Sapiens
aacatgcgaacggactgatcggcaggtgcttgagcttggacatgcgcaggtaggcgatggcgatgaagttctggctcgtcctgaagccgcgcgcggcgcgcttggctctgctgcagcagcccgttcatcgcctcgacgaaggcgttgctgcggtgatcagtccgttcgcatgtt

SEQ ID NO: 170703 - DNA, 493 bp, Homo Sapiens
cctacacaccacctctagccaactacctggctctccaaggagcatgctcgcagctgccaccagggaagcttctgcatgctgtgtgtcatgcagaaccacattgtccaggccttcgccaacagcggcaacgcaatcaagcccgtctccttcatccgagacctgaaaaagatcgcccgacacttccgctttgggaaccaggaggacgcgcatgagttcctgcggtacaccatcgacgccatgcagaaagcctgcctgaatggctgtgccaagttggatcgtcaaacgcaggctaataccttggtccatcaaatttttggagggtatctcaaatcacgcgtgaagtgctccgtgtgcaagagcgtctcggacacctacgacccctacttggacttcgcgctggagatccggcaagctgcgaatattgtgcgtgctctggaactttttgtgaaagcagatgtcctgagtggagagaatgcctacattgttgtgctag

SEQ ID NO: 170704 - DNA, 651 bp, Homo Sapiens
  misc_feature (23)..(23): n is a, c, g, or t
aatttgggagtctgtccctgttnagtgccacgcgttgaatagttccacatactttcagaagagcttatcagggccctgcctggtttcccgagcatcatgagttacgtgtctgctcagactctgctgacaccaaagtattttaaacaaattaaaggtcttggggaattctgtttggctacctgggcacgccagtctgcaccatgtgtccctgcggcgcatgagtgactggcgtatttagcccgtcacatttcattcgctgaaggaaaggcaagagagttgaaacatttttcttacttaaaaaaaatgatctttgtgaagtacatagtgagttcatttgtcttcagtcaacagcggctgaaactgaccactgagaaatgggtgtgggcactgacagttctcccccattatttggccaggaattgagcttggcttggcaaagttccttttaccctgttctgttcatctaaatgcagacatatttaaatcatattcaactagttagctaatgacctcaagttgtattccctggcaaaatggactttctcaaaataggactgcacgcttggtgtactttaaatgttaatgtttaatttaaaatttttatttaagaggattaaagccctaatgtttattttcctactttctgaaagc

SEQ ID NO: 170705 - DNA, 1467 bp, Homo Sapiens
  misc_feature (14)..(14): n is a, c, g, or t
tcgacccacgcgtncggacggcagctactacaaattcctgttcaaccccaagggggagtgcatccgagatgtctacgcgcagtttctagagatgaccgatgacaagctgtgactccagctgggggcgccacagcacccaccacctgccgccttcagactctcggggctggtgccagtgccccagggcctcctgggccacgggctggaggggctgcccaggaccttggtctcgaagccatacgtggttgtctgctttcctaaggactcccatttccagtattaaagagagaatcatcatcaaggcaccgtaggtaactcagtggctgtgaccagctcgactggcggccactggctgttcccatgagttcagctgtgacgttagcttcagtggctccgccgcatcctcacactgacgggggctccatacggacctggggactgggctgagagggtggacgagttcaggtttgtttttgcagcagattccgtcgttcttactgagtctgcagcgggggagtgaacaagtgtgcagatgtaagttcttacatggataagcagattgaatacaacaccagcagcttgccttagaaaaggagaaaggaattccttttcccgcccgaacatgaagaaaaacgacctgaccctgtagagagaacacagtgtgaatgtttcccctcgtgtgagcccagcctgtggtcttctccgtacccgcaacgtgatcatctgtgcccgtgacgtcacctgtgcccgtgcgtggcgtccccgtctccgttggggccattagaatgaggcagacaccaggccactctagaagccgagccgtcacacctcaggcgtgtgcggggcgggaacggggggtctcctggttacatttgggattaaacctgtttcccggtaatgtgtagggaacagcagagtgatgcacgaactttgaacattcgttatggggaaaacatcctttaacttcggggtcgtctgccagagcagggtctgggagggtccatgcagttcccgctggtgtggagggaaatgccctggtctggcctccgagcccccaggtccaccgtctcccctcccctcatttgtaagaatagctacacactaacattttgggaaggagaggcacataactttttttaacatttggtaactaggttatgggctctacattgtcagctacttgggatatatatttaattttcttaaattcccgttaaactctattttatggttttgatttcagattgcaaacatgtaaaacctgcatagcagcgagttcctcggttttgccggtttctttagttctttactgtcactgtcatgtaatcagctaattctctgtggatgttgctgtaaagtatgcatgttcctttcatgtgtatttaatcatgatgtttaattttgcacacttatttgtaatgtttcttttaaataaaagtgactaattttgttgtagtctggacctgt

SEQ ID NO: 170706 - DNA, 299 bp, Homo Sapiens
agaggatcccgaatctcgacaagtggtgcaggatagacaaatactgtacaccagtctctcaatagggagatcaaaaccaaattcacacagacatgaaaagttgatttatgacagatgatgttgcagtcccgggggaaagaatggaaatggtgctagaataatgggtttctatatgtatttctatactatgtatatgccattacattaaagtcaaggcctatggagttggggaggagtgatcaaaatgttctgattagatgtgaagtttgcacaactatcgaattcgagatcctgtagat

SEQ ID NO: 170707 - DNA, 931 bp, Homo Sapiens
tagagatcccaatcgcacgaccaaggagcaggttgtgcagcgtggtgatggcatagaacaggaccgactccacaggggagctgagcatgcggaccagagcagggatgccacccgacttgaagatggcgagcagcccctcccggtggtgggagaggttgtgcaggatgctggtggtgcagcgggctgtgtccaggtcgctggtattctgcatggtacgcacgacagcggccaccagctggggcgagcccatcagggcccgccgcgacgcctccttcttcgacagctggttcacaatcatggccgccttggtcaccaccaccgggtcctcgtcgttgagcagtttggtgagctcgggcagggcgcgagtggccagctcggcatcgtcctggtagttgatgagatgcacaatggccgacttgagcagctgggacggctcggccagtcgctgcaggttggtggcctgcccctccacctgggtggccagcagaagcgagctgtcctcgcctgacacaccagggcacatggcctcccgcacccgtttggccctggctgttgtggacatctggtactccaggtcaccttggctggggggcaccccctgggtgtaagtggtggttttcttgagcgtgtactggcgcccgcaggcctcatcctcctccatgatgcccttgctgctgacggagggcacgcaggtgttggcgcccgagtggatacccgagtcgtaggtgtatgtctgctgccactcagtcaccttgataggctgctccatcaggttcatcacctccatcgtggctactgagtatggggcctaaccgggccgggtcggggtcgggccggggtgggagccggcgcggacagcgaactgagctcggcgcggtcgggcggcggctgctccggactctggccctcgtgccgaattcgccacccaggc

SEQ ID NO: 170708 - DNA, 529 bp, Homo Sapiens
agaggatccgtatggacactgcgctacgcgtatgcactatcaccaccatcaccatgagcacaagaaaaagaagaagaagcataaacataagcacaaacacaagcataagcatgacagtaaagaaaaggacaaggagcctttcactttctccagccctgccagtggcaggtctattcgttctccttccctttcagactgagaaggggacaaaaagacctttcctttcatgtccagaagaatgtatgtaactaaagcttggtcctctgtgaagaattataaaagggaggggggaaaggattcgcctctcctacagaaattctgaattcatttaagttctaagcattggatttatgtaatttatacagttgggatctaattaggaaaatgtgtttggtagttctggataaactatttcatccgctgtttcctccccaaaacacacacacagagcaaactccctttcataaaagccctcatatccactggcagtccgcgtagcgcattgtccatagggtaccggagctcgaat

SEQ ID NO: 170709 - DNA, 660 bp, Homo Sapiens
ttcacgaggatcttaaattgtgtgtttgcagctggcgtgcggacgagggcgctgtgtggatgtggacgagtgtgcggcgagccgcctccctgcagcgctgcgcagttctgtaagaacgccaacggttcctacacgtgcgaagagtgtgactccagctgtgtgggctgcacaggggaaggcccaggaaactgtaaggagtgtatctctaggctacgcgagggagcacggacagtgtgcagatgtggacgagtgctcactagcagaaaaaaagctgtgtgaggaaaaacgaaaagtgctacaactactccaagggagctacgtctggtgttgtgtccttgacggcttcgaaagaaacggaagatgcctgtgtgccgccggcagaggcttgaagccacagaaggagaaagcccgacacagctgccctcccgcgaagacctgtaatgtgccggacttaccctttaaattattcagaaggatgtcccgtggaaaatgtggccctgaggatgccgtctcctgcagtggacagcggcggggagaggctgcctgctctctaacggttgattctcatttgtcccttaaacagctgcatttcttggttgctcttaaacagacttgtatattttgatacagttctttgtaataaaattgaccattgtaggt

SEQ ID NO: 170710 - DNA, 1000 bp, Homo Sapiens
  misc_feature (129)..(190): n is a, c, g, or t
ccaaggtagcgaggcctgaggtggctgttctcaagcacggaggtgggggcggccggagaggctgccagcagcacggccgcaggacctggagctccggctgcgtcttcccgcagcgctacccgccatgcnnnnnnnnnnnnnnnnnnnnnnnnnnnnnnnnnnnnnnnnnnnnnnnnnnnnnnnnnnnnnngaggccgccaagaagccgacgccctgccaccggtgccgggggctggtggacaagtttaaccaggggatggtggacaccgcaaagaagaactttggcggcgggaacacggcttgggaggaaaagacgctgtccaagtacgagtccagcgagattcgcctgctggagatcctggaggggctgtgcgagagcagcgacttcgaatgcaatcagatgctataggcgcaggaggagcacctggaggcctggtggctgcagctgaagagcgaatatcctgacttattcgagtggttttgtgtgaagacactgaaagtgtgctgctctccaggaacctacggtcccgactgtctcgcatgccagggcggatcccacaggccctgcagcgggaatggccactgcagcggagatgggagcagacagggcgacgggtcctgccggtgccacatggggtaccagggcccgctgtgcactgactgcatggacggctacttcacctcgctccggaacgagacccacagcatctgcacagcctgtgacgaatcctgcaagaagtggctccggcctgaacaaccgaagactggcgacaagggtcaaagtgggcctggggtgcttggaacaaagggcgcccatgcgtggactgtgcgaacaagtgtgcgaacccaaacacccccttccctgccaaagcctgccccaggtgcctgtaagaacccctctattgcccccccctcacgtgcctcaacaactcggtgaacagcccgccgttgtccacgtattctctccaagcgctaatgcggtgctgaatcccaccctcct

SEQ ID NO: 170711 - DNA, 969 bp, Homo Sapiens
gcgggtgggcggccgggaggccggagcagcacggccgcaggacctgaagctccggctgcgtcttcccgcagcgctacccgccatgcgcctgccgcgccgggccgcgctggggctcctgccgcttctgctgctgctgccgcccgcgccggaggccgccaagaagccgacgccctgccaccggtgccgggggctggtggacaagtttaaccaggggatggtggacaccgcaaagaagaactttggcggcgggaacacggcttgggaggaaaagacgctgtccaagtacgagtccagcgagattcgcctgctggagatcctggaggggctgtgcgagagcagcgacttcgaatgcaaccagatgctagaggcgcaggaggagcacctggaggcctggtggctgcagctgaagagcgaatatcctgacttattcgagtggtttcgtgtgaagacactgaaagtgtgctgctctccaggaacctacggtcccgactgtctcgcatgccagggcggatcccagaggccctgcagcgggaatggccactgcagcggagatgggagcagacagggcgacgggtcctgccggtgccacatggggtaccagggacccgctgtgcactgactgcatggacggctacttcagctcgctccggaacgagacccacagcatctgcacagcctgtgacgagtcctgcaagacgtgctccgggcctgaccaacagaaaactgcgggccagtgtgaaattgggcttgggtgcctggaacaaggccgcccggtgtgggatgggggaccaattgtgccggcccaagccccccttcccttgcaaggcttgcgccaattcttgtaaaaaacggcaaagggggttccataaccgtgggcgaaaaagaggtgaactcccaactctgtggtgggcctgccacagggggaaagaggccacaaagaaaacttgccaacgcaggggggcctcccca

SEQ ID NO: 170712 - DNA, 892 bp, Homo Sapiens
gctctccaggaacctacggtcccgactgtctcgcatgccagggcggatcccagaggccctgcagcgggaatggccactgcagcggagatgggagcagacagggcgacgggtcctgccggtgccacatggggtaccagggcccgctgtgcactgactgcatggacggctacttcagctcgctccggaacgagacccacagcatctgcacagcctgtgacgagtcctgcaagacgtgctcgggcctgaccaacagagactgcggcgagtgtgaagtgggctgggtgctggacgagggcgcctgtgtggatgtggacgagtgtgcggccgagccgcctccctgcagcgctgcgcagttctgtaagaacgccaacggctcctacacgtgcgaagagtgtgactccagctgtgtgggctgcacaggggaaggcccaggaaactgtaaacagtgtatctctggctacgcgagggagcacggacagtgtgcagatgtggacgagtgctcactagcagaaaaaacctgtgtgaggaaaaacgaaaactgctacaatactccagggagctacgtctgtgtgtgtcctgacggcttcgaagaaacggaagatgcctgtgtgccgccggcagaggctgaagccacagaaggagaaagcccgacacagctgccctcccgcgaagacctgtaatgtgccggacttaccctttaaattattcagaaggatgtcccgtggaaaatgtggccctgaggatgccgtctcctgcagtggacagcgggcgggggagaggctggcctgctctctaaacgttggattctccattttgcccccttaaaacagctggcattttccttgggttggttcccttaaacaccacctgggtataattttttgaatacaag

SEQ ID NO: 170713 - DNA, 213 bp, Homo Sapiens
aaacggtaagacaaacatgatggaaatggtggtagttctgggcatttcggcttttcatttgatggcatatttcgctgcactaagttatctatgtccctctttactatgtgcaggtgcccttggatgtcaatgaagtgctgtgttgtctcatagacgcctccagcagagccagggtgctgcattccactgaccagtcttacgtttcagtgtcca

SEQ ID NO: 170714 - DNA, 311 bp, Homo Sapiens
cgagctcggtaccctccactagtgtaggcacagcagatcactgggatgcggttctgtgaagcaagtgccaaggataacttcaatgtggacgagatatttttgaaacttgtcgatgacattctgaaaaagatgcctctggatattttaaggaatgagttgtccaatagtatcctgtcgttacaaccagagcctgagataccgccagaactgcctccaccaagaccacatgtccgatgctgttgatttcctactttggagacaaagtggaaatgattcctggaaaggggaaaaaacgttctattctacactag

SEQ ID NO: 170715 - DNA, 246 bp, Homo Sapiens
atcccgaatctcgacaagttgtgcagctttcactgtaccatgtggcagaagactctactagatcagagttgtgggtcctaaaagctgttcagtgtgactgtgcccttacaccgtgcaccaagaagccttctagaagccgttgggcttcctctgacagactttggtggtggtattactagttggagggtgtccaggttcttagcgtcttgaacaaaaatgggacaaaatgcacaacttgtcgagatt

SEQ ID NO: 170716 - DNA, 121 bp, Homo Sapiens
aatctcgacaagttgtgcatctcattaatggacagaactggtattgagtttagacttgggccattttgacaactctgtgtgcttctcgagcttcccatgatagcaagaatggcagtcaagt

SEQ ID NO: 170717 - DNA, 311 bp, Homo Sapiens
tagaggttaccgaatctcgagaagtggtgcagaaactatcactacagagacatgagtgtgggactcccgatcagcattaataacattttttagctgttcatagattaaggaaagaccttccttgtcagtgaaaatcccaactatggtcaattctgcaataaaacgcaaatcagttcttaactgggtgatgttaggtgttttctcctctttccttgcttcaaaatgttttttccagacctgaagaagtgatggggcaaagtcagcataacgctggtgaaagagagagcagaggtgcacaattggtcgagatt

SEQ ID NO: 170718 - DNA, 267 bp, Homo Sapiens
tatggacaatgcgctacgcgatctctcgaggcgtagctgtgcttgaactcgcgcagcttcatgtggtgtgcctcctcaggcacaccacgtcgaggccggaagctcgacgccatcccatgcctgctcgacgctcgcgtcggcggcgagcgtgccgggtaagggctcttgcggatcgcccctgcgccggatgcgcgcccgggttcatcacggcgctgatgctgcgccattcatacttcgcgtagggaaacctctagatcaccgcagcac

SEQ ID NO: 170719 - DNA, 585 bp, Homo Sapiens
catgccctcacataccttactgatgctggcatgaacaaatacagatggtaatagactctggaatagttcctcatttggttcctctgctcagccaccaggaagttaaagttcagactgctgcacttagagctgtgggcaacattgttactggaactgatgagcaaacacaagtagttttgaactgtgatgctctttcacacttcccagcactcctgacacatcccaaagagaaaattaataaagaagcagtgtggttcctctccaacatcactgcaggaaatcagcagcaggtacaggcagtaattgatgccaatcttgtaccaatgataatacaccttttggataagggggattttggcactcaaaaagaagctgcttgggccataagtaacttaacaattagtggaaggaaagatcaagtggcttaccttatccaacaaaatgttatcccacctttttgcaacttgctgactgtaaaagatgcacaagtgtgaagtagtactcgatggataagtatatataaaatggtgagatgaggagaaacataggcatttatgagggtacgagtcgaatcgtaatcaggta

SEQ ID NO: 170720 - DNA, 617 bp, Homo Sapiens
tgtctgaggatcccccagccctcacataccttactgatgctggcaatgaacaaatacagatggtaatagactctggaatagttcctcatttggttcctctgctcagccaccaggaagttaaagttcagactgctgcacttagagctgtgggcaacattgttactggaactgatgagcaaacacaagtagttttgaactgtgatgctctttcacacttcccagcactcctgacacatcccaaagagaaaattaataaagaagcagtgtggttcctctccaacatcactgcaggaaatcagcagcaggtacaggcagtaattgatgccaatcttgtaccaatgataatacaccttttggataagggggattttggcactcaaaaagaagctgcttgggccataagtaacttaacaattagtggaaggaaagatcaagtggcttaccttatccaacaaaatgttatcccacctttttgcaacttgctgactgtaaaagatgcacaagttgtgcaagtagtactcgatggactaagtaatatattaaaaatggctgaagatgaggcagaaaccataggcaatcttatagaggtatgtgagggcggaggtatgttagggctg

SEQ ID NO: 170721 - DNA, 279 bp, Homo Sapiens
acctaggcaagcgatatggctgtgtacttgtaaggacaccagtcatatgggaccgaggcacactcttgtccagtatgacctcatttgaagttaactaattctatttgcaatggccctattttcaaaaaggtgaaccttttgagggacaggggttagacttcaacatatctttatttaggggtaggggggagacacaacttaacccataacacctaccaaccaagcttttcacataatgcctatcttctgcctcacccatatgcacaactggtcgagatt

SEQ ID NO: 170722 - DNA, 256 bp, Homo Sapiens
gtgctctagaggattacgacacttgaaaccgtaagactagatttcctgcagcttcgaaatgcaaacattgcctcagacaaaagctaaaactgttacagtcagaaccgaaaccacgagtgagaaggggctctgctcccagtacccacagccacggggagccaccgaccagcacgtcttaccattgttcacctggccgtggaccgcagtggggactgatgccacgtgagtgccgtttggtcttacggtttcaagtggt

SEQ ID NO: 170723 - DNA, 991 bp, Homo Sapiens
cggtacccctatggacaatgcctatcgcggggtactgtgaccagcaaaagcgtcagaacttgttcactacctggtcccatcacctacagcaagcctacatccagttccgtacagatattgccaggacgggatacctttccaatgctgatgagcgtcttcgctggcaggccagctccttgcctgctgatgacctttgcacagaaaatgccatcatgctgaaacgattcaataggtatccgctgatcattgacccctctggacaggccacagaattcattatgaatgaatataaggatcgtaagatcacacggaccagcttcctggatgacgccttcagaaaggacttagagagtgcactgagattcggtaacccccttctggtccaggatgtggaaagctacgatccagttttgaacccggtgctgaaccgtgaagtgcggcgaacaggggggagagtgctgatcactctcggggaccaggacatagacctgtcgccatcatttgtcatcttcctagcccacccgggatccaactctcgagttcccaccagatctctgttcccgggttacttttgtaaaccttcacagttacccgtagcagtttacaaagccagtgtctaaatgaagtacttaaagcagaaagacctgatgtggacgagaaacgatctgatcttcttaaacttcaaggggaatttcagctccgtttgcgtcagctggaaaaatctctactacaagctctgaacgaggtgaaagggcgcattttggatgacgacacgatcataaccactctggagaacctgaagagagaggctgcagaggtcaccaggaaagttgaggagacggacattgtcatgcaggaggtggagaccgtgtcccagcagtacctcccgctctccaccgcctgcagcagcatctacttcaccatggagtccctcaagcagatacacttcttgtaccagtactcctccagttttcctggacatttatcacaa

SEQ ID NO: 170724 - DNA, 297 bp, Homo Sapiens
acttgacaccgtatacttgacgtagaggtgcaggggcagcgtctcgttggcatcgtgggacagctttggggtccgaaaggcgaaggtcccagattcctgcatggtcaccggctccatgaacttgagcaagtcactgcccacgtgcagggaggaaccctgtgtctgcagaagcctctgaacgtcctctgtgggtttcccacggccacctccaccactcatccacaccttcacggtgtccaggttcttgccctggaagttcacatctgtcttacgtttcaagtgtaaggaatccgtgac

SEQ ID NO: 170725 - DNA, 954 bp, Homo Sapiens
  misc_feature (505)..(517): n is a, c, g, or t
  misc_feature (733)..(764): n is a, c, g, or t
ggaagagtccccgccgctcagcgccaatgcttttaaccctcgtgaatgccagtgccagcctgcccgctgctatgcccataaccgctgctgacggacggagtgaccacacactcacctcgccaggtggcggcgggaaggccaaggtctctggcagacccagcagccgaaaagccaagtccccggccccgggcctggcatctggggaccggccaccctctgtctcctcagtgcactcggagggagactgcaaccgccggacgccgctcaccaaccgcgtgtgggaggacaggccctcgtccgcaggttccacgccattcccctacaaccccctgatcatgcggctgcaggcgggtgtcatggcttccccaccccgcaccgggcctccccgcgggcagcgggcccctcgcgtggcccccaccacgcctgggacgaggagcccaagccagctgctctgctcgacagtaacgagacactctccgacagcgagtgacatcagaacagggcnnnnnnnnnnnnncggtgtcaggtcccagcgagccacaggaacggccctgcaggagcagggcggctgccgactcccccaaccaaggaaggagcccctgagtccgcctgcgcctccatccatctgtccgtccagagccggcatccttgcctgtctaaagccttaactaagactcccgccccgggctggccctgtgcagaccttactcaggggatgtttacctggtgctcnnnnnnnnnnnnnnnnnnnnnnnnnnnnnnnncacggcaggcgtgtggcagccacacgcaggcggccagggcggccagggacccaaagcaggatgaccacgcacctccacgccactgcctcccccgaatgcatttggaaccaaagtctaaactgaaccttgcagccccccggggccctccctccggcctccaattccgttttacggttctggaaaaaatgga

SEQ ID NO: 170726 - DNA, 827 bp, Homo Sapiens
  misc_feature (692)..(693): n is a, c, g, or t
  misc_feature (741)..(753): n is a, c, g, or t
ctggttgccctagcttccccccctatttttgtgtcttttattaactagtgcattgtcttattaaatcttcactgtatttaatgcaggatgtgtgcttcagttgctctgtgtattttgatattttaatttagaggttttgtttgctttttgacactagttgtaagttactttgttatagatggtatcctttaccccttcttaatattttacagcagtacgtttttttgtaacgtgagactgcagagtttgtttttctatatgtgaaggattacaacacaaaaagttatcctgccattcgagtgctcagaactgaatgtttctgcagatcttgtggcatttgtctctagtgtgatatataaaggtgtaattaagacagagttctgttaatctaatcaagtttgctgttagttgtgcattagcagtataaaagctaatatatactatatgctctggcaacagttttaaagcctctgcataattgataataaaaatgcatgacattctggtatttaatagacttttaaaatcataattttaggtttaacacgtagatcttggcacagttgacttttggacatagcaaggccaaaaataacttcctgaatatttttttcctggggtataaggggaaaggccaattttcacatataagtgggctaaccaatattttcaaaagaacttcatcattgtanncactacaacagtaactagccccttattatggggacaggtcccctattnnnnnnnnnnnnnaaattactctagcaacctattacggtatttaccccgattgatcttttttccaaaaaccccatccccccgataaa

SEQ ID NO: 170727 - DNA, 248 bp, Homo Sapiens
tatggacaatgcgctacgcggtactgcatgtagttgcgctcgatgaggtccaggtcgcggatgaagcgcgtcaggtcgggcgccttcggtgtggccaggccgaatccgtactcggcgttgagcttggcgaacgacgcagtcagcatctcttggatctcgccgcccttgcgctgggcttcctcgagccgctggcgcagcgccgcgcacatctccgagaaggccttcttggcgcccagattcagcaccgt

SEQ ID NO: 170728 - DNA, 251 bp, Homo Sapiens
  misc_feature (159)..(207): n is a, c, g, or t
tccgacacttgaaacgtaagacacatacttaatagggattgttgtctggaaagaaatgcatgtgatcaagccactgaaaactcccccaaaacagtacagtctctgacatctctgtttaccttactcatttgtataatctttttttgggggggcagggtnnnnnnnnnnnnnnnnnnnnnnnnnnnnnnnnnnnnnnnnnnnnnnnnntctgtaatctccctcttacgtttcagtgaacggatcctctgaac

SEQ ID NO: 170729 - DNA, 537 bp, Homo Sapiens
accacttgaaaccgtaagacacaagccacgcctcgctgaacctatcccgggacaggcctcttcctcggccttcccatattggtggcagtggtgccacactgaacagagtggaagacatatgccatgcagctacacctaccggccctgggacgccggaggacagggcattgtcctcagtcagatacaacagcatttggggccatggtacctgcacacctaaaacactaggccacgcatctgatctgtagtcacatgactaagccaagaggaaggagcaagactcaagacatgattgatggatgttaaagtctagcctgatgagaggggaattggtgggggagacatagccccaccatgaggacatacaactgggaaatactgaaacttgctgcctattgggtatgctgaggccccacagacttacagaagaagtggccctccatagacatgtgtagcatcaaaacacaaaggcccacacttcctgacggatgccagcttgggcactgccgctctactttacaccaaccctgttctggt

SEQ ID NO: 170730 - DNA, 526 bp, Homo Sapiens
agacacttgaaacgtaagacactggtctatcaaatgacgttagtgatagctgagttctaatactgttacatcccattactgaacattagggatccaaacaaacttcatcatacttcagatggaaggctttaatttaagcaaatatatcaactggtgatccatcaggcaaaagccatggccaacctttgaactgccatgcaggaccctgcacaaaaacggctacaacgcggtcccagtcttgaggcataagtttaaggggctggtctactactctataaggtactgtaacactaatagcagtgccccctggttgcatctggtcttttcttctaggtataaagagttacattttctcgttgacaaccttgtgtcttcttttcatctgatgggacaaatttcaggtcctgtagaaggtctttggcattaagcatggtaattaaagaggtggtaagctgcaggaattatgataatgggtgtacgagatcctttcttctgataggggggaggtcttacggtatcaagtggt

SEQ ID NO: 170731 - DNA, 347 bp, Homo Sapiens
agaccttacactgaaacgtaagacattgatgaggaagatgatgatgtccagatctgtagaaggtctttgcattaagcatggttattaaagaggtggtagctgcaggaattatgataatgggtgttcgagatcctttcttctgatttgggggaggtcttgcttgagaaactggtcttggtactggctgggctgcaggagtctgagtcttccgggcagatgcaccctccgttacagatttcagtgtcataccatggtaggttcccatagtgtcaattttgaagccttccgtttcttcttttcctttgaatctttcctgatcgtatctgtataggcagctgggataggcc

SEQ ID NO: 170732 - DNA, 190 bp, Homo Sapiens
  misc_feature (45)..(63): n is a, c, g, or t
tagaatggtgaaggtgaaactagaagatgaggaggaggagggttnnnnnnnnnnnnnnnnnnnctgggactgggatgaaggagttggaaaactcgccaagggttatgtctggaatggaggaagcaacccacaggcaaatcgacagacctccgacagcagttcagccaaaatgtctactccagcagacaag

SEQ ID NO: 170733 - DNA, 245 bp, Homo Sapiens
attattccggtgtctcatcaaaattatgtgcctgtaaagcaaattatacgcatctagtacttatgggaagaacgaaaatgctttcaggacatgtattttaggtttagcgaaacctacttatttccgggttttatgggagatcatttttctaaacgtttctttactctaagaaattcattaattcatactaccctgcatatgaatttgttaaattagggcttctgaatacatggtatatgtctctc

SEQ ID NO: 170734 - DNA, 296 bp, Homo Sapiens
cagaaccagtactggagctgggtctccaggtacgtccatctcatgccttgtttgcatccagcgcctatcagccactcaccacgacgggacgcggaagtggcaggtgacgggggtgtgtgccagcagatgcggatgccaggaagagtgtgagaacaggggtgggattaccgtctgtctgggaggggctccaggtacccctcttccccgtcagacccactgggagatggctgcttgccagccccccagaaggaacatctgtcttacgtttcaagtggacgaatcctcggatcacctcg

SEQ ID NO: 170735 - DNA, 1369 bp, Homo Sapiens
tcttggagagcacagctctggtgagacggcctgggcaggcagaggctgagaaaccagggaggatagaggagaaaagggcttgggcccccagccccagaagatgctggaccccaggtgggagacccaacagtgggtgcagtttctcagtagggctggagccaatggtgggggtggccccggcaagcctggctcctcacatcccaggggttggcttctgatttggggcttgggctccaggcactggcttctcttctctgtgtccttagcatttgagagaagaggccaggggccttgttcatggatccctggacccaaggcagatgtccaggctttatcctcctgaggatgaggagtctgaccagcccaaatctgccctggccggcctgaccggggcaaggcagtccaagagagttcagtgaggaccagctaggctctcccaggtgcaatgtgggtgcagggccctcatgtccccctacccctgcctgtgatggagtgttctgaggggctttggcatttgctggaagcacagggagttccaaatgagagggagcttctgtggcttgagagcctctggggccttggctgccagagcacgaggcaggccaggacctggagagcccagaccctgtctccaggaggccaggaggccagatgggggccttgcctgaaagactggtccccttgatcgctggaggcatggtgggtggcaaccaggggctgggcagggcttagggtggtgtgggccaaaccccccttgggggttggcaaagccgcctgtcaggcctcctggtgggggcccctggacacagggagcagaccctctgcctcatggggtaggagtggctgcctcctgtgttctctggatttcttctcccaacaactacaaccctggacgtgcctccccaggcctcttgcctgtaaatagaagcccgcaaactgtacagaattacagaggcatcgagactgggccctgggagttgccatctgagagccgatggccccagcatcccccaggtgccctgcctggcaccacagtgaacctggcctcagcgtggcaaaagcaagtaaataattttcgtaggcagcgtggctccagagagccccctgaagacagtgtccctccctcctgtgagtcctttcccctgtacagaacctgcctggggtgggtgggggtctgccattccctcccccaggccttccctgccccttctctcccctgtaacctgtttattaaccatacctgtcctgagttcatggcccaaaccttaaataagaaaaaccaaagaaaaagacagtggaaaaaagagaccaaggcgcctgccccactgcgggtactctcctgttccagccttgtgaaggaactggcttc

SEQ ID NO: 170736 - DNA, 911 bp, Homo Sapiens
accgtagttaaatagctttactccagtggaatccttctgtacatgatgaagccagagaaaagatgctgactcagaaaaagaagcctgaagaacagcacaataaaagtgttcatgttgctggcactgtcatgggtaaagcctggctcagtacagcctttcagtaaagaagagaaaacagtggcgacttaagagatggtgaatctggtgcaccatgcactatcctgctagactctgtgcctagttcaagctgaccaatggcagaggactgcctgaagagtaaaactgtgtgaacaatgactgactgccagtgttttccatgtatgcataggttctaacagcagggtttggaaacctgtctctaagtaatgcattacttctgtcagaagtgtcttagggtggttatctagttcagtactccaaattattggggaccttgaggcttaagtaagtatttttctgaatataatgctaaaggtaagttgcattcatttaaactaatagagcagacagaattcagcactacttaatagtttataaatcagtggtttcagttgtatatatgttaggaaatggagaggtatagagagagcaggttccatagctcagcacttttaagtggaagatcatttgaatctcagtcttcagcctgcactgatttgtagcctgcactgtcttactgatttacaaactgaaatcactgagaaatgtctttagttcagtgagaagaaaccagaacacttgttcctagtgttgtgttgttttttttaagcaaattacttactgtatttttatggcaggagggagaaaaagtgttacaacggtttctaatgaagtccggtatttaaatgataaatgactaatgtgtttagtagagacaaaataaaccaataaatgattgttctttgccattt

SEQ ID NO: 170737 - DNA, 673 bp, Homo Sapiens
  misc_feature (45)..(92): n is a, c, g, or t
cagatcataatgcagtgcatttccttagcccttagagtttcttgnnnnnnnnnnnnnnnnnnnnnnnnnnnnnnnnnnnnnnnnnnnnnnnncatatttaattactgtaaacaggtactgctttatgtttattttctctctacttcaaccaaaatcagatctttgaggttttgctgacattgttggtggttttgcacatgttctttctaattggatttatgaatagttctatgggttttcaaagatgaatcatgctaagaacacttctgctttttgatccactgtttgcagcagaattatatatatgtatagggaaaaatcccactttgaataacccatgttttgtatttgggaaattgtttttaaaaataaaaaggaaaggaaatatataaagctgttatttattctgcatttcttacatatctatcgcttgtcagtatacccgttttggtatatattgcctctgcacatctacatttgtatatgcaacagtgagctttatatctacataaactgtaaataatcctttctgtgaaaggatcatcatatcaagatgataccaaaagtatgtaaaaagaaacctgcattattttgtaattatttcttatagatatttcatggtaagattagcagccaataaagttacttttttgcctttaaaaaccaaaagacc

SEQ ID NO: 170738 - DNA, 767 bp, Homo Sapiens
  misc_feature (660)..(707): n is a, c, g, or t
aattcggaacgaggcacttcaggagagaacttcatagcacaatgtctttctataagatatttttaatgatttagtattttacaacatttgtttaccatattttgatataccatttttttctatctgcccagttttattaaaaaaactatatattattttctaaagaaacaatcatatttttatacaaaattatgttttcaggtaacgaaatagatgtagggtacagtggaacataagcagtgttacccctggctgggagtcagtattatacaacaaatggtgagctggaacatgccctgtctgtgctgtccctcctgtgctgggtcgcggatgtgtaggcaacattgccttatcacgctaggttcacctgacactttaaaaggaaaaaaagttccatagagttctgtggtcacaaaattgttttgcttttatcaaatactttaatagaaccaaagttgcagatattggaatgtatggaagtatctcagtctctgcataagaggattaaagtatgaaaggatcatttaatgactgttttacttataagtcattaagtaatccaccatttcttatggatgatgcttaagcctggtgaggtttgtactctaaggagcccagatcataatgcagtgcatttccttagcccttagagtttcttgnnnnnnnnnnnnnnnnnnnnnnnnnnnnnnnnnnnnnnnnnnnnnnnncatatttaattactgtaaacaggtactgctttatggtttattttctctctacttcaacca

SEQ ID NO: 170739 - DNA, 768 bp, Homo Sapiens
  misc_feature (632)..(632): n is a, c, g, or t
  misc_feature (654)..(654): n is a, c, g, or t
  misc_feature (661)..(708): n is a, c, g, or t
aattcggaacgaggcacttcaggagagaacttcatagcacaatgtctttctataagatatttttaatgatttagtattttacaacatttgtttaccatattttgatataccatttttttctatctgcccagttttattaaaaaaactatatattattttctaaagaaacaatcatatttttatacaaaattatgttttcaggtaacgaaatagatgtagggtacagtggaacataagcagtgttacccctgggctgggagtcagtattatacaacaaatggtgagctggaacatgccctgtctgtgctgtccctcctgtgctgggtcgcggatgtgtaggcaacattgccttatcacgctaggttcacctgacactttaaaaggaaaaaaagttccatagagttctgtggtcacaaaattgttttgcttttatcaaatactttaatagaaccaaagttgcagatattggaatgtatggaagtatctcagtctctgcataagaggattaaagtatgaaaggatcatttaatgactgttttacttataagtcattaagtaatccaccatttcttatggatgatgcttaagcctggtgaggtttgtactctaaggagcccagatcataatgcagngcatttccttagcccttagagnttcttgnnnnnnnnnnnnnnnnnnnnnnnnnnnnnnnnnnnnnnnnnnnnnnnncatatttaattactgtaaacaggtactgctttatggtttattttctctctacttcaacca

SEQ ID NO: 170740 - DNA, 466 bp, Homo Sapiens
atcagtattgggaaattaagtgaaaagtaattaagaagtagtagtcctgagagagagaaatgaaggctgaaagggaatcaagaaaaccatattccatcccagatctgccactacccagtctgggaaaggcatttattgtcctggcctcagctgtagaatgagagtggctgacaatctatgtcgtctggagtcaataacagctctacaatcttgctgtcctaatcctaccataaggagccaatgctaacgtacacatactgaccatataagcaggtactcaaaatgaaaagggaataaacactgagtacatggggacacttataaggaagacaagagaaatacataagtatgctgcttacaacatgcatcaatgtaactgctttatccacactaattagaatacatacacacaaaatgtgcatcatatatcactttcaaaaattccatgtccatgagactattaaca

SEQ ID NO: 170741 - DNA, 793 bp, Homo Sapiens
tgacctcaatctcccggaagtggcgatacacgagaggcttgcagatataggcatgcaggatctcctcagcattcagctagcatcaccaagcacagcaccagtgtccgatcagcctcacccgagaccacatagtctattacactgaaggcatcaagcaggacgtcgaagtacacattctcatagccacatagcaccttggcgagataggagagatggaaccggaaatcctgaatggctctagtacacgtccttgggtttagtatccctgaatgatggagaacacatccccaagctccttgtccttcttgctaaacaggaactcccagtaagtgcaagagtgcaatgtaactctaggggaggcatagaatgacattcttccagaggcgggccagcaacaccccacagtggatgaactgaaactccaggagggctactgtgttaccaatgctggggataagtggatcttagaacctcttgatgaggacattcatgaaacggaaaaagagcctcatgtagtctactgggttcctgtacacgtagaattgatcaatgcaattctccagaagccggatgaagcacaggtgggtcttgtccatattttcatcatccctgttgggtgccagcatgccaaatttcccttctattccttttatcctgctgcctctccacctgcccctttcatccttttcagactctagagccttgagttccctgttgtagttgtcctcctcctggtggagcagcttttctactcctccgggtagttggaagagagaaggaatgcttgcactgc

SEQ ID NO: 170742 - DNA, 1111 bp, Homo Sapiens
ggggtgggaaggcagctgaactcggcgcctggaaagatggaggcagcggagacagaggcggaagctgcagccctagaggtcctggctgaggtggcaggcatcttggaacctgtaggcctgcaggaggaggcagaactgccagccaagatcctggttgagtttgtggtggactctcagaagaaagacaagctgctctgcagccagcttcaggtagcggatttcctgcagaacatcctggctcaggaggacactgctaagggtctcgaccccttggcttctgaagacacgagccgacagaaggcaattgcagctaaggaacaatggaaagagctgaaggccacctacagggagcacgtagaggccatcaaaattggcctcaccaaggccctgactcagatggaggaagcccagaggaaacggacacaactccgggaagcctttgagcagctccaggccaagaaacaaatggccatggagaaacgcagagcagtccagaaccagtggcagctacaacaggagaagcatctgcagcatctggcggaggtttctgcagaggtgagggagcgtaagacagggactcagcaggagcttgacggggtgtttcagaaacttggaaacctgaagcagcaggcagaacaggagcgggacaagctgcagaggtatcagaccttcctccagcttctgtataccctgcagggtaagctgttgttccctgaggctgaggctgaggcagagaatcttccagatgataaaccccagcagccgactcgaccccaggagcagagtacaggagacaccatggggagagaccctggtgtgtccttcaaggctgttggtctacaacctgctggagatgtaaatttgccatgacttcctggaggacagcagcatggagaaagatcctagaaaaggcctctgacttccctcacctcccaaccatcattacaggaaagactgtgaactcctgagttcagcttgatttctgactacatcccagcaagctctggcatctgtggattaaaatccctggatctctctcaggtgtgtataggtacatcttcatatgctggcaggaacacctataatacagatctcagaagcaatacctgac

SEQ ID NO: 170743 - DNA, 915 bp, Homo Sapiens
atgacagtcgatattagcaggctggtacggtccggaatgcccgggatatcgtcgaccacgcgtccgccctggtgtgtccttcaaggctgttggtctacaacctgctggagatgtaaatttgccatgacttcctggaggacagcagcatggagaaagatcctagaaaaggcctctgacttccctcacctcccaaccatcattacaggaaagactgtgaactcctgagttcagcttgatttctgactacatcccagcaagctctggcatctgtggattaaaatccctggatctctctcagttgtgtatttgttcatcttcatatgctggcaggaacaactattaatacagatactcagaagccaataacatgacaggagctgggactggtttgaacacagggtgtgcagatggggagggggtactggccttgggcctcctatgatgcagacatggtgaatttaattcaaggaggaggagaatgttttaggcaggtggttatatgtgggaagataattttattcatggatccaaatgtttgttgagtcctttctttgtgctaaggttcttgcggtgaaccagaattataacagtgagctcatctgactgttttaggatgtacagcctagtgttaacattcttggtatcttttgtgccttatctaaaacatttctcgatcactggttttcagatgttcatttactatattcttttcaaagattcagagattggcttttgtcatccactatggtatgttctgtttcattgacctctagtgataccttgatctttcccactttctgttttcggataggagaagatgtaccttttttgtcaactcttacttttatcagatgatcactcaccgtattggatcttaattgtctctcaaataactatttaggttatacatttaac

SEQ ID NO: 170744 - DNA, 1238 bp, Homo Sapiens
aatccatggagtccatgcgtggcatttgcaagcacagcttcgctccaaaagaggctgagaacagtcgcctgtgcatgcagattaagaatctggagcgcagcgggaatcagcataaggcagaagtggaggccatcatgggagcagctgaaggagttgaagcagaagggagaccgagacaaagagagcttgaagaaggccatccgagcccagaaggagcgagccgagaagagcgaggagtattctgagcagctacacgtgcaactcgctgacaaggatctttatgtcgctgaagctttatccactctggaatcctggaggagccgctacaaccaagttgtaaaagaaaagggagaccttgagctggaaattatggtcctgaatgaccgggtaacagatcttgtaaaccaacaacaaaccctggagaagaagatgcgggaagaccgggatagcctggtggagagactacaccgtcagactgctgagtattccgcattcaagcaggagaatgagaggctgaaggccagctttgctccaatggaggacaaactcaaccaggcacacctcgaggtccagcagctgaaggcctcagtgaagaactacgaggggatgatagacaactacaagagccaggtgatgaaaacaagattggaggctgatgaagtagctgcacagctagaacgctgcgacaaagagaacaagatcccttaaagaccagatgaacaaagagatcgaggcggcacgacggcagttccagtcacagctggctgacctacaacagctccctgacatcctcaagatcacggaggccaagctggctgagtgccaagaccaactgcagggctacaagaggaagaacatcgacctcacagccatcatatcagaccctgcgcagccgggtaagggactggcagaagggatcccacgaactggcccgagccaggggcccgcttaccgagatgagctgcacgcccccccagggaggaccccttccttttttcttggctgccgatttctgaaaagagtgagctatcatcagtgctgtgaaataaaaagtctggtgtgctaaaaattccttccgtttccccgacaatcttcttgtcggcccgccctcgggccctcaaaaagtttccaaaaaccttctttttggggcccgggcccccccagggtaaaggaaaatgggccaatacttggttccaaggaaatcctgggaaaggactaggggcctgggattccccccc

SEQ ID NO: 170745 - DNA, 488 bp, Homo Sapiens
  misc_feature (366)..(378): n is a, c, g, or t
agactcaatcgggaatctctgtcgtatatacttaagggcatctaggctctttcaagctgactattgggaaatcaaccttattaatttgggggggaggatggggaaaagagctgagagtttatgctgaaatggattcatagaatattggtaaatctattttatagtgtttgtccgttttcttaactgttcattcctttgtgcagagtgtatatctctgcctgggcaagagtgtggaggtgccgaggtgtcttcattctctcgcacatttccacagcacctgctaagtttgtatttaatggttttggttttcgtttaggttggtttcttgaaaatgagagaagagccggagagatgatttaacttacnnnnnnnnnnnnnatatttattcaaaacaggatctcattcttttgccccaggctgaagtgcaggtgcacgatcagagcactttgcagccccaaggtcccaggctaaaacaatcttcccaattc

SEQ ID NO: 170746 - DNA, 316 bp, Homo Sapiens
cgagctcggtacccaattcatagaggcccacggattctcaagattccttatttgcctcgagaaccttgtttaaaagcagaagactgcaagattccttcgcctcagaaaccaatctagattttagaagtgggctggctatagtgagccaacatgatttagaccagcttcaggctgatgcaatcaatgcttttggagaatcactaccaaagaaacttctggacattgaaggattatattccaaagttcgatctcgatatagtttcatacaggctcttgtcagacgtatccgtgcctctatgaagggatcctcgggcgc

SEQ ID NO: 170747 - DNA, 305 bp, Homo Sapiens
cattcatagaggcccacggatacgtctgacaagagcctgtatgaaactatatcgagatcgaacttttgaatataatccttcaatgtccagaagtttcttttgtagtgattctcccaaagcgttgattgcatcagcctgaagctggtctaaatcatgttggctcactatagccagcccacttctaaaatctagattggtttctgaggcgaaggaatcttgcagtcttctgcttttaaacaaggttctcgaggccaaataaggaatctagagatccgtgggcctctatgatggaatcctgtgaacac

SEQ ID NO: 170748 - DNA, 1325 bp, Homo Sapiens
tgattgtgagactagctcaatgccaagtctatgacatgcgcccagaaacggacccgcagagcatgttggcatgagagaccctccaatgttcatccctaccccagtggatcgctaccgccagattctcctcccagctctccagctgtgccaggtcatcctcacatctagtatggcccagcacttgcaggcagcagggcaggtatgcagtttcttatttcacattctgataccatacaagcaattctgcgctgtcaggatgttagtgctgggtctttgcaggaatggctctgctgacaggaattataagtaaagcagcacttcctggaatattaagtgaacttgacgttgatgtaaatgaagggtctctaatggagctacagggacatattggaagattccagcgccagtgcttaggactactaagtcgctttggtggctctgacagactgcgtcaggtttaaatttcaagacgataatgtggagggagataaagtaagcaagaaagatgagattgaactggctatgcagcagatttgtgccaatgtaatggaatattgccagtcactcatgttacagagttcccctaccttccagcatgctgtgtgtctcttcactcctaagcctttcagaaacagttaatagagatggaccgcggcaagatacccaagctccagtggttccatactggcgcctgcctggttttaggcattatcatctacctgctgaaacagagtgctaatgatttcttcagctattatgacagtcatcgaccagagtgtcagcaagctacaaaatgtagagcagcttcccccagatgagataaaagagttgtgtcagtctgtgatgcctgctggtgttgataaaatctccactgctcagaaatatgttctagcaagacggcgcttggtgaaggtgatcaacaatcgagctaaactgctttccctttgttcttttatcatagagacctgcctatttattctttggcgccatctggagtactacttgttacattgcatgcccacggattctcaagattccttatttgcctcgagaaccttgttttacaagcagaagactgcaagattccttcgccctcagaaaccaatctagatttagaagtgggctggctatagtgagccaacatgatttagaccagcttcaggctgatgcaaatcaacgctttggagaaccactacagaagaaacttctggacttgaaggattactattcaaaagttcgatctcgatatagattcatacaggctctgtccagacgtatcccgtggcctctgaggattcaggactgagagccgtgcttatgctctc

SEQ ID NO: 170749 - DNA, 496 bp, Homo Sapiens
  misc_feature (61)..(71): n is a, c, g, or t
tgtgtccaaggacttatcgaatgtgtcatgtggcgtgtgtagctgtgtgatcggacatggnnnnnnnnnnntcccctatctgcccagtcaaaaataaatgtacacctgaaaatcagatgcaacactaacttgcaaagattcccacaacataaaaaagaagtgatgctttcatgtgctggccgtggacaatgtggaaaaactgaagcgtatacagcgctgttgtcagaacaactcatgtgcagacaggggtggatgtggcgtgccgggcagtgtggctatgcaatcagactgggatgaagagaatacgaatacttaccagagcctgagagtgaaaacagagattaaagaatcaatcattaaggtgaacgttcaccagtgaggtttacagctttggaaaacagtgacaggaagtcctgacagaagggatggacacagggcagcaggaggcatcctggacatgggctctgcttcccgctgatggattcaggcggcaacg

SEQ ID NO: 170750 - DNA, 686 bp, Homo Sapiens
  misc_feature (627)..(627): n is a, c, g, or t
ggatttctagtagtctgatgtatttttctgaggaatagtttgtgattccaatgcaggtgtcttcattaccattacctctacactgcagaagaagcaaaactcctttattagaattactgcacatgtgtatggggaaaatagttctgaaaggctagaatgatacaagtgagcaaaagttggtcagcttggctatggagtggtggcaataatctctaaacattccaaaagaccatgagctgaacctaaactcccttggaatctgaacaaaggaatataaaattgccatttgaaaactgaccagctaatctggacctcagagatagatcagccagtggcccaaagccatttcaagtacagaaattatagagactacagctaaataaatttgaacattaaatataattttaccactttttgtctttataagcatatttgtaaactcagaactgagcagaagtgactttactttctcaagtttgatactgagttgactgttcccttatccctcacccttccccttccctttcctaaggcaatagtgcacaacttaggttatttttgcttccgaatttgaatgaaaaacttaatgccatggatttttttcttttgcaagacacctggtttatncatcttgtctaaaggtaaatgtcccccttagggcttttgaaataaatttcctttttgta

SEQ ID NO: 170751 - DNA, 609 bp, Homo Sapiens
atcagaggttacctcatagaggccacggagcaggtgacctagtgactgtgggagctcctccttccctccccacccttcatggcttgcctcctgcctctggattttaggtgttgatttctggatcacgggataccacttcctgtccacaccccgaccaggggctagaaaatttgtttgagatttttatatcatcttgtcaaattgcttcagttgtaaatgtgaaaaatgggctggggaaaggaggtggtgtccctaattgttttacttgttaacttgttcttgtgcccctgggcacttggcctttgtctgctctcagtgtcttccctttgacatgggaaaggagttgtggccaaaatccccatcttcttgcacctcaacgtccgtggctcagggctggggtggcagagggaggccttcaccttatatctgtgttgttatccagggctccagacttcctcctctgcctgccccactgcaccctctcccccttatctatctccttctcggctccccagcccagtcttggcttcttgtccctcctggggtcatccctccactctgactctgactatggcagcagaacaccagggcctggcccagtggatttca

SEQ ID NO: 170752 - DNA, 911 bp, Homo Sapiens
  misc_feature (307)..(326): n is a, c, g, or t
  misc_feature (328)..(341): n is a, c, g, or t
  misc_feature (343)..(356): n is a, c, g, or t
  misc_feature (358)..(359): n is a, c, g, or t
  misc_feature (361)..(361): n is a, c, g, or t
  misc_feature (363)..(366): n is a, c, g, or t
  misc_feature (371)..(372): n is a, c, g, or t
  misc_feature (374)..(374): n is a, c, g, or t
  misc_feature (379)..(503): n is a, c, g, or t
  misc_feature (543)..(543): n is a, c, g, or t
  misc_feature (560)..(560): n is a, c, g, or t
  misc_feature (598)..(598): n is a, c, g, or t
tgatcagaggattccaatcatagaggccacggactggaggcttgagagctccaacgggaagatggcttcacggaggtcagaagagaaggaggccggcgagatctgaacccgtctcccgggtgctgtaaatagtctgataaacgttcacacagtctaaaattaccctttatatttgctgaatacaactcatctttggtagtttaaaatttctattgtttgggagctagctgtgagtttctagaagtgtacagagttgctcctgtgttcccgggtcatgttgagtaggaataaataaatctgatgctgnnnnnnnnnnnnnnnnnnnncnnnnnnnnnnnnnncnnnnnnnnnnnnnncnncncnnnnccccnncnaccannnnnnnnnnnnnnnnnnnnnnnnnnnnnnnnnnnnnnnnnnnnnnnnnnnnnnnnnnnnnnnnnnnnnnnnnnnnnnnnnnnnnnnnnnnnnnnnnnnnnnnnnnnnnnnnnnnnnnnnnnnnngcgagacccacccgcatatcccccgcccacccaccaccanaccgcgggtgcggccgnaaaaagccgcggaggccacctaccgcgacggccggatncagccggcgcgccaggccgcccgtgcctcgcctcccaatactgttgtctctgtttcctcccttatgacgaacatcctctcgatcgcccccccatttacacgatagggcgggtcgtccctctttttcccccctatcgaaacaaagagaaaccgttttcgccccgcgggttaatacaacccacagaatttcgctttcttcggacacgcccatcccctctgggtgtggggtatctttaccagaagcggcctctttcttgcgccttattttcttattccccgtagcgtccgcgcgtttcatccccgcgccctcttta

SEQ ID NO: 170753 - DNA, 389 bp, Homo Sapiens
tcgttcagtggatcccatatagaggcccacggagatctaagctggctgtcttgtgtgcagcctgagttggggtggtgcaggccggtagtctgcccgtcacttgtggatcatagccctgggcctggcggcacagcagcacttgcgttctcggggctgtcgatttcctgccacctgggcagataacctggagatttccaccttttcttttcagcttgattgcatttgactatattttacagccagtgattgtagtttcatgttaatatgtggcaaaatattttggtaattattttctaatccctttctgagtactctggggccctgcatttatgaggcacctaccttcattttgctaacgcttattctgaataaaagtttttgattcctta

SEQ ID NO: 170754 - DNA, 606 bp, Homo Sapiens
aaaggattaaatcatagaggccacggcggagatctatctgcgcagcgtgggctggggcaccatcttccagctgcccttcaagcacgtgcgtgactaccgcctgcgccacctcgtgcctttctttatctacagcggcttcgaggtgctctttgcctgcactggtatcgccttgggctatggcgtgtgctcggtggggctggagcggctggcttacctcctcgtggcttacagcctgggcgcctcagccgcctcactcctgggcctgctgggcctgtggctgccacgcccggtgcccctggtggccggagcaggggtgcacctgctgctcaccttcatcctctttttctgggcccctgtgcctcgggtcctgcaacacagctggatcctctatgtggcagctgccctttggggtgtgggcagtgccctgaacaagactggactcagcacactcctgggaatcttgtacgaagacaaggagagacaggacttcatcttcaccatctaccactggtggcaggctgtggccatcttcaccgtgtacctgggctcgagcctgcacatgaaggctaagctggcggtgctgctggtgacgctggtggcggccgc

SEQ ID NO: 170755 - DNA, 209 bp, Homo Sapiens
aggaaacttcacccggatgaaatggacaccgactctgaatacattcttttctatgagcagcaggcgatagactatgcaccatttctgccaaagactgatggcaaaaagatggcagacacaagcagtatggataaagactacgagtctgattacaaaaagtactgtgtgttacagtaaagctaccactctggctgctagtcatgcttgtc

SEQ ID NO: 170756 - DNA, 247 bp, Homo Sapiens
acaatcatagaggccacggcagggaaccactcagggggtttatctggggcattctgtgcatacgtaactgagaaaggtatgttgttacctaatgtatgctttggataattgggaccaagagacatggtattctgaatagcagccaaatatatgaggtcaaggtgacttcctctagcaattaggacagctgtcatggaagagtaggccagacccgatttccttcttaagtccgtgggcctctatgatg

SEQ ID NO: 170757 - DNA, 448 bp, Homo Sapiens
ttcaagacggggtcggcacaagaaaatctcttaactcggctctgacccaccccaacctccctctgtacttcaacacacagctcccacccgctcaaggccccgtactccaaaacgcttacacagtaaccagcctaggattgagaaagcatccatgggctcaggcagacggccagccagctggtgggggggtgaacaactgtgttctgggacgccagccagttatggcatccggggaactctggggaggagaagggagaaccaaggtgcacaccttcgaagccctagagtccaaagggaacatcgtccatcgtgatggggtccagccgaagtgcccacgaacacagactgccctgcgcattggggttgggagcacatggccactggctaccgcccaagtgctgcggagtgagaggcgagaaggcatcctgggagtccagaattgccccga

SEQ ID NO: 170758 - DNA, 1010 bp, Homo Sapiens
  misc_feature (799)..(799): n is a, c, g, or t
  misc_feature (990)..(990): n is a, c, g, or t
cgctgatgaggcatccgggaagctctaggtgaagttagtgtccacgtggacagctctttactttgtacttggtcctcagaatctcaccaggaagcagctagtaatgagaatgataaaaaacctggtaactacaaatctatgttacgaccagaggttggcaccacttcacaagattcagctctcttagatcaggaattgtataactccttccatttctggaggactcctcttcctgaaatagatctagacatagagcttgaacagaactctgggggaaaacccagcccagagggaccagaggaagaatctgagggccctgtgcccagttctccaaacatcaccatggccaccagaaaggaactggaagaaatgatagaaaatctagagccccacattgatgatccagatgttaaagcacaagtggaagtgctgtccgctgcactacgtgcttccagcctggatgcacatgaagagaccatcagtatagaaaagagaagtgatttgcaagatgaactggatataaatgagctacccaattgtaaataaatcaagaagattctatgcctttaatcagcgatgctgttgagaatatggactccactcttcactatattcacagcgattcagacttgagcaacaatagcagttttagccctgatgaggaaaggagaactaaagtacaagatgttgtacctcaggcgttgttagatcagtatttatctatgactgacccttctcgtgcacagacggttgacactgaaattgctaagcactgtgcatatagcctccctggtgtggncttgacactcggaagacagaattggcactgcctgagagagacgtatgagactctgggctcagacatgcagtggaaaagtcgacgaactctagcattctccatccacgagcttgcagttattcttggagatcaattgacagctgcagatctgggttccattttttaatggattttttaaagaacctcgatgnaagttcagggatagtggtct

SEQ ID NO: 170759 - DNA, 645 bp, Homo Sapiens
agcaatcgctgatgaggcattactgaaaggtggggcctttgagatgtgattggatcgtaaggcttgtgccttcattcatgggttaatggattaatgggttatcacaggaatgggactggtggctttataagaagaggaaaagagaactgagctagcatgcccagcccacagagagcctccactagagtgatgctaagtggaaatgtgaggtgcagctgccacagagggcccccaccagggaaatgtctagtgtctagtggatcccaggccacaggagagagtgccttgtggagcgctgggagcaggacctgaccaccacccaggaccccagaactgtggagtcagtggcagcatgcagcgcccccttgggaaagctttaggcaccagcctgcaacccattcgaagagccacgtaggctgcacccagcaaagccacaggcacggggctacctgaggccttgggggcccaatccctgctccagtgtgtccgtgaggcagcacacgaagtcaaaagagattattctcttcccacagataccttttctctcccatgaccctttaacagcatctgcttcattcccctcaccttcccaggctgatctgaggtaaactttgaagtaaaataaaagctgtgtttgagcatcaa

SEQ ID NO: 170760 - DNA, 562 bp, Homo Sapiens
  misc_feature (193)..(370): n is a, c, g, or t
  misc_feature (395)..(484): n is a, c, g, or t
  misc_feature (518)..(518): n is a, c, g, or t
gaacctggatctcaatttaatttttcatattcttgcaatgaaatggacttgaggaagctaagatcatagctagaaatacagataattccacagcacatctctagcaaatttagcctattcctattctctagcctattccttaccacctgtaatcttgaccatataccttggagttgaatattgttttcatacnnnnnnnnnnnnnnnnnnnnnnnnnnnnnnnnnnnnnnnnnnnnnnnnnnnnnnnnnnnnnnnnnnnnnnnnnnnnnnnnnnnnnnnnnnnnnnnnnnnnnnnnnnnnnnnnnnnnnnnnnnnnnnnnnnnnnnnnnnnnnnnnnnnnnnnnnnnnnnnnnnnnnnnnnnnnnnnnnnagagaactgagctagcatgcccagnnnnnnnnnnnnnnnnnnnnnnnnnnnnnnnnnnnnnnnnnnnnnnnnnnnnnnnnnnnnnnnnnnnnnnnnnnnnnnnnnnnnnnnnnntctagtgggttccgggccacaggagagagtgccntgttggagcgctgggagcaggacctgaccaccaccgggccccag

SEQ ID NO: 170761 - DNA, 493 bp, Homo Sapiens
  misc_feature (47)..(225): n is a, c, g, or t
  misc_feature (250)..(315): n is a, c, g, or t
  misc_feature (479)..(479): n is a, c, g, or t
ctgtaatcttgaccatataccttggagttgaatattgttttcatacnnnnnnnnnnnnnnnnnnnnnnnnnnnnnnnnnnnnnnnnnnnnnnnnnnnnnnnnnnnnnnnnnnnnnnnnnnnnnnnnnnnnnnnnnnnnnnnnnnnnnnnnnnnnnnnnnnnnnnnnnnnnnnnnnnnnnnnnnnnnnnnnnnnnnnnnnnnnnnnnnnnnnnnnnnnnnnnnnnnagagaactgagctagcatgcccagnnnnnnnnnnnnnnnnnnnnnnnnnnnnnnnnnnnnnnnnnnnnnnnnnnnnnnnnnnnnnnnnnncccaccagggaaatgtctagtgtctagtggatccagggccacaggagagagtgccttgtgggagcgctgggagcaggacctgaccaccaccaggaccccagaactgtgggagttcagtgggcagcatgcagcgcccctttgggaaagcttttagggcaccagcntgcaaccctttcgt

SEQ ID NO: 170762 - DNA, 562 bp, Homo Sapiens
tttctgaagatactatcattaagtgtaaattatctataaaatcttatttttatttctattcatcaataggcccacatctatctttgtagcctttccttcaatcttacaggaaaaagttgtttccccctgactaaaatgaatacctctacctaggactcattctttaccatccagacaatcctcataaaaggagatgattgaaccggcaagctatccggttcaatcaatagtagacctaaaaaaaatcaacttgttgctttcatctttttattgatagcacagccagagctaccaaaatgatttactggattctagcaaattaataaatacagtaatttgattgtaaaaggaaacattctacttggacatcttagtagaaattgctagagggtaggagctcctggcatacattctacttggatagaagagaagatagcacaggaggagaactggacagtccaggtatagattgttgagattagggattccgcagaaagcaagcaatgttctcattgttcttttgagtacgaactctgaagagtcagacactaaaagtaaaagc

SEQ ID NO: 170763 - DNA, 589 bp, Homo Sapiens
cccggcaagctatccggttcaatgtgatcggcgtgggtttgaggttcccattgtgttctcagttgctgggaagcctagtacattagtacgaatgtaatcactgagaccttgtctgtgaaataagggaagcagccaaactttgattaaagttgcaagttctggggacttgcgggggttgtcataaactgtaacagtgggttttggttcagcatgtaaatgcaactttgattttcttgaggaccgattgacctgtcatgtccctgtatcctcatgctcatcatctcagcaggcctgagaggctgggtcagtttgggtgttcatcatgaggattgcttctgccatggagctgatggacatgggcaggttgctgagaaggtcgcggtgaaagtgagtgccgcgggtgggtgagtgccctggtgcttgttcataggggagcctatccctagcagtggaacgctatgagacattttctctagcataattccttgggaagtctagatttgctattactctggctgagaatctaagttctgtgccttagagacagtttgcactttcccatattgtgcctgggacagccatttaggta

SEQ ID NO: 170764 - DNA, 496 bp, Homo Sapiens
tctagcggatctctactccagacaagttgaccggacctcactccacaggtattgacttagtgtattacatgaccataggcactaactgctggccactcctgtcaacctcaagtgaggtatcagtagtaaagttcatccggactgtgtttacacactattccaaagggaaaattaaagtatccagaagagtttaaagagtctcaaaaactattttgaatgcaaactggtagtaatgaaagtgtacacattattttcagatgaaatcttcaaaacagacgcacttttgaacttagcatccccagtttgatgcacctggatacatgggctgtgcctgacctaaaacgtgtgtctgttcgtttctgaaaataggactgtgttgttctacagctatagcctacctccttggtcctctcctacatccatttgaaaaatctttgaaaatgggaagagatttttaaaactcagacaacggtcaacttgtctggagtagggtacc

SEQ ID NO: 170765 - DNA, 690 bp, Homo Sapiens
tccttactccagacaagttgacgtctgatatggtgtagtaaactctcaataaacattagctatttttattatatcctctccataactgttcaaacaaggtattatattgttacactatagatgaggaaactgaggttctgatgttagttttccaaggcccacagtagtaaaagcaaagtttggatttgaaccaaagattagttccagtttccagagccctcttctctcctcgacaggccttccctaaagcatcaagaagtttatgcaaattagtggttcacctgagtgaacatttaaaaaatttaatagtaccacttcctcttgacctgttggtaaggagttcctcttaaatgcaatttctgaaaaagagaagcataaactgagacatccacattttttccttatttggccaaatagaagtgagaacctctgaggatagaggaattggatggaggtgcccttcagaactcatggagaaaagcactgctcccagtaaaatatctctcattctaatgaatgggtaagtatcctacaaatctttcacttctgtacaatctaggtctggtaggttacttgcacacactgggtggaggtggcaaagaggcaaagtattcctgaggtgatggccctgatcctacctcaaatctccttggggcctggttggacctgactgagcgtgttgagcagtgc

SEQ ID NO: 170766 - DNA, 628 bp, Homo Sapiens
ggcctctgctccagcaaagagccctgccgttccctgttaagtgtttgtagtgaaagacctgcttcacagaggagctcggagtttatccatgcctaggaccttgccagtttggattcatgagccttggggctgccaaccgcatctttcactgcatggtaaatgatgttcttcacctgcagtttatcctcatgatttgtatgagtgttagagagatgcctgaattcctgagtcaggcggaaacagtgctttacatgttctggagatacaaagtcttctgctacttttatgcaactgtatagattgtgaacctggtgtggggctccagcaggtatgaaaacagcatcacctaggaactgcacaatagcccagccttgcacgccatactcctcatagagtcgcttacggagggtctggtccaggtaccaactttggtcatgaattgggtcatgatcaggggggttctcttggccttgttcttctccaacctgttcggagcagctcccggatcttctctgcatccttggctgcatagatgtgccataaagcacctggcttctcttttccatcatgaatcctctgcttcgtcacctcatcgcatctcccgtcacttataagcgtaggaccggcc

SEQ ID NO: 170767 - DNA, 507 bp, Homo Sapiens
gaccagaactctataatagtgggctcattagcacccggtagctgatttacagctcattgactttgagggcaaaaaagacgtggctcaaattttcaacaatattctcagaagacaaatgggtacgagaactcctactgttgaatacatctgcacccaacagaatattttgttcatgttattgaaagggtatgaatctccagaaatagctctaaattgtggaataatgttaagagaatgcatcagacatgaaccactggcaaaaatcatttagtggtcggaacagttttatgatttcttcagatatgtcgaaatgtcaacatttgacatagcttcagatgcatttgccacattcaaggatttacttacaagacataaattgctcagtgcagaatttttggaacagcattatgatagatttttcagtgaatatgagaagttacttcattcagaaaattatgtgacaaaaagacagtcactgaagcttctcggtcaacttgtctggggatc

SEQ ID NO: 170768 - DNA, 564 bp, Homo Sapiens
ccagacaagttgaccgacacagaaaataacctgaaccaaggacccagcttgatggaaaccatctttagaatattgtaccattgcagtttttctccacaaacatttgcaaacgtttttgtgagctacatggaagaagagcaattatgggactttttatataacatcccagtctcaacgtgcgtggagtacgagctagaggtcatccgatgcttgagactggcactgaccgatgccatcaaggacgctgtacagcagatagtatctgtaatgagttctaggagaaactgtgagacaaacctaaacaagcacgttgttcctgattgtttgcttgagagcatgccaaaggaatggaattatggtccaaaagaaactaacaggaaagaatcatgcaaaagcttcaccaaggcttactgctcaggcagtatctattgtaatcagcaagttacctcacggtgattgcatgtttgcctcccccagttaaatacttcttttttcagtctgagagaaaaatgtcaaaaaaatttgctgaattgaagaaagccggtctacttgtctaatagtagg

SEQ ID NO: 170769 - DNA, 464 bp, Homo Sapiens
cctgataaaacaagatacatagagagtcaatctggcttctgagaatttaccaagtgaacagagtacctagttcatcagccgtccagtaaagcaacccaggaaactgactgggtctctttgcctaccgtattaacattaaacattgatgttctgtattctgtactttactgcacccagcagactttcaacaactcattgaaccggatagcttgccgacccttaccctagtagagcttaagaactgtgggagacagaggtcactctgccaggagagtgccgcagggtgagcctctgcagggcctctgttggtgggtgggccactgcagggcagtgaggtggtcccctgaggaggggaccattgaaccggatagcttgccggcagctatccggttcaataatccttctactagctatcctcttcaacaatatactctccggacattgaaccggatagcttgccgggt

SEQ ID NO: 170770 - DNA, 211 bp, Homo Sapiens
ccttggagccatagtcagtcagggagaattccaccttcacaggtggcatgctggcattgtccacggactcagagggcgcgtgctgcacaactgccactctggcgaagtgctgggaggccttgggatccgggctcatgtctcagttgtctgaccagtacgctatgacttgttcatctcatgaaccggataactgccggaccggctcattcta

SEQ ID NO: 170771 - DNA, 307 bp, Homo Sapiens
  misc_feature (296)..(296): n is a, c, g, or t
ctgcggaaataataatttcaatagctttctctaagcaatgttttaactttaagaattctggagcacgattaaccatcctcttgaaatcttggtattcaaagttttcttcttgtacttgccttcgtgaaacttttaattttcgattcagcaagatgttttcaagagatctaatcaatcccatggcattagttttcatttctttggtaacctcattttttgtacactgcctaaagagttcatgctgaagttcttttgctttttccagtccagaatctaatagaatcttcattcctaangctaaagcatc

SEQ ID NO: 170772 - DNA, 338 bp, Homo Sapiens
tattcagtatgatcacagttgccgtgagggtaaaaagtcatttttattatgtttccacaagagacgcactcctactgttctcttgaaaacacacagctcatgtcctcctttagaacacacatcctctttaaagtaacatacaaagatgccaaaacaaggtaaaaaattacatctgaattctcacacttcaaacatatatgaaatatcaaataaaaatttatttttacaagaatataggggaactactacatagctataaatgtaatatatatgttaactaagtatcacagataaaaaccatgctcccttcagcagcacgtgtaataatagatacaaag

SEQ ID NO: 170773 - DNA, 1127 bp, Homo Sapiens
ctgtgcaatacaatggtcaatgacctgggaattctcattgtatgtgcccccagggataccaagtggtgagaagtagaacatgtcaagatataaatgagtgtgagaccacaaatgaatgccgggaggatgaaatgtgttggaattatcatggcggcttccgttgttatccacgaaatccttgtcaagatccctacattctaacaccagagaaccgatgtgtttgcccagtctcaaatgccatgtgccgagaactgccccagtcaatagtctacaaatacatgagcatccgatctgataggtctgtgccatcagacatcttccagatacaggccacaactatttatgccaacaccatcaatacttttcggattaaatctggaaatgaaaatggagagttctacctacgacaaacaagtcccgtaagtgcaatgcttgtgctcgtgaagtcattatcaggaccaagagaacatatcgtggacctggagatgctgacagtcagcagtatagggaccttccgcacaagctctgtgttaagattgacaataatagtggggccattttcattttagtcttttctaagagtcaaccacaggcatttaagtcagccaaagaatattgttaccttaaagcactactttatttatagatatatctagtgcatctacatctctatactgtacactcacccataattcaaacaattacaccatggtataaagggggcatttaatatggaaagattcaaagtttgtctttattactatatgcaaattagacattaatccactaaactggtcttcttcaagagagctaagtatacactatctggtgaaacttggattctttcctataaaagtgggaccaagcaatgatgatcttctgtggtgcttaaggaaacttactagagctccactaacagtctcataaggaggcagccatcataaccattgaatagcatgcaagggtaagaatgagtttttaactgctttgtaagaaaatggaaaaggtcaataaagatatatttctttagaaaatggggatctgccatatttgtgttggtttttattttcatatccagcctaaaggtggttgtttattatatagtaataaatcattgctgtacaata

SEQ ID NO: 170774 - DNA, 409 bp, Homo Sapiens
tgtgagccaacacacccggccgattcccattttaaaatgaggaaaccaaggcttgggttcggtgatttgctgtgactgaaaatccttccctccccacaaatagggacaccactatcagatatcacatagatcatttcccaggagccaaggccaaagggcagacccgtcttgggccaaagccaaattctttcctacacagtaaatatcggaaaaagagagacttcaagcttcacccaagagttgagacatttggaagaaagactgacacaaattaggggagtcgctggatataggagtgaagtgcgagagaggtatcaaatatcaggctctggcctatgcttggagaaatggtgcaaaagcgttagccgaaatatggaaccggatagctggcggggactctctagagtcg

SEQ ID NO: 170775 - DNA, 612 bp, Homo Sapiens
ccagactagtgaccgaatccacacccatttacgcaaatatatactctctaggaactaaaatgaaaaggaaactcactcaacctgataaaaaggcatttaggagaaacatctacagcttacgctgtactaaattgtgaaagaccaaacgctttcttaaaatcaggaacacctaaaggacgcccactcacaccactttcactgaacattgtcactgacggacctggccactgacataggcgaaaaaatcctgtatagatatgtatgcatatgtgtacacatcatatgtacattataggtaaatcaatatgcaaatgtcatatacaaatgaacatatatatatgaaagaaaagcgcaattgtttttaattgtagatgacacgatcatggacatggaaactcctaaggaatctataagacaactactagaccttaatacgtgaatttagcaggaactcaagggaaaatgtcaaatctacttttatgtattagctatgacacaaccagaaagtgaaatttaaaacaatttaaatggacaaataatgacacataccctggggtacatagtgatgtttcatacatacaatgtgtgtgattagatgccgtcaactgtctg

SEQ ID NO: 170776 - DNA, 1495 bp, Homo Sapiens
aatggaagatatgcataccatcagtttatatgattatataacttctacctaattctgcctcaaagtaaagagtgacaattacttctcaaaataaatctagattgacttaaagttcacaatttagaaatagccattgctactctatttccatagattgcaaaatgatttcaaatacagattatacataccattgttttaccaaaatagaaatattgtttgggattttacaaaactttataaaatataacactatatttgcaaattcaagatagtttcacactgaaatagacaatacttccacgatatgaagtctagccaaacttaaagtggtctgccttgaggccattcttacatattatttcttccaaatcttcaagcctaggtaaatctgtgctctaacacaggctttgtaaaaaagagactatttattttcaagggttttataagattttcaatccagaaataatgttaaagcataagaatttatacctaaaaaatatgtcttactaaaggtagaagctaatgcagtatgacaattctgtataactgataaatttcaaaccaaattcctaagaatgacaacttttattaatttaaaatatatatttgacaattataatttgggacctatataaaacaaaaatataatcacaactattttatggaaaaatatttattcatatagagtgaaaaatacctccaaaacttagttatttgtagctgtcagatgagaagtatttcctaattacacccattcataaacactcattttatcacttcaaagagcaccagtgtattttttcaacaaaccagaaagtaagaaggtaggggcttatttcatgtaacagtgctattatgataaggcaccactaggtatatgaaaaagccaaagtatttccaaatcatgtgtttttgttactggtgtcttaaccattagacaggatggttagaaaaaagctgctaacattattaatgaaccacattatagcccctttcccaccattctgtgcttttagttttacttataacagaaatgaaaacaacaacgtagtacatgacctgttaaaacaaacatcttttcccaaccttccaagaaaataacctaaaaataaacaagaaacaaaaaatttatctgatatatttgcaaaagcctatccctgtagaagagtgtgaggagtgggagaaggcagggggacctactttctatggaatatattgaggcacataggttacaagtttctcaggcaaattcatggctagaacaaaacagagagagagctcagaatcttacatttcccccaaagttgattcctcagatagccacacctgattaaatactcccaaatgtgtccttagtcactgctatcatcatcgtcatcatcatcagacatatcatttaaaggagacttcaatgactggctgtaagagtctgatctagcaggctggcatgtggccatgtccccagcagaaagcaggtcaaagcagaagtcacagg

SEQ ID NO: 170777 - DNA, 714 bp, Homo Sapiens
  misc_feature (198)..(208): n is a, c, g, or t
taggataaacacagatacttacacctagatacctcatggccaaactgttgaaagacaaagcaaaatcttaaaggaagctagagaagtacaagttatcacttacagaagaataaccaaataaatcacagctgccttctaatcagaaaccatggaccccaggaggcagtggggcagtattgtcagagtgccaccagaagnnnnnnnnnnntgctgtcaaacaagaatcctatatccagcaacactgtccttaaaacaagtacaggtgaaataaagacactccacaaaaaaagagaattcattgttagcagaccagctttataagaaatactaaaagcaatagttgaggctgaaaagaaataattccagatagtagttcaaatctactcaaagaaatgaaaaggtaaacagtacctaggtaaatataaaaaactgtgttctctttaacttcattaaaagacataaagttgcattaaacaataagtataccactgtattttggggtttatagcatatagaaccgtaatatgtatgacagtcacacaaagaagggggtaaaaatgaaacaacatgaaaaccaagtctatgtgttgccagcattaaggtaatattaatctcaagtatagtgttatataacctctagacaaccactaagaaagtaactttatttatttagagatggatctgctcggtcacttgtctgatagagatcctcga

SEQ ID NO: 170778 - DNA, 327 bp, Homo Sapiens
caagctatccggttcaatcactccttccaagaagaaaggaactaccccagtaccttccaagaaactgctttttattagattcctgtaaagttgggctctttactgaagaagtggaattaatatccactgaacactgaagctgaaaatttcacacgtgaactagctcatttagtctaatttaaccttcacaacaacccaaacataacagataaaaataaagctgaagggttaaacaacttgtccacagtcacgggcagcagaacaagattcaaacctaggtttatatactaaaaagaccacattgaccggatagctgccggaccggcc

SEQ ID NO: 170779 - DNA, 547 bp, Homo Sapiens
  misc_feature (85)..(193): n is a, c, g, or t
accgccagcgattaggttcaatcgattctcctgctcagccttagagcagctgggattataggcatgcgcaccacacacggctaannnnnnnnnnnnnnnnnnnnnnnnnnnnnnnnnnnnnnnnnnnnnnnnnnnnnnnnnnnnnnnnnnnnnnnnnnnnnnnnnnnnnnnnnnnnnnnnnnnnnnnnnnnnngtgtgagccaccgcatccagcctttttttcttttattacaacagtccttatgctgaattcacttatcttgaaatggtgaacaaccacagctgtggacctcaaactatgtacaaactgagcaatttttcttgtaatgttctaacttttctctgcctcttaggggaacttccagcaacactagtggcactagtgggtcccatagtattactcaaggtttactgtattgcactaaacacaatgaaaactatacaagaaccatgagagatcaatttttactgtgatacacaattagctggagagataaacactcacatggtgatgactagcgtcacacaacattgaaccggatcgctt

SEQ ID NO: 170780 - DNA, 254 bp, Homo Sapiens
tcaattatttaatcagcattactctgtaggttcagtatccataattcatttgaagctgacaccagagagagaaggaaagtcatttctgcttcgttattttagaaccagttaaagctgaatccagagacagagcctttcaactgacccctcagaatgccctgcctgcacccacacgtgcccatgcccacccccctactcccactcttaggtctccaggcatgctgcctttacaataaacactacctttagccatg

SEQ ID NO: 170781 - DNA, 238 bp, Homo Sapiens
cacaacagtgtaattacataaattatgatatattcctaccacagtataaggtaattctgtatgttctgatgacaagctctcagcattaaagaatacacaatgtactgttaatagcgttatccatggagagaagaatgggataagagcagtgagagcatgtgaaaagagacttttacttttaaaatcagtaaactactagttaaataaattatttagtaccagcgtgtaatgaccgatg

SEQ ID NO: 170782 - DNA, 291 bp, Homo Sapiens
cctcctttacataaaaagaaaggaaatataaaagccgggtttttgctacatggtttgcaaataatgctggtggaatggagcgagttgttatggggagggaaaggagagagaaggaaaggagtgaggtatttcccgtctaacagaaagcagcgtagcaactcctattgttctgcactggatgcattcagctgaggatgtgcctgatatgcaggcttgcgccgtcaacagagatggcagcagaggccatcgagcacctgggcctggtggcgccaacgtgggcaaagacacatg

SEQ ID NO: 170783 - DNA, 1226 bp, Homo Sapiens
  misc_feature (396)..(396): n is a, c, g, or t
  misc_feature (412)..(412): n is a, c, g, or t
  misc_feature (675)..(675): n is a, c, g, or t
gcaagctatccggttcaataaatatgaacatttgttttttaaccagttactattaggcagaaaaaaacagtcatttatcaagaattcaaaagataacaccatcttgaaaacaaagtgccaaaaatctttgccataaactcttcctcacttatagaactaaaagtaacaaatatttactcaaaataaggcttggaataatctaaaaagttccagatatattttaaagctataacagattttgcacataaagccaaaacagattgttttacacatacatagactatctgacaacccaatgaataaatgattgaatggataaattgttgagcattagtgattacttatgttcacattatgggccaggcttacatccatttcttgttcttctcctgcctncactgtcccttgctcnttccaaggtcccttggtgaggtggcttccagataggcctgggcagtaaggtgctggtggaagatgtgagggcaggataggtgagaacaaggtattctcttatctgtctcagctcactccatctcagttcagtggctttgttcttgtcatggctccattttccacaatccattggtggtcctaactcccactaggcagcccccaccatggttccagctcctctggatgatcccactactggacacaggaaaccaaacctcttcnccattatcctcatagccctgggtgtggtaacagcttcttgctgtttggcttctcttttatcatctatgtaagtcaatttcctgtattaaactccctctgttgaaacacctagaatggtttctgttttccagactggatcctgatggatacatatcagaatcattaagctttttctcctctaactcatatgagaacttttgcatgaaaatctgccctaagccaatgaaaaatcattcaaatcacactcaatacccacattctgcaataaagagcagtaaatatccccttggctgtgttttgtcaaacattgggattctttttgccaagtgcaaacatgactctaccactgttaccaccaattgcagtggacacagccatgagctttctccagaagtcacttctgttgcatgtattaagtctattaacaaggtaacagacatacaaagagaaaattaatcttaagagaaagttacacagtcaccaaatgaataacattataaaaaaagtctctgaaaattcagagaacaaaagacagcaccagaaagtttccc

SEQ ID NO: 170784 - DNA, 562 bp, Homo Sapiens
tatacaaaggatctagaatcatacaagtgtgtggtttgaccttgggtctgggttgggaatatgggcaaattatttaatctctccaagcctcagtttgcttatctgtaaagtatgagtaataacatctcagatattagtggtggtatgagaattgaaggagaccacacagtggcaggtggttttaaaacatgatttttacaaatgttacccatgactttccaaagcgctctgagattcttaggcttagcagcgtctgaattataaaagctgtatatttatgagcattagcctttcatgcactaatttccttgaccctttgcttgggctgatgcttatacatactgttcctggacttggtcagtgattaaggcccgaggtgaagaagaggtcagccccaactcttccccccttggcttctcagctctgccccatcctgcggctgctactctgaactgttcacacttagtttgcaaatgtgtgtcagaaagccaggtttccaacattatagagaaaaacccgctcatggcatctgctcagcttgctggggccaaggtaccctggt

SEQ ID NO: 170785 - DNA, 225 bp, Homo Sapiens
gggcgtcggccatgcggatgatggccgcggcaatggcggcattctcggcatcttccggcaagccgctgacaaaagatgcatcaagcttcagtagcccgacacgaatgtttttcaggctggcgagcgatgaatagcccgtgccgaaatcatcgattgccagatgaatgccagcatcggtgaaatcatgcagatgagttagggctggggccaaggtaccctggtcac

SEQ ID NO: 170786 - DNA, 1007 bp, Homo Sapiens
ccccagggggaggaagggtggaggggccccaggggtcaccgtgtgcaccaggggccgtgaggggccggggcattcagctcagctctgaaccggggaagctggcacggcaaggactgcctcaggtgacgggccgtgagaggggacgggtcaggagccttcccaagccttctcctcagcccgacacccatggccatcggaggctaggatgccagacacagccatttgcagaaatcaggcacagtgactgcagctcacgtccagccaaccaagcatggggccgcagctcaggaagtcccttcccgccacaccacagcctaattcttactgggacggaggcaactcggctacgctgggcaggacgacaaacacgagacgccactgtggaatgagcaacttcggagcacggggtgacttgcttgggaccgtgcccacgtgacagccccttatgcagaggaggaaagagaagccccgagtgggaggggaacctgtccaaagtcacacggtgtgtgggtgacacagctggggtgagtcgaggctggcccctgaggcccatgctccctgaacgctggagaccactgtcggctagcagcggctctcagggaaggcctggtctccaccctcccagcctagcctcgcggaccctcgtcctccccacatcggacctgctcacctgccctggaccctgggctgccagatgcaggaagcatcaaaccccccagcctcgtgggtgcggggcagggcgcaggcagcacagcttagatgccctggtttgtccctcttgtctcctgggaagagcttgtcccgcccagctctcctgccactggcctttcagggttgggctgggcccagagtgccttttagtcgcttctcacggtggcctgatggctcaacccagtcccaaacgggcccagtgacactgccgactgcaccccagctcaggcccccactgcaccagcaatgctagaaaaccaagccaataaaagtgatttcttttttcattaaaaaaa

SEQ ID NO: 170787 - DNA, 801 bp, Homo Sapiens
  misc_feature (785)..(785): n is a, c, g, or t
gttttggatgagatgatgttgcttccttctttttctctaggaacttttggagtaaaatttctctctggtctcaacactagacatagtttttgtttttattcttagcaaatggagtgtttttatcttacagatactatgaattctttaaccgatgtttccttcttttccttgttcactggaaaactgagaggcaaatctgaggtgcatgcaaacgtacctagtgttggggcatgcggtttcgcactggcccattcctgcagtgtcttgtcttttctccttttgtcttcctttgtcttgttttctgccttcattcatcttaccttttattttgtgtgtacttatgttagcctctttaaatccttctggcaacaaggtatgagcccttttcggacacttcagcctaaaattaaatacaacaactggctgtttccccagaggtcttccttaggcctcttttcttgcatttgagttaccgcttactgagtgggtgtggagaaagcacgtgtggggctctggctggggcgtttcagttctttctgcctcactagctctgtcactcagggtgagtgcttcaactttgctgagtgtttctttgagtctagcatgcggattatcgtgctttctttgctaggtaactgtgaagattaaattaggtaatggttattcatgaacaccatgcctgacacacagtcccaaacgggcccagtgacactgccgactgcaccccagctcaggcccccactgcaccagcaatgctagaaaaccaagccaataaaaaatgtatncttttttcattaattt

SEQ ID NO: 170788 - DNA, 462 bp, Homo Sapiens
  misc_feature (341)..(341): n is a, c, g, or t
  misc_feature (357)..(357): n is a, c, g, or t
  misc_feature (399)..(399): n is a, c, g, or t
  misc_feature (408)..(408): n is a, c, g, or t
  misc_feature (424)..(424): n is a, c, g, or t
  misc_feature (429)..(429): n is a, c, g, or t
gagagaagccccgagtgggaggggaacctgtccaaagtcacacggtgtgtggggtgacacagctggggtgagtcgaggctggcccctgaggccatgctccctgaacgctggagaccactgtcggctagcagcggctctcagggaaggcctggtctccaccctcccagcctagcctcgcggaccctcgtcctccccacatcggacctgctcacctgcctggaccctgggctgccagatgcaggaagcatcaaaccccccagcctcgtgggtgcggggcagggcgcaggcagcacagcttagatgccctggtttttccctctttgtctcctggggaagagttnttcccgcccagttttnttgccattggccttttcaaggtttgggttgggccagagtgcnttttaattngtttttaaaggtggcntgatngtttaaaaccagttccaaaaggggcccattgac

SEQ ID NO: 170789 - DNA, 598 bp, Homo Sapiens
  misc_feature (485)..(513): n is a, c, g, or t
tggagaggagctggtctagggcaaaggaggtggctgcccagtggttcaagggtctctctcctttttcactttaacatccccagctaagatagtcgcgatttcgccctgcatgaaggcccaaggtacattcgacccgactagggggcatttctctccgctggggcaatacacctcgccggtggccccctgggccttgatactctctctagagcaagggaagcaaaatttgtggctggggacggaagggcactgaacgaaatgcgtatcctccaaacgttcgtggcaaatggtgcagcagaggggtccgctgttggccatgggggaatccggaatgttttgggggtgcacttggtccatgcccgggtgggcgctaggcggcgggggcgccacctgtaaattcaggtccccgttacgtgatgccaagcggcgctgccccggcacggaggccggcgggtactcgaagcggctgcgctgttccaccgcannnnnnnnnnnnnnnnnnnnnnnnnnnnnagcgcttaggccgtagcgctccaggccagacggggccgccagcaccgcaggcttgctggaaccatcaacgtggttgagctgttgt

SEQ ID NO: 170790 - DNA, 661 bp, Homo Sapiens
ggtgcgcacttaggatgtttctgagaggtccatccccgcagcaagatgctaccaccaggccaggaatgagacctaggctggaagcgaactcagaggagacaggccagggcagctgccaccttcagcaaagcttgccctactcctgacccaaaccagagcagctgtggccagagcattctccgaatgtgcaccataggcagaagattcctatcagagtagcatcgtgaggcagctaaaatgccaaatgtcacttcaaaaagaagccaggatggaagtgaagggcctgcacttgccccacatttgcacgcttccagacgaatcattaacattcctcaacacatcattccaaccataccttccgctgcatagtcttcttccttgctcacttgtatttttgcaataggagaaatcaactatgcctacttagcgctttcttttcttaagccttaagatgcttacatacacattttgaaaagcatactataaacagattcataataaacttcacaaaagattttcccacactgaggttattttcaaaacatatgccaaatagacgaccattcgtttttctccaataatgagcttggatttccaagttaccctggcataagttacactttccaggaaaaagaagtgaacatgtggaaatgatatgaat

SEQ ID NO: 170791 - DNA, 164 bp, Homo Sapiens
cctgtcattgcccttcctacttcatgcccttctggctcaaatgtcacctctagcctgttgtcacctctacactaatgactcccccctcaactcactcagccacatctctgccagacactgacttcttgtactagagtcttactgcctcatttgaccttaagacc

SEQ ID NO: 170792 - DNA, 685 bp, Homo Sapiens
ggggccgcgccagtgacagcgatggcggcggagtcggcgctccaagttgtggagaagctgcaggcgcgcctggccgcgaacccggaccctaagaagctattgaaatatttgaagaaactctccaccctgcctattacagtagacattcttgcggagactggggttgggaaaacagtaaatagcttgcgaaaacacgagcatgttggaagctttgccagggacctagtggcccagtggaagaagctggttcctgtggaacgaaatgctgagcctgatgaacaggactttgagaagagcaattcccgaaagcgccctcgggatgccctgcagaaggaggaggagatggagggggactaccaagaaacctggaaagccacggggagccgatcctatagccctgaccacaggcagaagaaacataggaaactctcggagctcgagagacctcacaaagtgtctcacggtcatgagaggagagatgagagaaagaggtgtcacagaatgtcaccaacttactcttcagaccctgagtcttctgattatggccatgttcaatcccctccatcttgtaccagtcctcatcagatgtacgtcgaccactacagatccctggaggaggaccaggagcccattgtttcacaccagaagcctgggaaaggccacaagcaatgcctttcaggacaga

SEQ ID NO: 170793 - DNA, 346 bp, Homo Sapiens
cacctgacagtctacagaacctccatccaccatcatatccactgatgcaggccagacagatgtctactctacataggaaacagaggcaaatcaggcctttcagtttagtctctgagctgccagttgtccctgtaactcaccagggagtcataaagcagaaaatgctccaaccaccaggtgggctgttcagcctgaggccaggtccctgtaagctgaccctccctcgtctaggtgatgagaaaagtcctaagatgcaggaacctggctgtcctggagacaaacttttgattccagaaatgtcccagaacttaaagcaatgcctaggcctgcctcaccagcccaagtt

SEQ ID NO: 170794 - DNA, 223 bp, Homo Sapiens
gtctgtccttgatgcaaaaatcccctctgcttcctctgcagctgcagatcatgcttgctactacagtctctcttcccgacccaagaagaactatctgtagggtcagaaaaacaccccagcctcttcctgcttctagccttcctgctctgtatccacacagctgaagccacaaaacaagcaagcaacaaacaaaaacagaataggctggggccaaggtaccctg

SEQ ID NO: 170795 - DNA, 585 bp, Homo Sapiens
  misc_feature (520)..(520): n is a, c, g, or t
  misc_feature (545)..(545): n is a, c, g, or t
agctccctgcgggggtggctgaggctgccatgggcctctgttgccacttaacctctccctcttccctgtcctgcttccttctccccctcacaaatgttgattctgaaagtactctctaatcgaaatcctgcattccagaccccacctcagagttcactccccgagagcccaacctgcaacacgtcaagcagactgccaccctgtcagtccatggctgatggaggacagatgacaagatataccctgggctgctgccagtagcagcccctcaagccttggtagggtctggagtcagactcagccaccactgacctagcccctactccaagttgaccatcttcagagccgggtactcactggatcttcacacactctttgttagaggaatgactcccccaggtttcggatggagaaactgaggtcccaagaagggtggtcacagaccagaagccagcttcagcactttcttccagcattaacccaagggaagtgaagggatcacccatctttccccttcctnttgggaacagttgattcaccagcancactaggaagagacccatgcctggggccaaggtaccctgg

SEQ ID NO: 170796 - DNA, 263 bp, Homo Sapiens
ccagggtacatgaaatggtgggtggttcggctgccaacatcctgctcaaagcccacggttggcgcctgattcatcctcatgatgaagttgtgcccgtccacgtcctgcccatagccagagccccgcaggttgcccgagttccccaccacggcacagcgccggcactggtgggggtcccggaagcggtaggggttctcgccaggcactatctggaacagcttctccagcacctcattggtgttgtgtgacttgaactggggcca

SEQ ID NO: 170797 - DNA, 607 bp, Homo Sapiens
  misc_feature (511)..(511): n is a, c, g, or t
  misc_feature (516)..(516): n is a, c, g, or t
  misc_feature (536)..(557): n is a, c, g, or t
  misc_feature (578)..(578): n is a, c, g, or t
  misc_feature (593)..(593): n is a, c, g, or t
tccagatgctccagctcacagtccggcagagcacgcggaacctctacgctcgcggcttccatgacaaagacaaagagtgcagttgtagggagtctggttaccgtgccagcagaagccaaagaaagagtcaacggcaattcttgagaaaccaggggactccaaagtacaagcccagatttgtccatactcggcagacacgttccttgtccgtcgaatttgaaggtgaaatatatgacataaatctggaagaagaagaagaattgcaagtgttgcaaccaagaaacattgctaagcgtcatgatgaaggccacaaggggccaagagatctccaggcttccagtggtggcaacaggggcaggatgctggcagatagcagcaacgccgtgggcccacctaccactgtccgagtgacacacaagtggtttattcttccaatgactctattcattgtgagaagaaaacttgtaccaatcgggcagaacgggggaaggaccataaggcatacattggncaaanagattgaacttttgcaggannnnnnnnnnnnnnnnnnnnnngtgagcttggacctttggacngggatccttttaatngacttgaggcttcc

SEQ ID NO: 170798 - DNA, 471 bp, Homo Sapiens
aagaaaactaaatcaatagaaatagactcaggaatgatagacatggcgaaattagtagacaaagatgataaagaagttattatatgctccatgtgcgaacacagaggccaacttgaacatgattagaaacatggaagatataaaaaaatcttcctagtctccagtcttcaggcaaagagcaatatgactactgtgtttctgtagcctgctggaacatctaggcagaatgtgggctgtactgccctgataccaacattctccatggagttgggagaggaacgaagtaccctgcagagaactgaatgtacacagggagctgctgagatgtggctagtctggggccacacagctgagcaggatcagttcagaaataagggaaaaacgtggatattcctttaaaaagcacatcattattggtggccttttgcccttcattctggttcgcacaccgaacaagtaacaatttccatg

SEQ ID NO: 170799 - DNA, 523 bp, Homo Sapiens
acctcccttctctattgtagttcgttgcctcatacacagtcacaatatatgcttggttcagttgaacaagggttcatttaaaccacatctgttgctcatcagacctctatattaggagtggggaattctttttcagagatagattctgtctggaaggtcttatggcaacaaatagtcctcattaaatttcacaacattttaccaacatacatacagtactcgctgttacgtgattatagaattcaggcgaaactctgcacccccacgtcaaaggattcctcactggacaaattctaaagagtaaattgatcttcccatcatgtgttgtgtataacaatagaaaggctgacacagcaagattgctaaaatgacagaccatttctattcaaggggaaggaatttgtgttaatattcttaatgacaggcatctttatgagaaatgtgaaatcatttatccttagcaataacctgactaggattaacaagtacttggtacttagaacggaagtatctgtcagaaaaa

SEQ ID NO: 170800 - DNA, 278 bp, Homo Sapiens
  misc_feature (72)..(80): n is a, c, g, or t
tggcatgctctggtccccttctacatgcttagaaaaccaacaaaaatgaggtaccaaaagaagtaagaggannnnnnnnnaaggcatctgatgtagtttttgaagccatgagtaacaatgagaatttttgctggtattctattagtttgcatttcagtattgtcattttccattttgctaggaagagaaaagacacaccataatcttttcagtgcactgggcttctaagaaacttaatcagaacctgacggatcatctctgaataccatagttccaga

SEQ ID NO: 170801 - DNA, 569 bp, Homo Sapiens
cggcctgtgatcgctggacaaggagcggccaaaggtcctgtgtgactttgtgacatacacatcatcagtcttgactgtgctggaacaagtcctccgcagcagcttatgcgtattggagattccgtccggctcagattacagtttggatttgcttttgccacaaccagggggaggataactgggcgaccggcgcaaagtagaaaataaatgcaggggagacttcactttcttctctgacaactttttattgtgcaggcaattggatttttctttgctctggtgccactgctgtgtaacaaatgtctgcatgagggtgtgcagctgatgtcccaatccaaatcgctcttttgtggaaatctgaaagacatcaacagtgggcaccgggccatgtaaatactgtgtaagtgaacagtgtagtcgaacaagtataggttctgttcgaattacttcccaaggcacagcaatctcctcatcaagaaagctaacatcgatatgcagatcaatatctacatcatcaatggctccatattccctgagagaaactgcatgtgccccatatatctctctaa

SEQ ID NO: 170802 - DNA, 465 bp, Homo Sapiens
gctcggtaccccctcctatctgaatccagatcctttatagccctctctgtgttaaaggcatcacagaattaatttccacttcattgggagctctcagtccctgaaagttgaatccagagtggctattctgcaggtcatgcgattgctgccccaggcatcagaactcaggcatggcccactccatatggaaacaggctctctaaaaccccagtggcctggctagccagcatgttatattgtacctgtcctatctctatcagtgtccagtgcaggtgtgagagagagtactgtctttggaaaagatgagagcccagtaggatgctctgcccacagcctcgcatccacctgacttaaaaaccatcgtgatagcaaattgggtgttgatttcagaagtttttgatttgttatcttaaacgtcatacctatctggattcagataggagaggggatcgtctagatcactca

SEQ ID NO: 170803 - DNA, 765 bp, Homo Sapiens
tgtgattctagacgatcctctcctatctgaatccagatcctcctatctgattcagcctcctatctgaatccagatggctttgagaaggcagcgtctcagcctggtgaactcaaggactggtctgtgggtcgaagcaatgcccaggaaatagatctgaaccggaactttccagacctggataggatagtgtacgtgaatgagaaagaaggtggtccaaataatcatctgttgaaaaatattgaagaaaatgttgtggatcaaaacacaaagcttgctccttgagaccaaggctgtcattcattggattatggatattccttttgtgctttctgccaatgctccatggaggagacctcgtggccaattagccatatgatgagacgcggagtggtagtgctcacgaatacaagctcctccccagatgaacgccattttccaaagcttgccccgggcatactcttctttcaacccggccatgtctgaccccaatcggccaccatgtcgcaagaatgatgatgacagcagctttgtagatggaaccaccaaccggtggtgcattggtacagcgtacctggagggatgcaagacttcaattaccttagcagcaactgttttgagatcaccgtggagcttagctgtgagaagttcccacctgaagagactctgaagacctactgggaggataacaaaactccctcattagctaccttgagcagatacaccgaggagttaaaggattttccgagccgtcaaggtaacccatcc

SEQ ID NO: 170804 - DNA, 752 bp, Homo Sapiens
ctcctatctgaatccagattgcgggtaagtcattcatcagcatgtctcctcaaccgaacagcaagtctcatcccactccaatatgaggtttgtccccacaaattgatacacataattcttgctggcagtggtaatgacttaataaaagaaaatcatgagatggcatcagactttactttatttgctagctcagcagaatttgattcctagtctgataaggaaaccctattttccctcagaaacttttcactttatgtcacaggtttggttcccagaggaaactggatatagatgaagcttagtgtgcaggatgttcattaggaagtgatgtgaggatccacatctgtggaaaggataggcagggaagccttatgtgcaaagggacaagtctaatggcagtgcagcctgacattgtcacctggccacacggacagagctgtagagctaagaaatcctcccctatttgtcccaactgaatcaaatggcaaagcctatgtacccctcccctccattaatgattgtgtgcttgccatttgtggaggatgagactttgaagcaggtggctttctgtggctgaaaaaaaaccttaaatgtgctgacaaagttttccaaagagacagagaatggcatctgccatgtatgttgcccctttccaaagaggaagcaacagggtaagcaacaaaggtaagcaacaggaagcctccaatggatctgattcagataggagggagatcctctagatcacagcacac

SEQ ID NO: 170805 - DNA, 344 bp, Homo Sapiens
cctcctcctatctgaatccagatatgtgactacggcaagttacctagatattcccaaacctcaatttacttatatataacatcagaaaaaggtctattataatacatctaaggattggtatgagaattaagtggatttaccagcaacccttggcataatacctagcagagtaagcactcagtaaatggtagctatcataagaaattctacaggatcaacaacctggtttcttcaagaaataaattcaagggggtgacagaaaagctacaaattaaaagtcttaagagacatatcaaccagatgcactgtatagaccctgtttagatctggattcagataggagg

SEQ ID NO: 170806 - DNA, 1013 bp, Homo Sapiens
atgctgttctagaggatcccaacttcgacggacgcattcactgcaacatcacggagtcataccctgctgtgccccccatctggtcgctggagtctgatgaccctaacttggctgctgtcttggagaggctggtggacataaagaaagggaatactctgctattgcagcatctgaagaggatcatctccgacctgtgtaaactctataacctccctcagcatccagatgtggagatgctggatcaacccttgccagcagagcagtgcacacaggaagacgtgtcttcagaagatgaagatgaggagatgcctgaggacacagaagacttagatcactatgaaatgaaagaggaagagccagctgagggcaagaaatctgaagatgatggcattggaaaagaaaacttggccatcctagagaaaattaaaaagaaccagaggcaagattacttaaatggtgcagtgtctggctcggtgcaggccactgaccggctgatgaaggagctcagggatatataccgatcacagagtttcaaaggcggaaactatgcagtcgaactcgtgaatgacagtctgtatgattggaatgtcaaactcctcaaagttgaccaggacagcgctttgcacaacgatctccagatcctcaaagagaaagaaggagccgacttcattctacttaacttttcctttaaagataactttccctttgacccaccatttgtcagggttgtgtctccagtcctctctggagggtatgttctgggcggaggggccatctgcatggaacttctcaccaaacagggctggagcagtgcctactccatagagtcagtgatcatgcagatcagtgccacactggtgaaggggaaagcacgagtgcagtttggagccaacaaatctcaatacagtctgacaagagcacagcagtcctacaagtccttggtgcagatccacgaaaaaaacggctggtacacacccccaaaagaagacggctaaccctgggggttttcaccc

SEQ ID NO: 170807 - DNA, 841 bp, Homo Sapiens
  misc_feature (88)..(257): n is a, c, g, or t
  misc_feature (301)..(301): n is a, c, g, or t
  misc_feature (796)..(796): n is a, c, g, or t
  misc_feature (810)..(810): n is a, c, g, or t
  misc_feature (824)..(824): n is a, c, g, or t
acctaccaagatatacctgatatattccaccaggatatcctccctccagatatacttggttctctccaccaggttctttctttaaagnnnnnnnnnnnnnnnnnnnnnnnnnnnnnnnnnnnnnnnnnnnnnnnnnnnnnnnnnnnnnnnnnnnnnnnnnnnnnnnnnnnnnnnnnnnnnnnnnnnnnnnnnnnnnnnnnnnnnnnnnnnnnnnnnnnnnnnnnnnnnnnnnnnnnnnnnnnnnnnnnnnnnnnnnnccctaggtgagaacccttgcactagaggaaccctacaccccaancctggggggaatgtagggaagaggtgcgcaagccaaccgtggggttagctctaattattaagataggcattataaataaataccaaaaaattgtctctggcaatagttaccttcccagatacaggtccccccttttttcccctaactcttttaagcaatgattgtaactattaggagacattgctctcccacgtatgtttttctttttagacaatgcagacaccaggaagttgtggagctaggatccatcctattgtcaatgagatgttctcatccagaagccatagaatcctgaataataattctaaaagaaacttctagagatcatctggcaatcgcttttaaagactcggctcaccgtgagaaagagtcactcacatccattcttcccttgatggtccctattcctccttcccttgcttcttggacttcttgaaatcaatcaagactgcaaaccctttcataaagtcttgccttgctggaactccctctctngcagggcagcctgncttttaaaaatagnttgctgtcatccacttt

SEQ ID NO: 170808 - DNA, 318 bp, Homo Sapiens
catccgagtggcctggccaggaggtcggccagcgggtaaatggttttacagagcttggctaagacgtcttccacgagggtgatctgattggaaacttccgtgtccatctctgtgatctcagcgatgtcctctctgtgctcccagctgggaaacatattggtgaatgtcaggggctccagaccagcgtggataaggtaagacttgggggctggtttcttgagattttttcctttgcagtactggagcacagtctccatcgcactcttccggtcggaggcccagcggatgcgggcggaaccagtgatcttgttctcgatg

SEQ ID NO: 170809 - DNA, 180 bp, Homo Sapiens
gaagaagaaaagaaaatgtacatggttggaattattagttgctctctgggtttcagtgataggtacatacatacttatgtgtcttttggagatagagacaagtctgtgaattttgaaaagttttagaaatactttattacatcattgtgtaatgatttagaaggctgagtacaagaaggc

SEQ ID NO: 170810 - DNA, 863 bp, Homo Sapiens
ttaaaaagcagtgacgtcctctttgtgtctgacttcaggtgtccggcgaacgaggagtcttttcctttctgtcgatgcagtttctcagcctcctgttgcttcttctgctggttcagacctccgtaacgtgaatgtcaattgtttgctgccaacggtggtgtcggatacactcaatgtcccattgtttgcttcaattttcaaacgatcttcaagggtttggttcatcagtttctgctttgtggcagaatctttgaagcttctaaattcttctcctgctttgatctcataaaactggggctttaggactgtctgctggtcctccttgagtcgttcctgccgcttcactttttcctcctgctggaggagtctgcgtagcttcctgacctcttcaacccaggctttttcatcatctgaactctccgaactttctgcatcacttggttttccttccggctcttcctcctcttctttttcacgaagttcttgtagctctaagagtcttagtttcttcttccttttttcactaatttttgaaacaagtggattcagaagcctaaattcttcactctcttcatctacttggaagtcagggttctcaaacataactttaaatcgatcatcggtgagaatattaggaagactcttaactttctttttccatgtagatttctgcttctcctcttcttcctcaattaatttaagtgccagctctttgttaacttttggcatttctttaactggactctctgtgcacgtgtttcttctattttctgtcgtattttatctttcctatattcttcataagcaaatggatttaccatcagtttcaccttgtgatagagtcttatatccatgaaaaaccc

SEQ ID NO: 170811 - DNA, 1222 bp, Homo Sapiens
ttgaaacagcactcgaattattcgagtgaaaggatttaaccacaaactacctctactatttcagctcattattgactacttagctgagttcaattccacaccagctgtctttacaatgataactgagcagttgaagaagacctactttaacatcctcatcaagcccgagactttggccaaagatgtacggcttttaatcctggaatatgcccgttggtctatgatagacaagtaccaggctttgatggacggcctttcccttgagtctctgctgagcttcgtcaaagaattcaaatcccagctctttgtggagggcctggtacaagggaatgtcacaagcacagaatctatggatttcctgaaatatgttgttgacaaactaaacttcaagcctctggagcaggagatgcctgtgcagttccaggtggtagagctgcccagtggccaccatctatgcaaagtgaaagctctgaacaagggtgatgccaactctgaagtcactgtgtactaccagtcaggtaccaggagtctaagagaatatacgcttatggagctgcttgtgatgcacatggaagaaccttgttttgacttccttcgaaccaagcagacccttgggtaccatgtctaccctacctgtaggaacacatccgggattctaggattttctgtcactgtggggactcaggcaaccaaatacaattctgaagttgttgataagaagatagaagagtttctttctagctttgaggagaagattgagaacctcactgaagaggcattcaacacccaggtcacagctctcatcaagctgaaggagtgtgaggatacccaccttggggaggaggtggataggaactggaatgaagtggttacacagcagtacctctttgaccgccttgcccacgagattgaagcactgaagtcattctcaaaatcagacctggtcaactggttcaaggcccatagagggccaggaagtaaaatgctcagcgttcatgttgttggatatgggaagtatgaactggaagaggatggtaccccttctagtgaggattcaaattcttcttgtgaagtgatgcagctgacctacctgccaacctctcctctgctggcagattgtatcatccccattactgatatcagggctttcacaacaacactcaaccttctcccctaccataaaatagtcaaataaataaactgcagtcacgttggcctaaaa

SEQ ID NO: 170812 - DNA, 711 bp, Homo Sapiens
cccagacaatgtgaccggaagaggaaactgaattgaaacagctgaatttacacaaagatactgagcctaaacccctggagggaactcatctaactgggtgtgaaagactctaacatccatgagcttgaacatgagcaagagcctacttgtgcctcccagatggctgagcccttccgtaccttccgagatggatgggtctcctactacaaccagcctgtgtttctggctggcatgggtcttgctttcctttatatgactgtcctgggctttgactgcatcaccacagggtacgcctacactcagggactgagtggttccatcctcagtattttgatgggagcatcagctataactggaataatgggaactgtagcttttacttggctacgtcgaaaatgtggtttggttcggacaggtctgatctcaggattggcacagctttcctgtttgatcttgtgtgtgatctctgtattcatgcctggaagccccctggacttgtccgtttctccttttgaagatatccgatcaaggttcattcaaggagagtcaattacacctaccaagatacctgaaattacaactgaaatatacatgtctaatgggtctaattctgctaatattgtcccggagacaagtcctgaatctgtgcccataatctctgtcagtctgctgtttgcaggcgtcattgctgctagaatcggtcagactgtc

SEQ ID NO: 170813 - DNA, 596 bp, Homo Sapiens
cccagacgagtgacagagtgagactagtctcaggaaagcaaaaaaggtaaccactgtcctgacttctgacactgtagttgattacttttgagggattgagagactgaaataaaatggtaacagtgaacatagaaacatagaatcctactacacacatcaaacattatgggattattaaatatctaaatttggaaagctaaccttttataagaatatcaaggaggctattttcatgaacttttgagtagggaaagatttctttagcaaaattcaaaacatgaaggatgaaggtataagatttgactgttaaaatttataatcttggatgcagcaaaagatactataaataaatacaaagataaaaccacaacctaggagtatctgtttggagtgcattaactgacagaatattagaatccaggattaaggaagaaaaagaagcaaatcagtaggaaaaaaacagcctaataaaaatatgggcagttcatagaagtgaaaatccactgggtgataaactttagaaaagataatcaatgacagcacttctcaaaataagacatatacgcggtcacttgtctgagtagggatcctactag

SEQ ID NO: 170814 - DNA, 574 bp, Homo Sapiens
agtgatttctgccacaaaattaccaagttttgcaatatccatggatatgacatattttaactatgattcctatgcacaatttcattaaaaatatctgacattcacaaatggcttaaacttaacagcactactttcttgtaacggcaaggagacaaattatgtagaagttaagggatatttacttactctaagttaccaagaaaaagaccataataatttttctgataccaattagcaaagtaattctctactacttctccccacatgctaaaatggaaacatcaatattcatactatagaactaataaccctcaactgaaagaatggcaggtaaattatacagtggatttataatgacactcaaggtacattgagacagcacattaaacacgtctgctaccctcggtcaagacagtaaacgagatggcccttaaaatcaacacatgattctctaagcttttcctcaaactaccgtctaaaagtttttagcataacctcaaacctacttttaaactttcatgtaattttatcccacaatttccaatacaatttttctgggaaacaaattccctag

SEQ ID NO: 170815 - DNA, 329 bp, Homo Sapiens
tgaggtgatctagcaggatccctactcagacagtgaccgtgagcactgaatacaaaagagaattacttccatttcaacttcaacccattgattacgtccatcctagcaagctaaatggcatcccagctgctcctttctgtgcaaccaattaaagaacaatgagtgtgatgctccatgtctgaatttcgtccagcctctctctgaactgtgatctttgtcctcatgaactttcccttttgttcattgaactatatggactcttcatttcatattgatttactgtgcaatttacttttggacattgagaacttgaaatggtcgccaatccg

SEQ ID NO: 170816 - DNA, 218 bp, Homo Sapiens
tactccagacaagttgaccgtaggctgaaaaacagatttaagttagaggctagccacacaagaattgaacagtctattattatcaagagaatgcaaaagggaagtaagccccaagggaaatatataaaacagtccagtacatctgaaccaacagcaattgatatctggccattaaaatacagaggtcatttttgtagtcggtcaacttgtctggagta

SEQ ID NO: 170817 - DNA, 186 bp, Homo Sapiens
ctagaggatccctccagacaagtgaccgaacactcacattgatgtaaatccccctttccatctggtctactgtagatgagctaccagcagtcaggagtagagaatggcagtaggtgtctcttcttctctttccagatgagtagttatactcggtcaacttgtagtacggtcaactggtctggagta

SEQ ID NO: 170818 - DNA, 556 bp, Homo Sapiens
tagcaggatccttactccagaccagtagaccgtacacatccccatgttactatggattgggacgcgtattgagatccatctccatggatcttcgtgcgcccaagacagtatgcctgaattacgagcacttctgatgtagaagctcctcattccagctgtgatgcccacatcccttttagcacctagccatggctgctgttagactggcactcggggcacaagggctggacagatccaccaggcaagcttcttaggcatgtgtatgtgtgtttcttgcaggggaagcagaagtatacacttccgctgtaccacgcaatgatgggtggcagtgaggtggcccagaccctcgccaaggagacttttgcatccaccgcctcccagctccacagcaatgttgtcaactatgtccagcagatcgtggcacccaagggcagttagaggctcgtgtgcatggcccctgcctcttcaggctctccaggctttcagaataattgtttgttcccaattcctgttccccggtcacttgtctggagtagggatcctctagatcaccccc

SEQ ID NO: 170819 - DNA, 952 bp, Homo Sapiens
  misc_feature (45)..(45): n is a, c, g, or t
  misc_feature (192)..(210): n is a, c, g, or t
atcgggggggaggagagttcccaagcgcacttagggtgcagggtncccaagggatttggcttaggaaaaaccagggtttggcctcatgtttcactttacctttcgggggcccgcggcgcgcaaagggaatgggtttaggaaagcttttctcgaggggcccgagggcgggcccggcaacaggaaatttaggtnnnnnnnnnnnnnnnnnnntacttgaaaactttattaaaataaggattaagccggaaaaaagaacaatcagaatgccagccctttgcataaaatcagcaagaaaaaggacagaaagagaaaaaagaagagcatcagtcctctccacttcttcccagagacttaggtggggaggagaatacccgctgcctgcagtgcctgcagcctgtagcggggagagctgtgggcaggttctctgtctcggggctcagtgggctatagagaagtaagttcccaccagagcagaggcccaagagtcacagatacctaagctagagaatagattatcctgaggggatataaactccaggaagttgatcagggaacaggaatttgggaacaaacaattattctgaaagcctggagagcctgaagaggcaggggccatgcacacgagcctctaactgcccttgggtgccacgatctgctggacatagttgacaacattgctgtggagctgggaggcggtggatgcaaaagtctccttggcgagggtctgggccacctcactgccacccatcattgcgtggtacagcggaagtgtatacttctgcttcccctggttatgcaggaactccttcactttccagaaatcttactggtggtcgttcttaaggacgaattggccccatcgcagacggagctctgcattccgggaatttgagatacttgggtaatgtgtctccaagtttattcacattcacagcgcttaaatacatagaat

SEQ ID NO: 170820 - DNA, 383 bp, Homo Sapiens
agctcggtaccctactccagacaagttgaccgtggggctgggagtgtcgggaatgacaattgtctgccgctgccgttcccgggtggtgctggaggccacgtcgccccacccacaggtgaccgaggtgctgcaggccgggctactgtgcaccatggcacagcggggaggtgtgttctccttgacacgcttggatcgctgtggggagctgatggcctgagaggaggacacctcacaggtggagacatttctcacagatgactggtgctgcttactcttccgggaggaggtggtgctggttggctgctgccgcatcacgtgggccacacccacatttaagggctgtgctgctggaagggtcacatgaccggtcaacttgtctggag

SEQ ID NO: 170821 - DNA, 762 bp, Homo Sapiens
  misc_feature (119)..(133): n is a, c, g, or t
  misc_feature (575)..(575): n is a, c, g, or t
  misc_feature (604)..(604): n is a, c, g, or t
  misc_feature (617)..(617): n is a, c, g, or t
ctcgggagggctgaggcacaggagaaatcatacttgaaccccgggaattgaggttgcacatgagcccagagtacacccccgcaattcaacctgggccacaaaacgagaatccctttttnnnnnnnnnnnnnnngaacgcccttttactgtcctcatcatcccagtttgaggcagtgctggagtggggaaggccgtcttagaccatagaggttggaagacgctgagagatcatccagcccagccccttgatgttacagagcagaagacagatgcccaaacaggagaaggcacttgcccacggtcatacggcaggttgccacaaaaccaagatggcagcccttcctcagcgtgcctcactgccactcccagagccagggagccccataaaacccacatcatgtcttaagagtatatctggctccttgaccagcaatcggccctgggagccaccaggtgggaaaagcgcctctgccagagtccaggccttgggatgacagacagcttgcccgcacactcgggccccactcaaggatgtagggccttttctggcccctgacccctccctggcatgggancgtggggacggggctggccttgggaggancggcaggggcatnacctccttctgctgcttctccctgctcctaccctcaagggcctgggggctgcccagctgcctctatgcccttctgggggtctcagcccactgctgacacttctgcaatccagagaaacactaaataaagcaatacgtgtttgccg

SEQ ID NO: 170822 - DNA, 586 bp, Homo Sapiens
cagcaacaaacacacaaacaaaaactctccagaaagcaatacagagaacaagcaaaggaaaatataaaaggttaaaagacggggttaaaataaagactgaagatcctagaaggaaagaaaaaagaaaataaaggagagccaaagtgcttagagacctaagagctgagaatttttgaagctaagaaatgaaaccacagttatgggaagcacaacatataccaaacagaataaataaattcatgcacagtcatgttatagtaaaactgcaaaacaccaaaagagaagatcttaaaggacccaagaaaagatacaccacctacaaaaaaaccacaatcaataagaaagatagatttctcactgctatattagaaagctggaagaagagggcatactatcttcaacgtgataacctggaatgatcaacctggaattttatgtccagagaaactatctttcaaggatgatggtgaaatacaaagacatttcagataagcaaaatagaaactgcctccaacagactttcacttaaggacaattctcactttaagaagaagacacaatggtgccagacaggaagtcgggtacg

SEQ ID NO: 170823 - DNA, 131 bp, Homo Sapiens
agacaagtgaccgccgtgttagtaattagttttccaggagtgataggaggagccccgatttgtagtgtttaccaatttttatgctgtaaatcctcccactgtggccaatctcaaggtaccaaggtgatgtt

SEQ ID NO: 170824 - DNA, 198 bp, Homo Sapiens
gttgacgtccactggggctctcaaatttagtcttcaaaacaaaaatattgcatttttcccccagattcattcttcattttagtaaagaacaaccttactctcctgtcaattgatcatgtcgaaatgtctttcctttttttcagtcacctgattaagtcctgcggtcaacttgtcgatatacgcccgagatccgtcgcg

SEQ ID NO: 170825 - DNA, 1223 bp, Homo Sapiens
  misc_feature (1144)..(1144): n is a, c, g, or t
aagacaaagttgaccgctgttcactgtccacgtgatcagttgtaagattacaatgctgcatgctagtgggttacataagatacaattccagtgataggaaggcggttataatggatggtggtgtgtacaagatggcactgccatctttgagcagagcccagctctgcagcgccacttcatctttttaaacaccctagaggtctgttagttgttgctgttgtcctttattttgaaagagttgcaagagaagttacagtccaggtgaacttggagattgtgggattggttttgtttctgtaatgtattgtttatcatttacctgtagtgctattgctgttgatactatcacctataccctgtttctagtgagtgctgaatacagtatggtacaatgacagtaacagccgcgtggtgctgccaggactgcccttgggcatatcagtgacagcccaaatgtgggtggaggaaacctgtaatttccttcttaacatgagtttgaaataccaagagaataatactgttctggaaaaaaatgatacgctcgcggaaattagccaaattaaggggtcttatataaatggacagggacccacctcctcggaatattatttacaaaaactttttgaagaaataattagcattttgatcgagctattttgaatccagaaccatggttgtttgtctgggaccggatacgtccatacgggtattgaccatccggcgcgatcctggtaagccaccgaccgacccgcgacctggctgcgaccacgaccgccacacgccgtgttgccccctgtcgccccgcccaattcgtccggtttcgcgagcatgtcacccaccctcacagcaccggacacagctatgcctactgctccacgcactgagacgcctatcctcatcgacacagtacagtggtggctgcggccgttagtcgtgctccccacccccccgctaggcctcaactgctaccgcctcaggtgagtcctctgatccctccaacactcccagataaaatgcgatgtcccgctcctccacacttctaccctactcgaccacaagggctagaacttaccaaccgcatacaccggcactccgccagatcgcccaagtcgtcatgaaatcgcaagagaccacctccgtctcngagacacccagcgcgcgagcagagccacatgcctgtacacgactctccgaggtcagaggccggatgacttgttcgccag

SEQ ID NO: 170826 - DNA, 493 bp, Homo Sapiens
aacacatctggtttggagaaaccatcaatggtggcttccatttcagctatggagatgacaatctggctcccaacactgccaacgtccagatgaccttcctacgcctgctgtccacggaaggctcccagaacatcacctaccactgcaagaacagcattgcctatctggacgaagcagctggcaacctcaagaaggccctgctcatccagggctccaatgacgtggagatccgggcagagggcaatagcaggttcacgtacactgccctgaaggatggctgcacgaaacataccggtaagtggggcaagactgttatcgagtaccggtcacagaagacctcacgcctccccatcattgacattgcacccatggacataggagggcccgagcaggaattcggtgtggacatagggccggtctgcttcttgtaaaaacctgaacccagaaacaacacaatccgttgcaactccaacagcctctgggtaccgagctc

SEQ ID NO: 170827 - DNA, 1015 bp, Homo Sapiens
  misc_feature (588)..(588): n is a, c, g, or t
  misc_feature (959)..(959): n is a, c, g, or t
acaataggctgtagcagaagaagataagatgacacctgaacagctggcaataaagaatgttggcaagcaggaccccaaacgtcatttggaggaacatgtggatgtacttatgacctcaaatattgcccagtgtatagcagctatgttggatactgtcgtcatttaaataaagcaacgaaaaacgctattaatgatgccttcagttgtatattcctctgttgtacctaatgctcaaaatcaagggacctctgaaggtgtacttggctaaatgtaagacatctggcatcatttgcagcactgtaacaccttcagtctcagttgtgcaattacttctgtttctttagccagggtctttgcagattctaaagttatacatgaatacatcaaagtggacaaattttgttaacatcccatttaatatttgaaaaaatcagtgccacaaatatattttgattgtcacttacaaaataaaatagatttaccagtccccacaaacaccaccctaaccacacgccacttgcccggcccccctccggccctcgaacaactttctctaaacccatctcgttgggcgtgcccgggcccagntacgccaagcgccaccatgccccatcaccctggttttccctaaggaaaatctttggcccatgcactaccggccttggcattcctccccaattaacaaaaaccccccggcgcccaaccccaccggttctgaacaaactgcccaatgggaccttctaaaggcctttacctggcatttttccccccgtattcccaaaccgaccctcgatttcaaattcacctgcctcccccccgtaaacccccttcgaacccctggtggccccttcctttaatacctttcctcctcaactatggcaatccctccccaaaccgttttctgatgacaccctcacactcgctagccccgcctctacggcccctgtttacccccccgnatttataacttgcgcccctatggccgaaaaacacgggcgcaaatacaaacttgtat

SEQ ID NO: 170828 - DNA, 819 bp, Homo Sapiens
cagagttgctgactcaggttgcctcagaacatttctacttctggctaaatagtttgaaggagttttcacatgcagaacagtgtctcactgggttgcaagaggaaaattataatacagcactttcttgcattgatgaatctataaaattctatcacaaagggattgcttccttaacagcagctagtacaccactgaatcctattaagctttcagtgtgaattagtaaaactcaggattgaccttttacaagccttctctcaacttatctgtacttgtaatagcctgaagacaagcccaccacctgcaattgccacaacaattgccatgaccttaggaaatgacctccagaggtgtggtcgcatctccaatcagatgaaacagtccatggaagaatttcgaagccttgcttctcgatatggagatctttaccaggcatctttagatgctgactcagcaactttgaggaatgttgaactacagcagcagagctgtttactgatatctcatgcaatagaagccctgattttggatccagaatcagcaagtttccaggaatatggatctactggaacagcccatgctgatagtgaatatgaaaagaagaatgatgtctgtatataatcatgtcttggaggaggtagaatcactcaatcggaaatatacccctgtttcttatatggcaagtggcattgttttattgagcttttatgtatggatgtgggtttcatacattttatggcacttactgtgtgagttcaaacaaattaacctttctgtgcctgttcccttatccataaaacagggttaatacctacctca

SEQ ID NO: 170829 - DNA, 579 bp, Homo Sapiens
  misc_feature (19)..(19): n is a, c, g, or t
  misc_feature (96)..(122): n is a, c, g, or t
agctgtggaggtgcactgnaaataggacatgtgaaaggactctgattaagctggggacactgagcttgtaaactctgatgaacttttcttgccatnnnnnnnnnnnnnnnnnnnnnnnnnnncagcttctttattctagtagtggcaacatcccctccccaacacatgctgccatcagcctttccacctttgtctgaggagataaaccatgcactgcctggaagcaacagtgatggcctcccctgaggcagttgccaggcaaaataacgttgattctcctcaggagccaccccctaacactccctgtttgcttccagacctataactagactaaagtcccagcagacccctagaggtgaagatctgagtgtcacctatgaggaggtgcaccacacttgaaaagcactgcttgagtttactgatttacgtaaacagaagtctggagactaggcatgggaatggatattaagggtatggcataatggtggaaagaacatttagttggatcaggctgaatatattgattcaggcccacttagtatgaattccgaattcaatgttgcaactccaacagcctct

SEQ ID NO: 170830 - DNA, 297 bp, Homo Sapiens
attcgcgctcggtaccctgatgttatcgcccaacactagatatgaatccattaacactgacatacaattgaccagctgttatagagccattcttgtatccctgaaaggctgaaatgggggaaaagagagaaacagactggctagaatacacagctcctctagtggcattcctgttaaaacaacctcataggtcagagatgccactgatcactcctagatttcagtaaatatataataacattaatcattaatgtctggacttgggtgttggggataacatagggatcctctagatcg

SEQ ID NO: 170831 - DNA, 412 bp, Homo Sapiens
ggaggatccctatgttatcgcccaacactcactatgcttcgtaatttctccaagatctcctcatcagacattttaggcttcttcttctgcttctcagtattccgggtcaaagcatctggtggagtggtgttattttcagtaggtgaaatgggagatgtagccacgtcccgagttggagtgacaggaagtggttcaatcacagaccgtgtgtatacagattttgtgtgctctgggcgtggagcaatcactggtgttggggataacatagatgttatcgcccaacacatttatattcattgcttcctcccactttgtgctctgtaaaagagctacagctggcaagatgttttttcggcccttcatcactgattgcattttccatacagaagagacatcaggggtgtgggtaaaa

SEQ ID NO: 170832 - DNA, 237 bp, Homo Sapiens
tctagaggatcccttatgccaacacacagatgaatctcagaaacgttactgtctgtggaagcaagacacgaaagaatgcagaccgtgtgattctgttcataaggaattctggaatgtgcaaagtgaaactgtcataacaggaggcaggtcactcgttgctggaggcttgggggtgggacgttagatggccagagaggaggcaggaaggcacttttaggggtgtaggggataacatca

SEQ ID NO: 170833 - DNA, 574 bp, Homo Sapiens
gacgcaagcgtccctcatcagctgagctatgatgtatttaaatttgtcgctaatccgtgattccactttcctgaaaaacttctggggcttataaacaacttgctccaggttcctccatgattgtgtttgacgtgttgctatcactgcacgcatcaatgagaagcacacagcttgcagatatcaatccaaggcttcatctgtgtttttggcatccccaacaccaaccgaggcagtcagcccaatgacctggggcagtgggcctgaagatcctccaagtttctgatctagataattaaacatgatcatattgtacgggtgttgtttactagtgttgtggcattcatcaaatatcatcaaagtaaagatggatagtgatggaaatcgttcccttcctaaggtcgaacagcagaaatctgtattctcaaaatactttgaaagacatgcgtatagagttacaggcatttctggagcacagctgagaactgtcccagtgacaccagcatgtgacgacatgacatcatcatctcactccacagatcttgtgacacgcttaaaagggaacgatccaccacta

SEQ ID NO: 170834 - DNA, 996 bp, Homo Sapiens
tcgttcttcgatgacgcacgtctaaaaaacggaagaaacagaagacaatttccagtttatgtactaccaaaagtagagtatcaagcttgttacggagttgaagctctgactgaaagtgaactttgtcgcttatggactgaaattttattgcattccaacagctcattttatgttgggcatatcgatgcatttacttcaaaactttttctactggaagaaattacctcagaagaattaaaagaaaagctttcagcactcaagatttccaatttatttaacatcctccaacacattctaaagaaactaagtagcttgcaggagggttcctacttgttatctcatgcagcagaagattcttcactcctgatttataaggcctctgatggaaaagttactaggacagcatacaatttgtataaaacacattgcggccttcctggtgtaccttccagtctctcagttccctgggtcccattagatcccagcctgttattaccatatcatatccatcatggaagaataccttgtacttttccaccgaaatcactggataccacaacacaacaaaagattggtggaacgagaatgcctacacgcagccacaggaatccagtttccatggaaaccaaaagcagttgcttgcctgctcagcaagttgaaagtatgttatcccctacactcctacatttcttgcttttaagaaactaaatccttcaactgacgcgttgaaaatactaagtatctctaattatcggcccccaggtaaggggtaggaaggcaactatttactgctggggtaagcaggagatttcactattagacttgaaaaagggaaggagaatggagaagggagcccttctggctttccacagttgataggagaaggtggcctccataggtgtagctgaaaatgcagtgaagctatggcatgtggctgttgggtttggcctgtgacaagtctagtctggtgtcagcgtgtgtgttggcgatattatc

SEQ ID NO: 170835 - DNA, 656 bp, Homo Sapiens
ccaacacagccggacaccacagccacccagcagaggccttatggatatgaccaggacagtatggaaattaccagcagtgaaaaagtacttacattccagtagccagtatctattagcagccatatgtcacctcagcactgtggacacctccctgtgaagagatccttccattccatctagtttttggaaaaaccttgtggataagtggctgtttcatcagtaagcagcctttgtggtttagttataaaaggctttagtagctcaaaaatactcttgatttcacatttctactctagatggcaacattggacagaaaatgcaatgacataaccaatttgtaatgattttggaactgtgtttcaaatggactgttacagactgaaaggtgtgaacagctttgtatgtttatgaagggtaagggaatttaatacttttccacagatttttttgtaaggggaagagggaaatgtacactttttacagcagcaatattttgtatattatgtttatttcatgtggtgaatatgcaaggcggtacactacgcactggacagcatcagaaatcctctgttaatgtggactggagcatggtagatgcttgattgttttggtctcaaaatggtgtgctataaagataaagtattgggataacagta

SEQ ID NO: 170836 - DNA, 863 bp, Homo Sapiens
  misc_feature (809)..(809): n is a, c, g, or t
  misc_feature (825)..(825): n is a, c, g, or t
gggggggcgccagagccggggcacctgcgcaggcttggctgcgccctctcgcgccgcacgctctgcgggttcctcccttcttccgagcctctcctctggccgccgcgcgggagagaggccgagatggcagatgagattgccaaggctcaggtcgctcggcctggtggcgacacgatctttgggaagatcatccgcaaggaaataccagccaaaatcatttttgaggatgaccggtgccttgctttccatgacatttcccctcaagcaccaacacattttctggtgatacccaagaaacatatatcccagatttctgtggcagaagatgatgatgaaagtcttcttggacacttaatgattgttggcaagaaatgtgctgctgatctgggcctgaataagggttatcgaatggtggtgaatgaaggttcagatggtggacagtctgtctatcacgttcatctccatgttcttggaggtcggcaaatgcattggcctcctggttaagcacgttttggggataattttctcttctttaggcaatgattaagttaggcaatttccagtatgttaagtaacacacttatttttgcctgtgtatggagagattcaagaaataattttaaaaccgcatacataataaaagacattgttgcatggcttaaagtcaaaaacccaccccctcccccacttttaacacccctctcctccccatataaccgtcgttccgtcccccgccccctttgtaaaccgctcggttaccgctccattgcatccattttccctgctcatcgcccgcctacatccgcccnccggaaccgaaccgtnagtccaatcgtgcgtgccgcccgcccttccgatttaaa

SEQ ID NO: 170837 - DNA, 632 bp, Homo Sapiens
gggtcccttcttccgagcctctcctctggccgccgcgcgggagagaggccgagatggcagatgagattgccaaggctcaggtcgctcggcctggtggcgacacgatctttgggaagatcatccgcaaggaaataccagccaaaatcatttttgaggatgaccgggtaggtactgggcaccacctctctcgcctgctgagtgccttgctttccatgacatttcccctcaagcaccaacacattttctggtgatacccaagaaacatatatcccagatttctgtggcagaagatgatgatgaaagtcttcttggacacttaatgattgttggcaagaaatgtgctgctgatctgggcctgaataagggttatcgaatggtggtgaatgaaggttcagatggtggacagtctgtctatcacgttcatctccatgttcttggaggtcggcaaatgcattggcctcctggttaagcacgttttggggataattttctcttctttaggcaatgattaagttaggcaatttccagtatgttaagtaacacacttatttttgcctgtgtatggagagattcaagaaataattttaaaaccgcatacataataaaagacattgttgcatggcttatagccc

SEQ ID NO: 170838 - DNA, 525 bp, Homo Sapiens
ggcaatgattgatgatcactccgtggatagagaggcacactgtcagaggtgaccggagaactgagttgcaaaatatattaagatctggtagaggtaccagcttcctttccagctggagaggccccaacactggatggttctgtagggagcctagggagcctggtcatcaacttgcaatacctcacagagccagttcacatcccactctgagctcccacgagaaacactgcttctccaggcccggggttgttggggagagaggcagaggcagctggagcgccgttctctcctgctgggacaccgcttgggctttggtattgactgagtggctgacagttatcttccaaccccaactggcttgggggcaggacaagggctaggcttgatggtggccaggcttgcctgctccccacctgggatgcccctgctctggacctctcatttctcttcattggtttatttttcaatgcatctttaatttgtaaagaaataaaataaattaagatgtaaccattagcctcaaaa

SEQ ID NO: 170839 - DNA, 1233 bp, Homo Sapiens
ataaaagtagacacatttcatttgttaatttagttgtgtgtgtgtgttaaaaggagctaatgcttattctgttaatgtaaacttttgaagatcttaagtgtattgctctttcatcttaaacactttcgaggatttgcagtgcgtctagcacctagattacagccaggaacattggttaagaactgttggaaacaaaactaaaagcaaactcaacatatgtgatgtttatggccctcagatccttagtattgtgtgattttcccccgttaacatgtctttctaaaattgtctattaaagcagaggaaatacctgccaaaggaagtatgtattgcattaatcagggcataactaatattctcctgttcagaataatacttatttacgtgtgaaagcaacatggatgtgattcccaacacagaattttcatgacccttttattgtatacaaataaataccataacagttacttggttagacatcaaatctgtgtgcatgactatgtgcttatccacttaagacaataggtaaaaggggatctgagaaattatgtaatagggagtgggaataaaactacttaattcctgtgggcaggttatatttttaagttcaaatgcattgctttaacctttggttacttttattctgttaaacagaattgaagaaagagtattataccagagtgtagtaggctagggtgattgtaagaactctgtaatagaatgtcattgtggatgttacctttttcagatccaagcatataaaaagcctgtatattttttaaaaacacatcttaactccacgctttacgatattataaaagttgaatggttcctcttggtaaggatatttgcttacaagtgctaggaaataactcactgatacctgcgttaacatactttgttttgcctagagaggggcaataaaaatgaaccaaaggatatttccagaaaggattaagaaagctgtttaagaaggccatgactctttaggtgtgtatgtgtacctttcagcatcctaggaatttttatactaaaagcaaaatgttttttccagttagtcttcttcaaggaattactattgttcctttggtcacaggtaaaatcagtgttgggaattataatttgagaaaaatattacccagtaacattgaatgtagatggctaaacgattcttactcagtgtgatgtataatgatgcaacagggacccttgtaaattgtcatacgccaataa

SEQ ID NO: 170840 - DNA, 240 bp, Homo Sapiens
ggtacctatgtattgccaacactgatctgctagtactctgaaagcacctccgcgacccgacaccagatgaagggggaagatgcccagccacaggagatggcgtccacaagcttcccaagggccagtggtcccagtcctgaattcacgacagcacggggactctgacgggaagagagggagcccacagaatctgcccatagaacatcattttgcttgtaaagagtgtgggggataccatca

SEQ ID NO: 170841 - DNA, 506 bp, Homo Sapiens
  misc_feature (387)..(401): n is a, c, g, or t
tagtgtgccaacacagattcatttcagttattaaataagtacttaatgagaggaagaaagaactgagcagtgttttatttaggacttggagaacatgggtgagtaaacagtaacaatgtcctaaatgggaaaggtgttctaatttcccaaaagtcttcttgtaattatatttgagacatcttacaatagtatctggctattaaggcagaatgtatttgcagatttaaatattttgcaactgcccaaagatatccattagtgttggggataacatcacgcaccaaatgtaacaagtaaagaaagagaaaagaaacatgaaaagtggctcaacagtcaaagacaagtttaacttctggagaataaacctgagaggggcttctggacaannnnnnnnnnnnnnngggttaggagtgcttgctcctatggactaagagtttttatgggtttaagggtgagagagttaatcacaggcttggaatgttctctgtgtggggcgataacggttc

SEQ ID NO: 170842 - DNA, 278 bp, Homo Sapiens
tatgttatccccaacacccagcccctgaaggtctgtcactcccctcctgttccaaaccccatgctctttcacagcaggagacaggactgacacagggagactagagaacctgggtttggtttgagagcctgctctgccaataacttgtctgggtgacactcccccttttggggcctcagtttcctcttctgtaaaataggtgcataataatcctgcaccagacgaccattgtgggaattaaatgacatgatggatatgaaagtgcagtgttgggcgat

SEQ ID NO: 170843 - DNA, 813 bp, Homo Sapiens
agcgggaggccctggagaatgccaacaccgacaccgaggtgctcaagaacatgggctatgccgccaaggccatgaaggcggcccatgacaacatggacatcgataaagttgatgagttaatgcaggacattgctgaccagcaagaacttgcagaggagatttcaacagcaatttcgaaacctgtagggtttggagaagagtttgacgaggatgagctcatggcggaattagaagaactagaacaggaggaactagacaagaatttgctggaaatcagtggacccgaaacagtccctctaccaaatgttccctctatagccctaccatcaaaacccgccaagaagaaagaagaggaggacgacgacatgaaggaattggagaactgggctggatccatgtaatggggtccagcgctggctgggcccagacagactgtggtggcctgcgcagcgagcaggcgtgtgcgtgtgttggggataaatacgtgatgttatccccaacactagcaaatctaggtcctactaaatacaaatctctgggtggatgatcttctagtactgtatttttaaattaaggagttttagttataatgaaattgatttgtagtctgttttgccgtaaacttgtttttctttaaattgttcttacagtgatatcttactatttttaactgtctggggtttctgatatggggatttcagcccctggttaatcagtcttgtccctacaagtccctgatgcagtatgtttatttgtgatgtttaaagaacatttcttggctgggcgctgcggcttgcgcctgtaatctcagca

SEQ ID NO: 170844 - DNA, 310 bp, Homo Sapiens
  misc_feature (130)..(254): n is a, c, g, or t
ggaccgtatgtatccccaacactaaggtatcctgggtgttatgaatcttctgagggcatcttcaggtagatttgttagcctcctggtgttgcttttctttgggagatggagtctcaccctgtttcccagnnnnnnnnnnnnnnnnnnnnnnnnnnnnnnnnnnnnnnnnnnnnnnnnnnnnnnnnnnnnnnnnnnnnnnnnnnnnnnnnnnnnnnnnnnnnnnnnnnnnnnnnnnnnnnnnnnnnnnnnnnnnntttgtgtgtgtatcttgagtagagatggggcttcaccgtgtggggcgataacatca

SEQ ID NO: 170845 - DNA, 149 bp, Homo Sapiens
tgatgttatccccaacacatggaaaaagtacccaggctgacgaatttcttcccatcattaaaacataaagatctgcattagtcactcagtgaagtaaaacccacacaaattctacctttgggaaaggtgttgggcgataacatcaggga

SEQ ID NO: 170846 - DNA, 506 bp, Homo Sapiens
ctgtgttggggataaatacatgttatcgcccaacactatcacagtatatcattaggtgaagaaatcactaagacaatatgtacagtatggtttcaatttttaatttgtgtgtatatacacatatgcatacaagtagcaaaaaatagaacaaaactacatatctgggagaggaaatttcaggtagttttaaattttgttcttttttgctttctgcttttctgtaaaacttaggtaagttgtatcattaaaaagggtgttggggataaatacggtatgttatcgcccaacacctaaatttaaaaatgtactaatcaaaactttttctatatatagttcccaaacaggaaaccattcttcatatagatttctaggtctctggaaagagatctttcccctcaaaatgcctcttaaccaaccataaatcatggtagaaaataaatctagagccttacgtttgaatagtttgttgtttgtttgtgttggggatacatagtgatcctcagatc

SEQ ID NO: 170847 - DNA, 677 bp, Homo Sapiens
gaagtatcgcccaacactgcctccctcgcctgtgggaacactactagcttatgagggctgctcatcacacgagtgcttagcactgttggcatataattatatattatcttcttctggattgtagaattctgagagggaagaaagcaggtctaactgccttctgccacaagtagttccaaggctccccaccttgtccctgtgccctctactaagactgcatttgaagttacttcttcactggggctggtggggtctggcttctcagatactattcaccctacaggatctaccggctgccgtatcctacttcccctttctgtgtcacctgaacacttcaaaacctagactgtacatactgctacgaatagctgatttttaaatactttatacataatacataaattcatagtatttatgaatagtaatgttagagcaccatgttaaacctaacatcatgttaacatagtaggcactatttatggcctggcacagagtaagcatttcataatgttagcagcaaactgctgggctctgtgtagagcatttggaattctttaattcattttatcctgtttacctgatgaggaatgagaaattagagtccccaagacaaaatctagtaaagatcgtatggtaagtggcagaactgatcggcaacttctagagtcctggtcttg

SEQ ID NO: 170848 - DNA, 350 bp, Homo Sapiens
gaggatcccgtgatgttatccccaacacctgaaaacaggatgaaagccctgtttactgcaattccttttacccagtgtatcatgtctacctatcaacagaaaattacaaagcatacttaaaaggcagaaaatgcacgtgatttatccccaacacctgaaaacaggatgaaagccctgtttactgcaattccttttacccagtgtatcatgtctacctatcaacagaaaattacaaagcatacttaaaaggcagaaaatgcagtttgaagagactgaacaagcattagaaccagagtcagtcgtggcaggagtgttgggcgataacatcacgggatcctctagacgcctcc

SEQ ID NO: 170849 - DNA, 407 bp, Homo Sapiens
cacaagagcaaaactccatctcacacacacacaacgttagaaagaacatttgcctttgaaatactgtttatgaaaatataaagactctaaaaattttaaatgacagaaacctttcacttaagagatcatacttgcaataaaaatattgcctcctagtttaaccattttacaaatatgacttttacatcatgtaaaaggcatccctatatttcacaaaattagatagactcaaattttccagttttaagatcaactttagaaatgggcctcggttatagtgttaggggagttaacattcatgggatgattattcaagtctgtaatgagattttaaaaattcaattcagttagtaaaatcatacatgggaggtgggtgtcggggataacatcagggcaccgagctcgaa

SEQ ID NO: 170850 - DNA, 169 bp, Homo Sapiens
tgatgttatcgcccaacacagttgccaggctgtttaacagtcatttttgatatgggttaacttggttatttcagatttgccttgactatccttatcaagaaatctgagtggaatttagacaggaaaagagatttcttaattctgactccagtgttggggataacatcac

SEQ ID NO: 170851 - DNA, 327 bp, Homo Sapiens
agctccgtccgtgatgtatccccaacacttaaaataagcaaggtctccacacagtccctgcccaggcctagctgccaccccctgccctggctcagaccagaagggccagcaggccacaggcccacctccatctcaacccttgtgcccagagccctttccagggccgcctccctgcccggacacgccatgcccgactgtctttcaccctccatgtccccatccaaaaggctaggacctgcctcctcctagaagccctccctgaatgcgtctgcggccacatgtgcactcacctacatagaaggtgttgggcgatacattcacgtaccg

SEQ ID NO: 170852 - DNA, 267 bp, Homo Sapiens
catgctaagtgaaaaatgcccaacagaaaagaccagatattgtatgactacattcatatgaactgtcccaaatggacaaatcctttcaaatagaaagtaaattagttgttgccaggggctgggtaagggggcacttgggagtgactgctaatgattacacgggtttctttgggagttgttaacatattctcgaatgagccaggctcacacctgtaattccacacttcgggaggctgagctgcgactgcttgagccaacggtaccgag

SEQ ID NO: 170853 - DNA, 126 bp, Homo Sapiens
cgagccggtacgtatgtatcgccaacaccaggtggaagcgtgcaaggcttgggactgcatcttctgaagcaacagccttagctgtccatgggccccttttggtcacagctggagctggagtggctg

SEQ ID NO: 170854 - DNA, 676 bp, Homo Sapiens
  misc_feature (35)..(35): n is a, c, g, or t
caacaccgacgcagtaataatattaggaggtaagnccttttgggggttggttaggtcatgaggactctgcccttgaaaatgggactactgccttataaaagagaccccagatagctgccttgctccttccaccatgtgaggacacagggagaagacgccatctatgaaccaggaaacgggtcctcaccagacactgaatctgctggttctctgctcttggactctctggcctccagaactgtgagaaatgaattttgttgtttataagccaccatgcagtttgtggtattttgttatagcagcctgaacagactaaaaccgaggtgtatttcttggcaattcaatttgttttagaacatgatgggctgtgattctagaataaaatatttgcaaagtggtagttaacaaaacagaacaaaaaacaaactttgaacaaagcgccagtttaaacaatcaaattaccaattgaatacaaactaattaccaatattcttcctgatggatgtttgggaaggcaaacatagtttcactgttctactgcatttcataaattacaataatttatgatttacaatgtgcttatgaaggcagtgatctttagaagagctggctgttatattgcctagattgtttaaaactgcaggagtgttggcgataagggacctctagagcgccc

SEQ ID NO: 170855 - DNA, 274 bp, Homo Sapiens
actgatgttatccccaacacaccctcactcattccagggaagcccaggtaggtggtgaacccgctgccacgtctatcagtcctcttgttttatgcaaagatttactgtaaagtagatttctttccctccctcccccattcttttattgtaaatattgtctctaaatgtgtaacatattataaagaatttataaggatttttaaagatgttttgctcatttacaaaagtgttgtaacagtgttgggcgaaacatccgggatcctctaggcagccc

SEQ ID NO: 170856 - DNA, 597 bp, Homo Sapiens
  misc_feature (1)..(1): n is a, c, g, or t
ntgagccaccgcgcccagcccaattttgtatttttagtagagacagggtttctccgtgttgggcgataacatcacatcgcccaacacccaaccaccaaatctgctaacccagttgcattggtgcttttatagccttccttcctccctcttactaagaatgaaccaacactattcctatcaaagcccaaccctctagctttacattgactccatagatgtctattttctggattgtcaatttttttcctgacacaataattctattagcaatacaaatatgctgtaaaatctcttaaacttttttctctgcatctttgaactgctgttctcttttccttctccccttcatagcagaactcctcaaaagagttgctacctataattcttcccttccagttctctcatgaaccagctacaattaagtattcacccccaccactccatggaaactgatcttgtcaaaatcatcaatagcctttgtgtggtgaatccaatagccagtttacattcttcttactaggcttctcatcagtattcctagactatttccttcactggcttcgacaaatgctttcttggtaaacctccaatatctcg

SEQ ID NO: 170857 - DNA, 399 bp, Homo Sapiens
tatttatccccaacacaaagataatgtttgagatgatggatatcccaattacactgatttgataattatacattgaatacatgtatcacaatatcagatgtatccctgaaaatatgtacaactatatcagtttaaagatataaaaaaaattttctgtccaaagttaaatatgtacaactacgatatatcagtttaaagatacaaaaaataataattttctgttcaaagttaagcatatacatggcacctatgatgctaaaaccaagggcctttaggtctggaagagacacataaagtcaggtcctcgcgaatctacttctgaaggggacagaatcggtataggcatatgacagtctagaatcaagacacaaggggtgttgggcgataacagggtaccga

SEQ ID NO: 170858 - DNA, 480 bp, Homo Sapiens
gctgctctctgccacctgcagagctacttatctgcaggtttcccaataatcaaacaatgagcagatcccgcctcatcttttcacaagtagtggaacatgattcagtaaaactcagcttcgtttaacttacaaaggatggcctggcccccagtaaacgccgattcctgctcgcggccttctacgcccattactggagcagcagccatcagtgtagacgacgacgaagtctcctgtgggaaaaggaagtacatgctgctgggctgaccttactaaaaactgaaattcacctcaaaaatccactaggtcgacttagcattttaaaccgagagggtattttacaacgctgcagacgttttctctctaggaaaacatgctccattccttacaagggggcacctaacatttatgcttggaatccacttacattttgatcttgcaggccaggcaagttcggggtgaaggcaatcaccttgtaaaact

SEQ ID NO: 170859 - DNA, 1636 bp, Homo Sapiens
ggggacggaagtgcggtgttgagcgccggcggctcgcgcccacgctgggccgggagtcgaaatgcttcccggtgccgggagtgagcgatgagctggcttctgttcctggcccacagagtcgccttggccgccttgccctgccgccgcggctctcgcgggttcgggatgttctatgccgtgaggaggggccgcaagaccggggtctttctgacctggaatgagtgcagagcacaggtggaccggtttcctgctgccagatttaagaagtttgccacagaggatgaggcctgggcctttgtcaggaaatctgcaagcccggaagtttcagaagggcatgaaaatcaacatggacaagaatcggaggcgaaagccagcaagcgactccgtgagccactggatggagatggacatgaaagcgcagagccgtatgcaaagcacatgaagccgagcgtggagccaggcgcctccagttagcagagacacgttttcctacatgggagacttcgtcgatcgtctacactgatggctgctgctccagtacatgggcgtagaaggccgacgagcagggaatcggcgtttactgggggccgggccatcctttaaatgtaggcattagacttcctgggcggcagacaaaccaaagagcggaaattcatgcagcctgcaaagccattgaacaagcaaagactcaaaacatcaataaactggttctgtatacagacagtatgtttacgataaatggtataactaactgggttcaaggttggaagaaaaatgggtggaagacaagtgcagggaaagaggtgatcaacaaagaggactttgtggcactggagaggcttacccaggggatggacattcagtggatgcatgttcctggtcattcgggatttataggcaatgaagaagctgacagattagccagagaaggagctaaacaatcggaagactgagccatgtgactttagtccttgggagaacttgagccagcggctgtcttgctgcctgtacttactggtgtggaaaatagcctgcaggtaggaccattgcagtgatgggcagatgcgtctttcacacggaatcaggcacagtggccttctgtgacatgtgtttataaaaaatggttaagtatataataaattgaacatctttgagattggagaattagtgtgagatttccacattatgtttactgggttcaatactgtccttgcttgttttattgcaggcaagcaaggcaaatggcctaaaatgctgtggcttatattttgataagaaatcaaaaaaccattggttaaaagatgcaactcagaagtctggaagtattctgaaagcatccatttaccgtccagttgacaggtttgagtctcctgcttgtataggtgacttgtgcccatgggtacattaaaggaacatgctgcccagggcctgggcggacagctcagtgggcaggatgtgtgctgggtctcagccccatgtgcctgcttgctgggcagttagtatagggcaaagcctgcctgcggcgaccctggctgctaggccattctctaggaacagctgcgactcataaagaccaagaagcataaataaactttcaaaaatttatttggctctttcgttaaaaactgtgcaaatt

SEQ ID NO: 170860 - DNA, 255 bp, Homo Sapiens
atagcggtacatgtatcccatacttccccagcccattgtctgattggatcgaatatctgctactgatgtaggcatctctccccactgtagaactacatccttggtgatccttccatatgtgtttacataaaccccctcatcttcatagcacaccagaagctccattccatctgtattggggaggatgatgattgcatggggtttgatgctacactggatatgtgttgggcgataacatttcgggatcctctagaa

SEQ ID NO: 170861 - DNA, 948 bp, Homo Sapiens
tatagcccaacactcacatctacagtgccctcatcaacgcggccatcaggaagctgaactacacctatctcatcagcatcttgaaggacatgaagcagaacagggtcccggtgaacgaagtggtcatccgccagctggagtttgcagcccagtaccctcccacctttgaccggtaccaagggaagaacacctacctggagaagattgacggcttccgagcctattacaagcagtggctgacagtgatgcccgcagaggaaaccccgcacccctggcagaagttccggaccaagccccagggggaccaggacaccggcaaggaggctgatgacggatgtgcccttgggggcaggtgatgggagcacagctggaacaatgtgctcggcccccagtgctctgtgggagccccaggacaagtgagctggtgtcacctcctgcctgggggaagagccaggccctgaggaacagccgcagcgtgtcacaggtgttggtgaggacacacactaggcccaaggtgcctgtgctcccagcaggtccaagtgcagctccagccacctttgcgtgtcaccttcacgggacttccagctccagctacctttgtgtgtcacctcacacaccacaagggggctggggcatctggtccctggggcctgggccgccccgccgggttccataggccgatgctctgaaagaagagacgtgggggctcgagagatttaaagattttatttttacaaatcacagctgatagacagcgaagccttccccatagagaccgtgctccaactcggggcctggggcactgctcgctgctcccaggaagggcggtggcgtgacaggccagaaacctgcggaagtcagagtccaggggtggagcgcgccagcctcagccagagcagccacgacagccacagtggtgtgccactcgatgatgccggccctggcaac

SEQ ID NO: 170862 - DNA, 924 bp, Homo Sapiens
  misc_feature (850)..(850): n is a, c, g, or t
gggctgaagagcggaagccttctgtcgagaagcagctacccaagctccaggagcttccgaagaaacaggaccagagagggaaggtgacctgaaagtcacagaataattttttagagctgaacaagaatccaagcctgcaactgcagagacgagagatctttctgctgtctatactcttggaaagcacatcctaagatctttgcagattatcctgtggaaggaaaatgcctaaagtcaaaagaagccggaaagcacccccagatggctgggagttgattgagccaacactggatgaattagatcaaaagatgagagaagctgaaacagaaccgcatgagggaaagaggaaagtggaatctctgtggcccatcttcaggatccaccaccagaaaacccgctacatcttcgacctcttttacaagcggaaagccatcagcagagaactctatgaatattgtattaaagaaggctatgcagacaaaaacctgattgcaaaatggaaaaagcaaggatatgagaacttgtgctgcctgcggtgcattcagacacgggacaccaacttcgggacgaactgcatctgccgcgtgcccaaaagcaagctggaagtgggccgcatcatcgagtgcacacactgtggctgtcgtggctgctctggctgaggctggcgcgctccaccctggactctggacttcgcaggttcctgcctgtcacgccacccccttcctgggagcagcgagcagtgccccaggcccgagttggagcacggtctctatggggaaggcttcgctgtctatcagctgtgatttgtaaaaataaaatctttaaatcctctcaaaaaggagataaaggnaacattagagcgatctgtacgcgagtcaggaaaacagaaaggggtactccgaggggttcttatgtcggggggcg

SEQ ID NO: 170863 - DNA, 895 bp, Homo Sapiens
ggggccagcctcagccagaagcaggcaggacagccccaggggtggcactggatgatggggccccacttccaggttggttttgggcaacgcggcagatgcagttcgtcccgaagttggtgtccccgtgtctgaatgcaccgcaggcagcaacaagttctcatatccttgctttttccattttgcaatcaggtttttgtctgcatagccttctttaatacaatattcatagagttctctgctgatggctttccgcttgtaaaagaggtcgaagatgtagcgggttttctggtggtggatcctgaagatgggccacagagattccactttcctctttccctcatgcggttctgtttcagcttctctcatcttttgatctaattcatccagtgttggctcaatcaactcccagccatctgggggtgctttccggcttcttttgactttaggcattttccttccacaggataatctgcaaagatcttaggatgtgctttccaagagtatagacagcagaaagatctctcgtctctgcagttgcaggcttggattcttgttcagctctaaaaaattattctgtgactttcaggtcaccttccctctctggtcctgtttcttcagaggaaacggcgcgagaatcctagaggaaaacccccaaatctaccgtcccctcagaagaacgaacgtggcgccgcctcctctcgggagctctctccggcctcaaggtccaaagcccgaacacatcccagtggctggctgagagtccagccactcatatctccctccaggacggtgcagaccaccggtctcccgcctcagccgttgccaaggtaatcgagaacagagggaaaacacataccggaagctcctggagcttgggtagctgcttctcgacccc

SEQ ID NO: 170864 - DNA, 851 bp, Homo Sapiens
cggacgcgtgggtcgacccacgcgtccgggagcttccgaagaaacaggaccagagagggaaggtgacctgaaagtcacagaataattttttagagctgaacaagaatccaagcctgcaactgcagagacgagagatctttctgctgtctatactcttggaaagcacatcctaagatctttgcagattatcctgtggaaggaaaatgcctaaagtcaaaagaagccggaaagcacccccagatggctgggagttgattgagccaacactggatgaattagatcaaaagatgagagaagctgaaacagaaccgcatgagggaaagaggaaagtggaatctctgtggcccatcttcaggatccaccaccagaaaacccgctacatcttcgacctcttttacaagcggaaagccatcagcagagaactctatgaatattgtattaacagaaggctatgcagacaaaaacctgattgcaaaatggaaaaagcaaggatatgagaacttgtgctgcctgcggtgcattcagacacgggacaccaacttcgggacgaactgcatctgccgcgtgcccaaaagcaagctggaagtgggccgcatcatcgagtgcacacactgtggctgtcgtggctgctctggctgaggctggcgcgctccaccctggactctggacttcgcaggttcctgcctgtcacgccacccccttcctgggagcagcgagcagtgcccaggcccgagttggagcacggtctctatggggaaggcgtcgctgtctatcagctgtgatttgtaaaaataaaatctttaaactctctcgaaaaaattatacatccaacacaacaaacaaagtaacac

SEQ ID NO: 170865 - DNA, 628 bp, Homo Sapiens
aggtatgcccaacacagtgctctctcatggatagctattttcatagcaaacccaaatttcaaaatgtcagcctgataaataggggagatttgaaaggatacagtcaaggtgtttcgttttaatacttaaagaagaaaaagaagcctactcttgtttctaacaatcttttagagctttaaggaaagaggatgttgtattttgaaaagagacctggttgtatcttgtctagaagctattttaatatatacaaccattaagtaggttcagatcatattatgaggctcatttttttctctataatagggtgaatattagttagaactcagtaaccacaaagagctataaaagtttaaaacataatgtcttacttttatttccattttcttctgagtataggtgccgtcttggtatggtaaaataagatagcatctactagattctggtataatatatagcctggtagggtggctatgcacatagactttagagttgccttatagctctgaaaactatctttactggtattcaaaaccattggctgttagattttggacaatatttagtatctccaaggtttccctttctcatttctaaaattaggataaatagcaccagctacatagggtta

SEQ ID NO: 170866 - DNA, 502 bp, Homo Sapiens
ctcagccggaccggatgtatcccaacactcgagtctagctgagtcatactcgtcataatataaacatcattttctcagtgaagcttctggtatgcccaaatttgaataagctgttctatgtgcttccatagcatcctgaattcctttatgaaaggatctaccatactgtgttgggcgataatcattatcgcccaacacgcaaaaggttctgaagggcatggaatgagaatccctgtgctctcggccggctcagggcctgtgtcctggccgccagtcctccccatgaccccctagcggaaactgacgctatcagattctcagccttcgtttttcatgatggcctctttctcatccccataaaatgcagcatgtaaaaaacatcagaggaccctcagtttcttgtggatttatctagtttatgtttccgtttgccgtcatgtgtttaaaatttcttcctgttgagtacatggtgtagggcgataacatcacggggatcctctag

SEQ ID NO: 170867 - DNA, 326 bp, Homo Sapiens
tgtatcgccaacactgtacattaagcaggatgtacctgcccatatgcaaatatcaagccccattaaacatgcaggaagtaacctttactctcttagtcaggcaccttgttgcaagagagaaactcaaacacaagtctgaagaccactgagaacctttacattttcaccaattcttccatggtagggctgcacaaagtgcttattatcacacccagtatttcataagcatgtgtccatgacgtcagtaaggcccaagcagtcaagcatacagtcaggcaggcaagtaatagaaggcaatgttccttgcatttccacagcccttcaca

SEQ ID NO: 170868 - DNA, 244 bp, Homo Sapiens
gcgggcgatctagaggatcccggatgtatcccaacactgtacaggtcttaaagcctttagttgactcccttcctgcagacaatttttttcacccaaactagaaccacaaagaaataaaattaatgtttattttgaagtcaccaatttccttctccctggcatgaataagtaaaccatttggaatatgaaataattcacaagtttcctgaaaagacataatccgcccgggcgcagtggctcacac

SEQ ID NO: 170869 - DNA, 353 bp, Homo Sapiens
cggtacagtgatgtatcccaacactttgctgtgtctattggttagaagcagacacaggctgtgtcattcttaagtggaagggattgcacaagagcatgaatgccaggaggtggactcatggcagccactcgtatgagtattatgagtctatctgccacagtaaggaacagtctgcttctcatgccatgtttcgggtccagcagactccatccctctcaccttggctaagccaatcaccatattccattctctggccacagtgattggatcaaggttgggcataccaccaaggtcaagccaactggggcccatgtgactcaagtgctcagaaaataaagtgttgggcgataaca

SEQ ID NO: 170870 - DNA, 184 bp, Homo Sapiens
  misc_feature (123)..(131): n is a, c, g, or t
gtcggtcgtgatgtatccccaaactgtatctcagatgtcggagagatctagacaccatatcttagagaatgagcagcctcatgttttattccgtaatatgaatttactaaatttattgggccnnnnnnnnngagacagagtcttactctgtcactcaggctggagtgcaatggcacaaaatcgg

SEQ ID NO: 170871 - DNA, 482 bp, Homo Sapiens
tgatgttatcgcccaacacgagaagatcatctctcagcaccaagcagtgatcatagccactcagtctgcacaagtgttgcttgagaaacagggtcagtatctctctcctgaagaaaaagagaaactgcaaaagaacatgaaggaactgaaagtgcattatgaaactgcactggctgagtcagagaagaaaatgaagttaactcactctctgcaggaagaattagaaaagtttgatgctgactataccgagtttgagcactggctacagcagtcagaacaagaacttgaaaacctggaggcaggtgcagatgacatcaatggtttaatgaccaaattgaagaggcagaagagtttctcagaagacgttatttctcacaaaggtgacttgagatacatcacaatttctggaaacagagtgttggaagctgccaaatctgcagcagatgagggtggtgtctcgcagatgaggggatcctctagga

SEQ ID NO: 170872 - DNA, 143 bp, Homo Sapiens
tatccctaacacatgtaacaggaatctatccccagctgttttttgtcaggttgtcaaagatgatgatgtaggtgtgcggtcttatttctgggttccctattctgttcccagtctgtgtgtgaaaaagtgttgggcgataacat

SEQ ID NO: 170873 - DNA, 379 bp, Homo Sapiens
tgatgttatcgcccaacacgggggctcgaacctgggtcgaatagtcgccagagcgatggttagaaaatgtggaactacactggaggacacccgagtactgttaaagcaatcctcatggtgagtaagaaggggagctcagaagcatcagggtaacaatgggacaagggtcgagcaggcatgaggcttatttgagtctgcttcgccatctcagaaaaggaggagtgaacgttagcactagctgacttacgcagctttttagtgcagtagagaaatattgccgctggtttccggaccgaggaactgtgaatgtagaggtctgggaaaaggtagcagcacactgaaaaaggcatataaggatgtgttgggatacttcaggtcc

SEQ ID NO: 170874 - DNA, 301 bp, Homo Sapiens
gtgatgttatccccaacacttactcaccatttactctttatcactctgcaacaaatcacagaaccgatcatctcaggctttttcttctggccctttgtgtccaagattctttaatccatttttgttggtgaacatctcagactatagataagtggactggaccctgtgtcttgggggtggcagttgggattactccccaacaaggctgattttaggcagcatgtgttcactgtgctgtgatttcatctactgtctcccagaaagtgtgttgggcgataagggatcctcagatcatcacgac

SEQ ID NO: 170875 - DNA, 138 bp, Homo Sapiens
ataccggtccgtgatgtatcgcccaacactatagtaaggccttaggttttcacttcctgtaggacaaaaatcttgtaaatctcttaacttttcttaactatttgttcagtgttggggataatcgggacctctagagca

SEQ ID NO: 170876 - DNA, 346 bp, Homo Sapiens
  misc_feature (183)..(299): n is a, c, g, or t
tagccgtcctatatatccccaacacaagaaaatcaattgatgaaatatatcacattaatggaagaaaaaacatatatatcatctcaactgatgcaaaaaatatatttgacaaaattcagcactctatcagaaaaacctttagaaaactttaagaaaatttggctgggcgtggtggctcacacnnnnnnnnnnnnnnnnnnnnnnnnnnnnnnnnnnnnnnnnnnnnnnnnnnnnnnnnnnnnnnnnnnnnnnnnnnnnnnnnnnnnnnnnnnnnnnnnnnnnnnnnnnnnnnnnnnnnncgtgtggtccttgggcgatcacatcacgggatcctctagaacagcac

SEQ ID NO: 170877 - DNA, 242 bp, Homo Sapiens
tatcgcccaacactttgagaggtcgaggtgggaggattgcttgatcccaggagtttgagactagcctgggcaacatggtgaaatctcgtctctacgaaaactaaaaaaattagctgggcatggtggcacacacctgcagtcccagctactcaagaggctgcggtgggaggattgcttgagctgggaggtcgttgttctcaccactgcactctggcctgggtgacacagtgagatggtgtcct

SEQ ID NO: 170878 - DNA, 122 bp, Homo Sapiens
  misc_feature (14)..(14): n is a, c, g, or t
ctagaggatcccgnttatcgcccaacaccacgcccggctattttttgtatttttagtagagacagcgtatcaccgtgttagccaagatggtctcgatctcctataggcacgtgctactaacc

SEQ ID NO: 170879 - DNA, 447 bp, Homo Sapiens
cctccatcgcccccattctggctgagcccaggcccactttggacgtaggcttggcctgggttcctaccctgactggggcagcaactactatcaggtgaagctgactctagactcagaggaagaaggacccctggaggaatgcttggcctacctgactgcccgtttgccccagggatcgctggtcccctacatgcccaacactgtggagcaggcagtgaggctgtatacaaactcgctgaatcaggtagggaccttatggaggaggggcattatgcccaaagccattggtggcaccccagatctcagtaatgcaggggctgttgggtgcttcctgcaaatccctgagagggcagaagatagcttctgttaattcattattcttccaataaatgttgattgagtacctattttcatcagcactgtgctaggtgttgggcgataacatca

SEQ ID NO: 170880 - DNA, 1253 bp, Homo Sapiens
  misc_feature (958)..(1090): n is a, c, g, or t
  misc_feature (1104)..(1163): n is a, c, g, or t
caagcgttctagtgtatataagcactctgttacctgtgatattttgtagactgaactgctccattcctagtcttaattaccatattcagggtacgaactggagggcttgtgtgttagcttctgaattggcaattggaggcggtagtgctcgtgcctgtgtgtatcagaagggataggtatcttgcctcctttctctcaggcagtgcaatcaccctgtggaaaaccgatggacaggaaggagtgttacacactgcttaccctgatttattcagtggttttgttttcattctggaaccatactatcaaatggcgacagactgttccgttccacccccgtgaagtaatcatgcaccgtgtgaatagtatcaagcaggattgctttcattgtatggagcatgaccagcgtgtgactcattctgacatttcagatcctaagaattctaagaacactactagaagcatttgttccctcctagtcaatgcttcatactttttcttgggattcttttagcccttgacattcttgtcccccaaacctgtaagtaggtgaattcctaagataagtgtgtattttcattccaggtgaaaagcaggatgtaccgagcactttattcagtgcatagctttaagccagtgttggattcactaagtggacagccagtctcccagctctctgccttccccaaaagggtcgtagtaggtcacccttctacagcagctaactagagtcctaactaatgggatccagcagggccatttctccagagggccagtatcctattaggagactcttggaattcttaggttctactcaagagtggaaggaccaatcacctctgatattctgtggaaggttttggggtcaaattctgccctctgcattctgtgcaacttgtataaaagtcaagttagtattacatgaatttggggtagggttagtgctttgaaaaaatgttgnnnnnnnnnnnnnnnnnnnnnnnnnnnnnnnnnnnnnnnnnnnnnnnnnnnnnnnnnnnnnnnnnnnnnnnnnnnnnnnnnnnnnnnnnnnnnnnnnnnnnnnnnnnnnnnnnnnnnnnnnnnnnnnnnnnnncaaacattagcccnnnnnnnnnnnnnnnnnnnnnnnnnnnnnnnnnnnnnnnnnnnnnnnnnnnnnnnnnnnnaagaatcacttgaggtccagggagttccagacccagcctggtcaacactggcaaaactccattctctacctaagagaaacacaccaacag

SEQ ID NO: 170881 - DNA, 183 bp, Homo Sapiens
tctagaggatcccgtatgatcgcccaacacacttctcaacacaacttcctaaggaatatatgatcattctcttagtcacttaggaacaacacatggagtcatttggattcctccttcttgccaatccaagtagttgttaaaacctattgggattcttccactgcaatgtgttggggataacat

SEQ ID NO: 170882 - DNA, 298 bp, Homo Sapiens
gcgatctagaggatccgtgatgtgatccccaacaccaccaccgccatatcctgttcaattcccctgatccctcactttagcacatatgggatcactaccaagtaaacttcttgctcattagcctttgttctagaccaggggatgtccaatcttttggcttccctgggccacgtggaagaattgtcttgggccacacataaaatacactaacactactgatagctgataagctaaaaaataaaaataaattttaaacaatctcataatgttttaagaaagtttaggaacttggtgttgg

SEQ ID NO: 170883 - DNA, 662 bp, Homo Sapiens
atcccgtgatgtagtcgcccaacacccaaggagcaggcagggatgggctcagttacaggggacagctcagctctgaatgttacaaagggcacgtcatggaccaccaccttttctctgcttgctctgtacccctaagagtactacaaggcatgtttggttaataataatttgaatactatgtgttcttgtagattctactgcgtgtggctagctaaggtctctaagtagcaagatgatttactttttctggacaataccaggactatatgctgatacaggactggcttgctctaaagatcagattttccagtgtaaaatatatactccttatagggttgtaagagcagaagcccttcatagcctgtttctttttgctctctcttcagccagcagttggcctggatctttgctggtagacacagggaatgttctccttgacgagtggttcccaccctggcagcctcagatcccaccatgttggcagggatgctgaaatccacctgcctatcagcctttgtaaataacaaaaatcacaagtggctctagcatttatgtatactatgatattgggactcgtgatataaataatacaaatgcttttacatgcataattcaatttatactatgtttaatcttaatttactgataataaaaaatactac

SEQ ID NO: 170884 - DNA, 224 bp, Homo Sapiens
cacgaggtcaggagatcgagaccatcctggctaacacagtgaaaacctgtctctactaaaaatacaaaaattagtcaggcatggtgttgggcgataacttatcgcccaacaccactaattatttgtaaatgaacatcaaaatcacaatgagataccacttcatactggctattattaaaaacaacaaacaaaaaccgaaaataacagtgttggggataacatac

SEQ ID NO: 170885 - DNA, 1536 bp, Homo Sapiens
  misc_feature (92)..(92): n is a, c, g, or t
  misc_feature (109)..(109): n is a, c, g, or t
  misc_feature (148)..(148): n is a, c, g, or t
  misc_feature (340)..(348): n is a, c, g, or t
  misc_feature (614)..(614): n is a, c, g, or t
  misc_feature (626)..(626): n is a, c, g, or t
  misc_feature (650)..(651): n is a, c, g, or t
  misc_feature (658)..(688): n is a, c, g, or t
  misc_feature (691)..(721): n is a, c, g, or t
  misc_feature (724)..(743): n is a, c, g, or t
  misc_feature (745)..(747): n is a, c, g, or t
  misc_feature (1482)..(1490): n is a, c, g, or t
cctaatgaataacagacgatgagttacagtgggctcgcccttcccccccgcgagggcgggtttcttacaacccctgaactgttttttattgnggggcgccaccgacccnggggccgtttgtgttctcccgcccgcgctttttttcaangccccgggggagaaaaattaaaatgaccgcaggcgggccgccaggtggcgtttgtttgcgcccccgggcggggcgatatgtttgttttcccccacacgtgcttgtgggagggggctcctcccacgcccgcggagggaagttgggttataaaataacaacccctcttttctccgcagcgtcgcgttcgtggtnnnnnnnnncttttaataagaatttgtccgacccgcttccggccgtctccccgtgtttagaagggggcgggcgaaaataccctctctctaacccccccttttgggggttttctctcgcaacaccccttcggtttcttccccccggccgtttttttctttgtggggaaggattccacggccccgtttctctttctccccgcgggctcttttgttgtcccgggggggtgcccccgtggcccttttccctttgccggggtccttcttgcccaaccctntgggtttcgccngcttttctttgggcgctgggggcnnccccccnnnnnnnnnnnnnnnnnnnnnnnnnnnnnnnccnnnnnnnnnnnnnnnnnnnnnnnnnnnnnnnttnnnnnnnnnnnnnnnnnnnntnnntttaagggaattaaacatttattaagccaggcactgagctgggtattttcaataatgatgtgaatagaaatataactaacatattatattgggatgtctaagattttgtttggcaggcattggttttggcatgcagtaaaaatgaagatgttatgataatagcagttagtgttatctccaatactattgacaaagatttaactacccatgttgtcccctcaaaataggaggagataaatgaataaaaccatggaaaacagagagcacaatgtgccataagcaaagatttacagaatgaaaaatgcaaaataacaaatcagataactatagtcttctataaatctttaagtctaaaaaaatagacattaccataactacatatagaaatgagtttttaaaatccaaataagataatttctggtaaatggctgacttttcccatatcatactatgtttgatgactaaaatcaaataaggaaaagggttatttctaggggggttacagaagtcaatttgtaagagatatcattatcatggctttggacaactatgaggtgacttatagttaggaaaaaatctgcactctatggttttgttggttcttcatatgatgacttactaagtattctttctgaatctttcttgcagccggtttttataaaatataaacatgtaagaatggttattcagaaactcttgcataaccctacaaagtgatgaattagaaggtgtttnnnnnnnnncccagcgacttaattataaaacaatacttctcatttctcacttagt

SEQ ID NO: 170886 - DNA, 248 bp, Homo Sapiens
gggacaatgtaattctttatttctgggtggaaagatataccggattaaatttatctgtttaaaaaaatgacaaaagttatcaccaaaaccccctttcccatcttgcactgtttgttttggattgggtttgggggaaagagatgtttttcttagttgtctactttgtttgaacacttttgttgtggttcaagtgctgttttgtgtgttgggaccaaacagttgtcaataaactttacaagcgagcacca

SEQ ID NO: 170887 - DNA, 276 bp, Homo Sapiens
gagcgatctagaggatcccgtatgttatcccaacacattgacgaatataaaatgggaaaaaacttcagacaagaaaaagattgcacaattcagaaaagagaaagagactttcaaggaaaaagatacatataagctatttaaaaatggaactctgaaaattaagcatctgaagaccgatgatcaggatatctacaaggtatcaatatatgatacaaaaggaaaaaatgtgttgggcgtataaatcagggataccgcagctcgaaattcgataatcga

SEQ ID NO: 170888 - DNA, 1232 bp, Homo Sapiens
gaccacgcgtcgcctcagaggatgtccggcttccagatcaacctcaacccgctcaaggagccactcggcttcatcaaggtcctcgagtggattgcttctatctttgcttttgccacctgtggaggttttaagggccaaacagaaattcaagtgaattgtcctcctgcagttactgagaataaaactgttacagctacttttggttatccattcaggttgaatgaggcatcatttcagccacctccaggtgtaaacatatgtgatgtaaattggaaagattacgtcctcataggcgattactcttcttctgcacaattctatgttacctttgcagtctttgtgttcctgtactgcattgctgcccttctgctttatgttggctacacgagtctgtatctggatagtcgtaaacttcctatgatagactttgttgttacacttgttgccacttttttgtggttggtgagcacttcagcctgggctaaagctctgacagatattaaaatagctactggtcacaatattattgatgaacttccgccttgtaagaagaaagcagtactgtgttactttggctctgtgaccagtatgggatccctaaatgtatctgtgatatttggctttctaaatatgatactctggggaggaaatgcttggtttgtgtacaaggagaccagcctacacagtccatcaaatacatctgcccctcatagccaaggaggtattccacctcctaccggaatataattaaaggggagaaatacactgtatgaagtatatgttgatactatgacatgttgcaaacaccttgagaagcattatttgtttctaataaaagtaatggctttgtcaatatattggtggatttaaaactttgctgctttttatacataaagcctgtgcctttcctagaaagttaagatgtaaatgtattctcacatgtaaatttgaaagttcaggggtctattatgaaatgatacacatgttttaaatgaaccataattttttacactaagctgtttgccttccaaagtgtttacaccttaagccttaacatgtatcttcattcagaaaacagttatattgtcataccatagtaggaagaaaaacctttatttggaatatacactactgtaagtttgtacagatcatatacctaccacctgtctttgcttaaagagccttgattacataaatatgtaggaaaaaacatattgagttcaaaatatata

SEQ ID NO: 170889 - DNA, 769 bp, Homo Sapiens
  misc_feature (650)..(650): n is a, c, g, or t
ggggccaccgggctgctctggtctcgtcggtcccctcctccgccccgtcgtcctgactctctctccctcctttcctcagaggatgtccggcttccagatcaacctcaacccgctcaaggagccactcggcttcatcaaggtcctcgagtggattgcttctatctttgcttttgccacctgtggaggttttaagggccaaacagaaattcaagtgaattgtcctcctgcagttactgagaataaaactgttacagctacttttggttatccattcaggttgaatgaggcatcatttcagccacctccaggtgtaaacatatgtgatgtaaattggaaagattacgtcctcataggcgattactcttcttctgcacaattctatgttacctttgcagtctttgtgttcctgtactgcattgctgcccttctgctttatgttggctacacgagtctgtatctggatagtcgtaaacttcctatgatagactttgttgttacacttgttgccacttttttgtggttggtgagcacttcagcctgggctaaagctctgacagatattaaaatagctactgggcacaatattattgatgaacttccgcccttgtaagaagaaagcagtactgtgttactttgggctctgtgaccangtatgggaatcccctaaatggaatcctgggaatatcttggcttttctaaaatatggataactccggggggaggaaaaagctttggttttggggaaccaagggaaacccagccctacaca

SEQ ID NO: 170890 - DNA, 330 bp, Homo Sapiens
attgaacatggtcttgtggatgagcagcagaaagttcggaccatcagtgctttggccattgctgccttggctgaagcagcaactccttatggtatcgaatcttttgattctgtgttaaagcctttatggaagggtatccgccaacacagaggaaagggtttggctgctttcttgaaggctatgggtatcttattcctcttatggatgcagaatatgccaactactatactagagaagtgatgttaatccttattcgagaattccagtctcctgatgaggaaatgaaaaaaattgtgctgaaggtggtaaaacagtgttggggataacata

SEQ ID NO: 170891 - DNA, 204 bp, Homo Sapiens
ggcgtcttaagccggacagtactaatatgagaataatttctgtatcaaaggtcttagtggtagtcatgtcttaaaagagaccatttaactggaatggaagtgttttcttcggagaaaagcaggaaacattggataaatcttaattatacagaccttgatacttaggcagaaagtagagattctacttaggaaactagaaattac

SEQ ID NO: 170892 - DNA, 566 bp, Homo Sapiens
ggatggtctcgcccaacacaggaaaatgacataatgaaacccacaagatgacagtaaatggaggccataggatgacagtgtgcagacagttacaatgattaaccaggacaaacttgaaataaagaacagaaggtgcaggaggttccaaaccaacagaatacacagtgtgtaggaatgtactgaaaggagatttataattctggccacaaattggtaataggaatatagagaagtaagccaatgggaaaaagagatgattattaactacagagaaaacaaaaggaaatgcaatcatagtacaccagataggtcatccacgaataatatttacatagtcataaaaatgtacacacagactactgatttctttacaaggtgatagaaaacaccaagaggatgaggggagggaggcacatgtgcatgaggaaggcacagtaagaaagctgaatcctcaaccagggcgggaagtcagttctcaaaatccaaagctaagaagtcaagacagatagacaaagttatttaaaaacacagcggcaaataccaaaagacacttttaaatatgtaaa

SEQ ID NO: 170893 - DNA, 251 bp, Homo Sapiens
  misc_feature (197)..(211): n is a, c, g, or t
cgtaagtatgcccaacacagatatggaaaattactttgattcttcccgagtagatacattactgttaaatccctgggatagtttaattactgttaactatcttcctatcttaaaaatgtttacaggtgttagaagaaaattcttgccttcttgctagtgtttttacaggtattggtgcttctgccactcaaaagccnnnnnnnnnnnnnnnctgaaaagtgcttggaagggtgtgtgggggattacattca

SEQ ID NO: 170894 - DNA, 920 bp, Homo Sapiens
ggctcggtaccactatcgacggacgcatcatgaaacaacagcaaaaatcatcaacagtaattcctgtagtgtagaaaactagtgcagccttcactgctggtcagcatctcaggtggctggcagtgttgagagacgcctgacaatccaagatcaggctggagctcctagacaaacccaaattagggcagactcgaagccccagcggtcctgatgtggctgacattgttctttctgtctcgcgggcaccggtcactccctcaatatgtgagcctgtctccttagcacgagagagaatatttccctcactattaatggcgagataaacacaattgtacaacttgtctgtaaagagaaaatagtattaaatatgcagcaacagtttacttctgttagagtgtcatgttttgaacataataatggatttggacaattacattcattttgacttcatacaaagataatgtttaatcttcaatgaattagaaaatgattttgaaaattatggctaatattacaaaacactcaacatcacatttcagttcccaaaaaaagaacaatacatacaaataatttgccataggcggagcagagaactgagaccagaggctcagatgaacaacagtgatccttataatagataaaagttttctttctactacagttcctagtatgatcacatcagaaagttcatcaccagatacttcccgctacttagcatggatgtcagaaatggaacacaagttacatgggcccagtctttagaagctagatgggaattagatgaaagctccaaggtattcctggagctggactatcctggggctccttgaccacagcaagaggacagctgcctggagtacggctggtggaagctgccttcaattacagtgcctggatttggggacaggatactgtatgcg

SEQ ID NO: 170895 - DNA, 768 bp, Homo Sapiens
tcaaatagacaccagaaacaatgatgaatggtcaacttcgacgtacgcattcacggcttctcctccgggcggcattccagagtctgctggacgcccaggcggacgaggccgtgttagatcatccagacttgaaacatatcgacccagtggttttaaaacattgtcatgcagcagctgcaacttacatactagaggcaggaaagcaccgagctgacaagtcaactctaagcacttatctagaagactgtaaatttgacagagagcgaatagaactgttttgcacggaatatcagaataataagaattccctagaaatcctactgggaagtataggcagatctctccctcatataacggatgtttcttggcgcttggaatatcagataaagaccaatcaacttcataggatgtacagacctgcatatttggtgaccttaagtgtacagaacactgattccccatcctatccagagattagttttagttgcagcatggaacaattacaggacttggtggggaaacttaaagatgcttcgaaaagcctggaaagagcaactcagttgtaacttggggaagttaacgatccgcccgagtgcagaggaaaaccagaaacgccttgccttcagctgaaccaccgtttgtgcgagctggatgtccttttcagtagaaaagaattttccttttgaatttataccattcatcattttgacactttaaataacgtgtgaaagggttaagagggaaagatactcgccagtatttgatgcc

SEQ ID NO: 170896 - DNA, 765 bp, Homo Sapiens
tcgtaccgaagaggcattcaggatggctctatacacagcagtgctggtttatgtagagttcagcagtcacttcagagatgtatcttgtctttgtcaggcccttcgtcttcatggcccacctgttttctgccgtgacctttggtcccattgaggactaaggatcgggaccctttctttaccccctacccgttgtggctcccaccctgcctcggactggtttacgtgtcctggttcacacccaggacttttctttgcaagcgaacctgtttgaagcccaagtcttaactcctggtctcgtaaggttccactgagacgagatgtctgagaacaaccaaagaaggcctgctctttgctgcttttaaaaaatgacaattaaatgtgcagattccccacgcacccgatgacctattttttcagccgtgggaggaatggagtctttggtacattcctcactgaggttagcagctcagtttgtggttatgaaaccgtctgtggcctcatgacagcgagagatgggaatacactagaaggatctcttttcctgttttcgtgaaacgactcttgccaaacgttcccgaggcgccaaggagtgtagtacaccctggctgccatcactctataaaagtgcttcatgagcccagaccaaaagcccacagtgaaatgaagtacccttttgtaaatagcatttttttgcagaaggtgaaaattccactctctaccaccgggccagccatagatcactttggtgatgctccgtctaaggac

SEQ ID NO: 170897 - DNA, 705 bp, Homo Sapiens
catgagaagcacccgggaaaattgcaggctatatatccagcctgctcaccccgacaggctttgatacagctatggctgctgttgtcctatgcgtgaatagcttcatctggcaaactgaaccctttttatacatcgacactgtgtgtgatcgctcagaccctgtcttccctaccaccgggtacagatggatgcggtcgaagtcaagagaacacaatggcagaaggaggagtgtagagcttacatgcagatgctgaggaagttgttcacaacaatccgtgccctgttcctggctgtctgtgtcttgaaggtcattgtgtccttggtttccttgggagtaggtcttcgaaacttgtgtggccagagctcacagcccctgaatgaggaaggatcagagaagaggctactgggggagaattcagtgcccccttcgccctctagggagcagacctccactgccattgtcactgtagagccgccaaagaccccacggggtgcccgcatgtacctgtctagggcagcccagggcccccactcctggctcctcacacttgcctcccctatggccgctctccagaccctcctcctttcttctccccacatacgcacctgctgttcccactctggggttctcaagtccatgaacagatattgttgcattttccacaatgctgattaaacataataaacaatccagaaaagcaaaaa

SEQ ID NO: 170898 - DNA, 661 bp, Homo Sapiens
  misc_feature (17)..(17): n is a, c, g, or t
  misc_feature (35)..(35): n is a, c, g, or t
  misc_feature (618)..(618): n is a, c, g, or t
aacaacaaaacaacccnggaaacagggccacggantgcctgtgaaacaaacttccctcaagcatcctgccatgtaaagctcctaacactccctcccttctgcccattggttcctccttgacttcgccgcatcccatctgtacccagtggtagggaaaacacggtctgagcgatcacacacagtgtcgatgtataaaaagggttcagtttgccagatgaagctattcacgcagaggacaacagcagccatagctgtagcaaagcctgtcagggtgagcaggctggatatatagccagcaagtttgcccgggtgcttctcatggacaatggccccagctcctgctgcgatcaccacagaccccgcccagaaggcacagcctgaggcacgcagcacagtccagggccccaagctgagacacactccaagaacacaactcacaacccccagcaatatctgagtcacccctagagccagctgctcataaccaatcctggctgtggaaggcacagtgtccccagggtgaaaaagaaacttcttcagagaacctccagctttcagcagttgtgtcaaagctgactcctggtggatgtggacgttgacgtgggtgggctggcgtanctagaggccatagcaactccattcacaatcaccgtgttttgcg

SEQ ID NO: 170899 - DNA, 465 bp, Homo Sapiens
acacacaatgaaaaatgttgaggtgctcaactcagagctgaagacactgccagtagctcagactctgataagagtgaggtagattgtggccagcgtgccaggtaaccgtctgcagttgcaataacagaattagaaggtgggggtgtcatggaatcttaggagccctgcattccaattgcccaggctttgctgaaacacaggcaccctagtctcacctgagggtcaccaccaatggggatcattccttcagcattcactctcagtattcgtgtacccttgtgacaatgccacagacccgtgtctttcccaatacatctaagcatattcctcactgtttatctcttgtctgtacaacatcatcaaggcagaaacagtttcccaacaggttatattttcttaatggtagtcatgaagtcataaataaaaaaatggaatcatttagtatgttctcttgttttgactttt

SEQ ID NO: 170900 - DNA, 644 bp, Homo Sapiens
ctactcactaaatgtcaataactgccctagtcatgacatcaaaaatgtctcccgacgattgctaaatatcccctgaggttgacaaacgctgattttaatatcatgactcccattagacaaatataactgtcagctgcatgaatgcgtccgtaacttcgacggacgcattcaataaacacagtatgtgcaaggacagagaagaactgagtaatacaacaaatacatctgatttagcagacatagagaaatttgaatcaataccttaaaaaatgtttgaagtcatgtatctaccataaaaaaaagcctaaacaaaatttgaaaaacatttttacagtcaatgttctcaaataattatctgcttaaattgggtggaaaaagatgaaaagtaactcccagtaatttgttacattactggatatccccaggatcaaggagggtaacaaaagcaaagccataagcaatctctagaaagcaatggaaggaagataaaagcaaaacttaggagataaaacaggaaatcaataaagagaaaaaatgaattatgagggggggaaaaagaaggtaaacaaatccaaaagctggttttcttttcgttgtttgagatgtgaatgcgtccgtccgtcgaaggacgcattcatacaggg

SEQ ID NO: 170901 - DNA, 419 bp, Homo Sapiens
gtataggcctgcaatcctcattaagttaaataactactttcgtatcattcatgtctttcacctggaagaggttaaggcccggatcaatttgtttcatttaattcgtagctaccattagtgtctgtaatgaagtcatgatcctcagtgatttcaagaatttctagttgagttctttaagattttcttgcatttgaggcataaaatgataaagaagacaggaattaggattcattagttctccagggaatagaggaaccattcttaatgaaaatggattatgcagaccttatttttattgaacttgtcaatatttgattaatgattaaagtgtgaactcaacataaattattgttaacactttttaaaaaccatgtgtatgtttaatttaggtgatgcgtccgtcgaagtggtaccggcta

SEQ ID NO: 170902 - DNA, 532 bp, Homo Sapiens
acgcattcaccagtccacctatggcaagagcctagccatcatgaccgaggcccagcttctccacagccgtcattgagaaccctgagatgctcaagtaccagcgaaggcagcagcagcagcagctggaccagaagagtgctgcgaccagggagatgggctcagccacctcagtcgcaggcgttgtcaacggggagagtcttgaagatatcaggaagaatcttttgaagaaacaagttgagactcgcacagcagatggccggagaagaatcacgcctctctgcatagcacagctggacactggggacttctccacggcattctttaacagcatccccctctcgggctccctggcgggcaccatgctctcttctcatagcagtccacagctactgccactggactccagtacccctaactccttcggcgcctcgaagccttgcacagagcctgtggtggctgcccagtgccagacctgcaggcgattctgtcaataaagacagtatgaatgcgtccgtcgaagttgggttaccgg

SEQ ID NO: 170903 - DNA, 707 bp, Homo Sapiens
gacccacgcgtccgaattcttccgggcttgtaacgtctggcaggtgaatgctccttctggattccctacagattcttcttcagctgtcaaaaaagagactgcttgctcatgaaagatgatgggatgggatgcatcagtccatagctgtacaccccagtcacacagagtaggagtcagcaaacatttgagtgccattcagagaggagaaacacacacccaatcctaaacctatgaaatggcaacaacaaaaggagaaaatacatcttttgaaaacacggccacctacttggaacattccatagtgtgacatagagtaactctgtttaggattatttcgttgatccccagaggccaattgcccagtgctcagtcaaagcccaaggtggaagacaagtgcttccctgatgagctggcctctctgcagactgctccgtaccctgtgctgtcctgcctcagatgcagagagagcacaaggctcctgctctcctcgtcctcggtgcacctgtgttcgtgctaccatcacagctgaatgcaatgaaaggcggtcctctgagaggagcagggtggagatgctaaagtggaggccccctcccattgctgatagatcctcatctggcatgcgctccacctccccattctctgctcccacatatcgtagccccatcacagaagatgcgaccatggaaaaaagcactgtgtccacccta

SEQ ID NO: 170904 - DNA, 458 bp, Homo Sapiens
gaccaacattgacggacgcatcacgcactcccaggttgcacctgctgctggcggtgagcagggggttcagcagcttgaccgatgccccccgagggggctctccccagcttaaactttgttgtttaaatttgttaactttttatattaatgactattgaaagtggtaataaaaatttatattataggcttcaatgttttcatgaatgttacccaaaaagctgtgttttctttggtcagaggtcaaaatttatgaaaaacaaaatgctgtatgaatggaaatcattttgcaattgagtgacacttcattgtaattcacagtgtaaatttaatccaaactgaaattttgtttcaactgaatttgtaattaactctgaatttgtttttaatcattagtaatatttcagttgggtatctttttaagtaaaaacaacaaataaactctgtacatgtaaaacgtg

SEQ ID NO: 170905 - DNA, 732 bp, Homo Sapiens
ctaacatcgacggacgcattcagcaaatactaagctcccactatgcacataagagatgttcaatcaatgttagatgaagggaaaatattcagaaattcacaagtcactccagcactccaaaaacatacaactcttcatgctcctcccttctccgttcttggcctcatctctgcccacatcacaggttgttaaatgctcacatgaacaagaacttaagcacagtatgacatggcctgtgacttatacaaatgtctgtcccaccaagaggccatcttttaaagtaggtactagttccaagcctaaaaacaccctaacgggtcttcagcttcatctgaggatatgccacagtgatcatgcctgctatagaggacacaagacctccaagtccaatgatgccaggattggatttatagatccccagctggtccaaagggttcaggatatcacaaaggttcttcactgtgtccaggagcaagggaggatgctgcttcagagatcggaataaaagaagtagaaaggattggagccattctgtttcctcctcagccacgctgaaccaaagaggatcctgggatgctgatttctctttctttgccctgtcacatgtaactcgtttcatctgcagggagattcatacagatcctgacaagttcagagaagagatagtatagtgtgacagcctcgtcgcattctcttgttgtgctgagtggactagttctcacagagatggtt

SEQ ID NO: 170906 - DNA, 811 bp, Homo Sapiens
tggccaactcacaccattcatgaatgcgtcgtcgaagcgacgacgcattcatagaaagcatattacatacatgtttatacataagcattacatttttttaataaaaatgtatacaggtggggcactgttttggtggaaggcttggagtttttttaatgagcttagagctattagataaccactgagttaaaggtaactatgtacacacaaagtgtgcatccaagaggcatagcagcagcagaagtctttaaaggcttgtacaccaggaagaaagatgcatcctcttgccttgtggcaatcattttcctttagaaaacaggccagcttcacctgggcaccctgctgcctttcaaggctggtgattgctcggatagtgattcccagttgttggtgtttcatgcagagttgtatgagagtcctcctcttttctttctttaaaagaagttctttctttgaagaaatccgatacatatacagcaactaatattgcaaccagagctccctgaatgcgtccagtcaacacatcgctccagtggtgtttataatcagaaactcgagaaaggcccacataaatggatacggcaacaagaccaaattgcagtgtggggcgtaagagtcttgcccagtctcccttcatcctggcttgaagataaagtgccacaaacagcatgcagtacatggaaaacgaagagtggcctgaatagaaggacaacctgccttccttaactctttctgcattccctcgacataagtagtattcaatgtaaccatcgctgcagttgatttttgaccaatctggatcacaaacatc

SEQ ID NO: 170907 - DNA, 465 bp, Homo Sapiens
  misc_feature (159)..(159): n is a, c, g, or t
  misc_feature (177)..(177): n is a, c, g, or t
  misc_feature (217)..(217): n is a, c, g, or t
  misc_feature (246)..(246): n is a, c, g, or t
  misc_feature (252)..(254): n is a, c, g, or t
  misc_feature (262)..(262): n is a, c, g, or t
  misc_feature (267)..(267): n is a, c, g, or t
  misc_feature (281)..(281): n is a, c, g, or t
  misc_feature (286)..(286): n is a, c, g, or t
  misc_feature (290)..(290): n is a, c, g, or t
  misc_feature (295)..(295): n is a, c, g, or t
  misc_feature (309)..(309): n is a, c, g, or t
  misc_feature (312)..(312): n is a, c, g, or t
  misc_feature (314)..(315): n is a, c, g, or t
  misc_feature (321)..(321): n is a, c, g, or t
  misc_feature (327)..(327): n is a, c, g, or t
  misc_feature (329)..(329): n is a, c, g, or t
  misc_feature (332)..(332): n is a, c, g, or t
  misc_feature (344)..(344): n is a, c, g, or t
  misc_feature (355)..(355): n is a, c, g, or t
  misc_feature (361)..(361): n is a, c, g, or t
  misc_feature (363)..(363): n is a, c, g, or t
  misc_feature (367)..(367): n is a, c, g, or t
  misc_feature (369)..(369): n is a, c, g, or t
  misc_feature (376)..(376): n is a, c, g, or t
  misc_feature (378)..(379): n is a, c, g, or t
  misc_feature (386)..(387): n is a, c, g, or t
  misc_feature (390)..(390): n is a, c, g, or t
  misc_feature (398)..(398): n is a, c, g, or t
  misc_feature (402)..(402): n is a, c, g, or t
  misc_feature (404)..(404): n is a, c, g, or t
  misc_feature (432)..(432): n is a, c, g, or t
  misc_feature (443)..(443): n is a, c, g, or t
gctagctgtctgtactgtagacggtccatgtatcggattcacaaagaaagaacttcttttaaagaaagaaaagagggggaccctcatacaactctgcaaaaaacaccaacaactgcggaatcactaccgagcaatcaccagccttgaaaggcagcaggntgcccaggtgaagctcgngcctgttttctaaagggaaaatgattgccacatcggcaanagcgatcgcatcttttctttcctgcgtgntacaannncccttttnaaaangaactttcttggcntggcnggcntattngcctctccctttgnatntnncccccncttttncnctnctttctcctccnccttctctccncttttnancctncnttgtttncnnctaactnnatnccctttcnaaancnctccctttccaactaacatacacaactntctcccctaanatctctcttcttctacttccat

SEQ ID NO: 170908 - DNA, 767 bp, Homo Sapiens
  misc_feature (36)..(36): n is a, c, g, or t
  misc_feature (570)..(570): n is a, c, g, or t
  misc_feature (691)..(691): n is a, c, g, or t
  misc_feature (701)..(701): n is a, c, g, or t
  misc_feature (732)..(732): n is a, c, g, or t
gaggacctctcattacaaatttttgcatgaaaccanccaacaactgggaaatcactattcggagcaatcggccagccttgaaagggcagcaggggtgccccaggtgaagcctggctggttttctaaagggaaaatgattgccacaaggcaagagggatgcatctttcttcctgggtgtacaagcctttaaagacttctgctgctgctatgcctcttggatgcacactttgtgtgtacatagttacctgtaactcagtgggtatctaatagctctaaactcattaaaaaaactccaagccttccaccaaaacagtgccccacctgtatacatttttattaaaaaaatgtaatgcttatgtataaacatgtatgtaatatgctttctatgaatgatgtttgatttaaatataatacatattaaaatgtatgggagaaccaaatccacacttgcaggcatttgtagtcaactgtaatcaaacaggtggtcaataatttaaaatctcacattcctttagctgactctacaagtagaggctggcagcaaacacaatatctctcttgattttgggngattccttctgcaaatttattttccagctcaggtgtttccaatgggcttttgctggcttggacacatttgtcgaagcaattcttccgggggggcctcatacaacgggattatggctggccnttcaaagggncatctggtcattttgcaggttggggggcaangtagggtcccgtttgcccgggggggttatactacc

SEQ ID NO: 170909 - DNA, 898 bp, Homo Sapiens
  misc_feature (443)..(499): n is a, c, g, or t
ctggaccaacttcgacggacgcattcaaattgttgaattgagaacttgcctgttctaggcaagaactacagcttgcctatataatactaccttcaactgtcaattccacagaatcacattttaagtaggtattttgcataatattttcatcaagtgtctcttggttgaatgtggtccaagtatgtcattctaaactggacaatgtttattacgtttaaggagcaaaaaaattataagctgagtgttcataagtcttggatcaacaaataggtctgtctcagaaaagcgtttgtaattaatcacttagatgagaaacattccgcataccagtgggttccttggtataacgctaatttttaaaaactctagatcccaaaaattgtttgcaagttagaaattaactgccactaaaaaacatttctaggccgggtatggtggctcannnnnnnnnnnnnnnnnnnnnnnnnnnnnnnnnnnnnnnnnnnnnnnnnnnnnnnnnttatgatgcgtccgtcaacttcgacggacgcattcatgccacatggacaaacacacctgaaaatgtattttgaaataccgcttcaccagcccggtcccacagcagccactctggtctggaagttatccatccccaaaccccacaacttaacaggaacccagtgaagaataacgacacatttgcatagcactttgtaatttaccatgtgccttcccatatattatctagggatccataaacatctgagtaaacagcaatactactactggccaatatttccagcacgctcactatatcccataggctgcacaaagcttttaacacagaccctcccatttcatcctcataggaaacttatgagttgatcctactatatttctatcctataactgcttccgg

SEQ ID NO: 170910 - DNA, 652 bp, Homo Sapiens
ccggagcatcataacgaggggaaaaggatatattaatggaatcctaagctgcaaacactgaagtgaaaattaaggaagtttatttcacattttatccttatgaaaacaaaagacggaaaatgaaaagttttctgttttttcatgcacagcaccagaggagcacatttacatttttaaaaaagtgattgtttccaaatgctgttatgtgagtgattaaaaaatctcctctgctctttttcttattttcaatatttaagagagtttgaagggcttagcatggtttcagtgttccttttctggaagaatgaacaaaggccatggttgacagtcgtcagcttctcctgcgagggcagccttccattcagctggactggctgggctgggagctgtccagtgatgaatgaatcttccttggactgacctccagctatcctggaacctggagacaagaggtgacctgagagctttgccctcatcaacggccctcaggaacctcatgtgtagggccactaccctgctctggccacctggctctgtccaccccagaccctgggctgaggtcacattggagctgcagaggtggcttatccttcttgcccttgatgttaccaatcaccatatgtcttcaacagagcatgccaagacagggtct

SEQ ID NO: 170911 - DNA, 796 bp, Homo Sapiens
gggaaaccgaccagggccacaaggtgcaaatgacaaaaaaacctccgtgcatacggcaatccagagagtacaaatgtgtataggaagcatcatcaagagtggcatttgaccctatagctttaagggcaggccatggtttgtctttgtttacagaactgggaggaggttacagacagaagaaacagcattcctactacacacagtgccaggtgcacacagtgccaggcacacatcactcaccagaaactggggaaagcagtggaattgagtgagttctgtccctgccccggcaccaattagactgagtgagtgggcaagttgcttaacttccctgggcccccgtttccttcccattctgaagtgattaagctgcacagacttcagaaagaagcagactgagtgaggttcgaatgatgactatatgtgaccttgagccaatccgaagccggctcgctcagtctcaatttccttcctataaaatgggtaaaataatttctacctcacagggcttttgtgagatttcgagaacatatgtgagtcgctaaccacacagcctggcaataccagatttccttttacaaaagtaggggtgacaacgctgatctgcctctttctgtgtggctgctgctgcctccgcagcacccatcccagaggctgtcaggagtaggggccgtggacaaacttcatgaccccgaaagagaaaacagagctgaaggggcttcggggggaaaaagtaaagagctgccacagcaggctaacttggctaacggggacacttgtgatgcttccggactcg

SEQ ID NO: 170912 - DNA, 753 bp, Homo Sapiens
  misc_feature (439)..(457): n is a, c, g, or t
tcggtaccgatgaaaaagctaaaagtgatcttttaaaacatagtcccataagtgattattaaaatgcttagagacaaaatgtatgtttgtgtgtagactggaaatacacattggattgtagtttcagattctgactgtcaaaagaccaactttccatactccagagaaaatagcccccaagagacgagcacaagttttccccatggttcagggccagacgataaaccatgtgagatttcataactaccagaccagacgctgggtcaccatgagtcaggggcggcctgactctgccaatatctgcacaactgaataaacaggaggagcgagggaatgccgcagaacgtatacacctgaaggtagagatgtcgcctgtcccatcctgatgtttccccagagcctagcagcccttgtcacacacagcagttgtaaaaaatannnnnnnnnnnnnnnnnnnagaaataaatgaaagagcttcagtggacaacaaacaggaatagtgtgggggctttgatgaccccacagatgaggggtcgttattaacagtgccattttatccctttgtgagcttagatatcttggccataaatttgggccatgccagtcaaagccaaacttcttgaaagcatgatctccacgcctttgcctcccatttacgcaaccttctgcagacctcccacccgcgtcactccaatgaatgcgtcgggggatctctagagcgactgaggatgaagtgacgcgggtttaaaaaaa

SEQ ID NO: 170913 - DNA, 318 bp, Homo Sapiens
acgcattcaataagctaaaagcacagggagaaaggagaaaacttaatgaagttcaaaggtagttctttcaaaagatcaataaaattgataaaaattttagtaagactgacaaagaaataaagacagaagacacaaattactaaaagagatgatatcactacagggctgactttaaacagataatgagggaatactgtgaccaagtctaagataaatttgacaatttaggtaaaataaactaattctctaaaagttgcaaacttccagaactcacctaggaaggagataaattgtcttacatctattaaagatattaac

SEQ ID NO: 170914 - DNA, 595 bp, Homo Sapiens
ggaccgacgcattcactggacggtgctactgtcacagaggtgaggcatgcggctcacactgagccaccgcaggtcatgattgggccagcaggtgcctgtgaattgcctgtgacatatgagcagaagactccatccatgggaccccaagagcccgccagctgacaggcacctgaggaatgtggcacaagtagctcctcacatagaagtggccagctttggggcccaggaccctgctcatcctgcccacagctgctcagtctagggatcggccaaaggcagttatcaggccgactggctgagtggtaaagaaactggctcaatcttgtcatcctagggcaccaggaatgtgagggtgggcagaagaggacatggtggcaaaagaagcaggtgagtcgcagaggctttttgagccaagtcaagtcaggagaacaggttgcagtcatcacttgtctgtaagagacaagatgaccagatcaccagggttgctgctggctcctggatggccacaatgtgcatggcagggccccgcaaagcctggccctacagttgaagcttcctgaggatggcagtaatgaatgcgtccgtcgaagtaggg

SEQ ID NO: 170915 - DNA, 438 bp, Homo Sapiens
tagccggacggaacatcagtaacatcaaaacagcatgactgaggttgtcctttcatggtggtgatacttctgaaacaatatcttgttgaaaacaaactaatacattcaaaataatatgagtttcttttcagccgggaattgtgtagcattcatgcaacgccctccaccagtagcgatgggccacgtgcccacaggacaccatatggatagctcacggtgtcctctgagcttctacattacctcattttagcctcaccacaaccctaaggaggtaggcacagtaatttttcccattttgcagaggaggaaactgaggctttcagacttataaaacttgcttaacagcctgtgtgggacctcaattctaattccagaaccaagctcctaactgctaccctatgtgcctcctaagcacacagtgaatgcgtccgtcgaagt

SEQ ID NO: 170916 - DNA, 680 bp, Homo Sapiens
  misc_feature (102)..(155): n is a, c, g, or t
  misc_feature (179)..(191): n is a, c, g, or t
cagccctatactccctttacaaagttagcacaacacaatgggggtcactcacccagcacatttaccacattgaccctcattcacaggaggatcactcgaacnnnnnnnnnnnnnnnnnnnnnnnnnnnnnnnnnnnnnnnnnnnnnnnnnnnnnncgaaagtgagaatccgactcaccnnnnnnnnnnnnntcatacatagtaaaatggtagcattttttgaatatgagtggaagctacatgagtgttttaaatatttcataattttaaaatcactgggtgcaaatgactatatgaataaaagtgtccaataaactgtactcttaaaaactaacaaatatatgggatatattagatacttgatggatttatatttggcataagtaaggttatattcacttttcatccatcattgcatatatgtatcaagtatgtgtgtactggcagtatttatttagcccactcaggtagaatttattcttcccatataattacagggtattatcatcaactaaattaaatcagaaaatgaatgagaaagcacctcaaagtaccaggtctatacagccattctctagatcaaacttacttacaaacacacacacaacatgtacatagttttatttatttgtttatttttctcacagatgagacttacatgggctttggagtcataagact

SEQ ID NO: 170917 - DNA, 338 bp, Homo Sapiens
  misc_feature (177)..(189): n is a, c, g, or t
ccggaccgtcgacggacgcatcaacaaacatttagtcagtatcttctatgtaccaagtactatgttcggtgctaggaaaaactgttagataattgtttttaattagaatttctttttagtttgtaaaaattctgtagaaatgtgtttctctccatgagtaatagtgacattcccttnnnnnnnnnnnnngatgccatatttagtaatctaaccattagatcactgccacaggagtcaggaatttgcttcattttgtgctcttacctttgggcaaagtcaatgtgtttctcagatttgtaatcattcacaggttctgatgcgtccgtcgaagttaggat

SEQ ID NO: 170918 - DNA, 569 bp, Homo Sapiens
ggaccaaaattcgaggacgcatcagccaggaatgtaccattctaaatctttattttttggtttcaaatcttcttaaaaacatgtaaaacatttaactgacaaatagagactgcacacgtgccaggtgtacagtgtgctgatttgatccacgcagacactgtgtagtgatggtcacaatcacgttaacacattcaccaccacccaggtggaatgattttcatgtttatatttatctggccaagagggtaacataagaaatttctgtcaactgcaatctcaaaaggaactctttactaactgaaaattccaccaaaagaggtgatacgaggcaatgtgaaattcacctgttttataactggtgaacccagcatggcactcacgacgcttcccacagaatcactttatctcaaatggaagtcagagcctgtcctccccgtataaacagtagtctttaatgtctgagaaccttgtttgtgagcgattatgctgacatgagggggtgaaaacagccctccgacggatactcatttcaagacaaacagctgttttacctctgaatgcgtccgtcg

SEQ ID NO: 170919 - DNA, 948 bp, Homo Sapiens
gcgtgatcgtggtcatagcgttctagagtatccccgagctcgtcaaatacctaccaactaaatttctgccaaggtccagttctctttggaggaagcccattactccgtaactgactggatggtccagtgtcattttgatctgcttttcagaatggaaatttataatataaatatatgttttaataccacaaacactgtggggcacttgatatttattagtggtgtatatggtccactggtttcaggccaaatctagaatttagtgatactggctcagaagaatttaagttctattcagccttcctgggtgttagaacctagattcaaaatggcttgtctttgctacttttgttccacattctctctctttacctttgccctaccttctgtttgtaaggatgattttaatattaattccaggaacacatgtttttatttcctctgctggaataggagaaagcttaatatattcccaagctgaatgttcttgaattatatctgcatttaccactgtatatgcatatagtgacagtataacctgtctatactacagtagttccagtcctaactttctgaattatttttaaagatcttctctaacaagctatgggaatttggcttcatactctttctttgcaacagcagtgttctgggtgataattttgaattgatacctgttcctttttctgggttttgttggctttttgaaaaattgtctttccttatcattggtgggaggcttggtagcaaagtaacattttttggaaaagaggacagaaaaattgaactacagcttgagaacgtattctttttttcctactttgttattgcaaattgaggaatcacttttaactgttttaggtgtgtgtgtccagagtgagcaaggattatgtttttggattgtcaaagaggatgcttagtcttaaaataaaaataaatttaaaaagc

SEQ ID NO: 170920 - DNA, 481 bp, Homo Sapiens
cggtacccaacttcgacgggacgcattcagtaactagcattttttaaaagagcctccaatgcttatctccagtctttagggatagtacaaacttggatctttgatgttcaatttatttgcaatggttcttggcaaacactaacagaccacatgacaagtgtgtcagccaccatggaaatgcacagattttagaagatgagtttgggtaacatctgttattttcatgatgtccatgctttattttcttactcaataacaagatggccacaaagtcatctaacaactggaaaagctgttagatcctatcttcatgctcaactagatttctttcctgtttacatcttgttgagagaattaaaagctttggatttgattccagcattgagtgcagaggtacacttgtcggtcctatactgcttctgttttggtagagagatatgatgcgatctgtgatgcgtccgtcgagggatcctctagatca

SEQ ID NO: 170921 - DNA, 204 bp, Homo Sapiens
caacttcgacggacgcattcatgtggagatgtctgacattcaactttgaaaacaaatggtcttataataaggagaacagccagactagaaaacggacctggagtcatctttatggaagtgataagtgatacctcgggaatagaggaatcactaagagtatataaaaagaattaaagacattaaggaaacattaatccatatctg

SEQ ID NO: 170922 - DNA, 804 bp, Homo Sapiens
cttgcgacgacgcattcacttaggtgagctgattactttattgaagttcagtttctttggtgcttcttatagtcgtgctttgcccatctggaatatgaattctcaatgtctttgcatatagccaggaagatttgtgaaccggctctttaatatcatgtcagtttatcctgtgctgattttgttgcttgtattgttttttgggtgattgaattcttctttttgcttgctggaacttctccaatgttgtttccaaagggcttacctgctctttagcatcctttatctctctgtacaaagactgaacttcagtggataattccatcagtctgctcctccagttgcgtgacgacgttgcaaattagtggatatctgaagtttctcagattttagctcatttgttgtactttttagatgttgaatctgttcctgctggtcctgtataagcttacgattcaattcaatcttactagaaactgtgtctaacttgtgctgtttctcttgtttctcctggttgacttgttggacagttcgatctaagtctattccttgtagctcagctgcttgttgtgcaatttttctttcaacatctttaagttccatctggaacctctccataattgtaacatctgtcaggcatactttggcactttcttcttcaggcattattgtacccaagagtgtttcttgttcttctatgtcgttctttaagcgctgtatgtctctattgacattctgcagtttgtttcttaattctggtatttccttctccttcaaatcaattatgctttgaggggaaaagacctg

SEQ ID NO: 170923 - DNA, 649 bp, Homo Sapiens
tgctgatgtgatctagcaggatcctggacgcattcaataaattatgatgaggtgctctttgtgaatggtccgtcgcttcgacggacgcattcataaggttctctcctgtatgagttctgtgatgcacaatgagagttgatttcacactgaaggccttcccacattcactacatttgtaaggtttttctcctgtatgaattctctgatgtttgatgagagttgacttcctactgagggcttttttacagtcagtgcattcatagggtctctctcctgtatgaattctctgatgtttaatcagtggtgacttctcactaaaggctttcccacattcgttgcatttatagggtttctctcctgtatgcattctctgatgtacaataagggttgacttctccccaaaggctttcccacatcttctgcattcataaggtttctctcctgtatgagttctatgatggacagagaggtgtgactttccactgaaagtcttcccacatatactacattcatagggtttctctcctgtatgaattctctgatgaacagagaggtgtgactttcctctgaagcttttcccacatttactacactcataaaggttctcttttgtatgagttctccaatgtatagtgggactgggctccta

SEQ ID NO: 170924 - DNA, 210 bp, Homo Sapiens
ggaccaacatcgacggacgcatcagtgctgtggggcacagagcacgctgatgcgcgtgtggcgtgaaagatggtccctctgcaaggatcggcaccgtggcatgggaccagccactccaaaatgccaggactcctgtcctgagtctgtaaccacttttatctctattataatttattctcccagcctacctcctcagtatacgttctctga

SEQ ID NO: 170925 - DNA, 616 bp, Homo Sapiens
ccggtaccaactaggtgggaggagcaaaagaggctaaagtgatttaaactggaaagaataatctattcttggaagaaaataaacatagaagatgaaaaaaggggacaaaggacaaggggtttttggccaaaagtgtacaagtttggggtgaactgttacaaaagagagattgaaggtgccaagctgtgtaaggatatgggaaggtgggtaaaaagaacttatttgaagtttgctgagctttatgtaattgtatatttctatctcattagaagatttcactaatatattacagaagttcattactttccaaaggttaggggcttgtctgcttcttttgaatgcaatactgagactggcccaaaatgacccaggtatacgtgaccatgaatgtgtggaaaaggtaaatttgtaagcactaatggttgcagaggtcaagcatgatgtaaagggagaagccactagatttcacatttatgtggtgaccttcaagtgaactttcaaccgaaatgtaggggtagaaaaaaattacaggtagttcacaaagtgaatggcagaggcatggctctaacattgttcattcattcaaaaaatatttactgaatgcgtccgtcgaagt

SEQ ID NO: 170926 - DNA, 705 bp, Homo Sapiens
  misc_feature (548)..(578): n is a, c, g, or t
agccggtccgacggacgcatcattagaaacggattttcagatgctaccacggcaagactactggagaaatgcaagctgcgctggagatggaatagttcgcagcggcacacaagttttgcggcaaaggagagagctctaaaagaggaaatacaactagttcatgttaccatgaaccagcgcagtgggacccagaattactgaattaatagaaaactaaatacttctcttaagcagctatgataacttaagaaagtttccagggaagccgtttaatgaaaggaaacaaacaaaaagaagatttattcagtatcctgctccattttttagaaaaatgggaattcctacattccttaacataattcttggtacatctacactgtgaaagcaacacaaactcaaatggagatggcagcccaaatgaacttaaatctgctgtttaactttcttttgaagttatacatggaaatgaaacacaccacagcaactttcatgacatcttgctaacgaagttcgggtttcgaaaaatggaatgactagttgactaaaannnnnnnnnnnnnnnnnnnnnnnnnnnnnnnaaacaaggagttttgaaaataagcactaagcatctttccagggaactcactcattccaagaaacctcggttctaactcgcaagccagcggctgctgtgagtgtcctctgaatgcgtccgtcgaaggg

SEQ ID NO: 170927 - DNA, 571 bp, Homo Sapiens
  misc_feature (287)..(350): n is a, c, g, or t
gagagtggagaattaatgtgtgcgtctctatcttccggatccttgtggctccccagatagcgtttggggttgacgacctcctgcggcacagcttgggttggggttcgtgagctctcgctgtgtcttccctgtgccgtctcctatgtgtgcggggagctggctctccatgacctctccccgacctgtttctcagtgtctcgtccacttattctttgtctctatgtatctctccctctctctctagtggagggaggagccctccatctcctagtgatactgtccctcgnnnnnnnnnnnnnnnnnnnnnnnnnnnnnnnnnnnnnnnnnnnnnnnnnnnnnnnnnnnnnnnngaatactattcagccataaaggaagaatgaaatcatgtcttttgtagcaacgtggaaggatggaaggacctggaggccatgttctcacttataagttgaagcacaaataatgtgtacatgtgggccacagtgtggaataacgacactggagactcagaaggttgggaggctgggaggagggtgagtaacaagaaattactgatgcgtccgtcgagttggta

SEQ ID NO: 170928 - DNA, 324 bp, Homo Sapiens
ccggaaccaactcacgaccatcattagtagaagatattctcaagaatgttgctgtgcgctaggacatatggcatgcatggtagaaaatgaatgtgaagaccccagccaggagactattacgttcctctataaattcattaagggagcttgtcctaaaagctatggctttaatgcagcaaggcttgctaatctcccagaggaagttattcaaaagggacatagaaaagcaagagaatttgagaagatgaatcagtcactacgattatttcgggaagtttgcctggctagtgaaaggtcaactgtagatgctgaatgcgtccgtcg

SEQ ID NO: 170929 - DNA, 1503 bp, Homo Sapiens
tggtgagtctggcattcgttagccaatgatgtcctttagtattcattaaagtcaccacagcatggggggcctttatgttcaggttctgcccaagagtcagcttctttgcttcttgtactagcagggcagttgctgccaaggccctcaaacacaggggccatcctttagagaccccatctagttgtttggagaggtaggccaccggcctcagccagggccacacagtttgggttcaaagtccggctgccatcttttctctctctctgacacataggatgtaaaaggctttgtcagatagggtagccccagggctggggctgacagaagtttctcctttaactcatgaaagacttgctgttgttgggatccccattcaaaaagttcccggtccccgccccattggtgacctcatacaaaggcttggctaatactgcaaagtttgggatccacagtctacaaaaccccacagctcctaagaattctctaacctgccttctgcccttaggctccggtagattgcaaacgacctgctttctttctgatcccgggctgcgttcggacccctgtcgtatagaaaatcccaagtaaggtacctgccgtcggcagatctgagctttcttcttggacacctaatacccacagtcctccagacccctgtcggatagtaaatcccaagtaaggtaccttctgctggaagatctgagctttcttcttggacacctaaaacccacagtcctccagcagtgaaggatccagtgagattttccaggttaacggtcataatcgcctactggtccaacgttcagaagtaacacaggcacctggacaatacacagtagatgtggaaggacacggttgtacatttatccaggccacccttaagtacaatgttctcctacctaagaaggcatctggattttctctttccttggaaatagtaaagaactactcttcgactgcttttgacctcacagtgaccctcaaatacactggaattcgcaataaatccagtatggtggttatagatgtaaaaatgctatcaggatttactccaaccatgtcatccattgaagagctttgaaaacaaaggccaagtgatgaagactgaaagtcaagaatgaccatgttcttttctacttggaaaaatggttttgggccgagcaaacagttttcccttttttctggtggagcagaagcaacctttgtgttcaacattcaggcagccccagcaatgggtctacgattactatgaacaaaagaagaatatggcctagctttttaccaccatcgacaggtagttccagtttcccgagctgaaacaaaaggcgattactaagaaaagttgggacagaaagcattcctgggtacacaactggagtcttctggatcaaacctggaaacaatcctgaccatctgacatctgtgaccagtctgcagtgcgtatggttcctggccagtcttatttccttatatcccttaactgtgggccttggaacacacacg

SEQ ID NO: 170930 - DNA, 1081 bp, Homo Sapiens
  misc_feature (647)..(647): n is a, c, g, or t
gggcccttaggctccggtagattgcaaacgacctgctttctttctgatcccgggctgcgttcggacccctgtcgtatagaaaatcccaagtaaggtacctgccgtcggcagatctgagctttcttcttggacacctaatacccacagtcctccagctgcgttcagacccctgtcggatagtaaatcccaagtaaggcaccttctgctggaagatctgagctttcttcttggacacctaaaacccacagtcctccagacccctgtcggatagtaaatcccaagtaaggcacctgccgtcggcagatctgagctttcttcttggacacctaaaacccacagtcctccagtgaaggatccagtgagattttccaggttaacggtcataaccgcctactggtccaacgttcagaagtaacacaggcacctggacaatacacagtagatgtggaaggacacggttgtacatttatccaggccacccttaagtacaatgttctcctacctaagaaggcatctggattttctctttccttggaaatagtaaagaactactcttcgactgcttttgacctcacagtgaccctcaaatacactggaatttcgcaataaatccagtatggtggttatagatgtaaaaatgctatcanggatttaactccaaccatgtcaatccattgaaagagcttgaaaacaagggccaagtgatgaagactgaagtcaagaatgaccatgttcttttctacttggaaaatggttttggtcgagcagacagtttccctttttctgttgagcagagcaaccttgtgttcaacattcagccagccccagccatggtctacgattactatgaaaaagaagaatatgccctagctttttacaacatcgacagtagttcagtttccgagtgagacaaagcaattactagaagagttggagaagcatttcttgtaacaaactgattcttctgtatcaaacctggaaaaaaatcatgaaccatctgacatcgtgaacagtctgcagtgggctatggtttcttgtcaagtcttatttccttatcatcccattaaatgttgtcattttg

SEQ ID NO: 170931 - DNA, 689 bp, Homo Sapiens
atcaaggtattgttagattatattgctgatagattactttctaaaaaatttgtacttttctgtaaattaaaagaatatggagtcataaaatggcagtgttttaggattagcctaaaattggacattgtcattgatttcaaagaaggtatgaactagcagtcttacagcctaattcttctttggactggtccttggcagcagttcctttttcagactcgataaacagaattcagatgatgtaagtcaaaacaaaactttacaaagccaagcgtattatcttttgcattaacctatttttttccatcatacatgctactagtatgtgcattagcatgatattctcatatacattgcattaaaaattaaaaggtggcagctcagggtgagctcttctgttgctcatttgttcctaaatttttaagggctttttctcagtcaatagtttgtacaaactggttagtttaacttcattacccatttcattaaagttgatgggtcgtgtgatgagatgcatttaaggccgatagtgatagatgttttttttatttcttgaacacaggcttggtctgaatgatgttcttttatctcttgaacacaagctttgaatgataactacaggttttaagtgctgtttcaatccagagtgctgtttcaaaccaggggatcctctagagcgaccgcaggcagca

SEQ ID NO: 170932 - DNA, 578 bp, Homo Sapiens
gatgggtcgtgtgatgagatgcatttaaggccgatagtgatagatgttttttttatttcttgaacacaggctttgtctgaatgatgttcttttatctcttgaacacaagctttgaatgataactacaggttttaagtgctgttacattaataccataatgtgatgtgttagaaacaaagggatatttcaaaggtagatatttgaaaattctctagtctcaatatgtatgtgtattgaatatactctaaaaataaatgtgcaatttgctagtaggacaatgcagtgactgactagcattaggtatgtttcttttatatcctagctatgtcccactttcttctaagtgcaatcctttcatgttcacttgctgttttaccccatctactctaacttcatttggaaggcttgtctagagtatagcatgtatttttacctttgcagtgaattgcatgtgctaattgtaaccacagctatttttatgttgacataactccaaatgttatattaaatgttctattatatattagctctaatcccttaagtaaattttaagaaataaatacttgttcaaattttaa

SEQ ID NO: 170933 - DNA, 371 bp, Homo Sapiens
tctggctgttagccttttcattaagctgacttttaatcatggagctccttacacaaatgtgttttttaaatcttattaccatatttcaggctaggacaaaatgctgctatttcagaagtacagccattgctctttcagtctggtctggctggcaaaaaggtggccttgttatgtaaataaagccccttttgtagttaaaattaaaaatcttttttttcctttggatggccattttcctcccacttcagagaccctgttccccataatttagggttccccttcagatttgaccaagacagaaagaaaaaaacaagaccattaagcaaaactaacaatgatcacacaaattatatgatttctgaatgcgtccg

SEQ ID NO: 170934 - DNA, 343 bp, Homo Sapiens
  misc_feature (13)..(13): n is a, c, g, or t
  misc_feature (31)..(31): n is a, c, g, or t
  misc_feature (76)..(76): n is a, c, g, or t
  misc_feature (176)..(210): n is a, c, g, or t
ccaaatacctccngaaaacatcctacttagncagttgtgaatactaatttggcaaaatgtaaataatgttatacanaatataagatactactaaatacatagtagaaataattgcatgattcctgatatttatattcaaggtataaacatgactgatttcgctgatactacagaannnnnnnnnnnnnnnnnnnnnnnnnnnnnnnnnnnaatatctcaattagatatttttgttcccaatctctttcagacagatctatgaaataatatagaatatactatcaatatgttctttcatatgaagtgaaaaaaatgggatttaagtagtgagataatttctatt

SEQ ID NO: 170935 - DNA, 1097 bp, Homo Sapiens
  misc_feature (604)..(604): n is a, c, g, or t
  misc_feature (1069)..(1069): n is a, c, g, or t
atgtgaggtacttttagcggaagacagccttagttaacatcagcgcattcacactgaagtaagaccttacaagtgtggagaatgtgggaaatcttatatttcaaaggggcaccttaggatccatcagcgcatgcacactggagaaagaccttacaagtgtggagactgtgggaaatcttttaatgaaaaaggacaccttaggagtcatcagcgagttcacactacagaaagaccttataagtgtggggaatgtgggaaatgttttagtcacaagggtaacctcattctacaccagcatggccatactagaaaaaggccttatatgtgttgggaatgtggaaaattatttaagaagaagtctcacctccttgtacaccagagaattcacagtggagagaagccatatgcttgtgaggcttgtcagaaattttttaggcacaagtgccacctcactgcacaccagagagttcacactggagaaaggccatatgaatgcagtgattgtgggaagtcatttacccacagctctacattccgtgttcataagagagttcacactggtcagaagccttatgagtgcagtgaatgtgggaaatcttttgcngaaagctccagtctcactaaacacaggagagttcacactgaagaaaagccttacgggtgcagtgaatgtgaaaaaaaatttaggcaaatctcttcacttcgtcatcatcagagagttcacaaaagaaagggcttatgagtgcagtgagtccagtctcattaaatattggagaatacacacctgagtaagatcctgtgattgcagcaaatgtggaaaatgtttacccaaaggtctgctctccttggatattggagagttcacactagagaagagtccttacaagtaaaataaatttgggcagttttgtagccacacctctgtattccttcaggattatagttaacactgaatgaaggccttactagtgtgacaaatacaggatatttatccagaagtctggctgcataactcacaggagagctgtcatgtgggaggattgctacatgggaggatttgcttgagccntgggaggcagaaggtttccagtgaagcc

SEQ ID NO: 170936 - DNA, 589 bp, Homo Sapiens
ttcataagaaaccacgttttaaagggctggcagaaaacagaaatttcagcatctaagatgagtgtatcaatcgaacagccactcattaaatgcacactgggttaaatgcagcagttttataaggtattgagggcagttaagattacatctcacagtgttatttaggattctgcacctatattaaatttcagccaggaagaactattaacgcctggataaaactccacaaaatactagcttatatctaaaactctggacaaatttatagctgacacagatatagtaggcactattctgaaacaattattttctcaagtaatttttctttcaattataatgtagaactgttaagaccaattaactaataattgtgaacagttgataaggaaacaaaaaaagtataaatgtccagatttgttcatgaatatacaaactaaatacttacaaggtatgaactttaaataggagagatttttgtcctaaaactgtgatctagtccttgagtaaaagtataaatttataattattttaatggcaaaaatttaaagctatgttttctgcggttaaaataaggtgtaataaactaata

SEQ ID NO: 170937 - DNA, 359 bp, Homo Sapiens
tactaaattcgcggccgcgtcgacttcctttcctctctcgctctcatcagccgccttctcggcctcctccagcttctgcagggctgtagccaggcgctcctgggcccggtccagctcctcctcaaccagctgaatgcggcggttcagggaggccacatctgcctcagcatcagtggccttcttctcggcctgctccagtttctcctgggcctccttcacggattcagaatacttttccacctcatcctctgtccccttcagcttcttctggagggcctgctgctcctcctccagctgcttgcagcggtcctcagcttgcttcttgtcgggtcgacgcggccgcgaatttagtagtagta

SEQ ID NO: 170938 - DNA, 817 bp, Homo Sapiens
  misc_feature (621)..(651): n is a, c, g, or t
cggacgcattcactaaggaagagagagtttatttagtcaactggcccaaggcagcgaggcttctacagtcccacaccccatagccgcctgggctggggcttactgggggctgaaggttctggacatgaacaagggtcaggtagaagagaaaggcttcccctacaccccagcctcctgctgtcccctgaagcccaggactgcgttgtatgctttccatccactcaccttaccccatagcatcttgcggcccagaaaccagagccatttgtctcagaccctaaatcaataatcacaaaccccaaaacgggagagagcagtgaaaacatgcagggctgtggacgggggaagggttatggcgggtgttctgaggctgagaggacacctatatgcgtatgtcctctacacacatcaccccccttctataatcttaagccatgaaatagcctggtggcgtgtaagtttcggcccagttctaccccctcatgtgcttcttctgaatactgaatgtgactgtttgaaagctggtagaattcatccctcttactgtagataacactgcaaatcttggaattttgttttttgctgtttccagatgtatctataaatatctatacattatannnnnnnnnnnnnnnnnnnnnnnnnnnnnnnacatcgggtcctcccatgtgtggtgttcttctggagggtgtctcctttggccaggcggaacttttaatgggtaattatttcctcctccgcacaaagaaaagaagcctaatttttggggatttccgggcgggctggctgttcctggaaaaagaataaaaatggtaac

SEQ ID NO: 170939 - DNA, 621 bp, Homo Sapiens
  misc_feature (365)..(377): n is a, c, g, or t
tgtaccccaacttcgacggaccattcacagtgcaagaaggatacccaataccatgtacataaatcgtgctatgaaaagtttccccattattttgggttatcttcttttggacaaatgacatcaaacttgtgaggtgtttgcatgtggccattaccgtcattggcctgtgaagcattggacatttatagataattgatataaaagaatcgccatgcccatggactaagaacgatgctggctttcaagcaaaaaagaaaaataatcattgtttattgtatactgcctttttgtaatcctgtacaattgcatcacgggtggggataaaaagaggaaaattttggtttatttcctagactgttattttnnnnnnnnnnnnncattgtgttaggacagcatataaatgtaataagtatcacactgtatataaacatatcaatgtttgtcctgtataagaattactaaattacaaatgcaatttcatttaaacttctaggttaagtttgagcctgaaattttaatgaagtgcaatactgagtgtgcctcattatcttgcagctgtaaacatattggaatgtacatgtcaataaaaccactgtacatttttatacagtgataaagtct

SEQ ID NO: 170940 - DNA, 1143 bp, Homo Sapiens
ggagggtctgtggcaagtatctcccaccaggaacaactgagttctgtgccggatctgacccatggggaggaagacattggtaaaagaggaaataataggaatgggcagttattggaaaatcctcgctttgggaaaatgccattggaattggtccggaagccaatttctcagagccagatcagtgagttctcttttctagggtccaactgggacagcttccaagggatggtgacttcattcccaagtggggaggccacccctcggcggctgctttcctatggctgttgtagcaagaggccaaacagtaagcagatgcgggccacagggccctgctttgggggccagtgggctcagagagaaggtgtgaagtcacctgtctgttctagtcattccaatggacattgtactggcccaggaggaaagaaccagatgtggttgtccagtcatccaaagcaagtctctagcacaaagcccgttccactgaactgcccttctccagtgcctcctctgtatttggatgatgatggactcccctttcccacggatgtgatccagcataggttacggcaaatcgaagcagggtacaaacaagagggggagcagctacgtcgacaggtgcgtgagcttcagatgaggctggacatccgtcactgctgtgcccctccagcagagcccccccatggactatgaggatgatttttacatgttttgaaggagtcagatggcagtgatactgaggattttggctctgatcacagtgaagactgcctttcagaagcaagctgggaacctgttgataagaaagagactgaggtgactcgctgggttccagaccatatggcatcacactgctataactgtgactgtgaattctggttggccaaacgaagacaccattgcagaaattgtgggaatgtattttgtgctggatgctgccacctgaagctgcccattcctgatcagcaactctatgacccaggtcctcgtcttgtaactcatggttacgaacacattccaagtctctcggggccagggaactcattgagccaacagctggaaaaaacccatttgctaaaggcttccagttggaatgcccgggggaaaaaacctgggccaattttttaaacagggtttgaaaaggga

SEQ ID NO: 170941 - DNA, 865 bp, Homo Sapiens
ccggcttcagtgggacggctcctctgacctctcaccctctgattcaggctcctccaagacgagtgaaaatcagggatggggtctaggtaccaacagctctgagtcacggaaaaccaagaaaaagaaatcccatctgagcctggtagggactgcctccggcctaggttccaacaagaagaagaagccaaagccaccggcacccccgacgcccagcatctatgatgacatcaactgacttgggtgcaagggatagcctttggctgagcagagccctctctcctgacccccacccaggtggcatagcctggcaaatggacggctgctgggggttggggcttgggaagcttggtgggccaggcaggcagaggatccgattatgcgcccctggggggtgtcaaagtcctctgcaatggagcacgactcctcggcgtgcaggactcagacctggacatattatgccttggacataagtttggtggggaggcggttttcctatttattctgtgagttactggatgtccagctaggccaggggcctgacctgggcactgtgccagggcactgcctgccccccaccccaggaactggactaagccctgctgaggggcaatgtggcgacccgggaggctgtggggttggaagctgagccctgggagggggcctgcctcgggcggccctcagcaatgtggaatgggtccggttgcctgggagctggagggggcaaggctggggcatgtccctgtctgggtggcaaaaatctttttcaaatggcccccaggtccccagggggtagggcaaggcacagaagtggctgccctggtggaagggggggccttccaaaaattgggcggccaccctttccctt

SEQ ID NO: 170942 - DNA, 713 bp, Homo Sapiens
gagagcggatctgcggaaatgaacacctttcaactgctcatgaattcaggacactggttagaaagacgtcactccccacaatgagaacagggaagaggagacccggcgacactaagtcaccaggtccaaggaacgtggctccctccccagggtcatctcacctagatctttctctcccaggtcatctcagctcaatctcaataaccctatgaaagccctggtctgttgtgttccttcaccgtacggtttctgtaataaaaagtgttaatccatgttaatctgtgtgaaaattattgcgtgcaacagtattttctcgtgtacctctttttcctatgtgaattgtccctcttttttatttataaatgtctacttttgtttttttaaagacaaaccaatgtgttgtagacctatatgtaacctattccttagtctcatattataggcatgttataagaatggatattttacttggctttagaatgttttacaagaaaactaattcttaactgatcaagtccttgctactaaaatgcttgtgtttttcatcatgacgtcgtgtgcttctaaattaatcattttcgttgtagaaaaatggagtgaatttatattagtcttggaagctaataatagcattgtaaatttatgagctgatttcaacagaaaaaatatagaagaatagttcttttgattgtcatcgtacagctgtagggtaa

SEQ ID NO: 170943 - DNA, 235 bp, Homo Sapiens
ggacacttgacggcatcaccagaaatcagatagtcactatttgcaagatcgacttaatcaggtatctagagatcaggttcggacaatgcgcagttcaattctgtgcccgcaaagtctctgctgtttcaggagatgttcgcaaagcactggatgtttgcaggagagctattgaaattgtagagtcagatgtcaaaagccagactattctcaaaccactgtctgaatgcgtccgtcg

SEQ ID NO: 170944 - DNA, 1017 bp, Homo Sapiens
ggcatggtactggtccggaatgcccgggatatcgtcgacccacgcgtccgttaactgccagtgctttattaaggatctctaccaagacgtgctgtgtctcaccctgttagacagagaccagttttcaccagatgatttcctgggtcgtactgaaattccagtggcaaaaattcgaacagaacaggaaagcaaaggccctatgacccgccgactgctgctgcatgaggtccccaccggggaggtctgggtccgttttgacctgcagctttttgagcaaaaaaactctcctgtaggggttctaaaggacagcaccagcgggacagcccacaaggctggggctggagaatgagagactgcgctctcttggggctgagggagcaccatgcagcttcacaccctcacaaagccatgcacgctgggggctctgtatttcctgcacactaaatagctagcaatctatgcaaacacctttctccataaagaaaccaaaacccactagtacagtgccttgtcctagtgtacacactgttcagctctgtaggtttagatgccaaggtttccattttcagggctataaaaagtattacttggaaatgaggcatcagaccaccagatgttaccgcatcggttgaatgtgtccaccgtggagtggtttggtgacgctgtaaccattccacgccagtgacctctgctgggtcacagccactcaggaggggaagggtcaggatgagagggtgcagcctcgacaattggcgcgactgatactgaaatagcgtctactcgagcactgaatacaagcagcaaacttgatcatttatatacctgattagatatatcactctctgtaagacgatatagtctggagtataagtggggaaagattgaggtcaagtactgcgacctctactaagtggaaaatatatacaaatatattctctgaggtctaaatattatgtaatcatggtttgaatattctaagaactgctacttacatcattggcacatgtaagaaagtca

SEQ ID NO: 170945 - DNA, 772 bp, Homo Sapiens
  misc_feature (16)..(16): n is a, c, g, or t
  misc_feature (571)..(572): n is a, c, g, or t
  misc_feature (577)..(577): n is a, c, g, or t
  misc_feature (580)..(580): n is a, c, g, or t
  misc_feature (582)..(582): n is a, c, g, or t
gggcaaatgtggcccncaggagacacacccttccatgccccagacctctgtcttgcatgtgacaattgacaatctggactaccccaagatggcacccaagtgtttggcttctggctacctaaggttaacatgtcactagagtatttttatgagagacaaacattataaaaatctgatggcaaaagcaaaacaaaatggaaagtaggggaggtggatgtgacaacaacttccaaattggctctttggaggcgagaggaaggggagaacttggagaatagtttttgctttgggggtagaggcttcttagattctcccagcatccgcctttccctttagccagtctgctgtcctgaaacccagaagtgatggagagaaaccaacaagagatctcgaaccctgtctagaaggaatgtatttgttgctaaatttcgtagcactgtttacagttttcctccatgttatttatgaattttatattccgtgaatgtatattgtcttgtaatgttgcataatgttcactttttatagtgtgtcctttattctaaacagtaaagtggttttatttctatcnncccgnacngnccctcacactgagacctgaccagccacaccggaccatcctgggcatggcactggattaggggcccgactcccaatgaataatgccctttcagttccaaaacacctccttcggcaataaatgacactcttgaaggtctcccatgggagaacctccaatagggggttttgtgggccccccgcccgccccccg

SEQ ID NO: 170946 - DNA, 482 bp, Homo Sapiens
  misc_feature (16)..(16): n is a, c, g, or t
  misc_feature (39)..(39): n is a, c, g, or t
  misc_feature (431)..(431): n is a, c, g, or t
aagacaggggttccgnaaaacctccttgttggtttctcntccccatcaacttctggggtttccagggaacaagcaagactggctaaaaggggaaaaggcgggatgctggggaagaatcctaaagaaagcctcctaccccccaaagcaaaaaactattctcccaagttctccccttcctctcgcctccaaagagccaatttggaagttgttgtcacatccacctcccctactttccactttgttttgcttttgccatcagatttttataatgtttgtctctcataaaaatactctagtgacatgttaaccttaggtagccagaagccaaacacttgggtgccatcttggggtagtccagattgtcaattgtcacatgcaagacagaggtctggggcatggaagggtagtgtctcctgggggccacaagtttncctagacagggctattccaaaaagtcatttgtttctttaattgttcaagaa

SEQ ID NO: 170947 - DNA, 688 bp, Homo Sapiens
  misc_feature (585)..(593): n is a, c, g, or t
gcggcatcatctcctgcatagccttcagcccagcacagcccctctatgcctgtggctcctacgaccgctccctgggtctgtatgcctgggatgatgcctcccctcgcaccttgctgggagggcaccaagggggcatcaccaacctctgctttcatcccgatggcaaccgcttcttctcaggagcccgcaaggatgctgagctcctgtgctgggatctccggcagtctggttaccaactgtggtccctgggtcgagaggtgaccaccaatcagcgcatctacttcgatctggacccgaccgggcagttcctagtgagtggcagcacgagcggggctgtctctgtgtgggacacggacgggcctggcaatgatgggaagccggagcccgtgttgagttttctgccccagaaggactgcaccaatggcgtgagcctgcaccctagcctgcctctcctgcacactgcctccggtcagcgtgtgtttcctgagcccacagagagtggggacgaaggagaggagctgggccttcccttgctctccacgcgccacgtccaccttgaatgtcggcttcagctctggtggtgtnnnnnnnnnccagactccagcatccctgatgatcaccagggcgagaaagggcagggaggaacggagggaggtgtgggtgagctgatataaaaaggtttttatga

SEQ ID NO: 170948 - DNA, 1081 bp, Homo Sapiens
gcgcggtccaactcgacgacgcatcatgaatggtgtgaagttgggacgcatcatctagaaactgggagaccatgtggtataaaaaaagtcattaaagttgcttgcagaaaaaccacaatgcaagtcattaagtaatgctagaaatgtctcaattgacccaaccctcaagatacttcaaaatgtactttatttttccacgcaaagttaccgagccaagttctgcacagttggtgcatgctggacacacttgcaaactcttgcgctgtaatgtcagtctggactctgggagccaggctcagctttgagatttacatgcagggactcttaagagtcaacaggaaaacacataacagatctgtagaatgacacctgttcacatacgagaagcacctatgacttgggtatcacactgctttcagaagcttgtccctggctgcccacagtgaagcacgagggacagagcgactgcagctgtggacagaaaactgaggtactgtgtttacatggtgagtggtcgttaccatccaacagcacaaggcacaaaaaatgggcatcaaccaaaccatgcataacgaggcctggaaaccatcaagaacagccacaaaagaggtcactcagacctctgattcaaacttctggtgtttgagtgacaagcatgcacgtttaggctctgcccaaatatcagggaggatttccaatctccacaagagactggtttcacatatggcctttctcctggctgtcaaaccaccagggttcctccaaaacaaaatgagagcagctgttttgctgatcaaccaatcacactagcagttctatttcagtttaaaacaaccttgcaggaataaaccacataaagactccgtggctaagggctgctattacttacacctaccaagcgaacacaaacggctggctcttctatggtaacgcttcactggcatgcaaaccccaaggggccactgaatggaatgaatccacatgaacagcatacctggagcaggaacatgcaccccaccaagaggtgtcaggagactaagctgctgtttgtctagacattctttgaggggaaaagaacctg

SEQ ID NO: 170949 - DNA, 926 bp, Homo Sapiens
  misc_feature (709)..(719): n is a, c, g, or t
  misc_feature (844)..(844): n is a, c, g, or t
  misc_feature (899)..(899): n is a, c, g, or t
aaaaaactattctgtataggtaatgaacgattttcaaaaatcttagatgaatcaatgagataacagccaaacactcactcaactggcatctactcaaaaagctattggtttctcatgattagctttgccaaaccatctccctagattatttttctttttaaatttcactttgcatttggttaatcattccctgggaaagcacacggggcaggtgggcctccatagtcttcactttgccattccctatctgatgaattctgaacctcagcttttcatccaagaactggagttaaaacacctgcactattatacagggcgtgaggctgttctcatgataatcaatgagctgatgtgtggttgaagctcttagctgactccatagatagttctaaactacctaagtataaattcagcagctttgcttaagatttaaagcaggtattataaatatgcattcctttgccgatcttttaatagaaggacaggcctattcttttgaagatggatctgctgatgagagctcccctttgtctactttacatcaaccacacccttatttcattgttttgtgattccagtgttggtttctttaaagtaaaggaagaatttagatatttgccgagccattctgaatatagaaacttcctagatcgcatatcccttgatcttttatcgttaatttactctcatctaattaacagcgttttgnnnnnnnnnnnagaaattgacttttattaagtctttccaaagtagccaacttagttttcaaagaaaatttctctctatttttatggtcatctaatcagtgacagtaataagtcaatcagctcatgtaatcccagtnaccaaacagcaggattgtggacacacacaggtgggagccctgaaatgcctggcanctgggaccagtggggaaccttgaacca

SEQ ID NO: 170950 - DNA, 587 bp, Homo Sapiens
tgatcgcgttcatacactcatactcactcacaccgggaccgggagacataccaggtcgcctggcaggcacagctgggatgtgggaggaaaccagaggacctggagaaaaccactgaagacatgggaagaatgtgcagacttcacccagagagtggccccggacacggggcaatattttttctcgtcaacgtcataatgaaacgacgatgttattcatggacctgctgcactggccttcgccccctctatcaagtgtgccgcggggcctcaagtccagggtttcttgttaagctcatgccttctgccagggtgggccagagggagttgcctgggtgcacagagattctaggattctgcagtctccctcacaggcttctggtctgccatccccgtgccagcccttccctcatccctatcttgattcccccaatttttaaaacttcccctggttctgtgatgagaacctgcttgctttatgttggctcccatcatggcaaactcaagttatcacttgcatctccactccatcttccaaagtgtgttgacacctgtcatctgctgtcatcctctctcccttctttgtcctt

SEQ ID NO: 170951 - DNA, 531 bp, Homo Sapiens
tggcatgtgaaatatcacggaaaaatccgtcaccatcggagtgtgaaaataattaattggggtattgagtggcatgtgaccgaccacattcatgctggaatggaaaccacttacaccgttctacaaaatgaagcatcttctgagactcacaggagaatatggaatgtgatctacccaatcacagtcagtgtgattattttattccaaatatctaccaaggaatgaccaggagaataagatcctccgatgttcgcaatggtgtggtgtcaggaggctgcctcttagacaatctccagatgtactgtgatgtgagtttgaaaaagagttcctgaagtaccacatctgggagacatgccactagctgagcttcccaaaagtctaccaagagctgaggaattgtatcttcatccttagcacaaagcaccttaaaaacagtaaaaggagcctctatattccagataaatatagcactgataaagcgacagctgggctgaatatcacagcatcacatggccactcaatcacgaggat

SEQ ID NO: 170952 - DNA, 899 bp, Homo Sapiens
  misc_feature (125)..(159): n is a, c, g, or t
acccttttcgtgggaccaatttaaaatttgaattggagggttcattaaatttaaaggaaggggaattagtttcccacttacccggattaaggtaagccagcctgtaaggcatttgtatcatatannnnnnnnnnnnnnnnnnnnnnnnnnnnnnnnnnnatgatatataaaattaaaaaactcctctacttgtactttggcattcgatttttagaaattcagtctccaatgccagttatggtatttttcaaatgatacctgttaagtcaatggtttctttcgactgccatagagaagatatggcagaaaaatgttgcagtaccatcttctgggagaacattcatgaaatccttcagttctagttccacagcaaccattgacaatgtttcttttaatgatgacaggtagagttgatacttctctccaccacattttattctctgacaaagttcaggcaacagttttttccaccacagagtccggttctcttctttcagttcatgattagcatatggaatgactgcctccgggcatctctctaacagtatgtctatgcactgttcatactctttcaagcgtgtacgacacagaacatggacactgaggccggcaatagtgtcttctgaaagtggctccaagaacggaataatggaagctatgtcaaatgaaggaccacatataagagactgtaatctttgaaagatcttctgtataatttttatcagctaaagaatcacgatgatattacgacgtgaacccatggataaattaagccataatgactacaggcactttatcagatcctccgatgttcgctatggtgtggtgtcaggaggctgcctcttagacatctccagatgtactgtgatgtgagtttgaaaaagagttcctgaagtacc

SEQ ID NO: 170953 - DNA, 1161 bp, Homo Sapiens
ggggctggtcttctctcccgcggcgctggggcccgcgctccgctgctgttgctccattcggcgcttttctggcggctggctcctctccgctgccggctgctcctcgaccaggcctccttctcaacctcagcccgcggcgccgacccttccggcaccctcccgccccgtctcgtactgtcgccgtcaccgccgcggctccggccctggccccgatggctctgtgcaacggagactccaagctggagaatgctggaggagaccttaaggatggccaccaccactatgaaggagctgttgtcattctggatgctggtgctcagtacgggaaagtcatagaccgaagagtgagggaactgttcgtgcagtctgaaattttccccttggaaacaccagcatttgctataaaggaacaaggattccgtgctattatcatctctggaggacctaattctgtgtatgctgaagatgctccctggtttgatccagcaatattcactattggcaagcctgttcttggaatttgctatggtatgcagatgatgaataaggtatttggaggtactgtgcacaaaaaaagtgtcagagaagatggagttttcaacattagtgtggataatacatgttcattattcaggggccttcagaaggaagaagttgttttgcttacacatggagatagtgtagacaaagtagctgatggattcaaggttgtggcacgttctggaaacatagtagcaggcatagcaaatgaatctaaaaagttatatggagcacagttccaccctgaagttgggcttacacaaaatgggaaaaagtaatacttgaagaatttccttatatgataatagctggatggcagtgggaaccttcaccggggcagaacagaaaactttgagtggattccaagagaacaaagagaaaagaaggcaccgtcaaaaggttttgggtttttaccccaggggcgggaagaaacctcacaggtttgggaccacctttggcaaaaccggggctttggacccaagaacaaagccatttgccgggcaacattgatactggcttttttgaaaaaacgacaaacccaatctggttgaaagaaggccctaaaaagccttggcattcgggtcaaagggaaaaaaggccggcccttttttttctcaaggg

SEQ ID NO: 170954 - DNA, 456 bp, Homo Sapiens
aaaaaagcaagaagcacttgccagatttaactataattcctaaaaatgatgaacattttcatcttcaggaacatgaaacatcatcgactattctctacagacaacaggcaaaggttctcacatggccactcaatacctttaagacagcactgtctgtaaaagcatgaagtgcccccttctttattaacacataactgcatttgctgataatatttatttgcctagaattcaggccctttttgcttttacagacaatgctgtcttaaatgtgctagagatgtatcatttagtcaccttaagctggtgtttctgtagggtaggttcctaggaatggcattggattgtttggcgttacagatatagtgctactttacacaacgcactgaaccgagattatactcccagaatctgtttggtttttaaacctatccctagtactgtgtcttgactagtgat

SEQ ID NO: 170955 - DNA, 350 bp, Homo Sapiens
  misc_feature (309)..(309): n is a, c, g, or t
  misc_feature (337)..(337): n is a, c, g, or t
tgacacacggtgcctgccccagaatggtttttaaagccacagttgagaggccacccattgcccggcgcctggacagtgatcatcttgttcatcttgttcagtcctttcttgtgtgattggaattattcatcccctttgaaagatgagaaggttgagatgcaaagagtctacctttccaagttctcactgctggaaagagctagaagcacagttcaaagttctgggcttctgggactctggcagtccagggtctcccttcttcccacttggcctaccctcaatgccacactgttttttgaagtgggcccntaactttgaagggaaaaggttttaaagncagttcaatttta

SEQ ID NO: 170956 - DNA, 694 bp, Homo Sapiens
ggtggcagtgatacatgttggcaggctggtcttgatcctgactcaagtgatccgccgcctcaactcccaaggtgctgggattacaggtgtgagccaccacacttgtgcagtatatcctcagtatgaagatatttttatcttcctgtgttctctggcttcagagtttcacctgcccacacagggtccgttgctggcaactggacttccccataagccttgggtatcctgtgatgggctgtgtctccctgaagatagtctggcttgcccacttctccgtgcatgactctgggtgtgagtctgtctaggaacaggagggaaagttggactcagacagaaatcagatgcttccatgtattcagggcgcgcattgtgagcagtgcagtatgagccttgagggcctcatggttgcagggcaggcttccctgcagatgggtggcagcccctggtagaatgctggatttctctggaatctagaagtgccatattttagtggaaaggcatcagggctgtttgacagtgtgcgtctttccaatcccatgttcctccattcgtgtgtctgttataaaactgagtgaaggctgctatgacctgtgttcactctggttacagggaggtgcaaaccattctgtctcccagcctttcttctctctttgtgtgctcccagcacttccttcttttctcacatggccactca

SEQ ID NO: 170957 - DNA, 650 bp, Homo Sapiens
  misc_feature (345)..(606): n is a, c, g, or t
aatcaaccaatggagatgacagcaaaagttgcaaagaaaggcatctggggggtgaaaaaataaatgttccgtcacagaaagaaaccagttgtttaaaaactaaacagtactaaacataaacttacttatacacagaaataggtcaagcaaattctacccaaatccctcttcctttgggccttgtcaccacaagtaaacctcatcagaggggtcaagaccacaatgactgacatcctgatcatgtgatgtgatggacagagaacttgactccgagtcagcagaatcgtatagtccagtttgacttcaatactcattaattcaccttttaaaagtttctgactctcnnnnnnnnnnnnnnnnnnnnnnnnnnnnnnnnnnnnnnnnnnnnnnnnnnnnnnnnnnnnnnnnnnnnnnnnnnnnnnnnnnnnnnnnnnnnnnnnnnnnnnnnnnnnnnnnnnnnnnnnnnnnnnnnnnnnnnnnnnnnnnnnnnnnnnnnnnnnnnnnnnnnnnnnnnnnnnnnnnnnnnnnnnnnnnnnnnnnnnnnnnnnnnnnnnnnnnnnnnnnnnnnnnnnnnnnnnnnnnnnnnnnnnnnnnnnnnnnnnnnnngcctctgttgtcacatggccactcaataccgggatcctctagat

SEQ ID NO: 170958 - DNA, 294 bp, Homo Sapiens
caggcatgagtcactgcgccagccctagtttcttaatttttacacatcagggtggaaatatcttggttatgtaatcaggagtttaattgagcagtgtactagttggttaagcctgaagcttgtatccggcaatgtagtaatttaccaaaaaatgctcttgagtttagattatttcttagaagtagaaatccggggactacgagccacctcagtctaattgcctgccacttaattattttcacaactccgatggtgacggatttttccctgaatttttcacatggccactcaata

SEQ ID NO: 170959 - DNA, 657 bp, Homo Sapiens
gcttcctagacctccatttaagcaaggaatgcatgtttataagcgaactttgacacttgcctctgctgatatggctgggaatcctctctttcattcttcattattaatgggtatttattatgtcataggacttgtcattaaatttgctgaaatctggtaatccaagcctccaacccatagtttgcatcaaccaggtggcgacccccaggctctgctggtttccattcctttatcttgattccattcctctatcttgattctccctggtcgagagcttttctgacccacctaaaatctgttcatttcagaccccggcctttccaggatgccttttggagcccctgctggccaccacatatcatgttctgaagttctacagccctctgagttggacactgaccatctgggggctcgagtcatcctcagattggtatgcagccattcaaacattcctgtttgtttcctgtgagtcagcattgtgctgggcttccaaggaatctgcagtcctcttcactgcctcttcctgagtactcactgtgttccaggcttctctcagcccttcctgggtacagtgctaggaagtaaagagtcatatccactccagtaaatgattgctgagtggatgaatatagctattttcaccaccaagataaagat

SEQ ID NO: 170960 - DNA, 264 bp, Homo Sapiens
ggctcggaccttagctcatgggctgtatggaaattgcaggtattgagtggccatgtgactatccagcttcatctcttggccattatgtgcttccctcttcttgctctagaaatactgacctgtttacagttttccagacataacatgttattttcatgtttatgtacttttgtgcatgcagctgcttctgcctagaaatttgatcacccacccactgtcagtttttcagataaattcttattcatccctcaaggttacaccttt

SEQ ID NO: 170961 - DNA, 546 bp, Homo Sapiens
ccgtaccggcatgtgaaaggtcatggtagctcacactaggatcggcagtggagacaaacaggcaggcgattacagtgtatctgggagagaacattccaacaaatcgtaggtggtggcgtcgaattatagtgatgattactgtggccactcacacagtacaaacatctgccccccagataatttctaggaagtggaattcaccatcttcatattacaggtggggtaacagcagttcaaagaaaggaacttgagcccagacatttgccatgtcaagagctggagcctctggaaagagaagggagctggtgcttcctcagtggtggtggaggaggggcattcttatgccaccagctttattctgtgtggattccagggacttccatgttgccaaatccaaagcaatctctttgctgcattgtcttactctgtcccagcagtaatggacagttaccactctccggaagtggtctgtcatcttgcttcccgggcacagtgctctcctgatcactatcagcttctctagccactccttcccgccactcaata

SEQ ID NO: 170962 - DNA, 400 bp, Homo Sapiens
tcagccgtccggtattgagtggcatgtgaaaaatgaaggtggaatactggtattaaaaagttacgcttgattagaaactctcaatcagaatacagagccactcagaaatctgtgactatctgtgtatggccagaaacaacagccacagctattgaaagaataggttttcttcaatactcatccatccaaaagctatagcttttgaaatcagtcagtttaacgactggtcttgaaaagaacatatatttcattctagtaaacattccgtgtataaccccaccatgttatgcttttctagtttttgtcttgggttttttttggcaagctataggaatttattctcactggcagcataaccattccacgtaacataaacaattcactacattttataacccat

SEQ ID NO: 170963 - DNA, 559 bp, Homo Sapiens
  misc_feature (257)..(504): n is a, c, g, or t
agtgcatgtaatgattaactctgtagaagttgtgatctgcgtgatactgcattgggagtggatgacaagaaatgaaaagccgtattgacaaggtgatagcaacctaaacaaacaggcttttaaagaaaaggatgtttatttgaggatagagcattgcagtgaaaatacatgccacatgccatagtagactgtgtggatattcgcatattcagggaggtaaaggaaggcaagggttttgtttatgttattatttttgnnnnnnnnnnnnnnnnnnnnnnnnnnnnnnnnnnnnnnnnnnnnnnnnnnnnnnnnnnnnnnnnnnnnnnnnnnnnnnnnnnnnnnnnnnnnnnnnnnnnnnnnnnnnnnnnnnnnnnnnnnnnnnnnnnnnnnnnnnnnnnnnnnnnnnnnnnnnnnnnnnnnnnnnnnnnnnnnnnnnnnnnnnnnnnnnnnnnnnnnnnnnnnnnnnnnnnnnnnnnnnnnnnnnnnnnnnnnnnnnnnnnnnnntccaaagatgctgagaataacaggtgtaagcaattgagccccgacttggaaaagg

SEQ ID NO: 170964 - DNA, 339 bp, Homo Sapiens
tattgagtggccatgtgatgatttaactctgtagaagttgtggatctgcgtgattctgcattgggagggatgaaagaaatgaaaagccatttgacaaggtgatagcaacctaaacaaacaggcttttaaagaaaaggatgtttatttgggatggtattgagtggccatgtgaaatggtgcagcatctttgtaaaacagttgggctgttcctcaactaatcaaacgtagagtggccgtatgacccaataattctactcataggtataagaacaggcaaatctagcatgaatgtaaaatagatcagtgattgcctaatgctgaataggcagaggggaccgg

SEQ ID NO: 170965 - DNA, 226 bp, Homo Sapiens
tattgagtggccatgtgactttgggcaaattacttaatctgcctgggcctcagtttcttcatctttaaaatgaggatgataaagtagcaccaactcctagagttggtggctggcataaaagcaatgttaatggtaaaaataccagagacagcaggtgcttggcatccccactgtgctccctgagtggtggcccatgccgaagcagttggctccctccctttttgga

SEQ ID NO: 170966 - DNA, 642 bp, Homo Sapiens
catgtgaaggggaggtaagggatgaacacatctgaggcagatgggacggaaccaggaaagcaagcctgaaggacagcgacgggcaaagaagaactggcagccagtacgggataaatactaacacctacaaaggaatgagccttaaacaaaggcacttttttcgatgtttctctgatcccaccaggcctctgtatcccagtattgtactccctcttatatttcagctagtcagtatttttggcacccttttcaaaagagaaagaaaaaaactcctgctcagaaaccctgttatagtttgtactcatccttacatagcagtaaaatttataatacacaaatttataatatataaactttatatacatatgtatttttccagagaactgttaaacatatacattatttaacagcttaatacactatccaatctattcttcctcaacaatgcaccataacctagctaacctcgaattccaaaataatactaaaatcacactaaagtacaaagaaaagctttagaatcaccctgcttggtatctgccttagagtccaacgtcaaaagttttttatatttatcaataagggaaacttaagcatatatgaatatcctccagaagaaactatggggaaagttcgaactgc

SEQ ID NO: 170967 - DNA, 226 bp, Homo Sapiens
tgaacacttaatactgacaatttaaagctgcttttatgaaatagcttatacccagaccatttctgcctccgtgcaattacagtaagaaatagctatcctagcaccatcgttgcatgctgtgaaaaatatggcaggctgtgttgataccagcaaactttcatttgctttagcctggaaaataaaatatttcacatggccactcaatacctcacatggccactcaata

SEQ ID NO: 170968 - DNA, 849 bp, Homo Sapiens
  misc_feature (59)..(243): n is a, c, g, or t
  misc_feature (247)..(267): n is a, c, g, or t
tcagtgaggatgggtacggctacaaaaatatacagatgaataagatctattagatagcnnnnnnnnnnnnnnnnnnnnnnnnnnnnnnnnnnnnnnnnnnnnnnnnnnnnnnnnnnnnnnnnnnnnnnnnnnnnnnnnnnnnnnnnnnnnnnnnnnnnnnnnnnnnnnnnnnnnnnnnnnnnnnnnnnnnnnnnnnnnnnnnnnnnnnnnnnnnnnnnnnnnnnnnnnnnnnnnnnnnnnnnntgcnnnnnnnnnnnnnnnnnnnnnttcaaggatgtaagcataagaaatatccagtttaatacaggtgtagtataggtaagtaaatgcaattctagcctattataatcttaggatgttattaggaattagaagaaaaggaagctagatatcagttaagctctcaatctatgaaagccatttgtagagaattaaaattcattgaactgctctatgtaatagttcttcatcattaaacccccaacatgcccaatttacagaactgcaaatgggggataaatggttattttaaggaattaatcactgctttgactttcatggattaggagtgaggtacaattcgttttatattgggggaagacaatcctggtgaacagcaagtgcagatgacccaaggcagcaatgtgcccaatgcgcttgaagaccagcaacgaggccagcatacttggagtggaatgatctaagaggaaactagtaagagggagatcagagaggtaacaggcaccaagatcatgattggtctcatagacagtcttaaggactttagtttttatttttagtgacatggaaagtcattggaatgttttgatcacatggccactcaatacc

SEQ ID NO: 170969 - DNA, 261 bp, Homo Sapiens
ctcgttgaatgagtggcatgtgactgaggaaactatccaagactgggggaacaaaaaacatatgaaaggaagtggagcagcactacccagaactctcatggggccaggaatagtgcctgttcttagtagccagattagaaaaactcaatttatggggtatcgggtagagggcacaggaaagtcctaccttagcactagggaatttttagccctaaactaagtactgcttagtttaagtaccggcctaacaaattatacaac

SEQ ID NO: 170970 - DNA, 161 bp, Homo Sapiens
gccggtccggaatgagtggcatgtgaagtggtgtagtatttgcatataactatgcgaatgtatactttaaatatctctagattacttataatacctaatgcaatattactgttatatagttatactgtattataaaaatttgtattttttattgtattttt

SEQ ID NO: 170971 - DNA, 435 bp, Homo Sapiens
  misc_feature (11)..(11): n is a, c, g, or t
tctgtggggantgggtggcattgatgggaggctggggaacatgcgggaaaaactgaccccaataaatagatttaaggagaatgagaaccattcccaaaaagggccttacagctatggaaagagagaaaaactggaacgtaccctgtggtgctgggctaaaatcggagacagagagagagatggaagtacgtgcacatatcctctagctctgtccactaagagctcccgggtgcagcaatctgcaacagccaggagcacgcctcgcacccacatcctggttcctgatgctactctccagttcaaaagaacaggtcttcttagagctgcagctcactccaataaatgaaagagaaaggggcaggcaagtataaaataaggcttgaacatctttttgcaccagaaagtaaagaaacagctaaagaactgtaggtacat

SEQ ID NO: 170972 - DNA, 280 bp, Homo Sapiens
gtccggtcttgagttcatgtgactgcaggtactggagatccacagcaaagatccaggacccgctgaaagcctagaaatggtgagattgccagttccgacatctggagaggggcaagggctggttggaactggtgggaagcagctgtggtgggactcaggcctccccgcagtcagctccacaatctgcaccctgagttctccttgcccaggttggcatctgtcccctgcagccataagatggcagctaggctgacagccgggcccccgggcgtcctgtctt

SEQ ID NO: 170973 - DNA, 1079 bp, Homo Sapiens
ggatggcatgtgagaggggaggggctggtccttaaagagcagtgaggaagaaggcaaaagtatagcattgacatcactgggccaggcatctaggtccaggacagagtagctgccatgcccattagggggaaggtgctttatgggtatcatttgtgggtgatatatgttggaggctagaggaagaaaacttcagcggtcctggaattgctaaaccagagtcaagtcactgcatattggcagttaggagatggcattatcgctttcattcacacaaggaagcgacatggttagatttctgtgtaaagggctgaggaagtgaattaggcttagtaaggggaagggatgctagagtttctttgagggttgtgaggatgatcacacagtaagttttggaagccaatgcagtgtcaaagggaaaccaattaggaggcagaagactgcgcggtgtgggatataatttccttccgcaactcctggagacttaattaaagttggaacagtcacaaaatcatgaatttaatttaatttcttagggacaatggtgaagctcctgatattccatgtaccagctggcagatgagtggaactgatacaacacttagggttgcaggaatgaatccacagggatcatgaaaaactaagtttagaaatttgaataaattaaatagaaggcaatggtctttcatatgctgtgaaactggaggtttaagccaagtttacccaggtctgaggcagggcgacctcaagttacatggttacttgagttacaaattacatggaatttaagatcactccactggctacgttacaaagtctgaagctaactgacgattgcagctagtttatgattatatcagtagttgttccttagtaagctagggctgccataacaaaataccatagactgggtggcttgaacaacagaaatttattttctcacagttctggaggctagaaatcccagatcaaggtgctggcaaatttggtgaggagccctagtgagcactgtcttcttagcttgaatgcagctgccttctcactgtgtgttcacatggccactcaggtattgagtggccatg

SEQ ID NO: 170974 - DNA, 404 bp, Homo Sapiens
ggcatgagtggcatgtgatgaatcgtcatcgaacgctatgacgtatggaaaggacacagccgccccaatcacattctccgaccagtgcacgggggcacgctgggatatccctgcgactgtggcaaacatgcctagaagtaagaagaaagagttaggtaggcttccaaataagcatggtgtcattttcctgtagctatgtctggatgcagaccgacccctgcccaccagcaattttcctgtacagtcttatatttcaaggaaggaaaaacaatataatatgctgtatgtgtgaagagccctacaggaatttatttctgtgaagagaactaccttacccagaatgtatatctgatatttacttccaattaaaaatgaagttgtaataatattaccacaaacttagc

SEQ ID NO: 170975 - DNA, 321 bp, Homo Sapiens
ggtacaggtattgagtggcatgtgagaaggatgaagaagtggtaccctcaggaataagttgaattcagttatgccaaatggggaaaatgaatattgaggaataaatgagttaattatcatagaattggggtttctgatagcacaataaatgagtgctgcttcaataaagaagtgagcaataaaagaaagcatgaatctaaaatctttacataacaggatggttgtgttgaaaagaccagataattagattggcctataatttagattatggacaaaattatgaagacgggaaagtcagttagctcacatggccactcaata

SEQ ID NO: 170976 - DNA, 334 bp, Homo Sapiens
  misc_feature (145)..(167): n is a, c, g, or t
  misc_feature (177)..(185): n is a, c, g, or t
ccgtatagagtggcatgtgagaaggaaagtaacagagactaaagtgttcctacattttccacccttctttcataccattcttccccgcaaagagacttttgatctaactagacaatgttgagacattttctcaatgatctacacnnnnnnnnnnnnnnnnnnnnnnngaaaaagggnnnnnnnnntgtgccaaagggggaagggaaggggtgaaaccaagcccccgtgcaccttgaccccctcgaactcaggtgatcctcccacctcaacgccccaggaggctgctactacgggcatgtgtgtccccagtccccagttatttttgtgttttttt

SEQ ID NO: 170977 - DNA, 476 bp, Homo Sapiens
ctgttaagcacttttctacagtgacgagtgagagtgctgcatttgctaaccttgcttcataacagcccctaaagagacttcagatttttttcagtgtggtagcctcttcccaggtccccaatgtaaagttctgagggcgctccaaattggcatggcgatactggctattttttgtccccagggtgagcacaggctccaggagcgttggctacttgggaagtgtgggctgtgactcagccaaggcaagagacagaccctgctctccctatcctgaccctctccagggaagccagtggctagagtggcaagcacagatttctacccaggccacctctggaaacctagcttgacttttggcaggttacttcatcgctaccagcacatggtacacagacaggacgatgatgtgaaatcctagagctgtagtcttggcgagatgccaggtcagagcgcccacccctcacatggccactcta

SEQ ID NO: 170978 - DNA, 847 bp, Homo Sapiens
  misc_feature (491)..(773): n is a, c, g, or t
cgtcaggtactttatagctttgcttcaaaatcttgtatattagatatacagagtacagtgtttaaaggtgttaagttcaagccctttcaacagaaagccctctgacatggaggccaggccgccaacaccgacaggtggagatcggatgacagggactgcacacaaatgggtctcctcactggggatccaggtagaaggtggaggggcggacgctgatacaaagacttaaaggtagtttctagaagaaccactgactgaaatgcagcaggggtttgatggtcagtgaattaatgccttctatgcctgagcttcctctttctgctgaactaggaaaagtgacatcaggcgaccatcaaacatgaagtttttgcaataatagtatcagtaactgtaacatcataaacaatagctactacttgctaagcttctgttacattatcaggcactaagctgacttatctatgtaccttatctcatttctttttctttgnnnnnnnnnnnnnnnnnnnnnnnnnnnnnnnnnnnnnnnnnnnnnnnnnnnnnnnnnnnnnnnnnnnnnnnnnnnnnnnnnnnnnnnnnnnnnnnnnnnnnnnnnnnnnnnnnnnnnnnnnnnnnnnnnnnnnnnnnnnnnnnnnnnnnnnnnnnnnnnnnnnnnnnnnnnnnnnnnnnnnnnnnnnnnnnnnnnnnnnnnnnnnnnnnnnnnnnnnnnnnnnnnnnnnnnnnnnnnnnnnnnnnnnnnnnnnnnnnnnnnnnnnnnnnnnnnnnnnnnnnnnacgccagccacctcagttcatttcaacctgcctaacacgccagtgcagtagtctcctcatgtacaggctggaga

SEQ ID NO: 170979 - DNA, 397 bp, Homo Sapiens
tcaataccggtattgagtggccatgtgaaaaatctgaacatgaacaatgaacatgaacaatataaaaaacataatattgagtgaaaaaggaaatcgcaaagggataacctatcagtgtgttagcagtcattcagtcaaacatttttattctttttggagaatcttctatgtggcagctactatcctagacaataagcatgaaacagtaagcaaaaccattaatataaatttgaaataaatactgtatattatcatgggcacatattaatgtattaacattaaaggattcatatggcagggatatcactaaattcatttcacttttttaaatctaaagaaaacatggtaaaacatttacatatttggagctgggttcaccagtgaggtattgagtggc

SEQ ID NO: 170980 - DNA, 455 bp, Homo Sapiens
cggaccctatagagtggcatgtgagaaatgctggtgtctcataccaggggaatgatactggatttatagtaaaagctggaatcagtgcttggctttggcatatcatatattcattcacctgatactcagcaagtcactaaccctctttaactttcagattattcaaatgtaaactggctataatgcaatctatgtactggatattgtattgtaaaaaattagtaataaaacgaaaataacatgcaaaaatacttcgaaaactctgtagatctgtaaataggttttattctaaaaactgaaaataacgtaagaggtcattaaaggaaaatcagaaaatacaatcaaaatatctacccacatatagtcattcttaagcttagatgcatgcacttctaagttcttcagcatatactttttttgtttacagatatgagaccatacttagtcttttgtaa

SEQ ID NO: 170981 - DNA, 251 bp, Homo Sapiens
cggaccagagctgtctttcctctgtctctcaagcgctttcatccttagaatcgggcttaggtctcgtcctgctatgacacagccctggatactccagctcagtcacactatggcatctacaacacacttaatcatttatttgtcttctaattgtttcctggtgttcataatatccctcatcttctactccaagtgcctgaaagtacagtgccaagtagtatagcactgcagtcattgcatggtgttggtgg

SEQ ID NO: 170982 - DNA, 172 bp, Homo Sapiens
tacggtatagagtggcatgtgattacataatgcagatcgtaggaaaagctgcttcctcagtctcattagtccaaccagctccagctcaccttcactggaaattgtcatgatgcacattaccaacacagtgttcaggaaaaatgagtaaacataccttttattcacactttac

SEQ ID NO: 170983 - DNA, 1311 bp, Homo Sapiens
  misc_feature (254)..(313): n is a, c, g, or t
  misc_feature (667)..(699): n is a, c, g, or t
catcggggggtaaggagaagaatgacagcttcctgagaggtttcacccaagttccaagtgagaagcaggtgtagtccctggcattctgtctgtatccaaaccagagcccagccatccctccagtatcggggtgggtcagaaaaagtctcacctcaatttgccgacagtgtcacctgcttgccttaggaatggtcatccttaacctgcgtgccagatttagactcgtctttaggcaaaacctacagcgccccccnnnnnnnnnnnnnnnnnnnnnnnnnnnnnnnnnnnnnnnnnnnnnnnnnnnnnnnnnnnnctaatgcgctccctgggcaacgcttcagatgcgttgaagttggggaccacggtgcctgggccaggtcagcagagctgcctcgtaaatgctggggtatcgtcatgtggagatggggaggtgaatgcaacccccacagcaggccaaaaccttggcctccatcgccacagctgtctacatctagggccccaaaactccattcctgagccatgtgaactcatagacaccttcacgatgtggggtacagcctccttcccatcttatcccagaaggcctctcccttcttgtccagcccttcatgctacacctggctggcctctcacccctatttctagagcctcagaggacccatccacnnnnnnnnnnnnnnnnnnnnnnnnnnnnnnnnnacataaatcataacttgcatgcatgagccactgcgtctggccttctataattttctggtagtcacgatggaaacaaacaaaacaccttagaaccagagatcgaccccctcaagcaatacatcaattcccttcacaagaaacgtcggggctacatgagtatctgtgttgaatgcggtctgaaatgatcctatggattttcccggctggttgccactactgtacaacattcagtgcccacatccacctgtgccattaagcttttttgagacatgagagatgcctcttccctgctgtatgacatgcatttgggaagttggaaagaaatgacaaaatcagggagaaaacatccaagcttcttacctgtagatagaatcagccctcacttggtgcttattaccagttattcaagaacaataacaacaacaaaattagtagacatccaagaagcacatattaggaccaaagatagcatcaactgtatttgaaggaactgtagtttgcgcattttatgacatttttataaagtactgtaattctttcattgaggggctatgtgatggagacagactaactcattttgttatttgcattaaaattattttgggtctctgt

SEQ ID NO: 170984 - DNA, 496 bp, Homo Sapiens
tataggtattgagtggcatgtgacagaatgatgttcagatgagtttgggtattgagtggccatgtgagtcgattcaaataaaaacattcaaccttttaagagtggtggttgactggacagctcaagtgcatagactcaactggattttgaatgcagcaaaagcttctaatggaagagtaaaatgctttctgaagacaaatccagtcctcacactcctagaaacattgccttctaaattagatacttggagtggaatggcaggcaaaataatccccttaccgtttaattattgtatttgtccattcttgcattgctaaacagaaatacctgacactgggcaatttataaagaaaatacgtttaattggctcatggttctggaggctgtacaggaagcagggtgctggcatctgctcggcttctggggaggcctcaggaaacttacaatcatggccgaaggtgaagggggagcaggcacatcacatggccactcaata

SEQ ID NO: 170985 - DNA, 312 bp, Homo Sapiens
caccctttcccctgtggcaagacattgcctcatgccgtagctctcctcttctctacaatgtagcttacaggccaagccctttcagaattcaaaacttaaactctttgatctgaagtacccagttctcacaagttcaaagtgttttgctgtcagacccttctgtctgaaatgggcttcagaagctgatcatctcacagtcctagaggctggaagtcccagatcaaggtccagaagggttgggctctcgtgaggctctctttctggcttgcagatagccaccttctcgctgtgtcctcacatggccactcaata

SEQ ID NO: 170986 - DNA, 454 bp, Homo Sapiens
tattgagtggccaggtattgagtggccatgtgagtgaaaatttcaaagggattatgtaagtatagaaatttttcaccagaaaataggttgcaactataatctaaggaataaccgataaacttcaggagccagagaattctttccacacataagcaattaaataaccactttttctataaattcatacaattttagagctgaaggagtcaaagcgggacttcagaacttatgaaattcagtttaagtgacttgtcaggatacaaaagaaatacatctgccactgtgagtcctgagaaaaacactccgttaaacttttattagtactttttctttttgaataacattacctatcctgtgtgtcctttgtgcacctacataggtatcaaatattcgctgcaattcacacttcccagtcatctgtcgtaatagccatttcatccaaaatcgaaaaaag

SEQ ID NO: 170987 - DNA, 728 bp, Homo Sapiens
tattgagtggcatgtgattcaccgatgggtgccttgcagcagagatccaggtaccagatcccacatcgacaaggcagtgcttctggtccagattgatgataaatatgtgactgtaattgaaactggggtactagaacttggggctgaagtgtgagccagtgtttattataaagacatttctttttccctctcgattccaaggcattggaaaaagagaggaacaagcagaagatgcctgcaggtatcactttgatcctatgtgggagcgactgaaaatagaatgagcttggttaagcacctctcctttgcccttcaccctgactcctgccactgtctccatccccaaataaagctgaaatatttttttaagttagctgccgagaaaacattttgcatgaaggataaagttctgttaaaatacatccttaaaaaaagtttttcctatgcattgcctatgctttaaatcaacaaactcttgcatggcgaaactatgatgctgcatattgttctaatttctttgccaaaaataattgccatgttttgtcatagaacatgaaattcatttaccttgatttttaagaacagaccactgtagaaatgttccttttgacttatagcagtataaaagtttaatgtacagtgaaagagactatgaacagacatagatttatcgtattccttgagcgctaaaaactttaataaaaaaaactgcactaattttttacagc

SEQ ID NO: 170988 - DNA, 608 bp, Homo Sapiens
caaaattcaaactgtatataattcacatttatgcttctaaacaaatagaagctcacatctgtactacttttacaatttacaaagtgcttttatatacattttctcatttgctattcatgacagacacgtgagacaaatattcttattttacagatggaaatagacccagacattattcagtactttaaccactaatagtggaaccctgagactttagatctgcaaaggggtttaataatgcaaatatcacatatatttccatttttaacaccatatttaagttttccattttcttaatagaaaatgataaaaaatgttttccccaatataataatacaaatggaaaatattatagacagtcatatactaacctaatgaccaagattcaccagaagcaaaacctatttggaggggtcccatattgttacatatatacagggcaccagcaccagaaccacatttagactaatactttttatttctaattaaaagaaaacaatgcagggcactcctgcagcctgcaagtctaactgtacagacgtatgtgtcagactatggcggtggccacgaagaatgcaaagggatattttatcccagtttggagttta

SEQ ID NO: 170989 - DNA, 202 bp, Homo Sapiens
tattgagtggccatgtgagaggcagaattggaataaaaattaggactcctgacagctagtcccacattccctaaattatattattacttttgctatcagagagctaatccacacacttccacggaaaaagagctttgtcatttaaatggatgataatttttaaaatacacatagacaaaagtattcttatccggaccgccga

SEQ ID NO: 170990 - DNA, 496 bp, Homo Sapiens
actgttcctagaggatccggtattgagtggcatgtgacttcactgagtaggtgtctttgtatgtctagaaatccagcgagtgtgtgggactgcccgtgtcagttacatgtgtgcatgtggagacgtagatgttctggagccatgttgtcgctttgtgagtgctgagtggctccgctgtgctcccgtgctgtctcaagagtgtggaccagaatggcccaacgctgggccatgtgtctcccatcgcgtgggtgctcctctctaactgtgtctgtgcatggctgtcggccggtgtcggtgtgtgagcctgtgttgagtaaatgaggccagagggcagcttagcagaagacctagggcccaggtcacatattctcctggaaaagggatcatggaaggacagtgaccagaaggacagaacaggggaggagagggcccggccccttgaactttggtctctggtattctccctcctgcatcagcccagatgggaaagtcaggc

SEQ ID NO: 170991 - DNA, 470 bp, Homo Sapiens
tgcgtctttcaactgcggttgtgaacacagtctttacatttgatgcaaacaggacagcttaattataatcacttagtggcagtattacagacaaagccaataacgtatgccacacagatgattatttattctggagagagtcaactgataaacttggctttacaattaatacaaacatattcaactaaagaaaatggatgcactgtctcaacattcagcttaaaaatgtttagtactttctgcaaacctaaatttagtttagaaaggttaatattctttctaaactatggcatatactatacatagcatttttaaatatatttaaatataatgatttgcacatgaaatttagaaggaattatgcagatttactatgatacactgatctcatttcaactgtcaagctttatgggtgcttctgcaatactgtcatttgaaggtggggcatcaggatcagatcagacggaagg

SEQ ID NO: 170992 - DNA, 1082 bp, Homo Sapiens
cttttaatatattgaaatcctttatttgtgttttcttaatcagcatgttatattttgcagttacctcagttgtatgtctggtatctttgccctgttgagaagccaagatctcagctgtactagtcaggtgttttttcagacagcaagtagaagaggtggtggccaactccagtgctgtatcctggaggaggtccgggtcagcactgggcaaggtaggtagctagctgcctgacccctagtctggggttggaacttctgtttgcctgagtaaagggatgtcagtcctaagatttctccacattgtgtctttcttctgcagtggtaaaaaggctggtccttgaattgtcctgcatggtaccctaaggcaggcccactggctctttttgatcaaggattctgagaaaagctgcccttggaggcccttgaaataacatagggagcagaatgagtgctcgagtcgtggctgacacagtccagctcacactgccatcacagaggctgagtgagcagtcacccagggagggggctcccagctcattccattcccatggggcaagtgactagaaggtaagagcacccgagtaagccagtgccttcctgtatccacacccaggaataccttccagttgtccaagcaaccgcagttgtaaggattcctaaatactctgcccttggcctgtagccgacgtctctccttcttgttgatgtgcctttcgatgctagtctcacctcgactgatgagaacagcatgccatacagttagggcacccagggcaagtgccacagaactaagaaaagaggggcgaagactggtgggtagtttagagagggctggaggaagtatgtggcagtggtgatccatcttcagcacacacctgttgcagatgctgcagtggtgtgttcgggctggcttggggtaaatgcacttcttacagatggagacggtggcgatatcattcctgccctggggtgggtacccaggcggagtggtgatggcctggtagtagtggaagacaatcaggatcagattccagtggctatagaagaaatgccagcagagtcgtggcactgagtaggttccc

SEQ ID NO: 170993 - DNA, 405 bp, Homo Sapiens
agcagcggtacgaggaactgaacataatctgctgcactttcaggtccattacgaactgtggagaaaaaccaaaatatcaatacactctagtttaccaaactagaaataacaaggataaatcccacaactccattctactgtgaatacaaaaactttgtctgccaacttaaatattcttgtaaaaaaagtgctttttcagtttcaacatgcaagagaaaaactctaacttctatataagaggatggtataaatattcatgaattattatttgtaccacaaagattaagcaaggtgagttttgacctaggaatgtcaaatgtcctctataatttcaggaaatcatctttttgtttgtttccacatgcagcactgaaaaacacaaagctttttttgggaggcggttaa

SEQ ID NO: 170994 - DNA, 1074 bp, Homo Sapiens
atcaccaggatgcaagcaaagtcagtgcttcttgagctgtgtctagcaggagcgagacagacgcattatgtgtttcactgtcccacggtgtaaactggaacccggccaggaagggcagatctggcgatcttctgcacactgctgcaagggcgcttttaaatctgtcatttctacacaacctaactctggcaactcgagaggttctcccgtggagagagtctggacatcagagggaaacagcagggcacttctgtagtcctggcagtggagagtggacagaaacacccctgctgtgctgcactcatcaaatgaggctgctgtcttctgaaacatgggatcaatctcacacttccgatctgcttcggagacattgaggttgtttatgttctgctcaatagttctgtgtaagtgcttcttctttggctttacagcctttttggttgttcccatgttcagtagcacttccatcagcaacatggccttctacttcttccaaagacggtgcatctttgcccagccccccaaggactctgtatacatcggcatggacggcatccacgcgcacagcatagatcttggtgctggcatccagagtacccgcagccactttaaagttggttggttcggtgtctttctgtttaagaatctctgacataaaatcaatcaagtgcaaaccaaaagcattcttggtagtgattttattttcagtggacagtttgatacaggtggagtaatgttccgtaatctgcgtgtttgtaaacttggggatagtagctgaaatgtcaatactcctgctggagggggaggccaataagcgaggtgagtcagtgctgaactgcagatcaaagaccctcgagcgcctccgctgcagccgctccttctcatcgtcattctgaggaaagtcttcgaggactggggtgccaggaatattgagaggcgccttcctgggcaggggcatcgggaacacacgctctgaaggagaggaggcactgtgggggtgtcctcgcgtctctgaagaagagttattcattgtggctggcagtgctgggccgggaggtcccatctttccttggc

SEQ ID NO: 170995 - DNA, 1007 bp, Homo Sapiens
gggagtgacggcagttccgagtccagtgggggcggtgggagcgatgagggtctgaggcggtgggagcggttgtgtgaagatggagtttcccggaggaaatgacaattacctgacgatcacagggccttcgcatcccttcctgtcaggggccgagacattccatacaccaagcttgggtgatgaggaatttgaaatcccacctatctccttggattctgatccctcattggctgtctcagatgtggttggccactttgatgacctggcagacccttcctcttcacaggatggcagtttttcagcccagtatggggtccagacattggacatgcctgtgggcatgacccatggcttgatggagcagggcggggggctcctgagtgggggcttgaccatggacttggaccactctataggaactcagtatagtgccaacccacctgttacaattgatgtaccaatgacagacatgacatctggcttgatggggcatagccagttgaccaccattgatcagtcagaactgagttcccagctgggtttgagcctagggggtggcaccatcctgccacctgcccagtcacctgaagatcgtctttcaaccaccccttcacctactagttcacttcacgaggatggtgttgaggatttccggaggcaacttcccagccagaagacagtcgtggtggaagcagggaaaaagcagaaggccccaaagaagagaaaaaagaaagatcctaatgaacctcagaaaccagtttcagccatatgctttaatctttcgagatacacaggctgccatcaaggggacagaatcctaatgccacttttggtgagggttcaaaaatagtggcctccatgtgggatagtcttggagaggagcaaaaacaggtatataagaggaaaactgaggctgccaagaaagagtatctgaaggcactggctgcttacaaagacaaccaggagtgtcaggccactgtgtaaacagtggaattggacccagcacc

SEQ ID NO: 170996 - DNA, 186 bp, Homo Sapiens
ccggtcctgcgtttcactgcggtcactgttgctcaggatttcagcgatctggggctccaagctggcggggtcccccatctgaggtgtcttctcatagacatccttcattttctttagggcttccctctggtcaacctccttctgaagttcacgactgcgttcttccaaccgcagttgaaagacgca

SEQ ID NO: 170997 - DNA, 500 bp, Homo Sapiens
  misc_feature (333)..(412): n is a, c, g, or t
agcggtccgcgtttcactgcggttagtgaggtttgtggctgatcagtccactgaaactacaaatcgtttaccttctcctcatccgtgggggagactgcgccacataggcggtggtggcaacattctcctgggagggctgaatctcctggggggtggcctaggccagggggccagcacggcggtggcagtgatctcctggccatcaatttgtcctgttgaaaaagacagcaagtcataaaatatctaacaagcatctaccctagacaatgcatgccacagtgaaagacaggcctggggggacaatgacaatgtaagataatcacagaaacaggnnnnnnnnnnnnnnnnnnnnnnnnnnnnnnnnnnnnnnnnnnnnnnnnnnnnnnnnnnnnnnnnnnnnnnnnnnnnnnnnaccatcctggctaacatggtgaaaatgtctctactaaaaagacaataaatcagctgtgcgaggtggcgggcttacaaaagacgagcac

SEQ ID NO: 170998 - DNA, 1773 bp, Homo Sapiens
  misc_feature (635)..(635): n is a, c, g, or t
  misc_feature (639)..(640): n is a, c, g, or t
  misc_feature (642)..(643): n is a, c, g, or t
  misc_feature (651)..(651): n is a, c, g, or t
  misc_feature (791)..(866): n is a, c, g, or t
  misc_feature (874)..(910): n is a, c, g, or t
  misc_feature (1372)..(1372): n is a, c, g, or t
  misc_feature (1571)..(1571): n is a, c, g, or t
tgtcacttctctagcgtaaggaagacagtaggaaagcaaagccttgactctggcaggatttgcaggcagtcatggcagcacccctctgccagccgggccccggctgcagaagtgctgttggtttggatgctgtgtgccgtgtcaagattccctccggttttctggctagaaagctcatccgtttccggtttctaagagtcagttcagtggcagagccaccagggaaaagtgaggctcttgggggtggtttgaccctgcttacctgggagcacacttttcccttccccgatgacctgggatggtggccaggccgtgcccttgctgttgctgggcagtgtccttttggaaagggagctgccccaggctttagtgcagctgccaaccctgttaggcctggcctctcgaggcctcttctgacctcaagggtcacaccccctcaaagatcctctcacccatggtagttgctgctcgtggttctgtctgtccgtgcaccgatgcacacaccgcaccccaccactgtactctgaaattggcgagtgagtggagagccagctctgcggagtcatcacgcagccatggttgtgcctgccgttcatggtggtctttcaggttatcttggcaacatgtacattgcntttnntnnttttcttntttgctttcattgtacagtcagtactataaaatttctcttttgagttttatacctttgtagcattttagatgacattgtgtttgtactttgttgtgtagagtggaagaattgtgttgaataaacccaagatcggaatgcnnnnnnnnnnnnnnnnnnnnnnnnnnnnnnnnnnnnnnnnnnnnnnnnnnnnnnnnnnnnnnnnnnnnnnnnnnnncctaaacnnnnnnnnnnnnnnnnnnnnnnnnnnnnnnnnnnnnncctacaacccccgatttacccaggtggcgctacatcccgcccccttctgtgttgggcggccccccctccatttataaaaaaacttttctaacacactcttccttggccgcgcgacgccgaccccccttttttctacacgacaccgaggtgtcactctacttgtcatccctcaagagaaaaccccctccgtgccaatcaccagaacccgtgcgctccgtgtctacacccccccgctataaaacaaacccccccacccatctcggacgcacatacaaacacacgacgatgtcgctctaataaacataattacacccgccccacgctcagtcatgccccacgtctcggtgggcgctcgctatcgccctcgctcttgagtcgatatcttaactccataacccgcacgcctcgatgtctcgttccgccgccccagcgaacgtggtctctcgtgctatacaattaatntgatagtgcgccccccggctgtattcccgccgtcagcaagttatatattaagataccgcactatatcgtaagcacgcgcgcgtgatgacgatatattctctctacatgcatagatatacacaccacgcccccaccgcgatgttaacgacaccgcgagataatactattccccccacactgcgtctctgttctgtttctnagcacacctctcacctctcctcttatctctgtggcggtcgagaacattgcactcaccccactatttatctctattctttctctattactgaccaacatatcctctgtgcgcaccctcgcgcggaaacaacaacatcgtgtacacaccacaagaagtaagcacatgattgctagcctgggacaccgcgccctcataatatata

SEQ ID NO: 170999 - DNA, 735 bp, Homo Sapiens
  misc_feature (192)..(211): n is a, c, g, or t
  misc_feature (305)..(305): n is a, c, g, or t
  misc_feature (335)..(335): n is a, c, g, or t
  misc_feature (385)..(385): n is a, c, g, or t
  misc_feature (421)..(421): n is a, c, g, or t
  misc_feature (446)..(446): n is a, c, g, or t
  misc_feature (454)..(462): n is a, c, g, or t
  misc_feature (475)..(475): n is a, c, g, or t
  misc_feature (501)..(501): n is a, c, g, or t
  misc_feature (507)..(507): n is a, c, g, or t
  misc_feature (517)..(517): n is a, c, g, or t
  misc_feature (540)..(540): n is a, c, g, or t
  misc_feature (543)..(543): n is a, c, g, or t
  misc_feature (558)..(558): n is a, c, g, or t
  misc_feature (593)..(593): n is a, c, g, or t
  misc_feature (613)..(613): n is a, c, g, or t
  misc_feature (617)..(617): n is a, c, g, or t
  misc_feature (647)..(647): n is a, c, g, or t
  misc_feature (657)..(657): n is a, c, g, or t
  misc_feature (669)..(669): n is a, c, g, or t
  misc_feature (689)..(689): n is a, c, g, or t
  misc_feature (696)..(696): n is a, c, g, or t
agagtccgatggaggattcacaccaggatggggtatctcgcctatcaactgaggcgactccgagtcttggtttacataaacacaattcttccactctacacaacaaaggacaaacacaatgtcatctaaaatgctacaaaggtataaaactcaaaagagaaattttatagtactgactgcacaatgaaagcnnnnnnnnnnnnnnnnnnnngcaatgtacatgttgccaagataacctgaaagaccaccatgaacgggcaggccaaccatggctgcgtgatgacttccgcaaaagctggcttttncacttcacttcgccaattttcaagaagtancaagtgggtggggggtgccgggtgttgtgccattcgggtggcaccgggancaggaccaggaacccaccgaaccaagccaaacttanccattggggtggaagaagggattcnttttggannnnnnnnntggtggaaccccnttggaagggttcaagaaaagaagggnccttcngaggaagggncccagggcctttaaccaaggggnttnggccaagcttggcantttaaaagccctggggggcaagtttcctttttccnaaaagggacacttgcccaanaacnagcaaagggcccggccttggccccccattnccaggtcttngggggaaagggnaaaaagtggtgctcccaggntaagccngggtcaaaccacccccaaaagcctcaactttttccctgg

SEQ ID NO: 171000 - DNA, 1807 bp, Homo Sapiens
  misc_feature (1654)..(1654): n is a, c, g, or t
  misc_feature (1701)..(1701): n is a, c, g, or t
  misc_feature (1726)..(1726): n is a, c, g, or t
  misc_feature (1755)..(1755): n is a, c, g, or t
ggcgccggcctcggcggctgaggaaagcaggaggaggtggcggcggcgggaagatgctgctctttggcgtaaattgcaatcgattagggatcgtttctcagaatcaagttagaagtgagagttcagataagtgaggccgccattgctgctttgaacacctcagaaggggagaatggatttatcaggagtgaaaaagaagagcttgctaggagtcaaagaaaataataaaaagtccagcactagggctccttcacctaccaaacgcaaagaccgctcagatgagaagtccaaggatcgctcaaaagataaaggggccaccaaggagtcgagtgagaaggatcgcggccgggacaaaacccgaaagaggcgcagcgcttccagtggtagcagcagtaccaggtctcggtccagctcgacttccagctcaggctccagcaccagcactggctcaagcagtggctccagctcttcctcagcatccagccgctcaggaagctccagcacctcccgcagctccagctctagcagctcttctggctctccaagtccttctcggcgcagacacgacaacaggaggcgctcccgctccaaatccaaaccacctaaaagagatgaacaaggagaggaaaaggcggagcccatctcctaagcccaccaaagtgcacattgggagactcacccggaatgtgacaaaggatcacatcatggagatattttccacctatgggaaaattaaaatgattgacatgcccgttggaaaggatgcatccccatcttgtcccaaaggctatgcgtacgtagagtttgagaatccagatgaagccgagaaggcgctgaagcacatggatggaggacaaattgatggccaggagatcactgccaccgccgtgctggccccctggcctaggccaccccccaggagattcagccctcccaggagaatgttgccaccaccgcctatgtggcgcaggtctcccccacggatgaggagaaggtcccgctccccgaggcgcaggtcccccgtgcgccggagatcacggtccccgggccgccgccgacacaggagccgctccagctccaactcctcccgataaacaggccactgaagctctcgcccctgtaacttataccccacccagctcagttttgtcacttttctagccaaaggaagaccagtaggaaagcaaacccttgactctggcaggatttgcaggcagcaggcagcacccctctgccagccgggccccggctgcagaagtgctgttggtttggatgctgtgtgcctgtcaagattccctccggttttctggctagaaagctcatccgtttccaggtttctaagagtcagttcagtggcagagccaccagggaaaagtgaggctcttgggggtggtttgaccctgcttacctgggagcacacttttcccttccccgatgacctgggatggtggccaggccgtgcccttgctgttgctgggcagtgtccttttggaaagggagctgccccaggctttagtgcagctgccaaccctgttaggcctggcctctcgaggcctctttctgactcaagggtcacaccccctcaaagatcctctcacccatggtagttgctgctcgtgggttctgtctgtccgtgcaccgatggacacacggnacccccacactgtactctgaaattggccaagtgagtggaaaacccancctctgcgggagtcatcacgccaanccatgggttgtgcctgcccggttcctggntgggtcttttccaggtttatccttggcaacattggaaactttgggttttttt

SEQ ID NO: 171001 - DNA, 877 bp, Homo Sapiens
gcctcggcggctgaggaaagcaggaggaggtggcggcggcgggaagatggctccttcacctaccaaacgcaaagaccgctcagatgagaagtccaaggatcgctcaaaagataaaggggccaccaaggagtcgagtgagaaggatcgcagccgggacaaaacccgaaagaggcgcagcgcttccagtggtagcagcagtaccaggtctcggtccagctcgacttccagctcaggctccagcaccagcactggctcaagcagtggctccagctcttcctcagcatccagccgctcaggaagctccagcacctcccgcagctccagctctagcagctcttctggctctccaagtccttctcggcgcagacacgacaacaggaggcgctcccgctccaaatccaaaccacctaaaagagatgaaaaggagaggaaaaggcggaccccatctcctaagcccaccaaagtgcacattgggagactcacccggaatgtgacaaaggatcacatcatggagatattttccacctatgggaaaattaaaattgattgacatgcccgtggaaaggatgcatccccatctgtccaaaggctatgcgtacgtagagtttgagaatccagatgaaagccgagaaggcgctgaagcacatggatggaggacaaattgatggccaggagatcactgccaccgccgtgctggccccctggcctaggccacccccccagagattcagccctccccaggaaaatgttgccaccaccgcctatgtgggcgcaagtctccccccaccggatgaggagaaagtccccgctcccccgaaggcgcagggtccccggtgcgccccggaaataccggtcccccggggcgggccgcggcaaa

SEQ ID NO: 171002 - DNA, 808 bp, Homo Sapiens
  misc_feature (773)..(773): n is a, c, g, or t
gggagagcggcgccggcctcggcggctgaggaaagcaggaggaggtggcggcggcgggaagatggctccttcacctaccaaacgcaaagaccgctcagatgagaagtccaaggatcgctcaaaagataaaggggccaccaaggagtcgagtgagaaggatcgcggccgggacaaaacccgaaagaggcgcagcgcttccagtggtagcagcagtaccaggtctcggtccagctcgacttccagctcaggctccagcaccagcactggctcaagcagtggctccagctcttcctcagcatccagccgctcaggaagctccagcacctcccgcagctccagctctagcagctcttctggctctccaagtccttctcggcgcagacacgacaacaggaggcgctcccgctccaaatccaaaccacctaaaagagatgaaaaggagaggaaaaggcggagcccatctcctaagcccaccaaagtgcacattgggagactcacccggaatgtgacaaaggatcacatcatggagatattttccacctatgggaaaattaaaatgattgacatgcccgtggaaaggatgcatccccatctgtccaaaggctatgcgtacgtagagtttgagaatccagatgaagccgagaaggcgctgaagcacatggatggaggacaaattgatggccaggagatcactggcaccgccgtgctgggcccctggcctaggccaccccccaggagattcagcccctcccaggagatggtgccacccaccncctatgtggcgccaggtctcccccaccggagtgac

SEQ ID NO: 171003 - DNA, 1031 bp, Homo Sapiens
  misc_feature (1021)..(1021): n is a, c, g, or t
caggaggaggtggcggcggcgggaagatgctgctctttggcgtaaattgcaatcgattagggatcgtttctcagaatcaagttagaagtgagagttcagataagtgaggccgccattgctgctttgaacacctcagaaggggagaatggatttatcaggagtgaaaaagaagagcttgctaggagtcaaagaaaataataaaaagtccagcactagggctccttcacctaccaaacgcaaagaccgctcagatgagaagtccaaggatcgctcaaaagataaaggggccaccaaggagtcgagtgagaaggatcgcggccgggacaaaacccgaaagaggagcagcgcttccagtggtagcagcagtaccaggtctcggtccagctcgacttccagctcaggctccagcaccagcacgtggctcaagcagtggatccagctcttcctcagcatccagccgctcaggaaagctccaagcacctccccgcaagctccagctctagcagctcttctggctctccaagtccttctcggcgccagaccacgaacaacagggaggccgctccccgctccaaattccaaagcgaacctaaaaggaggattgacacagggccgcagggaaaacggcgggagcccccattctcctaaggcccaacccaaaggtgccacattggggagaactccacccgggaatgtggaccagaggatccccattcaatgggaagaattatttttacacccttatgggggacacaattttacccattggatcggacctttgcgccgttgcaaacagggatggattaccgccagattcgtgtcccaaaagggccgtaaggcgggaaaccgttaacacggttggggaagattccgggaatggaagcgccggagaaagggccggccagaacgcaactggggagtcagagggaccaacgatgaacgggccacggaaaaatcatagggccgacggagcgggcagcgcgcccgggggcgagggaacaagccccagagaagaatccgncgctgcccag

SEQ ID NO: 171004 - DNA, 220 bp, Homo Sapiens
cgcgatctttcaactgcggttgaactacaatacaaggtactgataagcaacctgagaaatgtggtggaggctcagtttgatagccgggttcgtgcaacaggacacagttatgagaagtacaacaagtgggaaacgatagaggcttggactcaacaagtcgccactgagaatccagccctcatctctcgcagtgttatcggaaccgcagttgaaagacgca

SEQ ID NO: 171005 - DNA, 679 bp, Homo Sapiens
tgcaatgcggttaatatgaacagagttgaatatgaatgtctgacagaagaatgaacagttgctgaataaaagccccgagtcaggatatatatacacagcagaaatggggcctcagactctcagcacttgtgcacaatgaaagaggaaatcggttttaaaaaaatgtctataacagaggatacaaatcaaaaaggcagcaacaacaacattggcgaggtgggaaagggagcagagcctctcattaggggctgcttagcccctggcgcaggctcagcagctggagagctgtctcagggaacttcaacatttagatgggttccaaatcctatgtcaaaatacaatcctaatctctctgatcagggtcagtcagaatcagcaatccttttccccagtgccctgcatagaaaactccaatctttccatgatagggagtctaagcaaagagcccccacctctcacctggcaccaaagttaacttactctcaccccaccacttgggacagacgttgggccccagcaaacaaaccaccccctccaagacagaaaccaggatagttgccagcctcaagaagctgcttcaaatgttaagatttaggaaatccataccaagctgctatccatagttcaacttctggggaaaatgctggagttgctgagacccagtgcggcagtcaatagc

SEQ ID NO: 171006 - DNA, 1059 bp, Homo Sapiens
  misc_feature (47)..(50): n is a, c, g, or t
  misc_feature (56)..(58): n is a, c, g, or t
  misc_feature (62)..(62): n is a, c, g, or t
  misc_feature (64)..(65): n is a, c, g, or t
  misc_feature (67)..(74): n is a, c, g, or t
  misc_feature (238)..(238): n is a, c, g, or t
  misc_feature (240)..(249): n is a, c, g, or t
ggaatggtctagaaagctttttgaaggcccgagggcgcccgacaggnnnnttgttnnntggntnngnnnnnnnngggggcttgcttcacaggggtttaatatgaacagagttgaatatgacattgtctgacagaagaatgaacaatttgctgaataaaagccccaagtcaggatatatacacagaagaaatggagcctcagagtctcagcacttgtgcacaatgaaaggagaaatctntnnnnnnnnnntctgtaacagaggataaaaatcaaaaggcagcaaggacaccgacactgggcgaggtgggaaaggggctactcagctaccagcatgggctcagcagctagagagctaatctatctcaaggatcttcaacactgaggtgggttccaagtcccctgtcaaaatctaatcctgatctctctgaccagggtcacaccagactcagcaatccttttccccaaggaccttcccagggacgtagttcctatcaattgccccctccggcaggaacatgtgtagacagcgttcattctgagccagtgggtgcccagcaattttgttaaataaactgctcgaggccctgcctcctttcttcaatgaaagactcctcaaagatcccttcatctcctcggaaagggagctgccgcttcaaggctttcccaggcagtggtggtactacaatcttactatctcgctccagctcatttttcagccactcaaagtcactatagcgccgccgtacacaggactcctttagcttgaagataggtaggtttgtccgcatgcgaacctcataggtggtgaagcgcgcgcgtcccacgcccaccgtctgaggattaaagatgtcgatctccaggaagttacttggcggcccgtaagcgtcggtcaggtcctgcggcttcgagttaaggcgccgggtatcagctactgccgtgtccgacatctttccgaaggagagcctgggaccggggaaagggggtgggggacagaggcctgaggcaggagcgcgcacggcccctcccgcttgcaaaataactagccaacccacaggcccc

SEQ ID NO: 171007 - DNA, 752 bp, Homo Sapiens
ataggcatcaccctcacagagctgccggagacagtttgacaactttaaacaggatcttcaaggtggtagagcgaaatgcggggctccctgggtggacaatattcagcaacacttcctcctctctgaccggttggccaggaactatgcagccatcgtcttctttgctaacaaccgctttgagacagggaagaaaaaactgcagtatctgagcttcggtgactttgccttctgcgctgagctcatgatccaaaactggacccttggagccgtcgactcacagatggatgacatgaacatggacttagacaaggaatttctccaggacttgaaggagctcaaggtgctagtggctgacaaggaccttctggacctgcacaagagcctggtgtgcactgctctccggggaaagctgggcgtcttctctgagatggaagccaacttcaagaacctgtcccgggggctggtgaacgtggccgccaagctgacccacaataaagatgtcagagacctgtttgtggacctcgtggagaagtttgtggaaccctgccgctccgaccactggccactcagcgacgtgcggttcttcctgaatcagtattcagcgtctgtccactccctcgatggcttccgacaccaggccctctgggaccgctacatgggcaccctccgcggctgcctcctgcgcctgtatcatgactgaggtgcctcccaacgctccgcccacgctgacaataaagttgctctgagtttgg

SEQ ID NO: 171008 - DNA, 1390 bp, Homo Sapiens
gaccacccatattccccctgggagaaatatgtcttcagtttccccaaggggaggcccactgtacaccaatccccttccttggtacacgggacacccagggtgcttcagagacagaccacagggcacatctgcacggcccccccaccttgctcccccggagcgaggaccagtctccaaactcagagcaactttattgtcagcgtgggcggagcgttgggaggcacctcagtcatgatacaggcgcaggaggcagccgcggagggtgcccatgtagcggtcccagagggcctggtgtcggaagccatcgagggagtggacagacgctgaatactgattcaggaagaaccgcacgtcgctgagtggccagtggtcggagcggcagggttccacaaacttctccacgaggtccacaaacaggtctctgacatctttattgtgggtcagcttggcggccacgttcaccagcccccgggacaggttcttgaagttggcttccatctcagagaagacgcccagctttccccggagagcagtgcacaccaggctcttgtgcaggtccagaaggtccttgtcagccactagcaccttgagctccttcaagtcctggagaaattccttgtctaagtccatgtccatgtcatccatctgtgagtctgggtcagtgggggcctcaccgacggctccaagggtccagttttggatcatgagctcagcgcagaaggcaaagtcaccgaagctcagatactgcagttttttcttccctgtctcaaagcggttgttagcaaagaagacgatggctgcatagtccctggccaaccggtcagagaggaggaagtgttgctgaatattgtccaccagggagccccgcatttcctctaccaccttgaagacccgtttaaagttgtcaaactgtctccggcagctcttgagggtgatgcctgttttggtgctgatgtcatccaggtctttcttggtgcctttggacagcttcttgcccagcacctcccgaacaaaggcctcatcaaaggcatagtacctctcgatgagtagtgcctgccgggagggcggaatctggaagatgagctggtgcagtagcttgggcggcgcatgcagcagccgctcgagcatgtggaaggtgcggtaatggtccatggtgtcgctctgcagcaccgctgccgtggcgccagtctgctccaggattcccgagcgcacccgcagggccaccgcgtcggtcaccgagtaaccatcgagccagaggcgatacacgtcctcgtcgataagggtcgtgttccccacgaagatgtccagctcactggtcatggcgacgcccggggccgcagcgccccgagcaggagcgagcactgctcgggactggcgcgccgccttcccc

SEQ ID NO: 171009 - DNA, 397 bp, Homo Sapiens
gtgctaatattaagaaagaaggtgggattgtgaccttgggtgagccatttgagttctctgtgcccagtcttgccaggagttgacctaaccaatctccaatggccttgggcacagccaaggcttcagtttcagacaccccagcggcctcaagccacagacactgggaagccctattccagcactgcaccaactgatggtatgcaagcagcccctctgtttgttgttctccatgcaacaccccaatgcctgggagaaaacaggagaacaagtcctttgctgctttccacctgcggccgttggttttgagttaaataaaactatcgaagtagctggcttccagtgttgaagaaagattgctttgggccaggcgtggtggctcatgcctgtaatccctgca

SEQ ID NO: 171010 - DNA, 396 bp, Homo Sapiens
tgcgtctttcaactgcggttggacctcagtgccattgagcaatctttgtctttggtcagaaccctcttctataaacattcaccacttggttccaactgcttactcacccacgtgcctaatagataacctcacctcctaattcacagagggaggaaagttcaaagaggcaggaactttcacttcccactgtgagcctccaagggagtgtgtacatctgcatccgactgcctcatgcatggagatagccgttctgtgcaacctgtcatctgttatgatcccacttcatcccatcaatgggatcttactccttcagccacccccttggcacctgtactttcagctctcagcctctactggtccgtccctcacccaaaaacgccccttcaccgcaattct

SEQ ID NO: 171011 - DNA, 329 bp, Homo Sapiens
gtcggtaccggtctttcacgggtggaagtagtataggttccttatgtgaactacattgtgttcgcattttctttatccttatagatttttgtctggtttttctatcagttactgagagatgtatgataaaatctcccactatgattgtggatttttctatgaattttctataagtttttctgttcttttctactttaattgcattatggtcagaagacatattctgtatgacttaaattctctaaaatgtattgcaatttactctatgagccagtatatggtcagattttaagtatgctctgtgatttcaaccgcagttgaaagacgca

SEQ ID NO: 171012 - DNA, 615 bp, Homo Sapiens
ctcagcaaagtgcctgacccctctgttagatggcaagctcgagagggaaggaccatttattttctgcttattactgtatcctcaacatgtggcgcagcatgtggcacagaatgaatacctgaaactcttgttgacagatgggtagatgaatagttggataaacagacaagacttaggtatataaatcctatatactcagagaaaactaaaaggaatatttagaaagctcagtacaactgacatcacacactattgtcctgttttcagcgttcagaattgaataaaggtggataaagaaatcaagggatgatgctttgccagtcagatgctatctggatcttagcctctctcccactcctgccatcacccactgtagccaacactgaagggaattttacaaagccctttttatggttcctaccaaaccagaagctgctgctcaaaatatcctcaagaagtcaaccatttggatctgggaatctgatacaattagtccttcaatcataggaataggaagagaaatcagatgatgatcttcagaccacatacaaatagtaggcagagattcagataggctactatatgccctcccgatggagaccgcagttaaaacgc

SEQ ID NO: 171013 - DNA, 131 bp, Homo Sapiens
gcggtacctgcgtttcactgcggtgcagagctagtgggcatagactcccaaatggacagtctttcctcttagccaaggtgtgatgttaaggaaggtgacataaggagaacggggatctcagcccaagtgag

SEQ ID NO: 171014 - DNA, 368 bp, Homo Sapiens
tgcgtctttcaactgcggttgaaattctacagtcaaaacagcaggtttaagccagggcaaaaaatgcgtcacacgaggagaaaacaggtgcaatttcactcagttgatcaaactaaaaaaatagtaggttaataaaaataaccaaggactgtgaaaagtcacgtctatttataagactgctataagcttattaaatgtgtaaaactctaggaagcaacgcaatgcacgagttgtcctaaacatacaaatgacaaagaaattccctttttacttcagttaccaggactcacctttattgtcaaggaatacataaccatcaaagcgatccctgaaccaaataatgtcctcgtggtttttaaaggtgaaca

SEQ ID NO: 171015 - DNA, 261 bp, Homo Sapiens
tgcgtctttcaactgcggttcggtggtggactgcagaggactgttacgaaaatgaagggtacgtataaccacagcaagaggcgggctgagattctctgcgtgccttaacctcgtcggcctataggaaagcgcccgttccctccttaagtcactctgcagaatgcttgagatgcataaaggatgttgggataaaactgtgaaccagttgacttggctataaaggaagctgtaaatacaccgcagttgaagacgcaggaccga

SEQ ID NO: 171016 - DNA, 648 bp, Homo Sapiens
tgcaatgataccttgtcatcagcccatttgacgccgtcagacaattcccaaagatctgggatactatttcttctgtcaatcacgagattgatatcccggccaccccacttgtaagacgcatgcgtctttcaactgcggttgaatggggggccactgccctgaaagcccggccaaggccctcttccgtcagatggttgaggccatccgctaactgccatggctgtggtgtggcccaccgggacctcaaatgtgagaacgccttgtttgcagggcttcaacctgaagctgactgactttggctttgccaaggtgttgcccaagccacaccgggagctgagccagaccttctgcggcagtacagcctatgctgcccccgaggtgctgcagggcattccccacgatagcaaaaaaggtgatgtctggagcatgggtgtggtcctgtatgtcatgctctgtgccagcctaccttttgacgacacagacatccccaagatgctgtggcagcagcagaagggggtgtccttccccactcatctgagcatctcggccgattgccaggacctgctcaagaggctcctggaacccgatatgatcctccgccttcaattgaagaagttaatcgcatccactgtagaccgcagttctgtc

SEQ ID NO: 171017 - DNA, 1260 bp, Homo Sapiens
ccagtctggtacggtccggtattcccgggatatcgtcgacccacgcgtccgggggacgagtgtctaagagcatggtctctcccagaacccacccaggtggtgtggtgggggcaacatggggccagactcctctagagggagggtggctctggggccctggaaaacgtgagagactgccctgagctggtccagtgggccagcactttataccaactcagcatttaagggaagtatcttagattgcctccatctcaatgtgaatgcaccaggctgagggttccctagcgccttgagtcaaggccacttttcagcccatcgagccctgagttctacttggtgtttgttctctggagctgattgcacttgagctctgtggtgggcaggcgcactttagcctacgttgggtgccccaggggcaccccctcctctctgctccttgccagcttcattcactcccagcctctcgctgtcctcactttgcaggggctcctcctcaacatttgcatgcacctgcaagaattgggaagaaagagcatttattaggcactgtgagcaatttgcattttaaaatgcctgagcatttattaagcttcttggtattcacttgggtttgataattgatctgagctacctcattgaatgtttttggaaaggtgtcctggtatgcaagtcagctttgcctcacagttgaaaatgttcggtcatgattgcttttgaaaccaaaggggaaggtaccgatatcattgagctatttaaagttgccagtttgggctccagtaatgctttctggtgggtaaaattccacattcaggccacgagagcatctacagtttgtactctggggctgcaggcatcctgggacgctgtacgcaattcagtggtctagtcctttataccgactcagattccttaagcatgcagagtcactcgaatgaaaaaacatactcgacctctccctaaaaagatgttgcaacccagtttctctgaattccaccacaaaaagagaccctgaataagatagagcagttttcctgtgcatatagagggtgtgtcaaaggtgagctttttggggaccgggaaaaacaaagttgcctgattccgcgcaggtgcacaggccccggatgtacacccggaaaggggagtgagcgctgtagaatcatccatcaggctacagctaaaacaatttgccaataaaggacatgtttttcttaagccagaaataaatacgttaacagaaaaatgatttaggatatagcttga

SEQ ID NO: 171018 - DNA, 743 bp, Homo Sapiens
cagccatataaaatatattcaaaatataatacacactcgtagaaatgcctaaccacttactgaaaggcagcttatgacatgtaaatgttccaaatgcaagggttaatgcatacatctttaatattccagctctattgctcaatataaagaaaaatgtgtttaacagtcccatttcaaataaaaacacagcaatatcaaatagtcaatataaacttgcaactgcatagtatcaacttcagcaagctaaaaagatgagatttaaataaacctcaagctaacttagaaggtacacaccatctgccaaattctttacacagcaataataatcttatccctcagaaacaccttgtaaacactggatactcaatgatagcgtaaaaagcacgcattattgaacctgatttttatatgaacagaattcactaaaactctttaaaatattgagaacaaattaattcaaatggtgtcatattcccatagaagcaactcaatcttcaagtcatagagttgtacatcagcatcttacatagtcagtgatagtcatgcagtaaacattttcaaccaaataaggatctgacttattaagagaaagatgcagtcctagaaaaatccttaaaatgtgggagtccatgttacatattccaattcctctcctccccagcagctaattttcacgtacagtttaagtaccccaaatctgaaatctgaaacactccatatctgcaagattgactgactgtatt

SEQ ID NO: 171019 - DNA, 1755 bp, Homo Sapiens
  misc_feature (1597)..(1597): n is a, c, g, or t
gaccggatggcgtcattcaaggggcttacctggaaatcaacaagaaccccaagtataagaaactcaaagatgccattgaagaaaagatcatcattgctgaagtcgtgaacaaaattaaccgtgctaatgggaagagtacatctcggattttcctcttaacaaacaataatctccttcttgctgaccaaaagtctggacaaatcaagtcagaggttccactggtggatgtgaccaaggtatcaatgagctcacaaaatgatggcttcttcgccgtccacctcaaagagggctcagaagcagctagtaaaggagactttctcttcagcagtgatcacctgattgaaatggccaccaagctctatcgcacaactctcagccaaaccaaacagaagctcaatattgagatttccgatgagttcctggtacagttcagacaggacaaagtatgtgtgaagtttattcagggaaaccagaaaaatgggagtgtcccaacatgtaaacgaaaaaacaaccgtctccttgaagttgctgtcccttaactggcgcctcctctctactttcatggacttgttcctttgtaatagtgcaatttggttttgttttatttggggttcattgtatgtttgggaatcaccaaaggcttttagagttctttggcaaaataaaaatatttgactaatcaatttttattattggaatagttttaacctttcaaatacatgttctgtcctggagcaggattgtagaaactaacagtgtctattttcatgtctgatgtgttcttcctttagtcatcatgttaggtctgtgtaccctaaatcagcatattactcataaatcattaattaatataagcataggaaatggtcttaaaagatactgcattcattcatcagatatttattccatgcctactctatgctaggcactgtgctagatggtatgaaaacttattaggaacctttttgtttttgagaccattgcattctggctggtttgtgctggtttaacgacatctaagaaggtttagaaatggtgagaccaaaacaataactggtaatgatggacagcattattaggaaccctgtagtatgatatttaacaatataggcttcaagaagggctgggccctaagaaggggcagaaatgaatggaccaggttaaatccctctacatgtggtttctgtttgaaaaaaagaaaactgacatttgaacaggacttttaatttgtttaaaactctggtaattacttgtaacagtagaaaatagaagtcattcttattttagaaaaagtgacagaagcagtccagtaagattatatgtttctgtttctggtaaataccatatatgatcctcgaaatgataatatctccagaatattgttttcacccaaatttgagtagatattttaaacacctaacaaagtaaagggctaaaagccattcagatagcagtaaaacattctgtatgatgtgcaataaaacatccaagatcttttttgaaagttttatttataatatacatttttgtatgagaaaggtgattggtacagggtgcctattttagtcatggatcaaaatttgtgtaacttgcaggnctttctttctttttcttcaaatttacaaggggttcattttggaaactacattttaaacttttggaatcaaattgtttcttatttgggaggataatgtatatacattgggtattatgtttaaataaataaaattggttctaattttggtgcccatttcc

SEQ ID NO: 171020 - DNA, 309 bp, Homo Sapiens
cggattggcgaccatttcaacatgagggacccactgacagattgtccgtataataaagtatacaagaacctaaaggagttttctcaaaatggagagaatttctgcaaacaggtcacatctgttcttcagcaaagggcaaacctggaaattagctatgccaaaggacttcagaaactggcaagcaagctgagcaaagcattacagaacacgagaaaaagttgtgttagcagtgcctgggcctgggcctcagagggaatgaaatccacagcggacctgcatcaaaaacttggcaaagcaattgaatgtcgc

SEQ ID NO: 171021 - DNA, 423 bp, Homo Sapiens
agaaccacgctataacaaaagcacacaaatataaaaagcccacacttttaattcctgcttcgaaatgcaaatggataaagcacggtttctctgacagtataatgatagctttgtgagttagtttcatgtcatgctgggaactctctatgaggtggccataagcagcaaccagcccaaacacccacttgcgttctattagtatggaaccatttgcatttgttttttttaagctttatctttccttgtgcatcctgaccaaaaaatatctttgattatgattaatgtattatgtcaaaatgtaggctagttaaacttttgtaaagttgcctggaatgtcatttgttaggttataaacacaagatctaaatgaagggttttatgtgttgtgtacaaatcttattttgaaatgtctccattccggtt

SEQ ID NO: 171022 - DNA, 400 bp, Homo Sapiens
cactgctttttagagactacattatgtgcctgaaatagcaatattaatggtccggattggcgaccatttcaacttatgtttaaggggttcttgataatctgacatgataagtggtgttggaattggcattaaaatccaccatgttctacaacacttcatccttcttcggcaggcaccaatttgatcttctactactttgcagacatctcatctgcaaacaccagacaaattgagacaatgaccttccgcaggacccaaatcacctcttactgcaggaaagaagatccagtgagaaaattagtccacaaatggaatgtaaatccataaacactcttaagtaacagaataaatttagtatgaacgtttttatgtgggagctcttgaaatggtcgccaatccg

SEQ ID NO: 171023 - DNA, 291 bp, Homo Sapiens
  misc_feature (223)..(242): n is a, c, g, or t
cctggccggatggtgacattcacagaatgtctctaattctagcaaataaggactatattgtgtattcgagtaaagcaaacacatatttataatatcgtcaacaaatacagttattactattttttattgtttttcatgaacttgtcctaaaatatctttaccctttgaccattaatattgctatttcaggcacataatgtagtctctaaaaagcagttgttannnnnnnnnnnnnnnnnnnncccaacctcttaattaaaaagggcccccaaccggggggaatctcctcct

SEQ ID NO: 171024 - DNA, 1213 bp, Homo Sapiens
  misc_feature (66)..(109): n is a, c, g, or t
ggtaaaccatcatgatttttggaggtgggttgtacctcctgaacttctagctttcaagttgtggcnnnnnnnnnnnnnnnnnnnnnnnnnnnnnnnnnnnnnnnnnnnnccctgtttcccaccttctcttcccctgttgccaaggtctaactcatggatttttctctttcctcatggatgatcttcagcaagagtggactgggaagctgcacctggctcccactttcaacaagagcctctgccatccacttgagggtattgagagccagtgggcttttgtgtagcctttttgttctgcaagcaactttctaaagttgtgtacatgaacatacacccacatccagactacagtgatttagagttgttttgattgggtaccgtgggagcagggaaattggttttttaaaaagcaactgtttaattgcttaaataagctatgtattaaatctgtctccagttagggctatcttcctagcataggccccttaagtagcatgggggatatattttttgctataacgtaaaaattttcctttaaccactgccctctcctttctccttcaaggttctttccccctcagttttgttgttgtcttactctggagatgccaagtgtattttttctttctatgtaattttagattcgccttacaatgtaaatcttcacattggagataatattggttggaccttgcccatcttcactctagccttcgtatttgtgaaggactcagccaccttccttcttcaccccatgcttctcaccaaatttttgttgtcattgagggcacttggataactcaagttgatatttatagctgatcaatctatatgtgtcacagaactatgctgcctaaagtgatcttggctccttaatggtccttttggccccttggatagttaacagctgagtaattctaatctcttctgtgttttccttgccttaaccacaaattgtggtgctttttgtatattttatgtataaatcacaaagttgaattctgactatttttaagacaaaagtctgttaaacttttttattgtaaagaatatttattatgcgaatctctattattttatggtatttattgcaaaagactgttgaaatgtactcatgtttgaatataacaaaatatcaatacttaacggaaaataaggtgacacgaagaaagtacatatgttaactataatgcagaaaatatattaattaatg

SEQ ID NO: 171025 - DNA, 360 bp, Homo Sapiens
ccggattgcgacattcaattaccagtcggcactgcgcctttctcgaataaatatcacatcatgccacaggccatcattgtatttctcctggcttctaatcttcagttttttgtgacaacactaaacatgtaaaccaagcggccatgggcccaaaatagagtcatgaagtcattctcgtcttgatctgagacatagaagatcatgccatgggaggaacgagttctcagatgaatggaaaactgagatttggcaccaaaatctccttttaagtgttcaaactcttggcggctgttggctgttcctccatattgataggcgtgctctattgctctagggctgttgaaatggtcgccaatcccg

SEQ ID NO: 171026 - DNA, 223 bp, Homo Sapiens
tggtgtatataaaattattggtaaaaatgatgtcaccaaagagtaatacatagaacgttaaaatagtagtgttagagatttttccctcttaatgacagatttgtccttttaatcataatacagagggtgagaaggttcaggaaagtgtacatataacaaacaggacattttgttatgactccaaatgtagataatttttcacatgcgttaaacatagttcaga

SEQ ID NO: 171027 - DNA, 323 bp, Homo Sapiens
acatccacagcccttaccgtggctatcttagctgatgtgctaatcaagttccccctaatttgacatactaaaatctaatactagaggcagcatgacattattaagggggaggaggttgagaagcactaacctcgaagttagaatttctggtttgtcatcccagtctgctaattagctttctgatttaggacaaaatactttttctgtgccttctgggggtcaaattcgatttttaagattctctcagtgggaagaaatctaactaaaaatatacttaaaataattcttgggtagtatattattttgaaatggtcgccaatccg

SEQ ID NO: 171028 - DNA, 695 bp, Homo Sapiens
caagagaaaatctggaattccttgcagacctggagacatgggtgctctcatgcagaggaaagtaaatctatcccagccctttgtcactgaccttgggaaatgttgcttgagctgttgagtcctggctcctgtgcaaaagcaaaactccctggggaaatactttatatcccttctacatactaggaactagagattactggagatttttaaaatgttagttttttgcagattgttccagtgaagtcaaatatggccatgttctctttttgatgaggctggacaatctcacttacagagattgtgacatccttgttattaagtatgtttcaagacagcagaaggttaagccatttaatgttattacaatggggaagtgacatccaagatgtaatgaggtacaagattgtggtggttgggtgaccctttgctttcagaaatgcggtgagtgctcaggattatggtgtggaaatccaactatgccacaggcctatgcacatgaattaattttatgcaggtgtcagggctttaaaaaaaatcaaataaatcatagcacttactggaaaccctgtgtgaatttaaacatatgatacatgacatgtttatttccgttcccaagtgagcatgttttaaggaccattcccacaggcatacgtaaacacagaccttagcagtgttttgaaattgaaatgtcggca

SEQ ID NO: 171029 - DNA, 550 bp, Homo Sapiens
tcccggaatggcgacatttcaacatgcattcagcaggaccgaccacatccaaaccataccacaaaatgtttactagccacataatcttacattttcttgatgtatcataatgttgtttataattgctctctgttgaatatttgagttgcttccaattgttcattattataaataatgctgcaatgaaatcccaggatataaatattggtctgcatctctctgacaactttgtgatatgaaattactagagaaaagggcataaatattttaggactgttgatatatattgacaaattgttttcaaaaaagagtttagcaatttacacattcatcaagtgtacatgaaagggctttctttcctgcaaaggtacactagattgaagtattcttcttatctttgctaatttgataagggaaaactagaatcacagaattgcatttaaaccatcattttgttccttgtgtgtttgaattccttaaaatatatttttcattaatgtgtatttctatgaattatctatatttttgcttacttttcttttcttttctt

SEQ ID NO: 171030 - DNA, 328 bp, Homo Sapiens
ccagtaaaagggtaacatatataaaaagttcactacagtccccaacatgggttactatttaatcagtagcagataatgttattaggcaatgagtaacaggcttctgaggatggctaacttaacaatgttggatagagaggagacacctgagggagcgaaagcaggctattgtgataccaagcaaaaagtaatagcaaaggagaaaaaaggaaataatcattgaaactaggatgggagctggtgctaggatgaatgagaagagagggagggatgaatgaatgactacacagacagaaaacaggggctgttaactgagaggaagagaaag

SEQ ID NO: 171031 - DNA, 559 bp, Homo Sapiens
  misc_feature (387)..(402): n is a, c, g, or t
  misc_feature (464)..(515): n is a, c, g, or t
ggaccggagtgggacattcaagttgagtaatatgccattgtatggctgatccattcctctatcaagtggacacctgggttgcttccatgttttagctactgtgaataatactgatatgaacatggtgtacaaatatctcttctagactctgctttcatttgtttggggcatatacccagaagtggaattgccgggtcatggcaattagatttttaattttctgaggaaccaccatactgttttccacagtggctgtaccattttacatttcctccaacagcgtgcaagacttctgatttctccacgtcctcaccaacccttgttattttctggtgttttttgttggttagccgttctgatggatgtgaggtgaccattattcactannnnnnnnnnnnnnnngagacagagtcttgttctgtcacccaggctggagtggagtggcactggtcttgaactcccgnnnnnnnnnnnnnnnnnnnnnnnnnnnnnnnnnnnnnnnnnnnnnnnnnnnnatgagccaccatgcctggcttcatcattcacttttatcgttcac

SEQ ID NO: 171032 - DNA, 624 bp, Homo Sapiens
tcccccggattggcgaccatttcaaaaagtcaaatatattcaactccctaaaaaagcatcctaaaatctacatgattctaattcattattggacaatgactgtggagaaacataataatgttaatgtacagcaattttttaaacagctttctcaaatacagcattagtactaaaaaaaattttggcaattgttatcatttctttaacacaaagtacattaaaaaattacagaagaacaggcagaaattttggctcagattagttctgatcaatctttatctccccagagcccttgctctacctaggaaaatggttaacttgctatatagaagtctgacttagcaaacacatacacatttaaaatgattatgatgaaagaagagataaggatgttatttcaactgctaagaaaacaaaaagtactaatcaaggctatgcagagtacagaattcaagaaacagtaaaagatagaaaatactaccctttctgacaaacccataatgggaaattggtcctatcacttatattctgatgtagataataattaaattagtagaaaaaggatgagccattagagagtaacacacgtagacttgaaatggtcgccaatccgggggatcctct

SEQ ID NO: 171033 - DNA, 624 bp, Homo Sapiens
  misc_feature (245)..(368): n is a, c, g, or t
  misc_feature (378)..(391): n is a, c, g, or t
attcagatgtgtccctccagttagtgaatggatgatgaaagactgcatgcaggaaaatgagatgctttgggatgtgtacattttagaattatttctctggctaaaccagggaggatggaatgaaggagagccacacaccaacagttttaccagctgggagggaatttctgtaattcgggtgaggcgtgcccagggtccatgagggcagtggttgtgggagtggcaagattataaaaatgaatttnnnnnnnnnnnnnnnnnnnnnnnnnnnnnnnnnnnnnnnnnnnnnnnnnnnnnnnnnnnnnnnnnnnnnnnnnnnnnnnnnnnnnnnnnnnnnnnnnnnnnnnnnnnnnnnnnnnnnnnnnnnntgattaaagnnnnnnnnnnnnnngtttatataacttggactaaattagcaataagaatatagaaaatgaagcaaatgaaaaagcgaagaccagtcatgaacttccagggaaaataaaaggttgtgcagaaaaggaaaaataatcacagtatactatcatggctcagctgtgactagtgttaccatagtcatcagctaatatcaatatttgatattgatctcatcaaattatgtatgaatgtcccatccggtccgct

SEQ ID NO: 171034 - DNA, 755 bp, Homo Sapiens
aagttgataccaacactacggaaatcaaatggtattgaagtgggccccaaaaagatcggctgtatatttcagaggcatactagtattaaactttcatggatagataactgttttctatgagatttgtcaattaggtcgtaaaatataaatctctttgggaatttcacattagaatttatgttatttttcacatacaataaaaatgcttagaatatttcaaatgttagcacaattactatggatagcataaggaaacaagtatgtgtaaacagtctaacatttttaaagaagaaacccactgtcatggtgaaagaagtatattggtcatcactgggtttaattagaagacctttaggcttatcccaacctcttcagtatttaaaaactggaaaactgtcagatgtcttattataaggaacacatgctgtatgattaaatcccaaaacatatgtgggaaaaataaaaataacgaaaagagcaacaaaacaaaagctgcttttctgaaaacaaggcaaacacaatgctagcaaaaaggagataagcacagaagagacagatataagaaagaggcaatataactaaaagctagcataatttttttaaaataagagcacattacaaacaactttatagcaaaagctaagtatctcagaagaaatggctaatttcaaaaatatataattatcaaacaacttagcaatagaaagtctgaataaacaaacaactatctgaaaagtcaaattgtaatgaaatgg

SEQ ID NO: 171035 - DNA, 513 bp, Homo Sapiens
ccgacatttcaagaagactgtagtaagaatcacagatcggcctcacaaagtgcatgggattacagagcatgacgccaccgcgctatggacactgtctctgagaaaatgagtaacagggcctttggtacctccacagcatctgctctgccccttgtacttctgctttcctgattgggtggggaagtttaggtgcccaggcacccaaggatcaaagcatcttatggactttaccatcctcctcttcagtgtgattagagaggcacagagcagcagtaaagccgttagtgctcccttcaccaccccttccatggctggctgtgccttctacgatgcacttcccaggaacgtgtccactgttccattcagctgcttaaccgcaaatactcttgccagtttccctcggacttggaaagccgctgtccacgccttgcgcaaataaagctaaaatccattgtatcagtttcctgggatgctgtcagaaattaacatcaacttgaaatggtcgccaatccg

SEQ ID NO: 171036 - DNA, 247 bp, Homo Sapiens
aaggtcaactaattaatgtatatctcaaggcttgcatagccttggactacagctggcattcattaaatattcaaataatgaatagctaattagacctttctcatccttttcctttgtctttctaccttctctctcagttttctttccccaccctgttcctcccacctctgtatcttttctacccatgtactcttctctttctgatcctttatcatttctcctttgaaatgggaaaagagtaaaattc

SEQ ID NO: 171037 - DNA, 710 bp, Homo Sapiens
ctctggacctccaacagatcacaaactccttcgttatcatctaaattaaagttgtagtcatctgccggggtaggagtaagccttaagagaggtaacacgtcagaagacattaactcatcaatgatatctccactaatagatcctgctgtagatatatctgtagctgatgtctgctgcagagcctggcttctttcagagacatgttgctcaggcagattttgagttgccatgctggatttctgtggagtcactggaatcaaggactgggaggaaggctgtgtgaggtcatcagatgggggaacaggaaaaaccacgggcttagatgaactcgactctttaatttataagcagcacatggataggtcctgaatgactctttagattgatctggtatttcttttgtccattctgacccatttctggaatgggtacctccagttgtgtaccagaaggtgcctgaatggccaaaagtgtatcaccattaaagcaattacagatgtcttcatgagttacataggaaaatctattattaatggaatcgtccatcacatttttgatgctttgctgtagccacaacttctgctgatcaagttctctttccttcagttctagatcttcaatttcagctttaagatatcttaatctatctatgacttctttagtattacagccagcacctacctattcacaatcgggacctctagaacagc

SEQ ID NO: 171038 - DNA, 628 bp, Homo Sapiens
ggtaccgatgtgaataggtaggtttttattcatcaaaagttaacagcaacaggcacatattaaaatgagtatggcaaagccttttacaaatggctttacactcaagctttctcccaagaaaatggctgttgcaacaaactgtaaacaattaataaacagtcttttacagtaacaagggaaatacaaatgaactaaaagaaagcaccggtttctcttaaaactagattacagttgtgcttactatacataaaacaatttaaaacaaattacaaaagtggaatgtttgaagtttaaaattagtccttatagtttgtcctagaaaacatctgttcacatcaaaaggcccgtcaaagggtaacgtttcatcaaagggagggacaagaaaacaatgcacttttttcaaatcaaaacaagaagtttggtcacttagctatgtgcatagtttaaggcaactggagcaatctgttacagcttacctaccaaccttcccctcccccgagtgtggctgctcattatgtcacattctaaaataataaataaaagcttacatttcaaatctttgcccacatggagaaacataacatgcacagtcacacatacactaacattcaagccgtcggggtacccg

SEQ ID NO: 171039 - DNA, 787 bp, Homo Sapiens
ttacctaacttacaggtacaaagtgcaaatgacttgacgcctctctttccccaatcccttgaactctctggatctcaaactttctttaggaaagcaaaggttaaaagcagacagtaactaaattccaaataaagacaagatttcaaacatgaatattatcttgatagcaaaaggtacagtaaaaccaaaatttcattactccacagtttacctttgcatttaaaacttggatagtataacacttgagactgagagatttggtttcaggcattaaccagatttaattgtttttggcaggtaagtacaggctctggcagagttaccaactattctggtcaacaaaagtaaagacaagtggataattattttgagtggagctattaaaaacctgtgagaagctcacattgactttttggcctccagtccacaaaataatacttcatttgataagctaaagtaaagagcaattttatggattaactctatcaaagtgaagcacatgaaaaatgggcctaaagtcacaatatattaatcaggatataaaaaattaaattttcacagaggttttcagggatgtttgtttgttaacaatgacctatatgtaataatgttatttgttaataaattcacacaacacaaagcagtaattaactaatgaattttcatttttctttccccaatattaaaaagggataattatactatcattataatttgataatgtctatatctgctaattagggcacataatatcctgcaaactactactataaaatgtgggaaatcc

SEQ ID NO: 171040 - DNA, 773 bp, Homo Sapiens
  misc_feature (686)..(698): n is a, c, g, or t
ataggtaggtcaatagaaatatggaataagtaaacacttctgtcatagacgaacctccccatgtaaacaaggtccttataagatactatggtaatgacagtatgaagctatcacaattaagaagacatttaacaaatccctctgaacattttatacttttacttttgtagttttgagcttgagtaatagtacactaacctcatcccatcatatatccaataattatttgtattccatcagtttgtagctcagaagagtgaggacatcacctgaatattaatcacagtagtaatgtaaataagttacacatatagggaagcctgctcaaaaactagtataaaaaaatccaaatattggtatacatgaaagtcacctggacatctagtaaaaatgtagatttagatatagtaagttggatgcgaggcccaagatgacacatttctaacatgtactcaagtaacagtgatactgtcggtgcaaaaatcataacctgagtagcaagtgactatagtacaaagtctgcctttacgaagtaggcaaataatatatgcaacagcaagcaggaggttgtaatagcaagataataacacaaatatgatctcattttgtatgaaagagaaagtactcttaacttggtggacgtaaactgggtccaggtccatagtagtcatacatattgtattccnnnnnnnnnnnnncctagatccccagctagcctgcaggatgggaaattcttgctgaaactgactattcacttggatacctatagattt

SEQ ID NO: 171041 - DNA, 641 bp, Homo Sapiens
cgattgtgaaataggtaggtagaaggcagctgctggcctagatgttggtttgggaatattaggtgatcctgtagagattctggatccagagcaatttctttagcttttgactgtgccaaagtgtagatagcctttatccagcagtattttaagtggggaatgcaacgtgaggccaactgaacaattccccccgtggctgcccagatagtcacagtcaaggttggagagtctccttccagccagtgacctacccaaacctttggttctgtaaaactgctctggaaataccgggaagcccagtttatctcacgtggtttctagcttcttcagactcagcccaaattaggaagtgcagaagcacatgatggtgaaaaacctaggatttggcagccttccagaatggtatggaatctgagggaagatttatgtctcgtttaggaggatagctcatagttgaattttctttccagccagttaccctttcaaacctacccatacttggtacaactcttacacaaatacttagcatatgcattagatagccctgaattcactctaattataaacagggagtgtacactggccccagatgttcctgggctgcgtaaaagcagctggagtgaagcactcatattccataa

SEQ ID NO: 171042 - DNA, 465 bp, Homo Sapiens
  misc_feature (67)..(79): n is a, c, g, or t
ggtaccccgattgtgaaataggtaggtatctgcaatgaagatgaacttttgtgaaatcatctaagtnnnnnnnnnnnnntgagtaatttataaacatgtggtttatatgtttacatttaaacacatatatgaatcatataccacaattgtaaatcgtggtatcagagaaaatacttgagttctgctgtcagacagatctttacttcaattaggctccgtcatttatgagttgtgagacctcaggcaagacatgtaagctctcttagcctttttctcatctgtggaatgtggcaaattacctatagccttcacaggttcctgtgagaatttcataaaggtgatgtggctgaacagctagcacagtatgttgcgggaatatttgcacatggatacaaagatgttcaatgtagtggtgttgctatacgaagaactggaacacctacctattcacaatcggagtcctct

SEQ ID NO: 171043 - DNA, 462 bp, Homo Sapiens
tgtccgaatgtgaaataggtggttgcatgttaaatggcgggtggtcgggagaaaccccatgaagtagtgatatttgatcaaaaatgtgaagaaggtgagagagttagccatagatataacattatttagtactatgtttaggtctgtgtccaaataattattctcacaggaaatatcaaagtacttctattactttctattacacaacaatattaaagcattttgcatttgaattcaaatatttctacaaatgaacacattccttcatacctttttcatttcattttctaaattttcctcctcttgaccttcagacagccttcttcttaaatcagctatttccctctctgcggattctctatactgtgcccactgtgttcgctcctgctccagcctaaggtggaactggtgctcatagtcacgaactgtttctacaaacatcacctacctatttcacaatcg

SEQ ID NO: 171044 - DNA, 319 bp, Homo Sapiens
cgtggttaatgttacagtacggttgtcaaagctaatgaaatgtgacaaatgtctaaatgctgcagaacagtataattttaattaaacaaaacacctgttattgtacagctgaggtctgatggttgttaaactgatgcctatgtgtatggccagccacaaaccttggggatgtttattacctgtacatatatatacaaatatatcccatacatatgtatgcacacaggcatgtattaatttatgcgtgaaacttataaaattatatatacaaacacatacatgcacatctatctacatatacctacctatttcacaatcg

SEQ ID NO: 171045 - DNA, 943 bp, Homo Sapiens
cgattgtgaattaggtaggtttaagactagtcccttggataagccccaagcgaatttgtcttcagattattaaaattagtgctgtaaatcagggtgggcaattcacagcctttctgaactgactgaactagagcttgcagtgaagtgttctgctgagactgagcaccttacagatatttttctccagaagatggtgctgggtaataaaatcatcacaattagggaatggttagtggtctctactgtggcaaatgccaactgttggaattcactttattgtagaaaaacccaaactgagactcttaagttttgtttagcaatgtgtttctggtatgaaacaaactactgtgtcactgtccaggtaggaaacaattctttcaactgggttttcagcataaatgggaactgatgtagaaggcaggatttagcccttctaggcaaaagaaaagctcagttgggtttcacgagtgttcctgtgcttatattcagtctgtgcctacatgttctcatgcatgtctaacctgatttacctcttacctgtaacctaccttatcatgtggcttttaattggcagtcactcgccatttctaagcagatatagtactacctttcagaactcacattggcaagtgtaaaaagatgacttaaggtgaagtgaggacaaaatcacattctgcatactaacctatttttttctccctttaaggtgctaaacttgcacctcatgtccactcagtaacaagtattgggacgtagagcacagcctcactcagctctgaaaggtaatacagcctgtgaggaagtgagccagcagtggcctttgcaattgtggatcttaagctctgctctcagcagatttcaggtgtaaccatttgttaactgtactgaaggtgtgtcctcaagaagaaagtgttcaaatttaaaaaagctgctgccaagtaaa

SEQ ID NO: 171046 - DNA, 749 bp, Homo Sapiens
  misc_feature (505)..(514): n is a, c, g, or t
attgtgaaataggtaggttgttagcagaagagggtgatgtacctgagaacctaggctggataggaaaagacacaaagcatgtgggagattgtagtttgaagaaatgagattgtagtttgaagaaatgaggaatgggtatcaaaactaggtaagaaagcaggtatttagggagtaatggagtaaaaaaactgcaaggataagtagttgtagtcagagatcaatatattggactcttaaggctgtagaataatttcttggttatcagaagatagagggtgtagctttgggtatggattactgaatgaagtggttttatagagtcagagttcatagtttttcaatgggttttccatatggacactgaagtgggaggtgatggcagaaaatgcaggggaggcagatactgtcagcaaagggccagagtcctcaacaaaatggaatgactgggtaattaataagaatgaaagaaaggagtaaaaaattcccaagattgttcatcatgccnnnnnnnnnncctcgtaaattaagagacatgagggtaaggactatgtctgaattaatccaacaaatgcaaatatttgttgaattaataagtgaatgataaactcatgttgaataagtatttcagaaaacttgtttttttcttattataagtagtcgatattaaagaaaatacaaataagcaggatgtaggaaaaaataatcccatcagccagaaatacctacctattcacatcggggatcctctg

SEQ ID NO: 171047 - DNA, 1010 bp, Homo Sapiens
  misc_feature (101)..(137): n is a, c, g, or t
tagagatagaggataaaatattaacactgaataccatgagggtggatctctaatatatattatttatggatatatattttcattagtatatgttatatctnnnnnnnnnnnnnnnnnnnnnnnnnnnnnnnnnnnnngtctaactggggagagataatccatacaaaaggtgaacaacttactaagagtgatgttgttgtgtatgtgcaggtctcaaaactgagctggatagagaaaaaaatggctgctactctgtaaggaaaaataccatcttcaactgtacaagaagctttacacaatttccttaaggtacattttgtgtatccattattttagtgtcagattgattaccatctgcaccaatccctgctgccgttgacaaggaaatcttttctccatgtggagcctcagttagaatcctggtattggcatgttcagtatcaagcccctcataatgcaagttattaatatgtattaagtctaaactccttagaacaactagttatgccctaggtactaggaattacaaaatacttaataaaaataacccagcagcctaaatgaaggtttaggtatgacagctcttactgctaagtccaagaacagctctctgagtcacttgagcatgtgcagaaacagtcacgccctgatggttaaacttagtcccagtcctcctgattagcctaacatagaaccagtttaatcttaaggaaataaaagtgctaaaggaagagttattttaaaagctaactcctaaagttgcagacatttctctggaagattcttggggtatcagaccaaatcagtattctcaatcctgtcttaaaatgtataatcgctgtactatacaactctaagcagtaatatatgtgtgtgtgagctcacatgtaaatgtataatatagccacccatataatcaacttcctgtgggggtaataatccctttacctttctctggaaccagtttcaaattttatagttactaaatgtttttccttccctacctacct

SEQ ID NO: 171048 - DNA, 462 bp, Homo Sapiens
tctcgaggatccccgatagtgaataggtaggtatcataagatttagtccagagtcaaatagagaagaaattactttagttgatatgaaaagaaaccatgctatttagtcagaatacttctgagagtatcccctgtccaagcatttgctgaatttctatctactaattttcaggtggaacagtatggttgcagagagtccatttggacatagatacactttcatgcattcatgtctttaacaataatttgtggccctactgtgtttgttcactaactcctttgaacctaccacataagctatatctgtattttccttgtaatttgggagttccaatgcttcattaagctcacatgcctgaaactaatgaagaaaatagtctcgttaatccagatagtataaaagtagccaccaaatcaagtcaatcacctacctatttcacatcggagatcctctagatcgac

SEQ ID NO: 171049 - DNA, 629 bp, Homo Sapiens
tacaaccaagatggtgatcttgatatttaaaaaaccgaaaataagaaaatttgaaaattttgtacataaaatgattaaacaagctatataaacctgtatttgtaagtgaatactagacaaggagctaatttctgtaatatacaaattcttacaaattgacaagaaaaggaggtgatagctataaagaggtaattcacagtaaagcatctctctgctcttgaactgctagaaatgcaaactgtaaaaataaaagtacccaaaccttatcctaaaatgcacagatgtttactgcaagtgttgtttatagcttcccagaactggaaacaaaacacattcccattatgagaaaaatggctgagcattttgcatgtatagccacccaatggaatttccacagctattgtaaagaacaactttaatttagagccatataagatgtcttgaaggtatatcaacaaggagttaagtgataaaatcaagatgtagaaaaatgttagttatgggtctgtcaatcctggtgatctctttaaggagctaacttttatctttgttaatcttatctattgcctttcatgtactatttcgtttacttctgctcttccctttacctacctatttcactatccggg

SEQ ID NO: 171050 - DNA, 470 bp, Homo Sapiens
attctgaaagttctaccttgtgggaactgagaatggtcaaggcccttttgaccgattgtgaaataggtaggtctgtgtgcaaaaatggtagcccagtaaggatgtttaatagtaggttattgaggtaaaccatggtacacccatcaagtaatattgttctctgaatagtaaatgatatttatcttagaagtgagctaacatttgtgaatctgaacccttttatattgtgacacccttcaattgattttccttttcccatttatttttagtgctccccccccaacaacattttattagtaattccagctagtccggaaatacaatgacttgttataaccgttggagcatccttgattctaaccttgtactaagttactaatttactggtgggccttgccacaaatcaccttcccattgtcattgaataagtcaccattcattgagccccaagcactgggcaaaagtgttta

SEQ ID NO: 171051 - DNA, 1044 bp, Homo Sapiens
  misc_feature (300)..(341): n is a, c, g, or t
ataggtaggtaacttcatcaaatgtacataatctgtatcaggctagtccacctctgaaaatctaaggaaaggatttaaaggaagagccaagcttgtgcctaaagatgtttactgtaacctggtctctcagaaaaggtagaaacagtctaaatagccagaaataggggaatagtgagcacattcaggtgacaaaactcctagaactcatgtcacatagaaatatgtaatgctgtcattctaatctggaataattctggtataaaatatatataaatgttacttaaaatcaagcatgtgagnnnnnnnnnnnnnnnnnnnnnnnnnnnnnnnnnnnnnnnnnnttcttggcactcagaaattcgagaccagtctgagtcgatagtgaaataggtaggtatatttctctcccactgaatcacatctccttgaagacagcaaccacagttcgtccgagtgtacagagtagcaaccacagttcgtccgagtgtacagagcagcaaacactgttcactgtagcctttcatttctctccctctaaagattctgaacaataataccctgtcaattagcaaacttttacctggagacagaaggcttatgcaaccagtgcacttaagtactggtcataccttgctaaagactttcttaagacttaaacaaaaattttggggggaagaagaggaggatatgcttcatgtttataaactaaccaaagacagatttttaattttttaaaaaagttatgtcttaaaagcttgctttcattatttcattcaaaaaaaccatggtgcttttaatataaaaatacagaagcataatttctgcatatgtcaagtctaacctaatcataactggccaatctgctgattttaatgtaatcctaaggatgctagacaacaatatgcttgcttgattcacctgacactatttacataaaataaaagcattttaacaatacatcgagatgcaaatctttctggctctgattggtgccctttctccctcttaacaaaagtgcacacacacacaaaagagctccagtat

SEQ ID NO: 171052 - DNA, 460 bp, Homo Sapiens
  misc_feature (84)..(101): n is a, c, g, or t
  misc_feature (201)..(214): n is a, c, g, or t
agccccagagttcaaccaaacagtttgagcacgatcgtgtaaccgcacttcagcctggggtgatagggtgagactctgtctctnnnnnnnnnnnnnnnnnngttttagggtaaccattagagatacagacatgagatttcttgctttaaacaattagtgaaaagattggaattgaaagaaaacttagtgctcacaagaagnnnnnnnnnnnnnngcataggtaaatagaaaacacactaatggtagaaataaggtgaaatgtatcaataatcaccttgtgagttaaattcttctatgaaaaaagactcattaagaatcatataagcaaaaatatgcagtactatattgtttttaagatatcctaaaataaatattcatatcaaacacaatagaggcccaagtcaaaaccaaattatttatctacctgggatattttacaacgattaaaatacacacctac

SEQ ID NO: 171053 - DNA, 712 bp, Homo Sapiens
  misc_feature (525)..(660): n is a, c, g, or t
tgtctgctgttcacgaggatccccgattgtgaaataggtaggtgagtgagcccattgtgtcgattgtgaaataggtaggtcataataaggcacacctcatgagtacactgggcatgcaaagctcttagaagagtgtcaacatagaggaaatattacctgttgttattatgataacttagtcattctcaattcatttctcatctttacagaatcctaagtaactcctctaattattgctttatgtacttaggcctgatattcaaaatatctaacacctgatttattacctgcagtgataaacaaacagagtgccactagctatggttttgaggtccctgtggattctacatgaatttagaacaaaaattctgactttcagagttggcaaatcaggtaaatagcagccctatagaaataggtagtaagggtacttctttttgcctagttaacctagttcttcgaaagcagggaaatttagcagaagtggacatttaaggacaataacaaatttcctgtacatcagcnnnnnnnnnnnnnnnnnnnnnnnnnnnnnnnnnnnnnnnnnnnnnnnnnnnnnnnnnnnnnnnnnnnnnnnnnnnnnnnnnnnnnnnnnnnnnnnnnnnnnnnnnnnnnnnnnnnnnnnnnnnnnnnnnnnnnnnnaggggtatgggtgctgcttatctctagctggctcttccacctatctatttca

SEQ ID NO: 171054 - DNA, 688 bp, Homo Sapiens
atctagaggatcccggatagtgaaataggtaggtgaaatttaagaacacattttacttaatctaatatatccaaaatgttatatttcaacatgttatcaacatagtaattattaatgaaatggtgtacagagtttatgctatactatgtcttggaaatctagtgtatattttacacctaaagcagtcccaattcggacaagccacagttccagtactcaataagccacgtggattactcaataagcggctaccacactggacaatgcaggtctaaatggaatctacgcaaaccaagaggaagttctgattcaactagaaaatctccaagaaatatgcccatgcctgagttttcaggacgaggggaagggaagtcaatttcccggaaagcagttaccaattttatataagtactccattgtgaaatcacaaggaacatcagcagggctgggatggtcaaggagaaggctgcagggcgtggccttggggaagcaggtgaccaaccaacaggtgatatcaaggctctgtctgtcaccagcagagcccaccttctaaccatcgttaacattttcacggtgcttttccttcctcctttacatcttccaacagccctatgaggaaggcaggctttaccccattccacatatgaagaaaccaaggccaggcaattaaatacttgtcattctagtg

SEQ ID NO: 171055 - DNA, 699 bp, Homo Sapiens
gatctagaggatctgcggattgtgaaataggtaggtgtaatgaagagaaacagagaaggaaagagaaggaaattttggtaaaaaatgatgaatactcctttttagacattcgaatttaataaatcagtttctgttgatgttcatcagtgaaactgtattaggcaaaaggtcaagtgtggagataaagttctcggtattgttcacacaaggtagacagctaaagatatgaatatataggagagtacttacaatagaaagctgctaaagtaatagctttgggaagttatgatgtaggaaggctatgcaaagcagaagagtggcagattctactaatttcttcccttttcccttagtaagagcccctattttgtgcggggaagtaatgtatccagctaaaaggctaaatttctttgccttccttgcacacagggtagccaacaagatgtaagcagaagtcttatggtgtggcttctgggaaacctctccaaaggtaacagactaagatgggaggcaggtgctttttctcttctaccttccttttctttcaagactggaaagtaaacatgatggctggagctacagaagcaattttacaataaagaagtaactttaaggagcctgaaacagtgattccattgcgatgtcatcataccagccctagactacttacctacctatttcacaatcgggctaccgagc

SEQ ID NO: 171056 - DNA, 758 bp, Homo Sapiens
gctgacatagaggaccccgattgtgaataggtaggtggatcagaggtgatagtaggagaaggggttatcagtttggtttgagcaatggaaaatgttgtgaaccatgctttgtgacatggttcggggtcacgatgtcaataggttgctgaagtggaattgaggggaaagctgttggaatacagatgaacaaccaaacctcaaggctgagatgttggtgattcatcttcagggacattgaaatcacctagaatcaggtagatggtagggtaaaactgtgagtcctgcagcaactcacccaaaatgcaacagtccaccatgatttacaatttatcctcatcttgatgagatggactgactcatcttactccagggcattctgtaacttgattgagctttctaaacattttaatcaaatcatttccctactctccaatcatcagttattctatgtgccatcagacgaaactctataaattccagatgagtattgacaaccctctagcagtcaacctataatatcaatttatctgtagcagtccctatactgatcctccatgactcccgtcaagccagtctccttcccctccatcagacaggtgttccttttgcttagactcacgttgatccctcagactggaatactcctcctctctgagaggccaatccagatccttcccttgtagctcaacttgagatgcctctctaagtggacaaatcccccttacctacctatttcacaatcgcgattgttacacgcg

SEQ ID NO: 171057 - DNA, 670 bp, Homo Sapiens
tagattgggccaggtagtgttgctaggtgctcgggatatatagtagaaaaacaagcctgtcttttttaatgtatgcaggaaatctctggcgattgtgaaataggtaggtagttatgtaagtcagaaattaaattcccactaaaatgccactaatcaaatctatggtatgcataaaggcgaaatcacatttttactacaattaaataagacaaaagagaaatgaggctccaacagaaatttcaggacatttcctatcatgattattgtacactgaaatgacagctcccatccagtatctagttctgcatcttcctatactggaacaatataagacactggggggcagggaagtttagaagcgatggtgcctacactgagaagtctcagtaagtgaacaattactgacaactaagtatgagtgacaaagcagagcttctaccattcttcaaactgaactatgcgctaaatccatagcattaactatgctgtgtctttcataaagaattacatacaactaaccatttgatagagagcatgtacctaagatgttcctgggaagatatgaacattaatataccaaagatttatcatagaagaaactttctcctcttagcctcttgcatttggctcagttttctcacctacctatttcacaatcggagatcctctg

SEQ ID NO: 171058 - DNA, 560 bp, Homo Sapiens
gaggatcctccgatgtgaaataggtaggtgatggtatcatagaatgataggtttgtaggatttatgatactgcattcagttttggcagtgttacattcaggtatccaaggaacattcatatggttaaccacccaagtcacagcctttggagtttttctctgtgtctcctttgctcctgttgataaccattccctgtatcattctgtcactatatttacataattactctgattgccataggtcacttttaaaaaattgtttcttttcaactgctctgatagatctccttttctcaacctctttcttcctttctccatcttctacattgctatcaggtagctttataaagtgcaaatcttacttcactaacaaaaacttgttcgtagctctactgtcatctacttgagtccagattctttagtttgcagagtttttccatgatctgaactctgctttatttcctaaattcttgttttcttcaaactcatgctttttcaagcattgcattcatttttacatattgtatccaacctacctatttcacaatcggggtaccgagc

SEQ ID NO: 171059 - DNA, 642 bp, Homo Sapiens
cgaacgtgaataggtaggtcagtctgaagataatgaatttgaagtgtgtatatgtcaactcaagtggaattatcaagttagcattttacctatggatataggcaggagaactggtgatgtgctatagatgtggatgtaacttgcttataatattcattgaaactctaatgatgaatgagattatccaagaggagtggggaaaatacaggaatctaatacaggtcttgaggaacagtgtcattaaagacacaggcagaagaaaagaagtctgcaaagtagcatgtgaaaaacagcaacataggttagagcaagccctagagttgattgtcacaggaggcgatatttaaggaagtcctagtaataaatgttataaggttctgagagaaaagtagaagatggagaaaggaagaaagaggttgagaaaaggagatctgatcagagcagttgaaaagaaacaattttttaaaagtgacctatggcaatcagagtaattatgtaaatatagtgacagaatgatacaggcaatggttatcaacaggagcaaaggagacacagagaaaaactccaaaggctgtgacttgggtggttaaccatatgaatgtccctggatacctgaatgaacactggcaaaatgaatgcgta

SEQ ID NO: 171060 - DNA, 690 bp, Homo Sapiens
  misc_feature (577)..(577): n is a, c, g, or t
gagatccccgattgtgaaataggtaggtaatcataatggatacagacatatcttcatacaaatacattgaagcatattgagataaatgggtagcagaacactggggagaagagacacaagatatcttgtccaagataaaaacttaaaccatgggctgcctggaggaaggaagtcaagcatcttctcactcgatccaaatttgtgctcacagagtgagttattacagggtttcccacattttataggacattttaggataaaggcagcagtgaagcatgagtttctgtgccttttagtgagagtatactcatacctaagcttcagtttctctgtcaatttttctaaattgtggtaaactacatataaaattgaccatttaaccatctttaagagtacacttgagtggcattaagtacattcacactattatgcaaccatcaccactgtctgtcttcagaaattttcatattcccaaactgaaacaatggccccattaaacactacctacccattctctctctcccagcccctggcgcccatcattctttctgtctctatgaatctgactactccaggnacctcagctaagtggaatcagacagtatccgtcctcttacgactgggttctttcacttagtagaatgtcccaagcttcatccatgttgtagatgtgtagatggttttctttta

SEQ ID NO: 171061 - DNA, 351 bp, Homo Sapiens
tgacagagccagagacactgtctttataaaaaaacccaaaaccaaactctctttttcctcctccttctccatgggctctgtccatgccatctctgttctgtaaatggcaccaccccctgctgagctgctcaaggtggtcataactcatgtgttgtgctaactctgcttttgccctcttctccagtcagcaagtcctgtgattctaaactttacccaacttgtccactctctttaacttcactgtcgttatctttgcctagggcactgctatcccagctgggctacagcagcagcctcctaactggtcttaactggtcctctgtacctacctatttcacaatcggggatccg

SEQ ID NO: 171062 - DNA, 755 bp, Homo Sapiens
  misc_feature (103)..(103): n is a, c, g, or t
ggtccgatagtgaataggtaggtagctagtcacacttttcagaccaattcaaactgtctatgcacaaaattcccgtgggcctagatggagataattttttttncttctcagctttatgaagagaagggaaactgtctaggattcagctgaaccaccaggaacctggcaacatcacgatttaagctaaggttgggaggctaacgagtctacctccctctttgtaaatcaaagaattgtttaaaatgggattgtcaatcctttaaataaagatgaacttggtttcaagccaaatgtgaatttatttgggttggtagcagagcagcagcaccttcaaattctcagccaaagcagatgtttttgccctttctgcttcactgcatggatacagttggtaaaatgtaataatatggcagaattttataggaaacttcctagggaggtaaattatgggaagattaagaaaggtacaaattgctgaggagaagcaggaaacctgtttccttagtggcttttatcccctcggcatgcgatggggctgatgtttctatgattgcctcagactttcacatttactagtagggctgagagaggctttagtgaggaaggaatattcagaataaaacggttgagaaagctgagaagaccattgagttttgatcagttgtgaatagagtgcaagccatggccaagctgtttttggaacgctggccgattctcttcggtggaaaaagcaaatcaaatggagcgagagcaca

SEQ ID NO: 171063 - DNA, 695 bp, Homo Sapiens
  misc_feature (98)..(117): n is a, c, g, or t
  misc_feature (139)..(376): n is a, c, g, or t
gctctagaggatctacgattgtgattacaacactactgcattctctccacagaggtacagcaaaagtgatttagattagcgataacctctaattctannnnnnnnnnnnnnnnnnnngagacagtcttgctctgtcaannnnnnnnnnnnnnnnnnnnnnnnnnnnnnnnnnnnnnnnnnnnnnnnnnnnnnnnnnnnnnnnnnnnnnnnnnnnnnnnnnnnnnnnnnnnnnnnnnnnnnnnnnnnnnnnnnnnnnnnnnnnnnnnnnnnnnnnnnnnnnnnnnnnnnnnnnnnnnnnnnnnnnnnnnnnnnnnnnnnnnnnnnnnnnnnnnnnnnnnnnnnnnnnnnnnnnnnnnnnnnnnnnnnnnnnnnnnnntgagccactgtgcctggcctgtaacctctaattcttgtttgctggctgtcctagagatcctgagaattacttttaataaaatcatttttttgctgttattaaaactaacctgaattgcctaaaaccaagaactctgcttgataaaataagcatagttttaggaacagccatgcagatatagattttatcaacactttatacataatttgggacttatatttaaatgtaatatttgatgcttataaaagggtaaatggggaatgcaaataaattatcagcataataatcatcactacttttggaaacgggtacgagccga

SEQ ID NO: 171064 - DNA, 151 bp, Homo Sapiens
aaaatttggcataggagtcaaaagctgcccaaggagggcagctacctatggggtgtgcatacattcatgaccaatatttaagtccaatatagctttgataattgttctataaaatgtttacacctacctattcacattcggtacgagctga

SEQ ID NO: 171065 - DNA, 384 bp, Homo Sapiens
tccggtgtgggaccttgggatcagaagcaccaacccaagtcccttgctcaggatgggtcttggttgaaaccacaagcccttctgcagttctaggtggatgtagtgttggttcttggctcattgcaggggtgaagcaggaaagagaaagagactggtgaggcctgcttggaaagaggattgaggcacattacgattccaaaccaggagatcctgactcagcactgattctgtctctggtttgtttaatacgggaaagggttccatccaagagcccaataggcctcctctcccaaacctgcatagcaatcaaactatataggggtggtggagggtctttaccagtctctttctctttcctgcttcacctctgcaaggaacccacgc

SEQ ID NO: 171066 - DNA, 1256 bp, Homo Sapiens
  misc_feature (1121)..(1121): n is a, c, g, or t
ggcttgttaccgcgatctgagaggtgggcttttagtccctccagacctcggctttagtgctgtctccgcttttctttcaccttcacagaggttcgtgtcttcctaaaagaaggttttattgggaggtaaaggtcaatgcgtaggggtagagtaagatgtcttatggtgaaattgaaggtaaattcttgggacctagagaagaagtaacgagtgagccacgctgtaaaaaattgaagtcaaccacagagtcgtatgtttttcacaatcatagtaatgctgattttcacagaatccaagagaaaactggaaatgattgggtccctgtgaccatcattgatgtcagaggacatagttatttgcaggagaacaaaatcaaaactacagatttgcatagacctttgcatgatgagatgcctggtaatagaccagatgttattgaatccattgattcacaggttttacaggaagcacgtcctccattagtatccgcagacgatgagatatatagcacaagtaaagcatttataggacccatttacaaaccccctgagaaaaagaaacgtaatgaagggaggaatgaggcacatgttctaaatggtataaatgacagaggaggacaaaaagagaaacagaaatttaactctgaaaaatcagagattgacaatgaattattccagttttacaaagaaattgaagagcttgaaaaggaaaaagatggttttgagaacagttgtaaagaatctgaaccttctcaggaacaatttgttccattttatgagggtcataataatggtctcttaaaacctgatgaagaaaagaaagatcttagtaataaagctatgccatcacattgtgattatcagcagaacttggggaatgagccagacaaatatccctgtaatggacaagtaatacctacattttgtgacacttcatttacttctttcaggcctgaatggcagtcagtatatccttttatagtgccctatggtccccctcttcccagtttgaactatcatttaaacattcagagattcagtggtccaccaaatccaccatcaaatattttccaagcccaagatgactctcagatacaaaatggatattatgtaaataattgncatgttaactggaattgcatgacttttgatcagaacaatgaatatactgactgtagtgagaataggagtagtggtcatccctctggaaatggctgcagtatgcaagatccatatgtgagtatggttctgtgaagc

SEQ ID NO: 171067 - DNA, 648 bp, Homo Sapiens
ctcggtaccccgattgtgaaataggtaggtgattgctctcatagtcctatgggcacacacatcttacgtttaggggtttacattggtggactgacttattgctgtaatgtgttcagacaaataggaataagaagagcaaaggggtgtgtactatctgcagaagacacatgtgcatgtatttcattgctgtgctagaggaagctgctcatggtaaacgtgctgaagttatccctgttgcaagaacaagcatcaaacacaggactgggcacgtgatgaatgttcaataaatgcatgctttccccttttcatttccaaggtggaatggaaacatctgagcccatgtggagcagcattatgatgcaagggaacaattactggactgttctatgttgagttgataggtaatgagggggcacctcactcagaacaatttcttatctgtaatgggggcactagttacactcattatccaggccctgtccacttccagggaggttgtgaatctctagtgagatgggcgtaaaatgctttgtaaattataaagcaccatgtaactaagatttctttgttaacctacctatttcacaatcggcccctctcatgagagaggtcaagccagagctaacctacctatttcactgtcggtag

SEQ ID NO: 171068 - DNA, 701 bp, Homo Sapiens
aaggatccccagatgtgaaataggtaggtataagtcagtagcttaagctggaaataaaaatttactatgggaacgactacagctgctttcaaataaccgacatatgaaaaatttacagctaacctcttccaaagagctgtccatactgcagtctccaatgctcttcctcctgttgtctcttgaaaccacaccaatcaggttttcttcctcactattctcctgaaagtgctcttgcaaggtcaccaaggaccttcctattactaaatccaatggtcatctcctagtcttcatcttacttgacttgtcaatcagcaggaggagacacagttggtcactttctccctgaaaaactctttacttggccttcagtactccatactcgctccttttcttccctccttatccagcttccagtaacagcctttccaaaaccccttcacttgagctatgaccttttcatcatacccatttggcaaactcccaacctacctgctttctctgagaaagccagacagatcaggttctctcataagttcatcattaaccacgtatggggaaacagggaatgggaaggaaaaatggagatgaaaggttaataagaaagtgcccaagtgggcctttgatgatacaatgtgccatgaaccagggttctgatgacttagtctctaacctgaggctagagcaaaacattacacaaataa

SEQ ID NO: 171069 - DNA, 611 bp, Homo Sapiens
ggtaccccgattgtgatataggtaggtatgcttcctgtatatatttctaaagtagtttctctttccttgatgccttattgatgtgataaacagcttgaggaataaatctgtctttattttggaaatggtttttagaagcctagttttggccttaattacttaggggatgtataagcacaggctttggggtgagatggatttgtattcaaatgagacttgggtatataagcttgtacttaacatccttaagctctgatttccttaactgtagttaacatcttcagaattactatttaaatggtgcatgtgagtgatccaagaaatttattagccatgttctacctcaagaagactttcacctggatgtgatttttttcagtgtgtcttttctgttacttctccctgcttacctcccattggctgcagctgggatttttttatcgaccgccagtcctaggttgcgcctcccttcccttatttatctaaacgcttttgtcctgctgattgtaagacatgtcttattctgctgaacagtggcaacatgaagatctacttatcaatagaccacaagccatgtcagtcacacctacctatttcacaatcgggggatc

SEQ ID NO: 171070 - DNA, 713 bp, Homo Sapiens
ggaccggtaggtcatccttgggaaaaggggagctcaccacatcaaacacagcctgcaggcccataggcccaaccagccacaatgactccagggaaaaatgaggaaggaggatgtcccagaacccaaacgtgtcttaaatgttattccaaaagaaactacttctcaactatctctaaaatccaaatgcattcctggtaggacagagcctaccctaccacactcctgaggactgggaatctccggctatgccacaccagcttgaaacatccaaccaaaaggcatttgaccaggccttccattggacagcactactttcctactgagggctgacattctgcagataaatttcccaaatcctgtatttaccactctaagtattcctgggcactcacacccactgccatttgtgagtcagaaagagggctggcaaggaagcctggtggatacacagacagaggtcacagaatgagggtcccacatgcaggatttcagtctgatttcaaacgatggaaataagaggcaggcaactcacatttcaataccaacttcatgtgctcttgagaaaagggaaatattgaacattcagatcagctttttgctttcttttaactaacaaggtcccagcgaaaacataatccgtgtctaacatatcctattactgagaaaaagcacgtacatgctcctgtgttctcttcacctacctatttcacaat

SEQ ID NO: 171071 - DNA, 391 bp, Homo Sapiens
tgcgtcaccacatcaaacacagcctgcaggcccataggcccaaccagccacaatgactcccaggggcgattgtgaaataggtaggttatacttactgattggcattttgcaattctaaatgtcttagttgtccaccccataaacactatagaagctgaaacacacaaaaagtcacctttgaaggaatataacaatactaagataatttactgtaagaaaaattaaatagcttacccagcacagcaaagatcagagtatttttaaaatgtctatataatgaaaatttcacagtgttctttcctagccttagggtcttcatagtttgtgccaaactaataaaaatgtgaaaaaagttaaggaaaaacattccaagtaataataagaggttaac

SEQ ID NO: 171072 - DNA, 781 bp, Homo Sapiens
tgcgatagtgaaataggtaggtagtaaatggcagagctaacattcaaccttatccatgtctgactacaaagtaatccatccattacttacctttttctcatggtaagcttgtgctttttggtcaacaccatgcactgtgccttgagtacatgtaccaacattggaagaccattcccatgtgatatttgtaatagaattaggtattcaaatcacgcattcttgagacaattaaagaatgtaggatttatttacatacaaagttgagagaacgtgcatcatgctgtgtcaggcttcctttccatgattctgttagttttcagtgcaggtatttgccacctgacttgggtttcctagatgtctataatcaatgaaatattttctctttttaaaaactatttttaaaatacatgttttaacagtgttgaattacaagatgttttaagataatataaacctggacccaaatttctatgtaaatgtttattttatagagacaagtaaattaaccaaataattcagtgaatcttcattgagaacctaatatgacctaggtaccgtgctaggtgtcagagaccggctatatggtttagtagaaagagaaatggtagacgctgtgccaagcatagtgcctggaacaagcagaaagtccataagaaatatatgttaactgaaaggaagaacaaaatggaaactgtgtctgtctgagtcacccaaattagtaatgtctgtgagtttatttcctcatctgaaatgaagggtaataaacctacctatttcacat

SEQ ID NO: 171073 - DNA, 420 bp, Homo Sapiens
  misc_feature (141)..(151): n is a, c, g, or t
ccggtcgactctatggggatcccccgattgtgaaataggtaggtatggccaagggaaagagaaaataaggggataggaactgggtctcttacctcatagacctgggaaaaaatagggatttggagtcagcattttgaaggnnnnnnnnnnngaatcaacacttaatcactcatttcacacagctggtacctgtctgcattatacaaaggtctgggggtgtgtcttactgaacaggggacagaggagcaggacgtgtccacctggggatgctttcttaccacagtcagcaagaggggctgagagtgtctagacctgctctgaagaatttcagaaaggtcatacgaagtcagtttaggattatgccaagagaaaaaaccacacgtacaaaaatgatcttctggacctacctattcacatcgg

SEQ ID NO: 171074 - DNA, 467 bp, Homo Sapiens
  misc_feature (221)..(237): n is a, c, g, or t
cgattgtgaaataggtaggtgaagagaaagacaaaggggtagaaaagttatttaaagaaatattagcagaaaaatttccaaattgggagacaaatataaatatccaggtacaggaaggtcaaaattgtccaatgaaattcaatctaaacaagactacaccaggacatttgataaccaaaccgtcaaaaatcaaggacaaagagaggatcctgaaagcagcnnnnnnnnnnnnnnnnntctcacataataaagttccaataaggttagtagcagatttcttggcagaccttacatgccaggagcgagtgggatgatatattatatttaaaatgctggaggaaaaaaacctgtcaagcccaaatactacagcctgcaagctatccttcagaaatgaaggagagataaagacattccagacaaacaaagctgagggagttcaccatcacctacctattcacttcgtgccg

SEQ ID NO: 171075 - DNA, 313 bp, Homo Sapiens
acaagtttcagatttgtattaagcatacttaatatcaacctttgtcatatgtgataacatcctttatgtattttatgagactctgatttttaaaatatctatttctatgtatttcttgcataatataataatgaccaaaaattcctatgattgtgccacttaagcacattgtgggaaattaagttactaaagagagtgcaagaaagaaatgatttatgaaatgaaaactggttgaatatcacaagaatatttgtatgtgtatagactggacacacagagtttcttgtttctatttgacctacctattcactag

SEQ ID NO: 171076 - DNA, 488 bp, Homo Sapiens
cgattgtgaaataggtaggtgtggcctaaattatctaatgtaataaagtcagaccaaatgcatactttatagtttcaagattttcagtacataaaatctgtgctttcctacctggacatgtcccattaaaaagtgggagattttaaataatttctttacagatgttttatttaagcaggtagcacaatctactaatgttgtttgactctgtgtttgttatactggttgtaattaatttttttaattcatgaactagcagaaaatttattaaattaactattaactacattcaccttgtaaattactgtataaaacttgttgacaatgcactgactttagaaagatgttaatgtacataaatagagtgtaaataaaatagtgttgatgtaccgaaatatgaactgtataaaaagtattggtaattgtatatggggtgtacctgtttatctgtaactagtatacaaacaaattaaatactgtggatgcct

SEQ ID NO: 171077 - DNA, 783 bp, Homo Sapiens
  misc_feature (22)..(22): n is a, c, g, or t
acaagggaaggatagggggtgnttaaggggtagtttaccacatgattcattcaacactaggtaattttatttcaaaatataaatatttcacattaataaagaagttacatcagtaggttgtcaaagcaagttagctaagaaacagcatttgtgtgagaacagagggtatttattgtattcgaatattcttttttacttttgaattgcctccttcacctgagaacccagggatgatacattttcaaagagttatgtaagcaattacaactctatatcaaatcttagttcaaaatcaaattgtactggaaatacacttcagttacctaaataagtggcactgcaaagggcaaagaagggttttctttgggatggctacaatgagagttacatctgctgggtctctgcaataaaaaataaatgatatttgataataagccaaaattatcaggatttgcttccatacttttcactgtaaaataaaaagctagcaaaaagctagtaagaaaccagatgtctagtaaagaactctggacttggagtcagaagttctgcaactaaattctggctccatcattttgtggtataaacttaggggaatatcaccaaaaacttttcagagcctccagagcccccccatctgtacaataaggataatattgtctgtctcacagggctgttacaaaaggtgtctgaaaactataaagtgccatacaaaagcattattaaaatgtaatatcaatatatcacctacctatttcacaatcgggggatctctagagtcac

SEQ ID NO: 171078 - DNA, 774 bp, Homo Sapiens
cagctcgactctagagagtcccccgattgtgaaataggtaggttccaatccattcttaatatcagcaaaattttcatatttgagagcctggaccaattgtaataggtacatcaacaaatcctcatcatcggcctgtcgcaaccgggcaacagcataacgcctcacagttgggttggtgtaatgagaggataacagctccaaggagtcctctacatccatcggctgccattttcccagaagttccaaggcctgtttggcctcttgaggtagatcccaattaacacatttcaagaattttgtcaaggctttttcttgattcgtaagataatatctaaacttccaaacaagatcttgctcttcatatgtaagttgcttggttggtggataactcacaataatatttaactgatctctcgtggcagcattgggtttcagatcgtggtcagaaggtccacttcttaaactccgggcaagcttgtggtgtttgctctcaactaaattctccatagacattctgggggtcaggaactttcactaattcaaaactagttaaaattggagatgattcatcaccgtccttttcataataaacaataccatattccttatcatcacacttgacacatcgaaattcaaccatcaggtacatgaaattagaacttcgtttttcactctcatttatcatttctatttctctaaatgtcaatctatccagccaatctactttcaccatgtgtccttgtcgatgagctttggtgagcttggcaagacggc

SEQ ID NO: 171079 - DNA, 393 bp, Homo Sapiens
accggattgtgaaatatgtaggtagaatagacagactttggcgatggaatggatgtggataggagagaggtcggtgtccaggattatttgcagactgtggctgatgtacctaggcaagcagtgggatcatttactgagaagataaaacactggattggctgtgggaagatcaaaagttcagttttgaaagtgttaagtgagagagacaagtggagatgtcaagtaagcaattgcatgtatcagtgtgaaactcagaaggaaggtcttccagcatctttccagcttaagaaggaatatctttttttgaaagaaaactttgaagttgaaacatgtttacattttcttgggtattttagcaacaaacctacctatttcacaatcgggggatcctct

SEQ ID NO: 171080 - DNA, 456 bp, Homo Sapiens
tgtgtcgtggtatcctaccctcatctctgaaagggataatactgaataattattagaaaactataaaacttcacagacttagtaccattaaaacctaaaattttaatcttgtccttttttactatggatcagtcggcactcgggaacagcagcgaaggaaaaaaagcaaatgtcattcacatgttctgtgttcatacctcttctctacctaattgttcatttaaatttcagccttattccttgataagggattttaccacatgaagtcatccagtgaccctagctcttattgtgaagttagtggagtatacttagaaatgttacaactttaaaatgttacaaacattcattaaagctcatatttaaagtagagcatctagtttgagaaatagaaatcattattaaagatgtcttttttctacaccatttaagtagttaaaaccacgaccagtgcag

SEQ ID NO: 171081 - DNA, 281 bp, Homo Sapiens
  misc_feature (264)..(264): n is a, c, g, or t
tgtagattgtgaataggtaggccaataatgataataaatgttcgtgcccccagttgttatctctaaggataagagtaatcaatgatcattcagcagatatagcttatatatgggtggcagtttacaaattataaattgattttacacatattttcttctgctacccaagacacaataaagatggtttatctttgcatccccaatgcctagcaatgagattggcacacaatagataactactatagtggcattcttcagacaacnaatcccttgcgtatgcg

SEQ ID NO: 171082 - DNA, 263 bp, Homo Sapiens
  misc_feature (20)..(20): n is a, c, g, or t
  misc_feature (26)..(26): n is a, c, g, or t
  misc_feature (61)..(61): n is a, c, g, or t
  misc_feature (78)..(78): n is a, c, g, or t
  misc_feature (115)..(115): n is a, c, g, or t
  misc_feature (122)..(122): n is a, c, g, or t
  misc_feature (220)..(220): n is a, c, g, or t
ttgcaccagtacgctgaatncccacnaagtcacacagccagtcgccgtccctcgacggtgncaacctgtaccgcctcngtcttgccattgcaagaatggtaccggcgttttggcncgggctnggccgaatcgcggatcgatgcctacggtgccctgaccggcggcccactgatagcaggcgggcttcctggccaactgcgcataagcctgaattcagcanccacgcaccgctatggccatcgcatcgacctggttgagtctca

SEQ ID NO: 171083 - DNA, 325 bp, Homo Sapiens
  misc_feature (214)..(214): n is a, c, g, or t
  misc_feature (229)..(229): n is a, c, g, or t
  misc_feature (244)..(244): n is a, c, g, or t
  misc_feature (248)..(248): n is a, c, g, or t
  misc_feature (258)..(258): n is a, c, g, or t
  misc_feature (273)..(273): n is a, c, g, or t
  misc_feature (289)..(289): n is a, c, g, or t
  misc_feature (305)..(305): n is a, c, g, or t
ctggtgccgtaggcggcggtggagtcgaggttgatcacggcactgttgtggcggccgcttgccgatgaccagcaccagcacgttggaaccgttcagaccgcgcaggctgtaggggcgggcgacgctgtcattggacgtaccggaagggcgttgggagaacgatggcaaggatttctgcagcgcaccgcgcaggctggattcgccagtctgttcnaactgcttgctgtcnatcacgtcgatcggngccnggctactggngacggtacgcacatngctgcccgcgagccgntgacgatcaccgtgtngagtgcagcgtcagcctcgg

SEQ ID NO: 171084 - DNA, 824 bp, Homo Sapiens
  misc_feature (311)..(350): n is a, c, g, or t
ggatgttccattcctttggtcaaggagttaaaccctgttacttctggaccaattaggccatatttattctctaaagtaaggttctgtgattttacccatatagcaaaggccaaggagggaaagtggcaaaagccaaaacaattttcataagtgaggagtcatttaatgtctttctgggctggtcttaaaattttaaagttgatataattttcaattctgtttagcattcttatttatggggatttctagctattaaagaagttttatcccacattttagatatatcaatggcatcagatccaccccaaagnnnnnnnnnnnnnnnnnnnnnnnnnnnnnnnnnnnnnnnnctatttaatttaccaccaggagtcaacacacgtttccaaattccacaaatggggctttcttaaggttcacacatttgactctataaatgatcgctttggtttggctgcagtgaggtggctcctgtgggcttcattactaatatgaggctgctgtttggagatactttcctggtacagatgagaaacagtcttagttatcctgttctcttgagagtggactggaatttggcacttgctttcttctagctccttcacttgtgccccattgtggacacttgcactcagggtagaaacagaacaggttttggcttggttattatatcctcccacttgcatgagagagggcttctcagtgttagcagactgcaggccagctgcagaagacgtgtttgtcagcagcccctctggtgccggacagtgccagctgcggcttggaggattgctctgctgttggaacctcgcagtcttatcccc

SEQ ID NO: 171085 - DNA, 273 bp, Homo Sapiens
ttacattcgatgtcgaagcactgatcaagctgcgtagccagacgcgggcgatctccgacgcgctgaaggcgcaggcggcggattaccttgccaccgtggcgccgctgatccgtccacaaaccctgtttggcgaatacttgcaaggcgcccagcgcagcagcgggcgcgaaacgcagggccatttccagtccctgatcgaactcttcgatcgcatcggctcggccgcgccgtttcagctggtcaacgaactggaagtgccgctgaacctgatca

SEQ ID NO: 171086 - DNA, 271 bp, Homo Sapiens
tccatcttgtacagcaacagccatgaccgcagcaattgcgaaaaccagaggcttgattgccatcgagggtttcatggtgattctccgtactctattaggttaagtgtcgttcttaactgaagggtcaatccgcgacccggatgctcaaggtgttggccatgcggtttcccaccccggcactctggttcaactggatcacgccacggctaccggtgaaggcctgatcactggtggtgacctggcgatagccggctggaatgtcagttgctcc

SEQ ID NO: 171087 - DNA, 169 bp, Homo Sapiens
ctgatgatcatcgagttgtccagctacctggacagcggtggcgcccacggcatgccggggcgtggcttcatcaactactcgcgcaagctggacaaggtactgaccctgcaggacatgttggtgccgggccaggaggacaccttctggaaaaccgtcgaggagtcatcag

SEQ ID NO: 171088 - DNA, 208 bp, Homo Sapiens
ccctatcgaagggaacctcaccgcccgaagcgccttccagttcccgctgctgatcggctccgaggcgctcaagcacttcgacgcgctggttgacccaagccttaaatatgcggccggcaaacctgcctgtgccaccgacgctcccaaagcagagtaatcacgatgcgctctcttaccctccatctgaaagtcctgatcaccgtactgg

SEQ ID NO: 171089 - DNA, 194 bp, Homo Sapiens
tggcggtcacggcttatcagatcttcttcctcggcttcccggtgaccgaggatgaaaccgacgacctgtggaacatcgacgccaaggtcgagttcgtggccagcaccaaggacccggtcaaggtgcagatgttcgtgccgccgctgaaccgcgactccgtcagcctgaacgagagcttcatctccaacaactac

SEQ ID NO: 171090 - DNA, 299 bp, Homo Sapiens
ctgtgaagatgcagggtattcgcggttagacggaaagaccccccaacctttactatagctttgcactggactttgaatttgcttgagaaggataggtgggaggctttgaagtggggacgccagttctcatggagccatccttgaaataccagccctggcaacttttgagggtctaactcaggtccggtatccggatcgaggacagtgtatggtggggagtttgactggggcgccctcctcccaaagagtaacggaggaggagtcatcagggggaccgggtccgaattcgtaaacatggg

SEQ ID NO: 171091 - DNA, 722 bp, Homo Sapiens
  misc_feature (139)..(168): n is a, c, g, or t
ccccttgcagttctctctgatttggtttgttctgtctcaggcttctgtggcaggactggcccagggaggaggaagccagcagcacacctggggaatggggtcccggccgggaggcttggcctctgggcgacctcgtccnnnnnnnnnnnnnnnnnnnnnnnnnnnnnnaaaggtaaacctcctgggccgcagatggcaaagggagtgcctgggcctggtgacccagggctggatccacccctgcggagccctgggccaggcaggtgtctgctgctcacctggctctggagggctgccctgcagcttgggccctggggacaggtcggctgtggggcagctcagtaccctccctgaggctcacggtggctccgagcatgaggtccgcctcctgggcgagacccagcagtggacagcatggtcctcacacccagctccctgcacacccaggacagccaccccctcccgctcgtgcacaggcacggcaaatgcgctcacacgtacacccacaccaaatgcaccccccactttgcacattgctcaccccacatggtttcacaacatggcacaactttcaggcttcacaaaatgggttggttccacgcattacaccaccccggcaacattacttcccttggcacacattggtttcccccttggccattgttgtttgggggcccccttcgggaaaacggaaaacaattcttcctccccacggtgcaacc

SEQ ID NO: 171092 - DNA, 209 bp, Homo Sapiens
gcctctactactactatacggctgcgagaagacgacagaagggcagagtctgaggcgatggctcctggtcccctgtccgccacacaggccgtggtcatccacacaactcactgtctgcagctgcctgtctggtgtctgtctttggtgtcagaactttgggggccgggcccctccccacaataaagatgctctccgaccaataaaaaact

SEQ ID NO: 171093 - DNA, 872 bp, Homo Sapiens
ctggacgaggcccgaccgcgagccgtccaggtctcagtgctgtgccccccccagagcctagaggatgtttcatgggatcccagccacgccgggcataggagcccctgggaacaagccggagctgtatgaggaagtgaagttgtacaagaacgcccgggagagggagaagtacgacaacatggcagagctgtttgcggtggtgaagacaatgcaagccctggagaaggcctacatcaaggactgtgtctcccccagcgagtacactgcagcctgctcccggctcctggtccaatacaaagctgccttcaggcaggtccagggctcagaaatcagctctattgacgaattctgccgcaagttccgcctggactgcccgctggccatggagcggatcaaggaggaccggcccatcaccatcaaggacgacaagggcaacctcaaccgctgcatcgcagacgtggtctcgctcttcatcacggtcatggacaagctgcgcctggagatccgcgccatggatgagatccagcccgacctgcgagagctgatggagaccatgcaccgcatgagccacctcccacccgactttgagggccgccagacggtcagccagtggctgcagaccctgagcggcatgtcggcgtcagatgagctggacgactcacaggtgcgtcagatgctgttcgacctggagtcagcctacaacgccttccaacggcttcctgcatgcctgaacccgggggcactagccctttgcacagaaaggcaaaatctgaaggcgatgggctccggggtcccctggccccccacccagggcctgggtccatcccacacaaattcactggtctggcaacctgcccggtgcctggggggtc

SEQ ID NO: 171094 - DNA, 883 bp, Homo Sapiens
ccgcgagccgtccaggtctcagtgctgtgccccccccagagcctagaggatgtttcatgggatcccagccacgccgggcataggagcccctgggaacaagccggagctgtatgaggaagtgaagttgtacaagaacgcccgggagagggagaagtacgacaacatggcagagctgtttgcggtggtgaagacaatgcaagccctggagaaggcctacatcaaggactgtgtctcccccagcgagcaggtccagggctcagaaatcagctctattgacgaattctgccgcaagttccgcctggactgcccgctggccatggagcggatcaaggaggaccggcccatcaccatcaaggacgacaagggcaacctcaaccgctgcatcgcagacgtggtctcgctcttcatcacggtcatggacaagctgcgcctgggagatccgcgccatggatgagatcccagcccgacctgcgagagctgatggagaccatgcaccgcatgagccacctcccacccgactttgagggccgccagacggtcagccagtggctgcagaccctgagcggcatgtcggcgtcagatgagctggacgactcacaggtgcgtcagatgctgttcgacctggagtcagcctacaacgccttcaaccgcttcctgcatgcctgagcccggggcactagcccttgcacagaagggcagagtctgaggcgatggctcctggtcccctgtccgccacacagggccgtggtcatccacacaactcactgtctgcagctgccctggtctggtgtcttgtcctttggtgtcagaaactttttgggggggccggggccccccttcccccacaaataaaagaatggctcttccggaccctttcccaaaa

SEQ ID NO: 171095 - DNA, 811 bp, Homo Sapiens
gccggagctgtatgaggaagtgaagttgtacaagaacgcccgggagagggagaagtacgacaacagtggcagagctgtttgcggtggtgaatgacaatgcaagccctggagaaggcctacatcaaggactgtgtctcccccagcgagtacactgcagcctgctcccgtgctcctggtccaatacaaagctgccttcaggcaggtccagggctcagaaatcagctctattgacgaattctgccgcaagttccgcctggactgcccgctggccatggagcggatcaaggaggaccggcccatcaccatcaatggacgacaagggcaacctcaaccgctgcatcgcagacgtggtctcgctcttcatcacggtcatggacaagctgcgcctggagatccgcgccatggatgagatccagcccgacctgcgagagctgatggagaccatgcaccgcatgagccacctcccacccgactttgagggccgccagacggtcagccagtggctgcagaccctgagcggcatgtcggcgtcagatgagctggacgactcacaggtgcgtcagatgctgttcgacctggagtcagcctacaacgccttcaaccgcttcctgcatgcctgagcccggggcactagcccttgcacagaagggcagagtctgaggcgatggctcctggtcccctgtccgccacacaggccgtggtcatccacacaactcactgtctgcagctgcctgtctggtgtctgtctttggtgtcagaacttttgggccgggcccctccccacaataaagatgctctccgaccttccaaa

SEQ ID NO: 171096 - DNA, 202 bp, Homo Sapiens
ggtctatcaatgaatgtgaaattcatgcatgcaaggtaattgcctgagcttgtttccagttacatagtcactaatacaaacactacagattttacctagttcactatcaatactgttatgctcatagtgcctggtggaaagattgtcaatctgctctttggttaaaccacgtattcgatcatcatcatcactttcatttagt

SEQ ID NO: 171097 - DNA, 919 bp, Homo Sapiens
  misc_feature (599)..(599): n is a, c, g, or t
cccttgtagcccccttcctagaggcgaaccctccgccccccacccccaggcactatctgtcctgcttgcacccacctccacccagggctgccgacaatagccctgtttcctctccattccacccctctcccccaccctcccatcccaccacagaagaggattactggttcctgctttccttagcgcccctaaatttaaaggtatctgttctatgttgcatgcttcagaaccctgtagaaacaaccagcaaatccactgttgatacgcaattacccctcttggatgcatctgcaacaagcactccccagcttcgaaggggcagcaaagaagttcacaattacaagaccatggggtcacgaccacagaagcgatatgaaacaggtcccgggacacagggaggggcagaaagaattctttgagtaagcctggaaggtggaggggctcaccaggccaagagcaggtgctaggccttcagtaggaacagtgcgagccaaggcacagaggccaaggggagcgagctgtagctgtgatggtgggcagctggaaggccgcacgtataatcaacaggggacccacatcaaaggggagatcttagccanaaccagcacataggggccttcaattccatgaagaatttagatgttatccagtgagccatgggaagccattgaagcgttttatctagggtagttaagtgggcccagattttcattttaagaaatcattctatagaaggaatctcaaacctcacctgactgcttttctccccccagggttctaagctctacttaaaagcctatataaaaaagtatagatttgcttcctacagacttgaaccatgccctaaggatttaattctaaggggcctgtgaagtttagctactttactcatttttctaaagaaaagttggccgggcgc

SEQ ID NO: 171098 - DNA, 1050 bp, Homo Sapiens
tgctgtccagtgaaagagagtgacttacttcatcgtgcgggctgtactctctaaagcaccattacagggaagaagactgagaattattgtttgtgccctccaccaaaaaaatgtcaccagcgaccttgtccagacggaggattctggaatcttcgaggattcctgtttctgttccttttcctcagcaacctcaactgccaagacatgtccatcctgcctcaatgattcctttgccactcttgggctcccttcaaagcaaagggacaggttcttactgcagaaaggatccttgtaggtgtaagcctcaaagtgaactgtctacttgatcggaaaagagttggaccccccgtactcctttctggatgataaaatggaggattctggagatggctcactgatgtcgctggtcttacctgggcccccttgcaggacctggtcaataatctggtgcatgaactcggtggagctgtctgacagcgcatggctggaaacaccatccaggcggaattccttcatgctctcgggcttgtcacagacaaagactttggagggtggtgggtggctggtttcatggttaacagtgtaggtacgctccccattttcagtcagaacgaagactttgctctcctgttcagaaggagtttctttgatgcgaacaaaagtggattcgataggaacttctttatctgaatcgaaaatatcttcggcttccaactccggaaaacgttctagaaactgtgccacgtaagtcatgatagactgctcgtctggtgtgtcaaccatgatgtcttctggctccaggagcctggggatgtgcagggcatcctgtgcgatgctgaaagccttctctagattttctcgtgtggaattttccagggcctgtttcatgtccaccaggctggggtcaatggccttgatcaccgccaggaaagccagcccactcctccaactgcccgcaaagtcctgcaccgccacgccatactttctcgttttcctctgcacccacgccaacagggccttgatagccttcctctggtctttcaccgatat

SEQ ID NO: 171099 - DNA, 246 bp, Homo Sapiens
tgtctagctgcttccagtgtatcccattcaacttgcggtgagcacgtgtatactaagtgctcatccctggaagacagccatcagaataataattgtcattgttaccatcaccagtgtcagtcagggtccagtcgagagaacagaaactgtaccgttcagataaacagagaaattttggtatagagaattagaccagcacggtggctcatgcctgtaatcccaacactttgggaggctaagcaggag

SEQ ID NO: 171100 - DNA, 891 bp, Homo Sapiens
  misc_feature (704)..(704): n is a, c, g, or t
ggatccaaactttcctttaaagagagtttttcataaagttgctaatgtaaactgatatgggtgttccaaggtccctcggcagggaagatttgctggtgattttcttcactccattttcctttgggtgagcctgcctgggaagggccatgaagtcagaatctccactctgcaaaaggaagaattccaggcagaagaggttctgacagggtgacatttccgtatattctctaggttcggacaagagccaggaagctggaagacagtttatcttaatatccaaaactaagtgggaatttttaaccttttcatgcacctattcatggccctacctggaaggaacttggcagttgggttgagccatcagccttcccagctattcagctctgttgagtagcccagagacaggcgtcacggtcagagattcagaacggtctgtgtcagtgaggcctgactcccaaagatggtagcaatttcccaggcttgcgctgtgctcagtcagcaagatgtggggcactgtcctatgactgaataaatagtaattcccatctttctatcgccagttaaaaataaacaacctaccaagtattattctttaaaactaagcatggatgttgatggctaacttctgcggcatataagctacagatctcaagttacttctctaactgtaagcatgtaaaatgactttaactcctttctataangttatgattttaaattttcagataagaattgcattttaatatggatatgtgtgcccttaaaagctacagataccaaattttcctcgtccaggtctactcggacgaattttcccccttaatctggccttaactgagactcggccttgagagccaggccctggccagcagtaagttgctcatagactgg

SEQ ID NO: 171101 - DNA, 429 bp, Homo Sapiens
aggtgccaggctgggtgctgctcagtcccccttgaatgacctcaaccggcagctggtgaacatgggctttccgcagtggcatctcggcaaccatgctgtggagccggtgacctccatcctgctcctcttcctgctcatgatgcttggtgttcgtggcctcctcctggttggccttgtctacctggtgtcccacctgagtcagcggtgacctctgagggctgataggggtgggtttgttgagagggacttgctgggccttggtgtgagagcaggcatatttggaggggatctggtggtgccttgaaggtatgatcagagaggggaccacaggtgtgtgcttcccctttgtgttaagcgtgaggcagagggagacgttagtccagcatttccaaagtattttgggaaccaacggacccacccacgtcgacg

SEQ ID NO: 171102 - DNA, 1014 bp, Homo Sapiens
cttaagattctccgtagagaagtctctattatagttacacaatatcaagacatgcatgtaggtctcgatcacaagttaaacattttaaactcatttttaattgacaatcttggaatgagaggtcacaaaagggcactaatttctatttttcaactgcagccaagcaaaataaacatgtgttgtggctctatataccccactctttaagctacctgccaggaagaagaatttcctcataaatactaagcaactttttcattacactgaaataaattgaagaaaacggagatttatttattcaatcagtttactttctgcaaaggtggtcattgtcattggtcatcttaaacctaaactgttgtattgaaaaatatttaaaatcaattaaaacttgaggattgtaagtaaaataaatattctgaaggataaggaggccaggcacttaagaccatatatacaatgctgatgcaggatcagccattacttcaagagtctcaggatcaacttcaaacagtcaaagttcttgtgaatggcggtggtcattgatggtggtgctcattgtcgatgtgtcttggcttactttacacaaaacaaactggcccaatttcaacgccgaattcctggtctgtgccgccaacatccacaggagcaagatctatgatgggcaagcgtgccacattctgtgttctatattcaaagacagtcttgcccacatttccattccgcttagagcaagtgtcttgaagaacgatataccggaatctaatatttccctctgctttgatatctaagtcatttgcccctttgagaaccacagcttttttgaggttcttagcttgatcgtccatgtatcctacactgtttttacagatgtaagtgatgttctgggaggcttcttttgataaaaggcgcaaaaaagtcatctgagtaatggctgtattaggtgattggtggtctccataagcgaactgagaccctctgttcatatcaatgaccaacaatttattggggtaa

SEQ ID NO: 171103 - DNA, 937 bp, Homo Sapiens; identical to SEQ ID NO: 3396
  misc_feature (676)..(676): n is a, c, g, or t
  misc_feature (723)..(723): n is a, c, g, or t
  misc_feature (730)..(730): n is a, c, g, or t
  misc_feature (799)..(799): n is a, c, g, or t
  misc_feature (843)..(843): n is a, c, g, or t
  misc_feature (846)..(846): n is a, c, g, or t

SEQ ID NO: 171104 - DNA, 877 bp, Homo Sapiens
ggcagccagacggtggggtggcagctagcagggggtgtggtgagtgggcccagcacgtcggagcggtaccagcccaggcacctcaagcgcctacaccagcgacagccctggctcctaccacaagtgaggaggacgaggaggaggatggtggcgaggagggcatggatgagcagtaccggcgagatctgcaacatgtacaccatgtacagcatgatgaacgtcggccagacagccgagaaggtggaggccctcccggagcaggtagcccccgagtcccgaaatcgcatccgggttcggcaagacctggcgtctctcccggctgaacttatcaaccagattgggaaccgctgccaccccaagctctacgacgagggcgagccctctgagaagctggagctggtgacaggcaccaacgtgtacatcacaagggcgcagctgatgaactgccacgtcagcgcaggcacgcggcacaaggtcctactgcggcggctcctggcctccttctttgaccggaacacgctggccaacagctgcgagaccggcatccggtcttctaccaacgatccccgtcggaagcccctggacagccgcgtgctccacgctgtcaagtactacttggcagaaacttcggccccaagttcaagggagagcgagatgaatgccatcgcgtgcgacatgtgcaccaacgcccgccgcgtcgtgcgcaagagctggatgcccaaggtcaaggtgctcaagggctgaggatgacgcctacaccaacttcatcagtgaaacgggcaagaatcgagccggacatgatgggtgtggagcattggttcgagaccgccagcacgagggcgaggcagggtcctcggtgaaggcctggagtaacccg

SEQ ID NO: 171105 - DNA, 1220 bp, Homo Sapiens
  misc_feature (654)..(667): n is a, c, g, or t
ccattgggggtcggagctcggtcctgctggaggccacgggtgccacacactcggtcccgacatgatggcgagcatgcgagtggtgaaggagctggaggatcttcagaagaagcctcccccatacctgcggaacctgtccagcgatgatgccaatgtcctggtgtggcacgctctcctcctacccgaccaacctccctaccacctgaaagccttcaacctgcgcatcagcttcccgccggagtatccgttcaagcctcccatgatcaaattcacaaccaagatctaccaccccaacgtggacgagaacggacagatttgcctgcccatcatcagcagtgagaactggaagccttgcaccaagacttgccaagtcctggaggccctcaatgtgctggtgaatagaccgaatatcagggagcccctgcggatggacctcgctgacctgctgacacagaatccggagctgttcagaaagaatgccgaagagttcaccctccgattcggagtggaccggccctcctaactcatgttctgaccctctgtgcactggatcctcggcatagcggacggacacacctcatggactgaggccagagccccctgtggcccattccccattcatttttcccttcttaggttgttagtcattaattnnnnnnnnnnnnnngtggaaggaaaggagctatgagtgtgtgtgttgtgtatggactcactcccaggttcacctggccacaggtgcacccttcccacaccctttacattccccagagccaagggagtttaagtttgcagttacaggccagttctccagctctccatcttagagagacaggtcaccttgcaggcctgcttgcaggaaatgaatccagcagccaactcgaatccccctagggctcaggcactgagggcctggggacagtggagcatatgggtgggagacagatggagggtaccctatttacaactgagtcagccaagccactgatgggaatataccagatttaggtgctaaaaccatttattttccacggatgagtcacaatctgaagaatcaaacttccatcctgaaaatctataatgtttcaaaaccaattgccatcctgttagattgcagttcctgggaaccaggctcagactgtgaaagtatatattctccagcattcagtccaggggaggcacggaaacatgttctggtttagccattaaagtcgagatgaaac

SEQ ID NO: 171106 - DNA, 609 bp, Homo Sapiens
gactctatgaggatcccccagccctcacatacctacagccacacacacacataaactaatgactaacaacctaagaagggaaaaatgaatggggaatgggccacatgggggctctggcctcagtccatgaggtgtgtccgtccgctatcccgaggatccagtgcacagagggtcagaacatgagttaggagggccggtccactccgaatcggagggtgaactcttcggcattctttctgaacagctccggattctgtgtcagcaggtcagcgaggtccatccgcaggggctccctgatattcggtctattcaccagcacattgagggcctccagggacttggcaagtctttggtgcaaggcttccagttctcactgctgatgatgggcaaggcaaatctgtccgttctcgtccacgttggggtggtagatcttggttgtgaatttgatcatgggaggcttgaacggatactccggcgggaagctgatgcgcaggttgaaggcttccaggtggtagggaggttgcgcgggtaggaggagagcgttgccacaccaggacattggcatcatcgctggacagtccgcaggtatgtgaggctgggggatcctct

SEQ ID NO: 171107 - DNA, 1214 bp, Homo Sapiens
  misc_feature (542)..(592): n is a, c, g, or t
cgatccatcaatacctgcggaactgtcagcgatgatgcatgtctggtgtggcacgctctcctcctacccgaccaacctccctaccacctgaaagccttcaacctgcgcatcagcttcccgccggagtatccgttcaagcctcccatgatcaaattcacaaccaagatctaccaccccaacgtgcacgagaacggacagatttgcctgcccatcatcagcagtgagaactggaagccttgcacaaagacttgccaaagtcctggaggccctcaaatgtgctggtgaatagaccgaatatcagggagcccctgcggatggacctcgctgacctgcttgacaaagaatccggagctgttcagaaagaatgccgaagagttcaccctccgattcggaggtggaccggccctcctaactcatgttctgaccctctgtgcactggatcctcggcatagcggacggacacacctcatggactgaggccagagacccctgtggcccattccccattcatttttcccttcttaggttgttagtcattagtnnnnnnnnnnnnnnnnnnnnnnnnnnnnnnnnnnnnnnnnnnnnnnnnnnnatggactcactcccaggttcacctggccacaggtgcacccttcccacaccctttacattccccagagtcaagggagtttaagtttgcagttacaggccagttctccagctctccatcttagagagacaggtcaccttgcaggcctgcttgcaggaaatgaatccagcagccaactcgaatccccctagggctcaggcactgagggcctggggacagtggagcatatgggtgggagacagatggagggtaccctatttacaactgagtcagccaagccactgatgggaatatacagatttaggtgctaaaccatttattttccacggatgagtcacaatctgaagaatcaaacttccatcctgcaaatctatatgtttcaaaaccacttgccatcctgttaaaatgccagctcccggggaccaggccctcctactgtgaaagcctattatcccccccgcatttcagcctccaggggggagtcccgccaaaaccctgtgttcttggtttttaagtcccttttatagctcctgcatatccgccttcctcctagcccttttcccatttactccaattcccccttatcgtactctcgctaagacggtcactccttaatggggtcccc

SEQ ID NO: 171108 - DNA, 454 bp, Homo Sapiens
ggagggagtttaagtttgcagttacaggccagttctccagctctccatcttagagagacaggtcaccttgcaggcctgcttgcaggaaatgaatccagcagccaactcgaatccccctagggctcaggcactgagggcctggggacagtggagcatatgggtgggagacagatggagggtaccctatttacaactgagtcagccaagccactgatgggaatatacagatttaggtgctaaaccgtttattttccacggatgagtcacaatctgaagaatcaaacttccatcctgaaaatctatatgtttcaaaaccacttgccatcctgttagattgccagttcctgggaccaggcctcagactgtgaagtatatatcctccagcattcagtccagggggagccacggaaaccatgttcttgcttaagccattaaagtcaaagatgaattttgg

SEQ ID NO: 171109 - DNA, 1015 bp, Homo Sapiens
cctgggtggcgtttcggacgaggaaatcacgctgccgctcgcgcctctcgatgggcagctcgcacttgctcaacaagggcctgccgcttgtaagactttgaccccgacgcaggcttcagtgattgccgcggatcagaagcctgagcactttggctcgagacaattaaggacgtgggatgaggctccgagacaggacgcggttctgcctggggatcctgaagataaaaagctttgaaaagtcgaattcatggtcgtggaagctgagcccatattaagagatgtcaggcgtccgacctccgatcatgaacgggcccctgcacccgcggcccctggtggcattgctggatggccgggactgcacagtggagatgcccatcctgaaggacgtggccactgtggccttctgcgacgcgcagtccacgcaggagatccatgagaaggtcctgaacgaggctgcgggggccctgatgtaccacaccatcactctcaccagggaggacctggagaagtccaaagccctccgcatcatcgtccggattggcagtggttttgacaacatcgacatcaagtcggccggggatttaggcattgccgtctgcaacgtgcccgcggcgtctgtggaggagacggccgactcgacgctgtgccacatcctgaacctgtaccggcgggccacctggctgcaccaggcgctgcgggagggcacacgagtccagagcgtcgagcagatccgcgaggtggcgtccggcgctgccaggatccgcggggagaacttgggcatcatcggacttggcagcccactcctgctgaccgctgtccttgtcccgccagcgtttggggaatccggacgttccgggtggtctcgggggaggcgggccacacctaaggtcccgtgggggcagggcagtgggcgcctgcgggccacagggcccttccgggcttccaggggggttccttcctacgacccccttaatttgttccgaaatgggccctgggaaacgcgggccgccttggc

SEQ ID NO: 171110 - DNA, 933 bp, Homo Sapiens
tctcggacgaggaatcacgctgccgctcgcgcctctcgatgggcagctcgcacttgctcaacaagggcctgccgcttgtaagactttgaccccgacgcaggcttcagtgattgccgcggatcagaagcctgagcactttggctcgagacaattaaggacgtgggatgaggctccgagacaggacgcggttctgcctggggatcctgaagataaaaagctttgaaaagtcgaattcatggtcgtggaagctgagcccatattaagagatgtcaggcgtccgacctccgatcatgaacgggcccctgcacccgcggcccctggtggcattgctggatggccgggactgcacagtggagatgcccatcctgaaggacgtggccactgtggccttctgcgacgcgcagtccacgcaggagatccatgagaaggtcctgaacgaggctgtgggggccctgatgtaccacaccatcactctcaccagggaggacctggagaagttcaaagccctccgcatcatcgtccggattggcagtggttttgacaacatcgacatcaagtccggccggggatttaagcattgccgtctgcaacgtgcccgcggcgtctgtggaggagacggcccgactcgacgctgtgccacatcctgaacctgtacccggcgggcccacctggctgcacccaggcgctgcggggagggcacacgagtccagagcgtcgagcagatccgcgagggggcgtcccggcgcctgcccaggatccgcggggagaccttgggcatcatcggactgggcagcccacttcctgcctgaccgcgtgtccttgtccccgccagcggttggggggaatcggaacgttttcggggggtgctccggtgaaggcgggccccaccctaaaggtccccgggggggccagggaagtgggcccctggggtac

SEQ ID NO: 171111 - DNA, 843 bp, Homo Sapiens
aggagcctggagaggaagacacacagaatgatctgaaagttcatgcaggaaaacaccacaattgaagagttagaggcgcttggagagtccttagggaaaggcgatgatcataaggacatggacatcatcaccaaattcctgaagtttcttcttggcgtttgggctaaagaattgaatgccagagaagattatgtgaaacgcagtgtgcagggtaaactgaacagtgcgacccagaaacagaccgagtcctacctaagaccactttttagaaagctacggaaaaggaatcttcctgctgatattaaagaatcaataacggatattattaaattcatgttgcagagagaatacgtgaaggcaaatgatgcttatcttcagatggccattggaaatgcgccttggcccatcggtgtcactatggttggtatccatgcccagaactggcagagaaaagattttttccgagcatgttgcacatgttttaaatgacgaaactcagcgcgaaatatattccgggattgaagaggttaatgaccattttgccagaaaacactttcctacagaccccatccaaatggggggagtacaatgcactgggagatctgtgtatggggtgttaataacacataagaaaactcatggaacacaggttgcgggactccgggaaattaccccccgggaatggaggaaaagaaacaaaaactgggaatcttccaaagtcctcttgaggttcctacccgggatggtaaactccctggaattgggctatttaacgaaacctttgggttgggccctctccacttttccgaaattctgggacatgttcacaaaccttgaattttt

SEQ ID NO: 171112 - DNA, 1136 bp, Homo Sapiens
  misc_feature (927)..(940): n is a, c, g, or t
gtggcgaattccgcacgagggcacgtccatggccggggcagtaggacaggaaggcagccagggccgtctcctcaaacagcccggaagatcaggatcttgttcttcatgccctgctggaagaccgagttcctccgggtcttgcagatgatcagatcggcccactggacgacaacgatgctcacaaagaaggccgtgtggcaggtgaactccaccaccttcctctgctcgtatgtccactgctgcccgtaactgtcttccaggtcattgacggtgcggtcatcccagttcagccggatgcccaccaggttgccgggcaagaagccattttctgccaggatcacaaagtaagagaagaagccaccgagagcctggatcattccaatctgcccgtaggccatgctgatgaggtctctcattgaccaatttgtccgtccgcgggttcctgggctgtctcttcatgatgtcgctttcggcagcctcgtacgccagtgagatggcagggaccatgtcagtgcccagatcaatgcaaaggatggtggatggtgcccagggggcaccgggatgtttgcccatgatgaacaccaaggaaaggggcgtgatcttccggggatatttgctggatccggggctgtagggccaatgggaactttcgttaaagggttgggccgaaaaaattcaaagcgggcccccatcccctccgaaccccccttggaaaagcttggaccccccttgggcaccgggcattcggaccaagggtgggtccgggcggccaaaaatttcttccgagaaaaacccattggcccctggccgtggaaaacccatgagaggaagtcctcaacatggggctggggtaaccccggcatgtatttcttggggcgggggcatgggggagggagagaggaaggccggggcacaaaatgcgcccannnnnnnnnnnnnncgcctgccgggagcgagtggggaggtcgcgggccccaggagaaggccacgctggggggggcacgcgaggagggtggcatgaaaagaaaaagtccgggctgccgtgggagcgcgcagacgaggagaaggaggggggagtgccgcgcgcgacgagcaggagaggaggtgggcaaggggggagagttaacaaaagggag

SEQ ID NO: 171113 - DNA, 784 bp, Homo Sapiens
tctcttcacttggacatacagagacactggagcagaaatcagatcgcgtcaactcccgccgcgggccttcgcgatgcttcgtttcaattaaccagtcggattcctctggtccgctgaggccgaggcgcttcctgttacgtgcgggcgtcccgctctgtctctgccaggcactctcatgactagggcccgggcatggatgatacctctcttcaggcgctccatggcgctcttgctgccagcataggtaggccggatctctttgcccatctcctctatgactgacagcaggtccgtgtaggtgctctgggagccctgggcgccgggtggcttcatcgcctgcacgtaacaggaagcgcctcggcctcagcgtctggacctatccggccactgcagagcacccgcttctccctggccttcatcccgaagttgcactaaccatcctgggcttcctgtcctgtgtcccttggtgggtcccctcccaggaaccaaggagtggccctcccaggtggcagcactaaggaaacccccccacaacaagagttagcagcgaggtccccatgagtcccacccatgacctgccgaaagtgttgcccaccggaacttttgtggcccctaccgctcagcccttcccagcacttctcccactttgtcccgagcctccttctcccccagcaggggcacaggcctggcacctccctgccttgtgtcctgagccatagtgactcttttatctgtgtgtcttttgctaaatatgccctttttatattaataaaaaatgatttgg

SEQ ID NO: 171114 - DNA, 606 bp, Homo Sapiens
  misc_feature (586)..(586): n is a, c, g, or t
agggaaaagcccccaggaagggtttaaagtgccaaccttcggggaatgaaaggcccaggggaagaaggcggggtgcttctgccagttggccgggataaggtcccagaccgctgagcccgaaggccgctttcttgtttcggtgcgggccgtttccgctcctgtctcttgccagggcactctctgactaggggcccgggcatggatgatactcttcttcaggcgctccatggcgctcttgctgccagcataggtaggccggatctctttgcccatctcctctatgactgacagcaggtccgtgtaggtgctctgggaagccctgggcgccgggtggcttcatcgcctgcacgtagcccatggaaggcggtccaaagtcgttaaacagcggtctgaaaggagcgccggctcctggcactgaagcccgacggcgacgggacgcttcctgtagggaccggggtgcccggcccaggggtgctggagccaggggtgctgctgggagcaggggcgatgggtttgtaggacatccccaactcctgggcgcggcggacgccagccggccgctcctcgggggttggctgcggggcgntcagccgcgctctgattggc

SEQ ID NO: 171115 - DNA, 854 bp, Homo Sapiens
  misc_feature (438)..(438): n is a, c, g, or t
  misc_feature (693)..(703): n is a, c, g, or t
aggtagcgaggcctgggtggcgaattcggcacgaggcttcgcttcgcctgcaaacgcggtgggggctgctcggcggtcaggagcaggttaccctccgtctgcatgcccaccatcaaggtatgaggatggtagaagctctcgtcgaaccagatggatgaagaccactaacggcttttgtttcctctggtaacagcaagagacagagcgacatgagagattggaccgcgggctgcactggagaatttactggtaggataattcatccctaaagagattgaagtgagcttcagaatggcaaaagaggagccccagagtatctcaagggacttgcaggaactgcagaagaagctgtctctgctgatagactccttccagaataactcaaaggtggtggcctttatgaagtctccagtgggtcagtacttggacagccatccngtttctggccttcaccttgctggtgttcattgtcatgtcggccgttcctggtggattcttcctgctcatcgtggtgcttaccaccctggctgctctgctgggggtcataataatggaaaggattggtcatctcctgtggggggctttctcactggttctgaatcctctgggggtttgagcttccgatccctcccccatgttcgggggatgatgaaaaccttccttatggaaggggcttcccagcccttaataaannnnnnnnnnnttttcccccccgggccccttggaaacgggaaaaaaaccccccggttgggggacttttttgggccacccctgtaaaaactctggaaaaaatttccaggggggggtttttccccggaaaaaggaggggaccgggcctcaaagggggcgggggc

SEQ ID NO: 171116 - DNA, 548 bp, Homo Sapiens
gggccaccggcccttacactgtggtgtccagcagcatccggcttcatggggggacttgaaccctgcagcaggctcctgctcctgcctctcctgctggctgtaagtggtctccgtcctgtccaggcccaggcccagagcgattgcagttgctctacggtgagcccgggcgtgctggcagggatcgtgatgggagacctggtgctgacagtgctcattgccctggccgtgtacttcctgggccggctggtccctcgggggcgaggggctgcggaggcagcgacccggaaacagcgtatcactgagaccgagtcgccttatcaggagctccagggtcagaggtcggatgtctacagcgacctcaacacacagaggccgtattacaaatgagcccgaatcatgacagtcagcaacatgatacctggatccagccattcctgaagcccaccctgcacctcattccaactcctaccgcgatacagacccacagagtgccatccctgagagaccagaccgctccccaatactctcctaaaataaacatgaagcac

SEQ ID NO: 171117 - DNA, 778 bp, Homo Sapiens
gggagtgggttcccgcgcgtgccgagactctgaggccttgcacccccacgatcccgtacgatggccgtcaagaagatcgcgatcttcggcgccactggccagaccgggctcaccaccctggcgcaggcggtgcaagcaggttacgaagtgacagtgctggtgcgggactcctccaggctgccatcagaggggccccggccggcccacgtggtagtgggagatgttctgcaggcagccgatgtggacaagaccgtggctgggcaggacgctgtcatcgtgctgctgggcacccgcaatgacctcagtcccacgacagtgatgtccgagggcgcccggaacattgtggcagccatgaaggctcatggtgtggacaaggtcgtggcctgcacctcggctttcctgctctgggaccctaccaaggtgcccccacgactgcaggctgtgactgatgaccacatccggatgcacaaggtgctgcgggaatcaggcctgaagtacgtggctgtgatgccgccacacataggagaccagccactaactggggcgtacacagtgaccctggatggacgagggccctcaagggtcatctccaaacatgacctgggccatttcatgctgcgctgcctcaccaccgatgagtacgacggacacagcacctacccctcccaccagtaccagtagcactctgtccccatctgggagggtggcattctgggacatgaggagcaaaggaagggggcaataaatgttgagccaagagcttcaaattactctagag

SEQ ID NO: 171118 - DNA, 480 bp, Homo Sapiens
actacatacttccgagcgtcgtgatgtgagtaggtatggagaagataatagaggatatggcgggtcacagggaggaggtagagggcgtgggggatatgacaaggatggaagaggtcctatgacaggatcaagtggtggtgaccgcggtggcttcaaaaattttggtggtcacagggattatggacccagaacagatgctgattcaaaatctgataattcagataacaacacaatctttgtgcaaggacttggggagggtgtgtctacaggtcaagttggggagttctttaaacaaataggaattatctagacaaataagaagaccggaaaaccaatgataaatctttatacagacaaggacacaggaaagccaaagggggaggcaacagtgtcatttgatgaccctccttcagctaaggcagccattgactggtttgatggaaaagaattccatggcaacatcattaaagtgtcctttgc

SEQ ID NO: 171119 - DNA, 143 bp, Homo Sapiens
accagggtagacatctggcctcagatagacaccaaggtcccagatgtacagcaggccccaaccgaaccccagactcagtgtggacatcaggccacaggtagacaccaagccttaggtagataaataacttcaggtagacatca

SEQ ID NO: 171120 - DNA, 582 bp, Homo Sapiens
  misc_feature (41)..(41): n is a, c, g, or t
  misc_feature (48)..(48): n is a, c, g, or t
  misc_feature (87)..(87): n is a, c, g, or t
aatcccaggtcctgcggtctccgcaaaatgaagcaaaatgncgctgancagccccgtctcccgccatcatccatctcccagggcaancagctggttggcgaaaggcaaagaccaggtcggtgaagggggccgaagccagcgttgtgcatctgggtccggttcagggtcagcccgtccgagaaggtcatggtgtcctgctcgggcgtgtaccgcgtgcagatccgcaggatcaggatgtcccaggcaggcagccttgaggagggtgatctggtcggcgatggtgagggtggtgaagccgggcagctgcttggcgaactccacagtcttaatgatgcacttggtggagagttcactgaacttgtcccagaggtcaatgtccagagagacacgttgttctgagctgttgttcgtagtgtatttgcccagctggcagagggcagggaaggtttcctggtgcgctttgcgcaccttctcaatgagctcccccacctccggcgtcagcgtgtagctctcagagcactcgggcttgggcacctccttcttcttcttgttcgggcggttctcaaaaaattccttggcatg

SEQ ID NO: 171121 - DNA, 1591 bp, Homo Sapiens
  misc_feature (233)..(233): n is a, c, g, or t
  misc_feature (305)..(305): n is a, c, g, or t
  misc_feature (365)..(365): n is a, c, g, or t
  misc_feature (376)..(376): n is a, c, g, or t
  misc_feature (1382)..(1383): n is a, c, g, or t
  misc_feature (1387)..(1387): n is a, c, g, or t
  misc_feature (1391)..(1392): n is a, c, g, or t
  misc_feature (1394)..(1396): n is a, c, g, or t
  misc_feature (1401)..(1401): n is a, c, g, or t
  misc_feature (1404)..(1504): n is a, c, g, or t
  misc_feature (1576)..(1576): n is a, c, g, or t
aagccgggtcgcgatgtacgactgtatggaaacgtttgccccgggtccgcgacggctgtacggggcggccgggcccggggccggcttgctgcgcagagccaccggcggctcctgtttcgccggacttgaatcttttgcctggccgcaacccgccagcctgcaatcggtggagacacagagcaccagctcagaggagatggtgcccagctcgccctcgccccctccgcctcctngggtctacaagccatgcttcgtgtgcaatgacaagtcctctggctaccactatggggtcagctcttgtgaangctgcaagggcttctttcgccgaagcatccagaagaacatggtgtacacgtgtcaccgcnacaaaaactgnatcatcaacaaggtgaccaggaatcgctgccagtactgccggctacagaagtgcttcgaagtgggcatgtccaaggaagctgtgcgaaatgaccggaacaagaagaagaaagaggtgaaggaagaagggtcacctgacagctatgagctgagccctcagttagaagagctcatcaccaaggtcagcaaagcccatcaggagactttcccctcgctctgccagctgggcaagtataccacgaactccagtgcagaccaccgcgtgcagctggatctggggctgtgggacaagttcagtgagctggctaccaagtgcatcatcaagatcgtggagtttgccaagcggttgcctggctttacagggctcagcattgctgaccagatcactctgctcaaagctgcctgcctagatatcctgatgctgcgtatctgcacaaggtacaccccagagcaggacaccatgaccttctccgacgggctgaccctgaaccggacccagatgcacaatgccggcttcgggcccctcacagaccttgtctttgcctttgctgggcagctcctgcccctggagatggatgacaccgagacagggctgctcagcgccatctgcctcatctgcggagaccgcatggacctggaggagcccgaaaaagtggacaagctgcaggagccactgctggaagccctgaggctgtacgcccggcgccggcggcccagccagccctacatgttcccaaggatgctaatgaaaatcaccgacctccggggcatcagcactaagggagctgaaagggccattactctgaagatggagattccaggcccgatgcctcccttaatccgagagatgctggagaaccctgaaatgtttgaggatgactcctcgcagcctggtccccaccccaatgcctctagcgaggatgaggttcctgggggccagggcaaagggggcctgaagtccccagcctgaccaggcccctgacctccccctttgtggggggtttggnntttngggnncnnntttgngtnnnnnnnnnnnnnnnnnnnnnnnnnnnnnnnnnnnnnnnnnnnnnnnnnnnnnnnnnnnnnnnnnnnnnnnnnnnnnnnnnnnnnnnnnnnnnnnnnnnnnggcccccgtctgtcccccccttcccctgtcttcgcggggtgctctgcctgtttttggcggctctccgcccgnttcccccccggcgct

SEQ ID NO: 171122 - DNA, 709 bp, Homo Sapiens
ccacccccggctgtccgctcagagtgtccaggccctctgagttctccaacatttcctggatgagaggcggcatggagcccgggatctccatcttcagcgtgatcacccgctcagcccccttggcgctgatgcttcgcaggtcagtaatcttcattagcatcttggggaacatgtgggggcggctgggcctccgcttccgcacgtagacctttagcgcctccagcagcggctcctgcagcatgtccacccggtccggctgctccaggtcctggcggtctccgcagatgaggcagatggcgctgagcagccccgtctccgcatcatccatctccaggggcagcagctggttgccgaaggcaaagaccaggtcggtgagggggccgaagccagcgttgtgcatctgggtccggttcagggtcagcccgtccgagaaggtcatggtgtcctgctcgggcgtgtaccgcgtgcagatccgcaggatcaggatgtccaggcaggcagccttgaggagggtgatctggtcggccgatggtgagggtggtgaagccgggcagctgcttggcgaactccacagtcttaatgatgcacttggtggagagttcactgaacttgtcccagaggtcaatgtccagagagacacgttgttctgagctgttgttccgtagtgtatttgcccagctggcagagggcagggaaggtttccctggtg

SEQ ID NO: 171123 - DNA, 495 bp, Homo Sapiens
aacgtatgcattcactagaatcaggtctattgcacgtctggccaatattgatgaagaaatgctccaaaaagctgctcgagaaaccaagattcttttggatcatgagaaggaatggaaactaggccggtgcattttacggttccctgagattctgcaaaagattttagatgacttatttctccacactctctgtgattatatatatgagctggcaactgctttcacagagttctatgatagctgctactgtgtggagaaagatagacagactggaaaaatattgaaggtgaacatgtggcgtatgctgctatgtgaagcagtagctgctgtcatggccaaggggtttgatatcctgggaataaaacctgtccaaaggatgtaatccttcataggtttgaacactgtgtgtttttaccaaagtggccattggcactgtttgcttttttacaatcatgtggacacaagcataagtaaagaaaatttgtcaaccaggat

SEQ ID NO: 171124 - DNA, 947 bp, Homo Sapiens
ggggctggcgggaacgtgaagctccgcggtgcctgatggggccgttgggcggccggtagctgttgctgttgggggaccccctcattcctgccgctgccgtccctgctgcctcatggcggccatcggagttcacctgggctgcacctcagcctgtgtggccgtctataaggatggccgggctggtgtggttgcaaatgatgccggtgaccgagttactccagctgttgttgcttactcagaaaatgaagagattgttggattggcagcaaaacaaagtagaataagaaatatttcaaatacagtaatgaaagtaaagcagatcctgggcagaagccagaaatgcggtccttggacctggcttctcagcaattatccctgagagggaagatcctggagatatcctgagagcacacagagcttccccacaccttcagacttgcaccttgctgtccagaagctgcctagccctcctttccaacccacaatggccagtgccaatagcagtgcgggcatccggtggtccagacaggagacacgaactcttctctccatactaggcgaggcagagtatattcagcgcctccagactgtgcatcacaatgcagatgtctatcaggctgtgtctaagcgaatgcagcaggagggcttccgccgcaccgaacgtcagtgccgctccaagtttaaagttctgaaggcattatatttaaaggcctatgttgcccatgccacaagtatgggtgagccaccaacactgtccaattttatgatacgttggatcagcttctccgaaatcagatagtgactgacccagacaacttaatggaggatgctgctatgggccaagcactgtgatcagaaacttagtgggctctgacgcccaagggaagagggaccggcatctaaaatcacaggctcaggcagtgatcatcagctatttgaaaacgtaa

SEQ ID NO: 171125 - DNA, 1016 bp, Homo Sapiens
ggggcggccggtagctgttgctgttgggggaccccctcattcctgccgctgccgtccctgctgcctcatggcggccatcggagttcacctgggctgcacctcagcctgtgtggccgtctataaggatggccgggctggtgtggttgcaaatgatgccggtgaccgagttactccagctgttgttgcttactcagaaaatgaagagattgttggattggcagcaaaacaaagtagaataagaaatatttcaaatacagtaatgaaagtaaagcagatcctgggcagaagctccagtgatccacaagctcagaaatacatcgcggaaagtaaatgtttagtcattgaaaaaaatgggaaattacgatatgaaatagatactggagaagaaacaaaatttgttaacccagaagatgttgccagactgatatttagtaaaatgaaagaaacggcacattctgtattgggctcagatgcaaatgatgtagttattactgtcccgtttgattgtggagaaaagcaaaaaaatgctcttggagaagcagctagagctgctggatttaatgttttgcgattaattcacgaaccgtctgcagctcttcttgcttatggaatttggacaagactcccctactggaaaaagcaatattttggtgtttaagcttggaggaacatccttatctctcagcgtcatggaagttaacagtggaatatatcggggttctttcaacaaacactgatgataacatcggtggtgcacatttcacagaaaccttagcacagtatctagcttcgtgagttccaaagatccttcaaacatgatgtgagaggaaatgcgcgagccatgatgaaaattaacgaacaggggctgaagtagcgaaacattcttgtgtcaacctggggaagggccaactgttttcttgactcattatatgaagggtcaagatttgggatggcaagtggtccagagcaacgattggaactcctttggttctccactttttaataagtgtatagaa

SEQ ID NO: 171126 - DNA, 875 bp, Homo Sapiens
  misc_feature (440)..(440): n is a, c, g, or t
  misc_feature (697)..(697): n is a, c, g, or t
  misc_feature (753)..(753): n is a, c, g, or t
ataaaggttgccggagcaatgtgcagttacacaacctccaggtatgatcctgtttgaggactggatttagagataactacttagaggttaaaagtcacaagggtgtacggatgaggctggagtgatctgggaccaaagacatctaggcttgctgtcaaggcttctgatcaacatgagatgaccgccgtgtggtaaactgatgaaccccgacgctgatcaacatgagatgaccgccgtgtggtaaactgatgaaccctgaccctgatcaacatgagatgaccgccgtgtggtaaactgatgaaccccgaccctgatgaacgtgagatgaccgccgtgtggtaaaatgatgaaccccgaccctcatgaacatgagatgaccgccgtgtggtaaactgatgaaccccgaccctgatcaacatgagatgaccgccgtgtggtanactgatgaaccccgaccctgatgaacatgagatgaccgccgtgtggtaaactgatgaaccccgaccctgatcaacatgagatgaccgccgtgtggtaaactgatgaaccccgaccctgatcaacatgagatgaccgccgtgtggtaaactgatgaaccctgacccattaggctttggctacagaatgtgggaataaattgtgttactacatgtgtgtaatcctagggtgcaagacacccgccggggaggttccatanaagtgaggggttctgcaggtaacctcatcctctagttcctctggaaagctccctanaagggaggaaattatgtccctttaaaacctaataaaaattcccttccaaaaccaaaattaccggcaaccctaactggtgaaaggacccccaaaggattacttttttttagaaataaggtaaa

SEQ ID NO: 171127 - DNA, 292 bp, Homo Sapiens
atgtctataaactcaagaggatcttccaaggcagatgtggagttgctgtcttcaggttcctaacctgggtctgagtttggggatccttggctatgactgtctggtctgaacacgccgctgtgctggttccaagcctgagctgagactgcaataaaaggctcaagaagatcttctgagacagatgtggagtttctgtcttccggttccaaacccgggtctgagtttggggctccttggctatgaccgtctggtcttaccactccgctgtgctggttccaagcctgagtggaga

SEQ ID NO: 171128 - DNA, 957 bp, Homo Sapiens
  misc_feature (867)..(867): n is a, c, g, or t
  misc_feature (871)..(871): n is a, c, g, or t
  misc_feature (897)..(897): n is a, c, g, or t
ctgccctccagcctcagctgcaaggtgcacgtggcatcggtgaacaacttccccacggctgcgggcctggcctcctcagcggcgggctatgcctgcctagcctacaccctggcccgtgtctacggcgtggagagtgacctctcagaagtggctcgccggggctcaggcagcgcctgccggagcctgtatgggggctttgtggagtggcagatgggagagcaggccgacgggaaggacagcatcgctcggcaagtggcccccgagtcacactggcctgaactccgcgtgctcatccttgtggtgagcgctgagaagaagctgacaggcagtaccgtgggcatgcgggccagtgtggagaccagccccctgcttcggttccgggccgagtccgtggtgcccgcgcgcatggcggagatggcccgctgcatccgggagcgagacttccccagcttcgcccagctgaccatgaaggacagcaaccagttccacgccactctgcctcgaaaccttcccgcccatctcttacctcaatgccatctcctggcgcatcatccacccggtgcaccgcttcaacgcccaccacggggacaccaaggtgggcgtacaacctttgacgcgggccccaatgccgtgatcttcaccctggaacgacactgttggctgagtttgtggctgctgtgtggcacggcttttcccccaggctcgaatggagacacgtttctgaaggggctgcaggtgaggccggcccctctctcagctgagcttcaggctgcgctggccatggagccgaccccccggtgggggtcaatacatcattgtcactcaggtggggccagggccctcaatcctggatgacccctgcgcccnaccntctggggtctggacggctgccgaagncagctgcctgactgcctcagcagggaccgcatggcggcttgggaaaagggggtggcctcc

SEQ ID NO: 171129 - DNA, 1209 bp, Homo Sapiens
  misc_feature (290)..(290): n is a, c, g, or t
  misc_feature (1181)..(1181): n is a, c, g, or t
  misc_feature (1186)..(1186): n is a, c, g, or t
tccaggggagggtgggggccccaaggggggtcaattccaggaatttggagggccccttggccccccacccggaggggccaaatgaaggtattttgaccccacccgggggtccggcttccatggcccagcgcagcttgaagctcagctgagagagggggccggcctcacctgcagccccttcagaaaacgtgtctccattcgagcctgggggaaagccgtgccacacagcagccacaaactcagccacagtgtcgtccaggatgaagatcacggcattggggcccgcgtcnaaaggtgtcacgcccaccttggtgtccccgtggtggaacgttgaaagcggtgcaccaggtggatgatgcgccaggagatggcattgaggtaagagatgggcaggaaggtgtcgaggcaggtggcgtggaactggttgctgtccttcatggtcagctgggcgaagctggggaagtctcgctcccggatgcagcgggccatcctccgccatgcgcgcgggcaccacggactcggcccggaaccgaagcagggggctggtctccacactggcccgcatgcccacggtactgcctgtcagcttcttctcagcgctcaccacaaggatgagcacgcggagttcaggccagtgtgactcgggggccacttgccgagcgatgctgtccttcccgtcggcctgctctcccatctgccactccacaaagcccccatacaggctccggcaggcgctgcctgagccccggcgagccacttctgagaggtcactctccacgccgtagacacgggccagggtgtaggctaggcaggcatagcccgccgctgaggaggccaggcccgcagccgtggggaagttgttcaccgatgccacgtgcaccttgcagctgaggctggagggcagcgggtccccaatcccgtgagttcctccgcttcagggccaggcagcggatctcccgcaggcaggcctgcagcctcggctgccccacatcctcctcccggccattcagccaaatccggtcctcggtgaagtccttgctgatgacggctgttgtggtggtttttaactggtcctggtgcagagtgacgctcagggaggagttgatgggcagaaccagctcttcatcgcgcttgccccagtacttgatgaccgcgatgttgaccggcgctgtacaagtgancatcncagcggcttctcctgtgccgaat

SEQ ID NO: 171130 - DNA, 808 bp, Homo Sapiens
cgagctcggtaccccacacgccgaaggtccacacgatgtggtggttctaccaggaggtaatctgggcgcacagaatttatctgagtctgctgctgtgaaggagatactgaaggagcaggaaaaccggaagggcccgatagccgccatctgtgcaggtcctactgctctgttggctcatgaaataggttttggaagtaaagttacaacacaccctcttgctaaagacaaaatgatgaatggaggtcactactcctactctgagaatcgtgtggaaaaagacggcctgattcttacaagccgggggcctgggaccagcttcgagttggcgcttgcaattgttgaagccctgaatggcaaggaggtggcggctcaagtgaaggctccacttgttcttaaagactagagcagcgaactgcgacgatcacttagagaaacaggccgttaggaatccattctcactgtgttcgctctaaacaaaacagtggtaggttaatgtgttcagaagtcgctgtccttactacttttgcggaagtatggaagtcacaactacacagagcatttctcagcctacaaatggtgtctatacatttctaagccttgtttgcagaataaacagggcatttagcaaactagaagagcagacggagaaaccgaagcaacacacacagatagcaaaagaagaaagcagaacgacaaagtaacacacaacaaaggggcgcgcgcaccgacgagaagagatccacccgagggggcaacacaaacacgaggagcggaatccggacagcatcgggagacacaaagcggcccc

SEQ ID NO: 171131 - DNA, 1034 bp, Homo Sapiens
gggtgcgcagtgtggggctgagggaggccggacggcgcgcgtgcgtgctggcgtgcgttcactttcagcctggtgtggggcttgtaaacatataacataaaaatggcttccaaaagagctctggtcatcctggctaaaggagcagaggaaatggagacggtcatccctgtagatgtcatgaggcgagctgggattaaggtcaccgttgcaggcctggctggaaaagacccagtacagtgtagccgtgatgtggtcatttgtcctgatgccagccttgaagatgcaaaaaaagagggaccatatgatgtggtggttctaccaggaggtaatctgggcgcacagaatttatctgagtctgctgctgtgaaggagatactgaaggagcaggaaaaccggaagggcctgatagccgccatctgtgcaggtcctactgctctgttggctcatgaaataggttttggaagtaaagttacaacacaccctcttgctaaagacaaaatgatgaatggaggtcattacacctactctgagaatcgtgtggaaaaagacggcctgattcttacaagccgggggcctgggaccagcttcgagtttgcgcttgcaattgttgaagccctgaatggcaaggaggtggcggctcaagtgaaggctccacttgttcttaaagactagagcagcgaactgcgacgatcacttagagaaacaggcccgttaggaatccattctcactgtggttcgctctaaacaaaacagtgggtaaggttaatgtggttcagaaagtccctgtcccttactactttttccgggaagtatggaaagtcccaactacaccagaaatttcctcaagcctaccaaattgtgtcctataacatttcctaagccctttgtttgccaaaataaaccagggctattttaacccaagtcggcaagatccatccatcaccccctctcttgccccatccttccactttctcccaactctctcccccgcccctctctttcaaccacgttctgcctccccacttcgtcctgtt

SEQ ID NO: 171132 - DNA, 811 bp, Homo Sapiens
ggggagacggtcatccctgtagatgtcatgaggcgagctgggattaaggtcaccgttgcaggcctggctggaaaagacccagtacagtgtagccgtgatgtggtcatttgtcctgatgccagccttgaagatgcaaaaaaagagggaccatatgatgtggtggttctaccaggaggtaatctgggcgcacagaatttatctgagtctgctgctgtgaaggagatactgaaggagcaggaaaaccggaagggcctgatagccgccatctgtgcaggtcctactgctctgttggctcatgaaataggttttggaagtaaagttacaacacaccctcttgctaaagacaaaatgatgaatggaggtcattacacctactctgagaatcgtgtggaaaaagacggcctgattcttacaagccgggggcctgggaccagcttcgagtttgcgcttgcaattgttgaagccctgaatggcaaggaggtggcggctcaagtgaaggctccacttgttcttaaagactagagcagcgaactgcgacgatcacttagagaaacaggccgttaggaatccattctcactgtgttcgctctaaacaaaacagtggtaggttaatgtgttcagaagtcgctgtccttactacttttgcggaagtatggaagtcacaactacacagagatttctcagcctacaaattgtgtctatacatttctaagccttgtttgcagaataaacagggcatttagcaaactactggaaaacccccggcccaacaaccacacccccaaccaccaaggggggcgcccaagaatcc

SEQ ID NO: 171133 - DNA, 900 bp, Homo Sapiens
ggggagtggtacccaacgggccggggcgccgcgtccgcaggaagaggcgcggggtgcaggcttgtaaacatataacacaaaaatggcttccaaaagagctctggtcatcctggctaaaggagcagaggaaatggagacggtcatccctgtagatgtcatgaggcgagctgggattaaggtcaccgttgcaggcctggctggaaaagacccagtacagtgtagccgtgatgtggtcatttgtcctgatgccagccttgaagatgcaaaaaaagagggaccatatgatgtggtggttctaccaggaggtaatctgggcgcacagaatttatctgagtctgctgctgtgaaggagatactgaaggagcaggaaaaccggaagggccagatagccgccatctgtgcaggtcctactgctctgttggctcatgaaataggttttggaagtaaagttacaacacaccctcttgctaaagacaaaatgatgaatggaggtcattacacctactctgagaatcgtgtggaaaaagacggcctgattcttacaagccggggggcctgggaccagccttccagtttgcgcttgcaattgttgaaacccctaaatgccaaagaagttggcggctcaagtgaaagctccacttggttctaaagactagagcagcggaactgcgacgatcacttagaagaaacaggccgttaaggaatccatcctcactgtggttccctctaaacaaaaaaaggggtaaggttaatgtggttcaaaaagtcccctggccccttactaactttttgcggaaaagaaagggaaagtcccaacctacaccagaaaatttccccagccctaacaaaatgggggcccaatacaatttccaaaacccctggtttggcaaaaaataaaac

SEQ ID NO: 171134 - DNA, 1011 bp, Homo Sapiens
  misc_feature (681)..(681): n is a, c, g, or t
ggggcagtgtggggctgagggaggccggacggcgcgcgtgcgtgctggcgtgcgttcactttcagcctggtgtggggtgagtggtactcaacgggccggggcgccgcgtccgcaggaagaggcgcggggtgcaggcttgtaaacatataacataaaaatggcttccaaaagagctctggtcatcctggctaaaggagcagaggaaatggagacggtcatccctgtagatgtcatgaggcgagctgggattaaggtcaccgttgcaggcctggctggaaaagacccagtacagtgtagccgtgatgtggtcatttgtcctgatgccagccttgaagatgcaaaaaaagagggaccatatgatgtggtggttctaccaggaggtaatctgggcgcacagaatttatctgagtctgctgctgtgaaggagatactgaaggagcaggaaaaccggaagggcctgatagccgccatctgtgcaggtcctactgctctgttggctcatgaaataggttttggaagtaaagttacaacacaccctcttgctaaagacaaaatgatgaatggaggtcattacacctactctgagaatcgtgtggaaaaagacggcctgattcttacaagccgggggcctgggaccagcttcgagtttgcgcttgcaattgttgaagccctgaatggcanaggaggtggcgggctcaagtgaaggctccacttgttcttaaagactagagcagcgaactgcgacgatcacttaaaaaaacaagcccgttaggaatccattctcactgtgttcgctctaaacaaaacagtggtaggttaatgtgttcagaagtcgctgtccttactacttttgcggacgtatggaagtcacaactacacagagacttctcaggcctacagagttgtggtctatacatttctaagcctggtttgcaggactacacaggggccttaagcaaacgtaagaaccaaggatcaagattaaaaaaacaaagaaccaataaactcgat

SEQ ID NO: 171135 - DNA, 724 bp, Homo Sapiens
  misc_feature (78)..(78): n is a, c, g, or t
gctgagggaggccggacggcgcgcgtgcgtgctggcgtgcgttcattttcagcctggtgtggggcttgtaaacatatnaacataaaaatggcttccaaaagagctcctggtgcatcctggctaaaggagcagaggaaatggagacggtgcatccctgtagatgtcatgaggcgagctgggattaaggtcaccgttgcaggcctggtctggaaaagacccagtacagtgtagccgtgatgtggtcatttgtcctgatgccagccttgaagatgcaaaaaaagagggaccatatgatgtggtggttctaccaggaggtaatctgggcgcacagaatttatctgagtctgctgctgtgaaggagatactgaaggagcaggaaaaccggaagggcctgatagccgccatctgtgcaggtcctactgctctgttggctcatgaaataggttttggaagtaaagttacaacacaccctcttgctaaaagacaaaatgatgaatggaggtcattacacctactctgagaatcgtgtggaaaaaagacggctgattcttacaagccggggggcctgggaccagcttcgagtttgcgcttgcaatttgttgaaagccctgaatggggcaggaggtggcggtccaagtgaaggctccactttgttccttaaggacttagagcaggaaactggacgatcactttgagaaacaggcgttaagaatcccattctcac

SEQ ID NO: 171136 - DNA, 411 bp, Homo Sapiens
gatgatgaagactttgaatgtttagatagtgatgatgacttggactttgaaacacacgaacctggcgaagaggcttccctgaaaggaacacttgataatctcaagtcatacatggcccagatggaccaggaactagcacacacctgcatcagcaaaagtttcaccactaggaaccaagtggaacctgtatcccagactaccgataacaattcagatgaggaagattctggtacgggagaatctgttatggcaccagtagatgtagacctgaacctggtttcaaatatattggaatcctatagctcccaagctggactggcaggacctgcttacaatcttttacaaagcatgggagtgcagctgcctgacaacaccgatcacagatctacatactgccgaaggaacctcttg

SEQ ID NO: 171137 - DNA, 1238 bp, Homo Sapiens
gggaatcaaaagttgagcagtagctgtgagttgctggcgctggagcgattcggtggcacgtggagccacggcgtgggagtagggggctgaaggcaggcagcagcggccagggccgccctctgctagccgcttgggtctcgggataccccgtttcttcctgtaggtgtgggacgtgcgtgcggcgagatggacactcccccgctctcggattcggagtcggaatccgatgaatcccttgtcacagacagagagttgcaggatgcgttttcccgagggcttctgaagccaggcctcaatgtcgtgctagaggggccgaagaaggccgtgaacgacgtgaatggcctgaagcaatgtttggcagaattcaagcgggatctggaatgggttgaaaggctcgatgtgacactgggtccggtaccggagatcggtggatctgaggcgccagcacctcagaacaaggaccagaaagctgttgatccagaagacgacttccagcgagagatgagtttctatcgccaagcccaggccgcagtgcttgcagtcttaccccgcctccatcagctcaaagtccctacgaagcgacccactgattattttgcggaaatggccaaatctgatctgcagatgcagaagattcgacagaagctgcagactaaacaggctgccatggagaggtctgaaaaagctaagcaactgcgagcacttaggaaatacgggaagaaggtgcaaacggaggttcttcagaagaggcagcaggagaaagcccatatgatgaatgctattaagaaatatcagaaaggcttctctgataaactggatttccttgagggagatcagaaacctctggcacagcgcaagaaggcaggagccaaaggccagcagatgaggaaggggcccagtgctaaacgacggtataaaaaccagaagtttggttttggtggaaagaagaaaggctcaaagtggaacactcgggagagctatgatgatgtatctagcttccgggccaagacagctcatggcagaggcctcaagaggcctggcaagaaagggtcaaataagagacctggaaaacgaacaagagagaagatgaagaacagaacacactaaatagcatctttgaatacaaagaaccaagaaaaaggaatgaagactcgcaatttcacgacacactttgatcccttctgttggtgtcatgttgtaaacatttctttcaataaactaaagaaaaattattaaag

SEQ ID NO: 171138 - DNA, 1286 bp, Homo Sapiens
gggaggcggggtgacgtgtggttgacgagctcggcggcgggtttgctgagatctgtggccggcggcagctggtgcggggggcagctgagagcgagaggtggatcggggcggtgtgtggccagggccatgacgggcaatgccggggagtggtgcctcatggaaagcgaccccggggtcttcaccgagctcattaaaggattcggttgccgaggagcccaagtagaagaaatatggagtttagagcctgagaattttgaaaaattaaagccagttcatgggttaatttttcttttcaagtggcagccaggagaagaaccagcaggctctgtggttcaggactcccgacttgacacgatattttttgctaagcaggtaattaataatgcttgtgctactcaagccatagtgagtgtgttactgaactgtacccaccagggatgtccatttaggcgagacattatcagagtttaaagaattttcacaaagttttgatgcagctatgaaaggcttggcactgagcaattcagatgtgattcgacaagtacacaacagtttcgccagacagcaaatgttggaatttgatacgaagacatcagcaaaagaagaagatgcttttcactttgtcagttatgttcctgttaatgggagactgtatgaattagatggattaagagaaggaccgattgatttaggtgcatgcaatcaagatgattggatcagtgcagtaaggcctgtcatagaaaaaaggatacaaaagtacagtgaaggtgaaattcgatttaatttaatggccattgtgtctgacagaaaaatgatatatgagcagaagatagcagagttacaaagacaacttgcagaggaacccatggatacagatcaaggtaatagtatgttaagtgctattcagtcagaagttgccaaaaatcagatgcttattgaagaagaagtacagaaattaaaaagatacaagattgagaatatcagaaggaagcataattatctgcctttcattatggaattgttaaagactttagcagaacaccagcagttaataccactagtagaaaagggaaaataggataaaagaacaaggtgtgagaaggaatagaaggaaacaaacaggaaagatatggctgcaccatgcagtgctactatatgctgagattctacaggatgagatttttgaatagctgaggcagttgcctataatctgtgatgacataaaagtatttgacctaaaatctttttatttgcaaaataataaataaaaagtgattctccctcgg

SEQ ID NO: 171139 - DNA, 579 bp, Homo Sapiens
ggtattgaagaagaagtacagaaattaaaaagatacaagattgagaatatcagaaggaagcataattatctgcctttcattatggaattgttaaagactttagcagaacaccagcagttaataccactagtagaaaaggcaaaagaaaaacagaacgcaaagaaagctcaggaaaccaaatgaagatgttttcagatatgtacacatttctgcttctgcacatattttcatggaaaccattatgtataaagaacttagagcaacatcctaattggctcagtgcacgtttggcaatagtgccagcctgtcttgtctttaatgtatggattcataaacttcttccctacctgcatcatgtgcatgtagtgcatattaaatgaaagtgatattaagaatgctttcccaaattccattatttgacattgagtctgacaactgttagttttctggttgtctaactaccatatgaagctagaaaatgcacaaacgatattccttatctgtaatttaaatacttaaaatttgcaattgtcagatcttgattaaactggttgtcttatttcttctcatcattaacgg

SEQ ID NO: 171140 - DNA, 1335 bp, Homo Sapiens
gggaccgtggcgagttccgcgctcaatggagacgtttgaccccaccgagctgcccgagctgcttaaactttattaccggaggctctttccctactctcagtactatcgctggctcaactacggtggagtgataaagaattactttcaacaccgtgaattttcattcacattgaaagatgatatttacattcgctaccaatccttcaacaaccagagtgatctggaaaaggagatgcagaaaatgaatccatacaagattgatataggcgcagtatattctcacagacccaatcaacacaatacagtgaagctgggagctttccaggctcaggaaaaagaactggtatttgacattgacatgacagactatgacgatgtgaggagatgttgtagttctgcagacatatgtcctaagtgctggaccctcatgacaatggccatacgcatcattgacagagcattgaaggaggactttggatttaagcatcgtctctgggtatattctggaaggagaggtgttcattgttgggtctgtgatgaatcagttagaaaactgtcttctgcagtacgttctgggatagttgagtatttgagccttgtaaagggtggtcaagacgttaaaaagaaagttcacctaagtgaaaaaattcaccccttttatcagaaaatctataaacataataaaaaaatactttgaagaatatgccttggttaatcaagatattctcgaaaataaagaaagctgggataagattttagcccttgttcctgaaacaattcatgatgaacttcaacaaagcttccaaaagtctcacaattcacttcagcgttgggagcacttgaagaaagtagccagcagatatcagaataacatcaaaaatgacaaatatggaccctggctggagtgggagattatgctccagtactgtcttccacggctggatatcaatgtcagcaaaggaatcaatcatctactgaagagcccttttagtgttcatcctaaaacaggtcgcatctctgtgcctattgatttgcagaaagtggaccagtttgatccatttactgttccgaccataagcttcatctgccgtgaattggatgccatttccactaatgaagaggaaaaagaggagaatgaagctgaatctgatgtcaaacatagaaccagagattataagaagaccagtctagcaccttatgtgaaagtttttgaacattttcttgaaaatctggatgaatcccgaaaaggagaacttcttaagaagagtgatttacaaaaagatttctgaagacagagctcctcaaaccattgtggatatcttctgccttcaacca

SEQ ID NO: 171141 - DNA, 504 bp, Homo Sapiens
  misc_feature (173)..(203): n is a, c, g, or t
  misc_feature (237)..(263): n is a, c, g, or t
  misc_feature (360)..(369): n is a, c, g, or t
gggtaggctaattcctcttgcccaacggcatatggagtgtccttattgctaaaaaggattccgtctccttcaaagaagttttatttttggtccagagtacttgttttcccgatgtgtccagccagctccgcagcagcttttcaaaatgcactatgcctgattgctgatcgtgnnnnnnnnnnnnnnnnnnnnnnnnnnnnnnnggtattaagtcgttgcctttatttgtaaagctgnnnnnnnnnnnnnnnnnnnnnnnnnnntaaaaaggaaaatgtttcagatgtttatttgtataattacttgattcacacagtgagaaaaaatgaatgtattcctgtttttgaagagaagaataannnnnnnnnnctctagggagaggtacagtgtttatattttggagccttcctgaaggtgtaaaattgtaaatatttttatctatgagtaaatgttaagtagttgttttaaaatacttaataaaataattcttttcctgtggaagag

SEQ ID NO: 171142 - DNA, 1039 bp, Homo Sapiens
atcaaccccagtttcgtgttcctgcagctctaccattcccccttctttggcgacgagtcaaacaagccaatcctgctgcccaatgagtcacagtcctttgagcggtcggtgcagctcctcgaccagatcccatcatacgacacccacaagatcgccgtcctgtatgttggagaaggccagagcaacagcgagctcgccatcctgtccaatgagcatggctcctacaggtacacggagttcctgacgggcctgggccggctcatcgagctgaaggactgccagccggacaaggtgtacctgggaggcctggacgtgtgtggtgaggacggccagttcacctactgctggcacgatgacatcatgcaagccgtcttccacatcgccaccctgatgcccaccaaggacgtggacaagcaccgctgcgacaagaagcgccacctgggcaacgactttgtgtccattgtctacaatgactccggtgaggacttcaagcttggcaccatcaagggccagttcaactttgtccacgtgatcgtcaccccgctggactacgagtgcaacctggtgtccctgcagtgcaggaaagacatggagggccttgtggacaccagcgtggccaagatcgtgtctgaccgcaacctgcccttcgtggcccgccagatggccctgcacgcaaatatggcctcacaggtgcatcatagccgctccaaccccaccgatatctacccctccaagtgcgattgcccggctccgccacatcaagcggctccgccagcggatctgcgaggaagccgcctactccaaccccagcctacctctggtgcaccctccgtcccataccaaagcccctgcacagactccagccgagcccacacctggctatgaggtgggccagcggaagcgcctcatctcctcggtggaggacttcaccgagtttgtgtgaggccggggccctccatcctgcactggccttggacggtattgcctgtcagtgaaataaataaagtcctgaccccagtgcacagacatagaggcacag

SEQ ID NO: 171143 - DNA, 1416 bp, Homo Sapiens
  misc_feature (188)..(198): n is a, c, g, or t
  misc_feature (258)..(258): n is a, c, g, or t
  misc_feature (265)..(321): n is a, c, g, or t
aaagtaacggagatgggggcaggagcacagggttccaatcgggagagattaagcgcataaagtatggtgagggtgtgggcgaggtgaagcggaaaatggtggggggttagacgggacccggggtgaaaacaaaactggggtaagaaaagggggatcagcggcccaggcggaaaaatataaaatatacnnnnnnnnnnnagactgtagggtaggggtgaaccttgtagtaaaatgtgtaacacgaggggcacggatgcnaaaaaannnnnnnnnnnnnnnnnnnnnnnnnnnnnnnnnnnnnnnnnnnnnnnnnnnnnnnnnttcagcatgcaggggaccctaagcctagtatacgagccaagaccaaaaagggttaaaggctctgtctcccctccctcccctttctcccaacatgccccgccctccttgggcactagaaagttttgcgatgaatagcacgggagccatcctcttcatactcctttttggacacccacatcttcttaaaagtgtccagcgaggccaggatggagccgccaatccatgtggagtacagccgttcctgcggggctgagatcttgattttgatatcctttggggcaagcttcttcacttcactgagtaatcggtctccgaagcctttgaaaagcgttgagccacctgagagcacgatgttggcgaacagcgtccggcgcaggtccatgtcggacttgtgtatggcgaaggccaccacctcatggagcccctcactctcatcccccacaaggtccggctggaacagcagctcgggggcccggaatcgtgcaggccccacatcaagcgtgctgccgtctggcaacgtgtactgcaccttctccgtctccagagcctcatccttctgtgggttgatggacaggtagcacgctcgctctttgattgtccggacaacctcaaactcagccgaggtatggaagtcaaccccttccttgcgcagcaggagtcggaggtagcgggagacgtcgcggccggcaatgtccacccgcatgatggagtgaggcatggcaaagccctcatagatgggcacagcatgagtgaccccgtcccctgagtctagaaccactcctgtcgtgcgtcctgttgcgtacagactgagcacagcctgcatggagatgaacagggccggcacgttgaaggtctcaaagaacacctctgccgccttctcccggttcttactcgggttgagcggggcctccgtgaggagcacaggatgctcctccgagaaggtctgcagctgatccttggagtagacgtactgccagatgcgttccatgtcgttccagtctcgcaccacgccgtgctccatggggtagcggatggtcagcagcccccggtgctcctctgcttttggtccgatgaagaggtccccctccagggctc

SEQ ID NO: 171144 - DNA, 869 bp, Homo Sapiens
  misc_feature (773)..(813): n is a, c, g, or t
tacgtctactccaaggatcagctgcagaccttctcggaggagcatcctgtgctcctcacggaggccccgctcaacccgagtaagaaccgggagaaggcggcagaggtgttctttgagaccttcaacgtgccggccctgttcatctccatgcaggctgtgctcagtctgtgagtgctccctaagcctggcctccctgagtcctgtcctccctgtgccgtcctgcttgccatgaccagggtctgacttccctggaaaaacagcccccttgatgactggttcctctagggagtccctcgtgtcctctcttcagactagataatgcagatgtgccagggttcctcccctgggtgaggaggtccccgtgcctcagtggctgaggtgaggggatgctgacctggtgacaggtacgcaacaggacgcacgacaggagtggttctagactcaggggacggggtcactcatgctgtgcccatctatgagggctttgccatgcctcactccatcatgcgggtggacattgccggccgcgacgtctcccgctacctccgactcctgctgcgcaaggaaggggttgacttccatacctcggctgagtttgaggttgtccggacaatcaaagagcgagcgtgctacctggtcctcaacccacagaaagatgaagctctggagacggagaaggtgcagtacacgttgccagaagggcagcagcgttgatgtgggggccctgaacgaattccggggcccccgaaactgctggtccaaccggaaccttnnnnnnnnnnnnnnnnnnnnnnnnnnnnnnnnnnnnnnnnnaccgctcgagaatcaagcgagttacaggcaagggactgaagccggaagcacgattc

SEQ ID NO: 171145 - DNA, 1150 bp, Homo Sapiens
  misc_feature (281)..(281): n is a, c, g, or t
ggacgctgttcgccaacatcgtgctctcaggtggctcaagcgcttttcaaaggcttcggagaccgattactcagtgaagtgaagaagcttgccccaaaggatatcaaaatcaagatctcagccccgcaggaacggctgtactccacatggattggcggctccatcctggcctcgctggacacttttaagaagatgtgggtgtccaaaaaggagtatgaagaggatggctcccgtgctattcatcgcaaaactttctagtgcccaaggagggcggggcatgntgggagagggggagggaggggagacagagcctttaaccctttttggtcttggctcgtatactaggcttagggtcccctgcatgccctgaacccctgggtgggtggcacagcagtgcccccctgcagccttcccctctacacaggacatgcacacacaagtaacattgagctgcatggacaggagccctgagctggcgtgtgggaattgagcgccatgtcaggctgttgtgggtatccccctggcagggccagctaggcctgtggttccctgctccgactctcagggctgcctccctgagctccagggccagaatgcctggatgcctgggtagccagtttggggagtgggctgcaaggggcagccagcagctcccactggtgtgtcactgcatccattgccacctcctgttcgtgacctgacagggtgacacagcccctttcacactctgtcctcctatcttcctgggtagatgccctggtgtagggctgagtactgaatggtcttccatccccagcaagggggtgcagcccagggtcaggcccttcagagccagggcagaggacgcacggtggctagagccgctgcactatccttttcagagcacttcatccacttgctcctccctctaccctcggcaccctgggtgggaaagggttgatgctcatcatttattgaggggaagccacttaataaggagtcagacctaaaagggggtgggggacattttcttacctcacccaagaaagaggtcgtcacttttgctgtggccagggccccacctccctctctcagatatgtacaataatttaacacggttgcctgaaaaaaacttttgtaaatcattatagtaataattatggacaaggcc

SEQ ID NO: 171146 - DNA, 672 bp, Homo Sapiens
agtcactgaatcaatcctaatatttactgagcagcctttacgactgaggtacatacactcaatctgtaagtcactgttatctcttttttaggacctgtggcagattccagaaaaggtctccctataagaagctgctgtcctccctataacttatggcactgcgatttttgctcttgagcattgggcccgtacccagcccgggtaatatagctgctgctggaagtgacgggaagtgcaagctggcgatgcagaggggtgcgcagtccagcgtgaactacagtcagggcagcctgaaggatgcacctggcatgggagggcaggattgtggtggtgggatttgctggaggaaacattgcttctgaaccagccaaccttctgctcctgaagaatatctctgctatgggcctgtactgtggtcaatacaaagatatgaactttcccgtcttctccaagagcctatcttcagtgcttcagtactgccaagcaagggtgcatccagctatatgtcagaatggttttcaagctggacgaggtcaatgatgccttccttcatgtgataacaggggaaaatccgtgggcaaggtgcttctcgctcttaaataaatccttgcctgagcgagcaaagtacatgtccagatcacatactgccgacgtaacctctggacacaccgt

SEQ ID NO: 171147 - DNA, 426 bp, Homo Sapiens
gaaccacgtgcactgcaggtggaaatgtgaaatgatgtagccactgctcctccaaaagttagaacagatcattaccatacaacccagcaattccactcctagatataaacccaaacaaactgaaggcaaaaagtcaaacagatacttagagcctatgttcacagcaacgtcgttcacaatagcaaaaaggggacatgacccaagtgcccatcgatggcagaataggtaaaccaaatgtggtctatccatccaatggaagatgaacttagccacaaaaaaagaaaagaattctgatacatgctacaacagggatgaaccatgaagacatgtaaagtgaaatcaacacaaaaggacaaatactggatgattccatttacatgaggtacctagaattagccaatataggccgggcgcagtggctcacac

SEQ ID NO: 171148 - DNA, 565 bp, Homo Sapiens
gctacacattcccctaaacatctgcagacaggttgccatgtatgtgctgcatttacactctacagtgctttagacctttggctgcagtttcatgttaggctcttacagtgtgaatgacggtgcgcaactctacatgattgacccatcaggtgtttcatacggttattgggctgtgccactcgcaaagccaggcaagctgcaaagacggaaatagagaagcttcagatgaaagaaatgacctgccgtgatatcgttaaagaagtcgcaaaaataatttacatagtacatgacgaagttaaggataaagcttttgaactagaactcagctgggttggtgaattaactaatggaagacatgaaattgttccaaaagatataagagaagaagcagagaaatatgctaaggaatctctgaaggaagaagatgaatcagatgatgataatatgtaacatttactccagcatctattgtattttaaatttctactccagtccaatgtaactatttagccctggattatacatactgtccaattttcattaaatttttgtcttataactatta

SEQ ID NO: 171149 - DNA, 989 bp, Homo Sapiens
ggggggcctgttactagtttgcggcatcctgtggtataggggaagcgctccgggcctggaatccctacgcgtccctttgggtttagcacgatgagctcaatcggcactgggtatgacctgtcagcctctacattctctcctgacggaagagtttttcaagttgaatatgctatgaaggctgtggaaaatagtagtacagctattggaatcagatgcaaagatggtgttgtctttggggtagaaaaattagtcctttctaaactttatgaagaaggttccaacaaaagactttttaatgttgatcggcatgttggaatggcagtagcaggtttgttggcagatgctcgttctttagcagacatagcaagagaagaagcttccaacttcagatctaactttggctacaacattccactaaaacatcttgcagacagagtggccatgtatgtgcatgcatatacactctacagtgctgttagaccttttggctgcagtttcatgttagggtcttacagtgtgaatgacggtgcgcaactctacatgattgacccatcaggtgtttcatacggttattggggctgtgccatcggcaaagccaggcaagctgcaaagacggaaatagagaagcttcagatgaaagaaatgacctgccgtgatatcgttaaagaagttgcaaaaataatttacatagtacatgacgaagttaaggataaagcttttgaactagaactcagctgggttggtgaattaactaatggaagacatgaaattgttccaaaagatataagagaagaagcagagaaatatgctaaggaatctctgaaggaagaagatgaatcagatgatgataatatgtaacatttactccagcatctattgtattttaaatttctactccagtccaatgtaactatttagccctggattatacatactgtccaattttcattaaatactctgtgcttgataataaataaataacaaatacc

SEQ ID NO: 171150 - DNA, 1223 bp, Homo Sapiens
atgagcagacgctggactgcctggagactgccatggccgaccgtggcatcacccaggacagcatcgaggccgcccgggccgtgccagaactgcgcatgctggacgacatccggagccggctgcaggccggggcagacctccatgcccccctggaccacggggccacgctgctgcacgtcgcagccgccaacgggttcagcgaggcggctgccctgctgctggaacaccgagccagcctgagcgctaaggaccaagacggctgggagccgctgcacgccgcggcctactggggccaggtgcccctggtggagctgctcgtggcgcacggggccgacctgaacgcaaagtccctgatggacgagacgccccttgatgtgtgcggggacgaggaggtgcgggccaagctgctggagctgaagcacaagcacgacgccctcctgcgcgcccagagccgccagcgctccttgctgcgccgccgcacctccagcgccggcagccgcgggaaggtggtgaggcgggtgagcctaacccagcgcaccgacctgtaccgcaagcagcacgcccaggaggccatcgtgtggcaacagccgccgcccaccagcccggagccgcccgaggacaacgatgaccgccagacaggcgcagagctcaggccgccgcccccggaggagggacaaccccgaaggtggtcaggccgcacaatggccgagtagggggctccccagtgcggcatctatactccaagcgaataaaccggagtgtctcctaccagctgagccccctggacagcaccaccccccacaccctggtccacgacaaggcccaccacaccctggctgacctgaagcgccagcgagctgctgccaagctgcagcgacccccacctgaggggcccgagagccctgagacagctgagcctggcctgcctggtgacacggtgaccccccagcctgactgtggcttcagggcaggcggggacccacccctgctcaagctcacagccccggcggtgggaggctcccgtggaaggggagcccgtggctgcctggctcatggtgaggcttgttgctcagcatgcaggggggcccctggtcgcggggcacagccccaagggctgccctcccccacgggtgcggtgcccctgggtgcctggcggggtgccaccaccgaaaaacccccggcttcctactggaacaggaacactgggccccctccttcaggtc

SEQ ID NO: 171151 - DNA, 1066 bp, Homo Sapiens
tcccgtcggcagtatgtcgatctgggattcgtacaaggtcgcagattctgaattatgcaaacttgctgctgatgtaattttgaaaactcttgatttgattaacaaacttaaaccattggttcctggtatggaagtaagcttctacaaaatacttcaggacccacgtttgattactccttgggcttttgctttaacgtcagataatagagaacaagtacagtctggactgagaatattattggaggctgctccactgccagattttcctgctttagtacttggagaaagtatagcagcaaacaatgcctatagacaacaggaaacagaacatatacccagaaaaatgccctggcaatcatcaaatcacagttttccaacatcaataaagtgtttaactcctcatttgaaagatggtgttcctggattgaatattgaagaattaatagagaaacttcagtctggaatggtggtaaaggatcagatttgtgatgtgagaatatctgacataatggatgtatatgaaatgaaactatccacattagcttccaaagaaagcaggctacaagatctttgggaaacaaaagctctagcccttgcacaggctgatagactgattgctcagcatcgctgtcaaagaactcaagctgaaacagaggcacggacacttgctagtatgttgagagaagttgagagaaaaaatgaagagcttagtgtgttgctgaaggcgcagcaagctgaatcaccaaagagcgcacagtgatattgagcatctctttcaacataataggaagttagagtctgtggctgaagaacatgaaatactgacaaaatcctacatgggaacttcttcagagaaatggaaagtactgaaaaagaagaataaagatttacagatcacatgtgattctctgaataaacaaattgagacagtgaaaaagttgaatgagtcactcaaggaacaaaatgaaaaaagtattgcccaattaatagagaaagaagaacagagaaaagaagtacagaatcagctagtagacagagaacataagctagcaaatttgcattaaaa

SEQ ID NO: 171152 - DNA, 665 bp, Homo Sapiens
tgctgtcttatcccatgcagtctttcccgtctgtcttccgctcactggcgatgctggagaagacggtggaaaaatgctgcatctccctgaatggccggagcagccgcctggtggtccagctgcattgcaagttcggggtgcggaagactcacaacctgtccttccaggactgtgagtccctgcaggccgtcttcgacccagcctcgtgcccccacatgctccgcgccccagcacgggttctgggggaggctgttctgcccttctctcctgcactggctgaagtgacgctgggcattggccgtggccgcagggtcatcctgcgcagctaccacgaggaggaggcagacagcactgccaaagccatggtgactgagatgtgccttggagaggaggatttcctgcagctgcaggcccaggaaggggtggccatcacttcctgcctcaaggaatccggggggctcctgagctttgcagagtcagcaaacttgaatcttagcattcattttgatgctccaggcccgccatcttcaccatcaaggactcttggctggacggccaactttggcttgggcacactctcagaaaccgactcgcactcccaggaccgtggctccccagagggtcaccagccagggcctcagctccaggtcacaggaaccccaccg

SEQ ID NO: 171153 - DNA, 183 bp, Homo Sapiens
tgttggagtgcttgttgctgctgccaaggaccaggcaacagcagagcagccttaagcatcttggaagatcccgaggttagattcttaagcaagagaagagttggacttccaggctgaaagggagaaagtgactctgttctcttagcaaccgtctgtagcaaagaagtgcttcctcaagcactc

SEQ ID NO: 171154 - DNA, 641 bp, Homo Sapiens
gctagatgaagctgtctcacagatactgctctagctgctttctttaacttaatgtttgacgggagtgggggtgtctggaagaacaggaaaggtgggagatcctaaggcagattaaaggactccctccaccccactacagcctcccataactctagtcatccctctcatagtacaggactgattactctgtgtctgtatgtacacacaaatgtgcatacagacataaattcccccaccccataccaaggtggtatacctagcaggaatgagcgtaggtggctgctggccaccattaccaccgtctgcatcagctgtgttgtctctctttggggtaaagtcctaccccagaatgagaaaaggctggggagagtagggcaggttaaaggagcttatgtcctctgtagatgtaggtatgtatcatagctactagggtttatctatatcaatggggggctaatagcacagagttatctcaccagcagtagctactgatgagtgatgtattagctgtaagaagtggctatccagcaacagttccactgactttaccttagggcagtgccacagtaatctgggacttgttagaaatcccatatcaggccccatccaacttatgaatcacagatctggggcagtttaaa

SEQ ID NO: 171155 - DNA, 311 bp, Homo Sapiens
gatgctgtcagagagtcccacctaggctgataccactgtctcgcgctgtagtgaaatagtgatgggagtgtacatgtctctttgatgttctggtttcctttcctgggaatacaatacccaggagtgggattgctgcatcatatggtagttctgtttttaatttttcgagatacctccatattgttgtccatagtggctgtactagtttacattgtcaccaacagtgtgcaagagttcccttttctccacattcttgtcaacatttgctgtcgttcatctttttgatagtagccattctatctggggtgagg

SEQ ID NO: 171156 - DNA, 442 bp, Homo Sapiens
  misc_feature (324)..(324): n is a, c, g, or t
gctgctggtggggtgaggccatcccacgcaactctggggtctgtgaagccaccaaggatcaaggaatggaagagctgcctgagtgtagagggagttcggtcaggcttcttaaacttggagacttggaaacagaaggccttgtaggccacataggttttcagagactcgcctggcagaggcctggagcgtcctgctgcgtggactgtgggcaccgagccaccaggaggttgttgatctcattcttgctcactggtccctgccagactggtggtgcctctctactgtcgggcagccccacctctgtgctgcccatccacctacagnccctcatgcctgggcccagctggagggttctgacaggggccccctggggtggcatgccggacccttcaaggtgcccaaggcgcagcacaggtctcagagacacaggcaccagggcgtt

SEQ ID NO: 171157 - DNA, 917 bp, Homo Sapiens
  misc_feature (41)..(41): n is a, c, g, or t
aactgaatgtggcgggccaaactgcagaactgactaagganagaggaagtgtggggggcctggctgtggtggtctggttactgttgcacacaacgcctggcagaaagccatggacttggaccaagatgtcctgagtgccctggctgaagtggaacagctctccaagatggtctctgaagcaaaactgagggcagatgaggcaaaacaaagtcgcttgaagacattctgtctgaagacaatatgctaccaaagaaaaaatggacaagagcaatgaggagctgagaaatctaatcaagcaaatcagaaactttttgacccaggatagtgctgattttggacagcattgaagcagttgctaatgaagtattgaaaatggagatgcctagcaccccacagcagttacagaacttgacagaagatatacgtgaacgagttgaaagcctttctcaagtagaggttattcttcagcatagtgctgctgacattgccagagctgagatgttgttagaagaagctaaaagagcaagcaaaagtgcaacagatgttaaagtcactgcagatatggtaaaggaagctctggaagaagcagaaaaggcccaggtcgcagcagagaaggcaattaaacaagcagatgaagacattcaaggaacccagaacctgttaacttcgattgagtctgaaacagcagcttctgaggaaaccttgttcaacgcgtcccagcgcatcagcgagttagagaggaatgtggaagaacttaagcggaaagctgtccaaaactccggggaggcagaatatattggaaaagtagtatatactgtgaagcaaagtgcagaaaatgttaagaagactttacatggtgaacttgatgaaaagtataaacaagtagaaaattttattggccacaaacccacaccagc

SEQ ID NO: 171158 - DNA, 504 bp, Homo Sapiens
gttgacgtgcttgagacagacagccgcagagggcgggcacggcacagctgagatccatctactcccatgggagcctgaaagacctgcctccaacttagaaaactgcttcgtgtttacagttactttacgggagaagaggtagagaacctgccctggcctgtctccatgaccatctttgcagtcagtactgaccaaacaggtgtaaacaggaccccaacaggcagaggtctggctggctttcacaaaagttgtcctgcttccccttagatggaaaatatttaaaatgagacactgggaaaggaagctataaccttttatctttactttactggacaaatttgactatctgttgaaggcatgaacctaatctccaacttgtaaaggtctctttcgtctgatttagtacaagttcggtatcagtctccttccctgtaagaaaatgtgcccacacattctcacctttccttgcctaattataaactaattcatattttgagactctgc

SEQ ID NO: 171159 - DNA, 570 bp, Homo Sapiens
atgatttcccattataatccagtggaaaaattgtagtgcttctatcaatggtaacttaattgtgaaatgttaagtagattgtgcctgtgtccggtgtctgggttttgataaatgatcatttatttggctaacgttgccattaagggctgaaatggtattgcacatttgtaagtgcatactttagagaagcataaattggggaaatattactaataaattagccctgaatcatctaggaacataataatggcattgtcagcactcacaagttggtgtgacacctgcaaatatgcacagatggacagtaacatttgcagcatatttgggggatttttttacgtgaaatgagcatgttttgtaagcaaaacattatattttggaataattatgagacgtgagtgcctaagcagagatgtacagcaaacataatcaggacagaaagcatgatgggagcacccgatgttacattcttcagttcatgctgtgaccaggcgacctcataaaaggaaaaatataatgtataagtacaaccccattttttgttttggctcttttatatttgtattttat

SEQ ID NO: 171160 - DNA, 531 bp, Homo Sapiens
atctcagggtgctggtgcagggcagggatccctcactgaggagaacccagggctgctacctccttcatatttctccccacattggacctggtcacaggtcagtgagcaacagggcttctgtggtcctagtactctgagggggctggggagttcagggtggagagctggggcctggtggtggcctccccgtagccagtcatagtccgaggctgcccagggcaggctcagagtggggcctgcgttggggacactgtgcgcatcccaggtcggggcccagcctaggccacagctagatgtgcagctccgtgtcatcaggtggctccaggccagactctgcgctgagtgctgaggctgagggaccctgggccaccccaaatggtgagacaacgggtgagcgagcagccagaggagacagagagggtgagaagctgggggacatggcagctgaggacagggagccttcatggctgatgggggagcggtgagaagctggtgggaagatggcccgggctgcagctgtgtttgctggct

SEQ ID NO: 171161 - DNA, 601 bp, Homo Sapiens
ggctgatttggggcactggttagactgcattaatagctacttgattagaattcgaacttttaaaattttgaaatgtttaagaatgtattagaaaatgcatgctttatgttgaaaaaatacattgctttaatattcctcattcttgagttaagaaatttatgtgaattttgcatgggcacaaacttaatcagaaacattttgtggagttacatttcctcttattatttatcaaggttcagtattgatctttgaaaccttggtcccgttaacttactagtcacattgaccaatgttttatagaaatgcctagaattttgagactaatagtagttatccattaacattccaaaagttttgtgctttttaaaatttgttttggtaattatcacatttttttctcttaccttcctttaaatggccacagtgtgtactgctggaatgttccatccaaaagatgtagcttcagaagcacagtgattgccccagggtccatgagatattgtttgtattatgaagttggagtgctgtctactgaaattatactcttaaataaatatgtatgtagtgtgtaatattttctaataaattcttttgataaact

SEQ ID NO: 171162 - DNA, 1012 bp, Homo Sapiens
actggtggaagcccaggaagacactcggctttggcgccaggaactcagaaggctctttggataggttgtatgacacacacatcacggttctcgatgcggcccttgagactgggcagttgatcatcatggagacccgcaagaaagatggcacttggcccagcgcacagctgcatgtcatgaacaacaacatgtcggaagaggatgaggacttcaagggtcagccaggcatctgtggcctcaccaatctgggcaacacgtgcttcatgaactcggccctgcagtgcctcagcaatgtgccacagctcaccgagtacttcctcaacaactgctacctggaggagctcaacttccgcaacccactgggcatgaagggtgagatcgcagaggcctatgcagacctggtgaagcaggcgtggtctggccaccaccgctccattgtgccacatgtgttcaagaacaaggttggccattttgcatcccaatttctgggctaccagcagcatgactctcaggagctgctgtcattcctcctggacgggctgcatgaggaccttaatcgggtgaagaagaaggagtatgtggagctgtgcgattgctgctgggcgaccggatcaggaggtggcacaggaggcatggcaaaaccacaaacggcggaacgattctgtgatcgtggacactttccacggcctcttcaagtccacgctggtgtgccccgattgtggcaatgtatttgtgaccttcgaccccttctgctacctcagtgttccactgcctacacggacaacagacgaggatccatgaagatcgaattcgagctccggtagaccacatgacttcactcccccgctccattcgtgctacatgtgttcaagaaaaagaatagtccattatgcatcccaagttctgggctaacacccgcataactctccggacgatgatgtcagttcctctcaggacggcctgcatcgaggatctataatcggatgaagaaaaaggagcgtggagcatatgt

SEQ ID NO: 171163 - DNA, 582 bp, Homo Sapiens
cagtcgtccgactactacttccgtatagcaggggaggcatacgtgcagggaggggaccaggactccagcaccttccctggctgcatcaacaatgccacactctttcaagatgagataaactggcgcctcaaggagggactggtggaaggcgaggattatgtgctgctcccagcagctgcttggcattacctggtcagctggtatggtctagagcatggccagccacccattgaacgcaaggtcatagagctgcccaacatccagaaggtcgaagtgtacccagtagaactgctgcttgtccggcacaatgatttgggcaaatctcacactgttcagttcagccataccgattctattggcctagtattgcgcacagctcgggagcggtttctggtggagccccaggaagacactcggctttgggccaagaactcagaaggctctttggataggttgtatgacacacacatcacggttctcgatgcggcccttgagactgggcagttgatcatcatggagacccgcctagtaagatgcatcttgccccgcccactgactgcatgtcatgaccacaacatatcc

SEQ ID NO: 171164 - DNA, 779 bp, Homo Sapiens
  misc_feature (52)..(94): n is a, c, g, or t
  misc_feature (506)..(506): n is a, c, g, or t
  misc_feature (727)..(727): n is a, c, g, or t
ttttttttaaggtgtgctctccctcaaaggaagtgtttattttttggagctnnnnnnnnnnnnnnnnnnnnnnnnnnnnnnnnnnnnnnnnnnnataacaacaggcagcacatgccccccacaccgcaccccatgcccaatctcagggtgggagacaagaggggggactcattgtccggagggaggctctggagggagacagccctgggtcaacccgactgtgtccccacacccaggactgccccatggcccctccagacctgctcagaactgatgagatcaagggaatgttcaagcgaaaagccgagcaggacggaccttccaagatgtgccagcttcctgggatctcactgcagcagagcgctgaggcccagcagcacaatcagcagctggggcgccgcagcggagctggagtcctgggagctggggtagtacttcttgtccgcgattctcacgcttaagacctggttttctcttctcagtcgctccacctctgcagacgcgtnctgaagcttatggtttaatgtagtgatctctccctcaagctcctccactttcttttgtccttgggccttctctgcatccagggaagccattagggccatcacagtgtggttgcaggtgggcggctgggcctccacatcctgaaagcccttctgggcctcggtcagctcttgttgaagaagatggtgacattgcgacactccatcactggccgaaagccggncccggcaggcctggctgtggccttggatggggagataataaagggcaccccc

SEQ ID NO: 171165 - DNA, 897 bp, Homo Sapiens
gggagactcctttcagctaaaggggagatctggatggcatctacttcgtatgactattgcagagtgcccatggaagacggggataagcgctgtaagcttctgctggggataggaattctggtgctcctgatcatcgtgattctgggggtgcccttgattatcttcaccatcaaggccaacagcgaggcctgccgggacggccttcgggcagtgatggagtgtcgcaatgtcacccatctcctgcaacaagagctgaccgaggcccagaagggctttcaggatgtggaggcccaggccgccacctgcaaccacactgtgatggccctaatggcttccctggatgcagagaaggcccaaggacaaaagaaagtggaggagcttgagggagagatcactacattaaaccataagcttcaggacgcgtctgcagaggtggagcgactgagaagagaaaaccaggtcttaagcgtgagaatcgcggacaagaagtactaccccagctcccaggactccagctccgctgcggcgccccagctgctgattgtgctgctgggcctcagcgctctgctgcagtgagatcccaggaagctggcacatcttggaaggtccgtcctgctcggcttttcgcttgaacattcccttgatctcatcagttctgagcgggtcatggggcaacacggttagcggggagagcacggggtagccggagaagggcctctggagcaggtctggaggggccatggggcagtcctgggtgtggggacacagtcgggttgaccccagggctgtctccctccagagcctccctccgaaccatgagtcccccctcttgtctcccaccctgaaattgggcatggggttgccgtgttggggggcaggggccggcctgttggttat

SEQ ID NO: 171166 - DNA, 328 bp, Homo Sapiens
tcactgtggttctcagacctttctgcctccttccttcctaagcccccaaagctgtcatcagattcaggccccactcccctcattgcagccattccctgtgggccccacgaccgttcctctcagtcctgactcttgtagttcctggttcactatcgccctctgcacagcagtgctgtctccttgatcctcggtgactccaacataactcagatgtgatgggccgagtaatggttcccaaagacatccaatctcaatcctgggcacccacgagtaggttgcattacatgcaaaagggaaaatactgccggagcggtgacaatcatgtggt

SEQ ID NO: 171167 - DNA, 337 bp, Homo Sapiens
agcctggatgacaggcaagacctgtctcaatattttaagtcaagggtttgtagtaatgtattcagtgccacttcttgccatcactttgcaattattgaaatgggaatactgagctcagaaagcaaatatgatgctttcatgggagatggagccacatttgtgttctgggtgggatcactagtgcaggagaacattacattttcttctgaaggcaaaatgcttgtaggttttgcctctactttgtatttacttctaaaattgcacttgttcacctaccagtgtttacgaaatcctgtatttgggatgctttttctataataaaatattataatttgaa

SEQ ID NO: 171168 - DNA, 266 bp, Homo Sapiens
caccgctccaggagacgctcgagtctgcgtcccggccctcagcactgtccactgtttcggtgccagcagagaccagcaggcccgggacagttggtgtttgccgtgccgctgtctaacttggtgtgcagagtgaatgccgctgccggagcggagagaggcggagcagccaggagagaggggatttctgtcagcgccggcctcgggagctcggagacatgaacggcttcacgcctgacgagatgagccgcggcggggatgcggccgca

SEQ ID NO: 171169 - DNA, 939 bp, Homo Sapiens
tagaggatccccggcacgcaggcaaaagatatagggagctgaaagataggctctgataatcctaggagcaccctttgagcatttctagggcccaaaaatcgatgtacaagggaagaccagcccagggaaaaacgaaatacaatatcctcttgaaaatctgaacataacttgtggtaatttagattataactgagatcaaatttcttgcaagggatcagtgtatgtagtttatcctgtataccagctggaagtaatggcttcaaattttcaataatttcttgctgggtctgaagcactaaggcgtttacttcatcggtgcatcgatcagccaaatttcttcccataccatcctctatgtgcttatttaattcacttttatatatttttaatacatctggattaggatgaaactctgaacaaaattcatcaaccaaaacagacagtcgacaaatttcatctgtcattgcacatgaaactttgtttgccacctcctcggtaacctccttgatttttttcttaacatccagtgttaaaaggttcatctggtttcgaataaagtccagtctatcaatttggtcttccctctcttccactgaataatgccttttatcttcagctgccaggtttactgaatccattatgtttttcacagtagctagtatctgtttagctctgatagtgtgctgttcgaactttgttttcactgctgactgcgagatacactcctcaaagatttgttcaaaattctgaaattcctgtaatcttgcatgaaatccttcagcaagtgccacaccactttctggcatcccctgtgctttttgctttctagcactaagaacttcctttgctgaaacaaagaagatacgattctgtgcttctaaagcatttacactttgagctcctccaccagaaaatgcagcatcttttcctggataacga

SEQ ID NO: 171170 - DNA, 1370 bp, Homo Sapiens
  misc_feature (1166)..(1212): n is a, c, g, or t
  misc_feature (1327)..(1327): n is a, c, g, or t
ggatcgatgcaccgatgaagtaaacgccttagtgcttcagacccagcaagaaattattgaaaatttgaagccattacttccagctggtatacaggataaactacatacactgatcccttgcaagaaatttgatctcagttataatctaaattaccacaagttatgttcagattttcaagaggatattgtatttcgtttttccctgggctggtcttcccttgtacatcgatttttgggccctagaaatgctcaaagggtgctcctaggattatcagagcctatctttcagctccctagatctttagcttctactcccactgctcctaccactccagcaacgccaggataatgcatcacaggaagaactcatgattacattagtaacaggattggcgtccgttacatctagaacttctatgggcatcattattgttggaggagtgatttggaaaactataggctggaaactcctatctgtttcattaactatgtatggagctttgtatctttatgaaagactgagctggaccacccatgccaaggagcgagcctttaaacagcagtttgtaaactatgcaactgaaaaactgaggatgattgttagctccacgagtgcaaactgcagtcaccaagtaaaacaacaaatagctaccacttttgctcgcctgtgccaacaagttgatattactcaaaaacagctggaagaagaaattgctagattacccaaagaaatacaccccttggcgaacatacacacgcactcacagctcttaagaaatacagctgctccactctgaccctgacctggcacacgtctactaaccagtcctccaccctcccacgccatcgcgcaaccctaacaacaggagactcgctttgcgtgacccctgctacgcccgcaacccaacacttgctaccatttgcacaccgccccgtcattccttcctcgcaaacctacctcttccaacaatctactcctccctccatccttgctcccttaatacccgcccccttgcgtcctgctggtacccccttttccccccatacgcatcctttgcctaccacgcgccattctcccatctcctttcgaacagtgcgtacccccccgccttagacctttcccccttccggcgcaccccacacacatggtttaccactccttggannnnnnnnnnnnnnnnnnnnnnnnnnnnnnnnnnnnnnnnnnnnnnnttgtttttgttccgcccctccgccgatacatacatcaccaatgccgttcctttattacccctccttccatacccgcgcccctcctttcccgcccgcacttatccgttcttagcgnatctccgttcgccccgtacccttgcgcctcttccgcgttaaaa

SEQ ID NO: 171171 - DNA, 340 bp, Homo Sapiens
tctagaggatcccgattgtcgacgtccatagcagatgaaatggagaggggcaagcagtgaggctgccttgcaaggcagggcagagcaggggctgttaaggagtttggacttaatccctgaggcaaggagaagtgatgtaaatgggggagtaacatgatgagattcatagattagagacatggctcaggctgctgtagagaaggcaccaggaagagcagatggctcaatgtgtgtgcagaagacctctccctgagtttagggagaggtttttaaaacagaagaagtttgagtaatttaaatgatgatgggaagagcggtgagcatcatgtggaccggctca

SEQ ID NO: 171172 - DNA, 299 bp, Homo Sapiens
ctgttcagaggatcccagatgatgctccacgctccagccaattatgctatctaagtcaataagcttgggatggtttattatacagcagaagtgtatcaaaagggtgatggtagttgcaggaaataaatatatacctttaattgtatatgcataaacatctttggaatgattcctccaaaatacaaattcccatattgaaagagcacactgagtacccagcatggtggatggaaacagatcatgaagtttcaaactaataggaagaggtagaagattctataggctttggggagcggtgg

SEQ ID NO: 171173 - DNA, 137 bp, Homo Sapiens
gtcactgaagaagaagtagaccttgttcgtcgtcccccgtgaagctgcccacactctcaggtacataggcagagcctacaaagtgaggttcgttgagccaaaaggccaggtactctgtcttcatggagcggtggagc

SEQ ID NO: 171174 - DNA, 176 bp, Homo Sapiens
  misc_feature (58)..(68): n is a, c, g, or t
ctcaccgctcatgataccaacaagtaaagctgaacaaactaaaaaatcaacagctccnnnnnnnnnnnaactgctccatgcagagcagggctaagtcataggcagtgcatctagagctgccaacaactctttatagatccgtaggagaaactagataaaaaaagtaaaggaggccg

SEQ ID NO: 171175 - DNA, 204 bp, Homo Sapiens
tagccggtccacatattgctccaccgctctgagtatgtgggcaagttactcggcctttttcctccttggtgtcttcaactgaacaagggcttgaagggaggaaagcaggacagcctagggtgggagagacagggtcataaggctggaagacataatagaacagggtcagttttagcctcagtggagcggtaggtgcaatcatgt

SEQ ID NO: 171176 - DNA, 218 bp, Homo Sapiens
caagtgggatccagtattgatcattgttgtaggtgttttgttttgttttaagatagttgatttattcttatagctaatgtacaacctggacttcccagtcttgatttaaaataaattagtgccctctaaactgtgagaatgctctgaaattcaaatttttaatactttctgttttgctgagtgagcgttgaaaatggatgttggcctggagcgtggag

SEQ ID NO: 171177 - DNA, 268 bp, Homo Sapiens
atcatgaaattccattcaaaatatatccagaaaccattgctgctcaccatcattgctgcaaccgccctgcctgagcccccattgtcacttgaatggatattgcaatggcttctccactgacccctgcttctccatttacccactacaatctttctctatgaaaagccacggtgagtcttaaaatgtaaatcagatcatgtgccttagttgctcaaaaactccagtggtttctcaacacacctagaattaaaatccaaagcctcagctg

SEQ ID NO: 171178 - DNA, 140 bp, Homo Sapiens
ccaccgctccaggtccagcagtgtgcattcttccccaggcagaaaacaggtactctaggtgcacaatcagattacttctgggacagacacttcattgtcatgttagagtgggagcgtggacaatcatgtggatcctcagc

SEQ ID NO: 171179 - DNA, 183 bp, Homo Sapiens
agtaccatagctccacgctcctggccagagtgacactattctgatggcatgcttgtgataaacttcagtaaaaaacatatcttagggaaaaagaggcttggatttgagaaagttgagtaagaatttgaacatatttaacatgtttgcttatagtgttcaataaagttgggagcggtggagcaa

SEQ ID NO: 171180 - DNA, 241 bp, Homo Sapiens
aggcaggaactcggagcccaggtccccgtgggtcgaggctgttttgtggagggtgtgcaggacccacaggactgatggtggaaggtcctgctttgccacttgcctctgggccgagtcacgtgaccaagacgagggctcacggagctttcctgatctctgatatcatcgggacacaaatgagggtttctacctggccaagtgcagagatgtagatgtctgcctttcgggccaggagcggtgg

SEQ ID NO: 171181 - DNA, 134 bp, Homo Sapiens
ccacatgattgtcaccgctccttttgggtccctacccctcctctcaatgttcctaccccttcctattcctcttattctccagcagactatccccttacctcacccagaaaacagacaagtcactggagaataag

SEQ ID NO: 171182 - DNA, 816 bp, Homo Sapiens
tcccctcacggattactcaaagtgctacgattacaggcgtgagcaccgcgtcggccaataaatggtttcttaattaaaaggattgtgacatttaattagccgttgcttgctcttgtcttgctcccttctctctcgaaacttgttaagaaataactcaatattctggcttttccactttaaatgtcatactgaccagcccgtgtatgccagcctcgatctcatcgttttctttaaccggtccaactccctttggcgtcccagtcaagataatatctccttcttccaaggttatgatcttagaaacatagctgatgatgtaggggatggaaaaaatcatggaggatgtctcaccctcctgtctgagttcgccgttgaccttgagccagagcttcagcttgtgagggtcagggatcttctccttgggcacgaacgcgctgaccgggcaggacgccgtgaagctcttcgccagagtccagggcagccccttcttcttgcactcgttctgcacgtcccgggcggtcatatccaggcacagggcatagccgcccacgtagtccatggccgcggcctcggggactgcgcggcagcgcttgcccatcaccacgcccagctccagctcgtggtgcaggttgcgagtgtacgcgggcatgaggatgggcgagccctcgggcgcgtaggccgtggacggcttcaggaacagcacgggctcgctcaacaccgcgctgcgcatctccctgacgtggtccgcgtagttcctccccacgcagacgatgttctttccccacttcccagaagcgggacaatggcctggatgct

SEQ ID NO: 171183 - DNA, 213 bp, Homo Sapiens
aatttactacagagattcaagatggagcgattttagtttatgacataacagatgaagattcttttcagataggtaaaaaagctgggtcaaagaattacggaaaatgttgggaaatgaaatctgtttatgtatagttggtaataaaacagacttggaaaaggagagacatgtttccattcaagaagcagagtcgtatgccgatctgtggagcgt

SEQ ID NO: 171184 - DNA, 617 bp, Homo Sapiens
  misc_feature (373)..(395): n is a, c, g, or t
tgagctcagtgtcaaggtgattcaactgttgtgccagacagtgatttacacagctcagataactgacctgtctagttaacagatcactgcttcatgttttcaaatattttaatttaatacattctttagtagaaatagtccacaaaacattttcttgaatttaaatatacaacttttatatcatgtatcaaaccagattttatattcaaacgatcacattttaaattctgtacataacagtaagcgcactagtcaaaagacatttatgtttgaaatgtcatttagatcaaacacaagggtcaaagcccaggacaagtattaaagttttatacttaaagagtactaaagggccagtgtgcagatgggtggattnnnnnnnnnnnnnnnnnnnnnnntagtactaaagggcttacttcaggcaaaagtgttcctgacataccaaaaagtaagatatagtttattttcatgcctccctgctcctagtaatgtatgttttgtgctgaactggcagctatcccaatgtgaaatgtattttggatgtatctggtgtcatttttctattaagaccaagtataatgtttgtttgtaaagcaataaatcttgacttgaaatcaaaa

SEQ ID NO: 171185 - DNA, 1203 bp, Homo Sapiens
  misc_feature (1009)..(1009): n is a, c, g, or t
ctagaggctgctgccttccaggatcttctgctgctgttgccgcaccaccatctgtacccacaggggagttaggatcaggcctccaggtgggagccccaggagcagaggaagaggtggaagagtcctcaccactgcaagagccaccaagccaggcagcaggcaccacccctggtccagaccctaaggcctatcagcttctatcagcccgcagtgcctgcctgctgggcctgttggccgccaccaacgcgctgaccaatggcgtgctgcctgccgtgcagagcttttcctgcttaccctacgggcgtctggcctaccacctggctgtggtgctgggcagtgctgccaatcccctggcctgcttcctggccatgggtgtgctgtgcaggtccttggcagggctgggcggcctctctctgctgggcgtgttctgtgggggctacctgatggcgctggcagtcctgagcccctgcccgcccctggtgggcacctcggcgggggtggtcctcgtggtgctgtcgtgggtgctgtgtcttggcgtgttctcctacgtgaaggtggcagccagctccctgctgcatggcgggggccggccggcattgctggcagccggcgtggccatccaggtgggctctctgctcggcgctgttgctatgttccccccgaccagcatctatcacgtgttccacagcagaaaggactgtgcagacccctgtgactcctgatcctgggcaagtggggaccccgctccccacaaccttgaatttaccaccatgatagccaccctgcccaaagttcctaaaaccccgaaaggcccactacaaccctaaccatcccggaacacctgacaacacaccatcaagaataaaaccctaattatcataagacgaacacaacgcccagcgaacaccgccattaaaccacaatataaaacaaagagcgcgcttaatcccacaaccacgcaaagatccgggaaaccaacacaacccccacctaatctgtacaaaacaantatccccctcacaccatcctaacaaattacttaaagccacacccaaagaataaagcacacctcagtgtaattttcacaacttcgctgataccaaaccaattattcacacattcaccaacagccactgattttccatattacgaaagcactcgctataatacatatttcgtctcgcaaaaccacccacgtgctcg

SEQ ID NO: 171186 - DNA, 990 bp, Homo Sapiens
  misc_feature (363)..(364): n is a, c, g, or t
  misc_feature (812)..(812): n is a, c, g, or t
  misc_feature (853)..(853): n is a, c, g, or t
  misc_feature (898)..(898): n is a, c, g, or t
  misc_feature (978)..(978): n is a, c, g, or t
gttggagcctcccctcttacgtctctgtgcttgtggctctggggaacctgggtctgctggtggtgaccctctggaggaggctggccccaggaaaggacgagcaggtccccatccgggtggtgcaggtgctgggcatggtgggcacagccctgctggcctctctgtggcaccatgtggccccagtggcaggacagttgcattctgtggccttcttagcactggcctttgtgctggcactggcatgctgtgcctcgaatgtcactttcctgcccttcttgagccacctgccacctcgcttcttacggtcattcttcctgaggtctaaggcctgagtgccctgcgtgccctcgcgtgcgtggcccnntagtgcagggtgtgggccgcctcgagtgcccgccagcccccatcaacggcacccctggccccccgctcgacttccttgagcgttttcccgccagcaccttcttctgggcactgactgcccttctggtcgcttcagctgctgccttccagggtcttctgctgctgttgccgccaccaccatctgtacccacaggcgagttaggatcaggcctccaggtgggagccccaggagcagaggaagaggtggtaagagtcctcaccactgcaagagccaccaagccaggcagcaggcaccacccctggtccagaccctaaggcctatcagcttctatcagcccgcactgcctgcctgctgggcctgttggccgccaccaacgcgctgaccaatggcgtgctgcctgccgtgcagagcttttcctgctttacctacgggcgtctggcctaccaantgggctgtgggtgctggggcagtgctgcccaatcccttggncctgccttcctggccatggggtgtggctggtgcagggtccttggnaaggggctggggcgggccctctcctcctggctggggcgtggttcctgggtggggggcctaccctggaatggcggctgggncaattccctgac

SEQ ID NO: 171187 - DNA, 961 bp, Homo Sapiens
gttggagcctcccctcttacgtctctgtgcttgtggctctggggaacctgggtctgctggtggtgaccctctggaggaggctggccccaggaaaggacgagcaggtccccatccgggtggtgcaggtgctgggcatggtgggcacagccctgctggcctctctgtggcaccatgtggccccagtggcaggacagttgcattctgtggccttcttagcactggcctttgtgctggcactggcatgctgtgcctcgaatgtcactttcctgcccttcttgagccacctgccacctcgcttcttacggtcattcttcctgggtcaaggcctgagtgccctgctgccctgcgtgctggccctagtgcagggtgtgggccgcctcgagtgcccgccagcccccatcaacggcacccctggccccccgctcgacttccttgagcgttttcccgccagcaccttcttctgggcactgactgcccttctggtcgcttcagctgctgccttccagggtcttctgctgctgttgccgccaccaccatctgtacccacaggggagttaggatcaggcctccaggtgggagccccaggagcagaggaagaggtggaagagtcctcaccactgcaagagccaccaagccaggcagcaggcaccacccctggtccagaccctaaggcctatcagcttctatcagcccgcagtgcctgcctgctgggcctgttggccgccaccaacgcgctgaccaatggcgtgctgcctgccgtgcagagcttttcctgcttaccctacgggcgtctggcctaccacctggcctgtggtgctgggcagtgctgccaatcccctggcctgcttcctgggcatgggttgtgctgtgcaggtccctgggcaaggttgggcggcctctctctgctggggcgggtttctggggggggctaacccgaagggcgcctgggaaatccttggaa

SEQ ID NO: 171188 - DNA, 1416 bp, Homo Sapiens
  misc_feature (839)..(867): n is a, c, g, or t
ggggggggcgccaccccacatggtgtgcggctggtgccgccgcccgacggggagggctgggtggcgacttcaaaacaaggaggaagaggtggaagatttcccaccactgcaagagccaccaagccaggcagcaggcaccacccctggtccagaccctaaggcctatcagcttctatcagcccgcaatgcctgcctgctgggcctgttggccgccaccaacgcgccgaccaatggcgtgctgcctgccgtgcagagcttttcctgcttaccctacgggcgtctggcctaccacctggctgtggtgctgggcagtgctgccaatccactggcctgcttcctggccatgggtgtgctgtgcaggtccttggcagggctgggcggcctctctctgctgggcgcgttctgtgggggctacctgatggcgctggcagtcctgagcccctgcccgcccctggtgggcacctcggcgggggtggtcctcgtggtgctgtcgtgggtgctgtgtcttggcgcgttctcctacgtgaaggtggcagccagctccctgctgcatggagggggccggacggcattgctggcaccccggcgtggccatccaggtgggctctcctgcttccaggcttgttgctatgttccccccccgacacccatctaatcaccccggttcccccgcccataataggacctgctggcagaaccccccttggtgaaccttcccgtgaaccccctcggggccccgggttgggagggaagcccccccagcctttccccctcaagaagaagcacctcgggagcccctgttccccgccccccgcaccaaaattgggcctcttgggctnnnnnnnnnnnnnnnnnnnnnnnnnnnnntttgtagaaaaacactagggacaccccctcggggtaaacagcatcgcccctccctatctacacagaaagcgggacgtgtcccgcccccgccgtgtgccaccaaacccggcgggtaggttccccactactcccccccggcagcagcgcagaaaaaagaaacctcccgcctagaccaccgccacagctgtgtgcctccttggttttagaaagaggcaaagggcattctccatcagtgagggaccgagtcttctttggtgctacaacaccaccgacatcggaagacgctatcaagccctcgctgaccgcaccagcgcagattcacacacaaatcatccctctgggcagaaagaagacatccgcaccgcgcgaacacgcgtgaacagcgcgggcggagagcgcctgtgttcgacctgtgggatcgcgagcgccacccccccgctggcaaaaacacctatgagaagcagacacagtataccgactgcgggaggccgccgtttttcgcggacgatgctataactgccccccgctgtgtgagtcttatccacacac

SEQ ID NO: 171189 - DNA, 585 bp, Homo Sapiens
gggggctgggcggcctctctctgctgggcgtgttctgtgggggctacctgatggcgctggcagtcctgagcccctgcccgcccctggtgggcacctcggcgggggtggtcctcgtggtgctgtcgtgggtgctgtgtcttggcgtgttctcctacgtgaaggtggcagccagctccctgctgcatggcgggggccggccggcattgctggtagccggcgtggccatccaggtgggctctctgctcggcgctgttgctatgttccccccgaccagcatctatcacgtgttccacagcagaaaggactgtgcagacccctgtgactcctgagcctgggcaggtggggaccccgctccccaacacctgtctttccctcaatgctgccaccatgcctgagtgcctgcagcccaggaggcccgcacaccggtacactcgtggacacctacacactccataggagatcctgcctttccagggtgggcaagggcaaggagcaggcttggagccagggaccagtgggggctgtagggtaagcccctgagcctgggacctacatgtggtttgcgtaataaaacatttgtatcta

SEQ ID NO: 171190 - DNA, 305 bp, Homo Sapiens
tgtcacgctccagctgctgtcaatggctctgggaccatgaggaggactcaccatccaatggagcatgacaagagcggcgaggaggacgcagtgcagccgaggaggggccagtggtgcctgcggccaccaccgaagaccacattcaggtggaagccaggatcggacccacggacgggaccccagaaccccaagtggagctcaggccccgtgatacgaggcgcatcagtctacgttttagaagaaggaagaaggagggcccagcacggaaaggagcggcagccatcgaagctgaggacagggaggaa

SEQ ID NO: 171191 - DNA, 222 bp, Homo Sapiens
gcctcaccgctctgacctggaagacatttatatatgacaaatttggagaggcaaacaatagtgaaagaaataattttacaataaatagctcttgggaaaaactagataacagtgtggaaaaagcgaactcagatttatatctcacatcatatgttataaattttagatgtattaaaaagttagttttacaaactcttaaaactcagagggagcggtgagcat

SEQ ID NO: 171192 - DNA, 733 bp, Homo Sapiens
  misc_feature (637)..(637): n is a, c, g, or t
  misc_feature (679)..(679): n is a, c, g, or t
  misc_feature (707)..(707): n is a, c, g, or t
ttccatgactccgataacacgaatttgctttttctgtcatattctcacaagctcctcagtctttctgtttttaattctattttctatgttgttgtatacgctgagtaatatgtattattctatcttctagtgcatagattatttcctctgtcccattcattctgctgttaagtctatctctgaatgtatttttatttttctggttcaatttctctcataaaagctctgaactttttatttcaattactgagtcagttataaaaattctaatttaaaaaaattatgggccaggagcggggtagggatatggcaggtacgataatgtaaggaaaggcaaagaggtgaaaattagcaagtcgtgaacaatagcagtgaccagtgcaggtcagtttcaggtccctggcattcaggttgggaatggcaggatgggaggttgggcagtggagctgggagcagctctcagagggccttgcatggctttctaaggagctcaaacattttccagtaggtgatggcctgcatgagggctttaagcgggggagcaaaatggtcacgtttgcatttttttattatttctagaaggcactatagatggatgaatctggtgggttgtgaaaagcccatgtctgaaggtcangaaggtcgtgaaggagtgaaggctgactagcctgggcccgtnaaggatggagaggaagaaaagggaagtngaaaagctgttgaaagcccaccattc

SEQ ID NO: 171193 - DNA, 192 bp, Homo Sapiens
acgctctaattgtctagagattaataaatcaatgcaaagaaaaaaatcactaatctagccaaaagtgtaagacagctccagtgtatcaattctgtcttcaaaagtggaccccagttacaacaatcgtgggaaactgaacctgtattacataaactctgaaccattttaattaatatttatcaaagtgttgcc

SEQ ID NO: 171194 - DNA, 150 bp, Homo Sapiens
atccagcttgctcttcgctccacaagatggctacataatacttgtaaaaatgtttcctacttccttgactttgtaactttatattcttcaacacaacccccatgttaacaataggaagggctggaagaaactaaatcagcccgagcgatg

SEQ ID NO: 171195 - DNA, 232 bp, Homo Sapiens
ggtcggtacacatgatgtgcacgctctctctccctaacccgggctctcctatctggtcaaaacccactccaaactagacccatggccaaaatgtggaattcttatcaaggccatttttcaacttgggctaccttcccgccctctcccatctttctttccctgacaaatctcaggggctctcctgtactttatacactagtttggctggtggtggagcggtggagcacactgt

SEQ ID NO: 171196 - DNA, 232 bp, Homo Sapiens
atctagtctttgagcttgaagaactcagacctctgaagacaggatactacccagctggtgctggtgtctctgagtggaacacaatggaactggttgggcaattgtcgggaaaaactacaaagtggattcagcagctgctacaagaaggacctgctactgtctgggtaaaggagtgttgccagagtgacccttacaggaataggaagcaaaaagaagagtcccagctggtgag

SEQ ID NO: 171197 - DNA, 338 bp, Homo Sapiens
ctgaatgagaatgagtgattagtacactgtcttgcgcagttcttaccaaacatctatcattcaagatgcctgtgaaatgagtacttcttgaaaaactcctatgtgaaatgcaccatgctagatgtcaaaaaaatttaaaaatcagtatatttagcaaaatccatgctcccaagagctcacaatctacaaaaagaacctatttccatcaccatttcattgaaatgtcctgttgcctaagtgacactcatattacaagccctgctcatttaccttaaaagaagaatctgtccacatactgctgaaacatcagtcaagagagggaatactccgtccctact

SEQ ID NO: 171198 - DNA, 264 bp, Homo Sapiens
caatatctgccaatctctccactagctccttcttgtaatcacacatttataagcctcccacatagaacacaactcacttgatactgctgccctttcagatgtcttgattttctaattcctgtgaataagtggctgatttttactagcctcatttagtataattcagtcctcttgattcctttgcagtctcatatcagttccatcaactatagagataattgaatcatagttacagaggcctccttttgaaacaaatgcagccat

SEQ ID NO: 171199 - DNA, 427 bp, Homo Sapiens
actcagttataccatggttggtcaggctggtccagacctcctgactctcacacaccgccagactcggtcacccagagcgcggagatagcaggcgatgaaccaccgtgcccagcactgtatataaactagctttaacttaaatatgggcctcctacctgctggaagtcacaggcgtggcttactcaggataagtcccagcacaacaatcgggacgtgtcggactgcccatcgtaaaacaaccaaggggcttccaagagctgagagtcgctgagtgtggcagatctgagtctgcagtgaagccttcggtcaggcagaccagcctgaggcctgagaagggagagcaaagccaggtcacagcctggtcagggccattaactcatgtcagagaagtggaaggtggggcctgagcccaatcagggagcggtgg

SEQ ID NO: 171200 - DNA, 603 bp, Homo Sapiens
agaggatcctcgctcaggtggtgtatctgaggacagtggcctcaggtcagcctctggctggagaggaaggtgctccaatgtcatggctactgccaggaatacctaagggttctgggttaagattgcaaggcccaccggatgatgaggttcccacctccctccagccctggcccacttgtgcctatgcacaaagacatctggaggccactcacaggagcacccgacaggtctgtgggcaaacccatgcttcctgtctggaggggtatgggccgggatgcccctgttggcaccaggcacagcagcccgccatcagcgggtgatgctcatgtgccatgctctgggctcacttcctgttggctctggcaagccttggtgcatgtcctccaggtgccaccaatagtgtggaaatgccttggagaccctggggggatgacatctcttgactctgacgggcctcatctctcctagattccctgggacagagggtgaaaagctacaaagtgcactagtgtttgcaaacagccctctggacactttttgtgcaggaactggaagggaaaactggtcagcacgtgctcctgtggccctggacgatgtcacagg

SEQ ID NO: 171201 - DNA, 860 bp, Homo Sapiens
  misc_feature (14)..(14): n is a, c, g, or t
  misc_feature (111)..(111): n is a, c, g, or t
  misc_feature (124)..(124): n is a, c, g, or t
  misc_feature (182)..(182): n is a, c, g, or t
  misc_feature (416)..(436): n is a, c, g, or t
gagaatgtattttntcaggagattggttgtagaatttgcataagtaatgagaagccaaatgttaatcaccaagccaatgggccaaatgtctccagggcatgttagagaccntcacagcagaccntcccatcacaggccaggaggcttagaaggaaaaatggttttgtgggtccagaaccccntgctgtgtgcagcctaggaacttggggccctgcatcccagctgctcctgccacaggtaaaaggggccaaggtacacctcaggccatggcttcagagggtgcaagttccaagcctttcaggttctaggtggtgttaagcctgcagatgcaccgaagaattaacgttcatgaacctccgcctagatttcagaagatgtatgaaaatgcctggaaatccaggcaaaagtttgctgtnnnnnnnnnnnnnnnnnnnnnccctcatggataacctctgctagggcagtgtcaaagggaaatatggggttggagctcccacacagagtccccactggggtactgccaagcagagctgtgagaaaagggccaccatcctccagaccccagaatggtagatccactgacagcttgcactgtgtgcctggaaaagctgcagacactcaatgcagccagaaggggggctgtaccctgcaaagccacaggggcggggctgcccaagaccctgggaacccacttcttgcatcacctagatgtgacacatggagtcaaaggaggtcattttggagctttaagatttgcctgctgggttttggacttgcatggggcctgtagctcttttgctttggccaatttctcccatttgaaacgagtgtatttacccaatgcctgtatccctgtgtat

SEQ ID NO: 171202 - DNA, 397 bp, Homo Sapiens
acatgattgatccaaagggctcaagtctaaatatgttgaagagcagcctggtcatatacaaatgggctttgcttccatccgcactgcaactggttgttacattggctggtgcaagggtgtttatgtctttgtgaaaaatgggataatggatacagtacaatttggaaaagatgcttatgtctatctgaagaatcctcctcgagattttcttccgaaaatgggagttattacagtttcaggattggcgggcttggtttcagcgagaaaaggttccaagtttaagaaaattacttatcctctgggactggccactttaggagcaactgtttgctacccagttcagtccgtaataattgctaagtaacagcaaaaagtatatgctacagccagcaatttc

SEQ ID NO: 171203 - DNA, 525 bp, Homo Sapiens
  misc_feature (378)..(467): n is a, c, g, or t
tggacacatgattgtcagcgctccaagatgtgacctctccctctctgtgttcctttctctccatcagtatctcctggctatggtcatagcgtatttcagccgggccggcctcccctcctggcaataccaacgcattcatttcttcctggctctgtgagtggtttgctgcctcctatccgtcaatatccaatgccctgggacagcgggggaagtgggattccagcctttcatttattctttcacctatttgtcctctttactctgtgtacaaaaaagacaggattatagtatcatagactgttgcttctaaacagaaactcaggctgagcacagttatagttcactgcagcctctacttcccaggctcaagcagtctgnnnnnnnnnnnnnnnnnnnnnnnnnnnnnnnnnnnnnnnnnnnnnnnnnnnnnnnnnnnnnnnnnnnnnnnnnnnnnnnnnnnnnnnnnnagtgcccagactgggttcaaactcctgggctcaaatgatcctcccacctttgcattct

SEQ ID NO: 171204 - DNA, 924 bp, Homo Sapiens
  misc_feature (826)..(826): n is a, c, g, or t
  misc_feature (859)..(859): n is a, c, g, or t
gtggttcgggtccgctttcgtctccgtcctgctgccgttaccgccgctgctgccgccgcttgcgtcccccgctccggtctgtggtgcagccgggacccaggaccatgtctctgtctcgctcagaggagatgcaccggctcacggaaaatgtctataagaccatcatggagcagttcaaccctagcctccggaacttcatcgccatggggaagaattacgagaaggcactggcaggtgtgacgtatgcagccaaaggctactttgacgccctggtgaagatgggggagctggccagcgagagccagggctccaaagaactcggagacgttctcttccagatggctgaagtccacaggcagatccagaatcagctggaagaaatgctgaagtcttttcacaacgagctgcttacgcagctggagcagaaggtggagctggactccaggtatctgagtgctgcgctgaagaaataccagactgagcaaaggagcaaaggcgacgccctggacaagtgtcaggctgagctgaagaagcttcggaagaagagccagggcagcaagaatcctcagaagtactcggacaaggagctgcagtacatcgacgccatcagcaacaagcagggcgagctggagaattacgtgtccgacggctacaagaccgcactgacagaggagcgcaagcgcttctgcttcctggtggagaagcagtgcgccgtggccaagaactccgcgggctaccacttccaagggcaaggagctgctggcgcaaaagctgccgctgtggcaacagccctgtgccgacccaacaagatccccggaccgcgcgntgcagctcatgcagacagtggccagaaacgggngccacccctcccccagaggcccctgtcgggccttccaaggtcccaaccctgggccatttttccgg

SEQ ID NO: 171205 - DNA, 1133 bp, Homo Sapiens
  misc_feature (170)..(170): n is a, c, g, or t
  misc_feature (181)..(197): n is a, c, g, or t
  misc_feature (210)..(210): n is a, c, g, or t
  misc_feature (215)..(332): n is a, c, g, or t
  misc_feature (337)..(511): n is a, c, g, or t
  misc_feature (514)..(516): n is a, c, g, or t
  misc_feature (518)..(519): n is a, c, g, or t
  misc_feature (526)..(527): n is a, c, g, or t
  misc_feature (529)..(530): n is a, c, g, or t
  misc_feature (533)..(533): n is a, c, g, or t
  misc_feature (540)..(540): n is a, c, g, or t
  misc_feature (542)..(543): n is a, c, g, or t
  misc_feature (546)..(564): n is a, c, g, or t
  misc_feature (566)..(568): n is a, c, g, or t
  misc_feature (570)..(571): n is a, c, g, or t
  misc_feature (575)..(575): n is a, c, g, or t
  misc_feature (578)..(579): n is a, c, g, or t
  misc_feature (581)..(594): n is a, c, g, or t
  misc_feature (598)..(656): n is a, c, g, or t
  misc_feature (658)..(717): n is a, c, g, or t
  misc_feature (719)..(747): n is a, c, g, or t
  misc_feature (749)..(753): n is a, c, g, or t
  misc_feature (776)..(776): n is a, c, g, or t
actgaaggtaggggctgggataaggagataattttaggtattgttagccacaaagtggtggttctaaggatgtattgggcaaaagcagggggtaaggggggagacgggtagcattatacctaaagggggtaaatagaaggcgggaagagtgcgtccagcggggaaaaaanaaaaatacaannnnnnnnnnnnnnnnnaaacgtggggtcngggtnnnnnnnnnnnnnnnnnnnnnnnnnnnnnnnnnnnnnnnnnnnnnnnnnnnnnnnnnnnnnnnnnnnnnnnnnnnnnnnnnnnnnnnnnnnnnnnnnnnnnnnnnnnnnnnnnnnnnnggccnnnnnnnnnnnnnnnnnnnnnnnnnnnnnnnnnnnnnnnnnnnnnnnnnnnnnnnnnnnnnnnnnnnnnnnnnnnnnnnnnnnnnnnnnnnnnnnnnnnnnnnnnnnnnnnnnnnnnnnnnnnnnnnnnnnnnnnnnnnnnnnnnnnnnnnnnnnnnnnnnnnnnnnnnnnnnnnggnnngnnggggggnngnnggnggggggngnnggnnnnnnnnnnnnnnnnnnngnnngnngggnggnngnnnnnnnnnnnnnngggnnnnnnnnnnnnnnnnnnnnnnnnnnnnnnnnnnnnnnnnnnnnnnnnnnnnnnnnnnncnnnnnnnnnnnnnnnnnnnnnnnnnnnnnnnnnnnnnnnnnnnnnnnnnnnnnnnnnnnngnnnnnnnnnnnnnnnnnnnnnnnnnnnnntnnnnntccccctcccgcagctacaactnacttataataaaggactcaaaaagagatcgggaggttttaagtggccgcagccccaccaaaccaagcaaagacacctcttgtacaggaggaacaaaaatccagaggaaaagaaaagtcttcctaggacacaatccatcgattgcgtggaaaaacctaagtttcaacagggcacactgaggcacttggctgactccccacccttcccctgaagttttcactccggtttaacaagagaatttgctgaagccacaaagatcccccaatggctacatcctagctgactgggagaaactatggcttctcccatccagctgtcacttggaccccactccccttccctaagaaaatagggaggg

SEQ ID NO: 171206 - DNA, 1068 bp, Homo Sapiens
  misc_feature (170)..(170): n is a, c, g, or t
  misc_feature (181)..(197): n is a, c, g, or t
  misc_feature (210)..(210): n is a, c, g, or t
  misc_feature (215)..(332): n is a, c, g, or t
  misc_feature (337)..(511): n is a, c, g, or t
  misc_feature (514)..(516): n is a, c, g, or t
  misc_feature (518)..(519): n is a, c, g, or t
  misc_feature (526)..(527): n is a, c, g, or t
  misc_feature (529)..(530): n is a, c, g, or t
  misc_feature (533)..(533): n is a, c, g, or t
  misc_feature (540)..(540): n is a, c, g, or t
  misc_feature (542)..(543): n is a, c, g, or t
  misc_feature (546)..(564): n is a, c, g, or t
  misc_feature (566)..(568): n is a, c, g, or t
  misc_feature (570)..(571): n is a, c, g, or t
  misc_feature (575)..(575): n is a, c, g, or t
  misc_feature (578)..(579): n is a, c, g, or t
  misc_feature (581)..(594): n is a, c, g, or t
  misc_feature (598)..(656): n is a, c, g, or t
  misc_feature (658)..(717): n is a, c, g, or t
  misc_feature (719)..(747): n is a, c, g, or t
  misc_feature (749)..(753): n is a, c, g, or t
  misc_feature (776)..(776): n is a, c, g, or t
actgaaggtaggggctgggataaggagataattttaggtattgttagccacaaagtggtggttctaaggatgtattgggcaaaagcagggggtaaggggggagacgggtagcattatacctaaagggggtaaatagaaggcgggaagagtgcgtccagcggggaaaaaanaaaaatacaannnnnnnnnnnnnnnnnaaacgtggggtcngggtnnnnnnnnnnnnnnnnnnnnnnnnnnnnnnnnnnnnnnnnnnnnnnnnnnnnnnnnnnnnnnnnnnnnnnnnnnnnnnnnnnnnnnnnnnnnnnnnnnnnnnnnnnnnnnnnnnnnnnggccnnnnnnnnnnnnnnnnnnnnnnnnnnnnnnnnnnnnnnnnnnnnnnnnnnnnnnnnnnnnnnnnnnnnnnnnnnnnnnnnnnnnnnnnnnnnnnnnnnnnnnnnnnnnnnnnnnnnnnnnnnnnnnnnnnnnnnnnnnnnnnnnnnnnnnnnnnnnnnnnnnnnnnnnnnnnnnnggnnngnnggggggnngnnggnggggggngnnggnnnnnnnnnnnnnnnnnnngnnngnngggnggnngnnnnnnnnnnnnnngggnnnnnnnnnnnnnnnnnnnnnnnnnnnnnnnnnnnnnnnnnnnnnnnnnnnnnnnnnnncnnnnnnnnnnnnnnnnnnnnnnnnnnnnnnnnnnnnnnnnnnnnnnnnnnnnnnnnnnnngnnnnnnnnnnnnnnnnnnnnnnnnnnnnntnnnnntccccctcccgcagctacaactnacttataataaaggactcaaaaagagatcgggaggttctaagtggcagcagcaccaccaaaccaagcaaagacacctctggtacaggaggaacaaaaatccagaggaaaagaaaagtcttcctaggacacaatccatcgattgcgtggaaaaacctaagtttcaacagggcacactgaggcacttggctgactccccacccttcccctgaagttttcactccggtttaacaagagaatttgctgaagccacaaagatcccccaatggctacatcctagctgactgggagaaa

SEQ ID NO: 171207 - DNA, 254 bp, Homo Sapiens
accgctcgttccaagtcaaaatgggactacaccatgcataccataggctctgtcaatgtctccagccccagctatactcaccagacaggagcaagaaagcctcagtaatacaggcatcttgcttgcatacccgcacatccagagtactgccctccatgggaactcaatttctagaagtctcttggcccagcactctttatttctcatctgagccctccctactgctttcattcttttttaaaactagacagctg

SEQ ID NO: 171208 - DNA, 140 bp, Homo Sapiens
gccggtcacatatgctcacgctctgtctggggcagcgtcgcaccgctcaccccgcacctcatccctccgctcctccttccttctcctccacaccctctcggcaccgtgccccctttcctcacctaggatgcgcgtgatga

SEQ ID NO: 171209 - DNA, 187 bp, Homo Sapiens
ctcagccggtaccattgctcaccgctcctgggcggtgcacaaacccactcacgcacacagcactcagtaagccgggactgacccactcagacacgcacacaggcgcacatcacacacaggctcagccccccaaacccagacccaggagctggagcgtacgggtccacgtggctagaaaatgcaggtt

SEQ ID NO: 171210 - DNA, 286 bp, Homo Sapiens
  misc_feature (211)..(229): n is a, c, g, or t
accacatgattggtccacgctccgtctcactacttcattccccattccccagctcagcagcctgaggtctagggctctaggagcactttccaccttcagctcataatcccgaacccaaccccatctggacctgaagcctgaggtctggcaccttcaccaccatgtctcaacctctacccttgtccctagagtggccctcacctctcttccnnnnnnnnnnnnnnnnnnnctcttggagatagcatctcgctcggtaacccaggctggagcgggggagcactcaggt

SEQ ID NO: 171211 - DNA, 434 bp, Homo Sapiens
  misc_feature (35)..(35): n is a, c, g, or t
ggtacctccacgctctggctctgagttcttctcantgggaggctgagaaaagtctgggggtctgggacagccagggccgggtttccccttccaggcaatgagaaagaacaggctctgcctcccaccataagagtctatcccaagttccagatgtgtcagggaagcgatggagagccccagacttgaggcatctgcagacaggtacctgctcagacatccacgtggagggtgttagtatcctgggagccttcagaaccttgaagcatgccagcagaggagaatgagggaagataaaatcaaagtgacttatcacaattaaggaaatgtgctatttcatgtacaactgtgtgtgaggatgagattcctacctgccatactgaggtattatgataagaactaagagagtccaaattcctacaggatgaacagctgag

SEQ ID NO: 171212 - DNA, 169 bp, Homo Sapiens
ggtactgctctctatctgctgcttactcttggccacctgggtaggagggtgaagtcaggttcacgctctgagtcagaggtgaagagcaagtgcccgggaaccagagctccagtagtgggatataaaaacaggagcctggtggcctgggagctggtggagcaatctatgt

SEQ ID NO: 171213 - DNA, 421 bp, Homo Sapiens
gtcggtacccacagtcccttatcatcttctgcattctaagcattctcctttaactatcccacatttcttgaccctgtttttctccttcaaggacattcttccttaaagactgcaacaattcccttccccatctctgccaatggaaatccaaccttcaaaatacccacccttcaaagcccagctcaaaggtaaccttcacgaagacagtcctgaatctcaccccagcttccccaaagaactcttcctcttctaagcaccaaacatataatactgctttaatcccccactcattttggaacatacccctccctgtctttctactatgcttttgcttatagtcactcagcaggtatttgttaaaaagaaaagtcagttaacactattcccttcccttctctaccataaaacatatttaaggccg

SEQ ID NO: 171214 - DNA, 390 bp, Homo Sapiens
  misc_feature (329)..(337): n is a, c, g, or t
ctccccaccctctcctaccctcaccatcacctgctagcctgcacttttaacttgatcttctgcccagtgatagcttttaagtgaggcttagagcagatacacctttacagccggagcggtggctccaccgctccctcaagtgcctgactccagagctggagcaaagaaaattcaagatgcaccctgagtgtcctgtggtagctgaaaataagaaattgggaaaacatgatgaaaggacataggaccccaactgcaggagcttcccatgacccaagctacgacaatctgagtaacagaataagaatactggattataatacatagagttnnnnnnnnntctaagtgcataaagacataaatgagcccggagcggtggagctatcactgtgg

SEQ ID NO: 171215 - DNA, 360 bp, Homo Sapiens
  misc_feature (55)..(131): n is a, c, g, or t
agaggatcccagatgatggctccacggtcctggataaaaggtaaattaagtagcnnnnnnnnnnnnnnnnnnnnnnnnnnnnnnnnnnnnnnnnnnnnnnnnnnnnnnnnnnnnnnnnnnnnnnnnnnnnnccttcatgcccggccacattaaatattcttaatacctaatagtgcagataaaattgggagaaagacaagctgtcattgcaataggatgttacaacattatattgcattaaaaatgatacctaaaagcttgctctttacaacacatggaaatactaatactacattaggagaaaaatccaataaacttgttgacattacatgatctcaagtttaaaagaaatatgcaaag

SEQ ID NO: 171216 - DNA, 229 bp, Homo Sapiens
caccgctcccttgagtaattcataaaatccactctttaacctctgaatcatcccttcatttcttgctctaagtaaaatctagctccctgaggatgccttttcctttcgcagccatctcaaatgataggtgtttcctcttttctcctccacacacttcatatcactgtacctactggagatgtggggaagaaatcttcctgctctggctgagcgtgagcaatcatgtagg

SEQ ID NO: 171217 - DNA, 1118 bp, Homo Sapiens
  misc_feature (681)..(693): n is a, c, g, or t
  misc_feature (1075)..(1075): n is a, c, g, or t
  misc_feature (1080)..(1080): n is a, c, g, or t
tgagccggccagatgctcacgctcgcggctgctggcatgattttagagtcagtgtcagatattgactttgtcttcctgtaccagatataaccaaccatatgacgttagacaagtgacttaataattcttagcatcagcttctcctgaaaaattgggatagtgctgtctgtttcacaggactcttgagtttcatgaagattaagtaagaatatatagtcaaattagtagtatagtacctggcacactgaacctttggtaatggtgctggatattgtaggggataaatacactagtagaaatccctgcctttgaggagctcacgttctggaggggaagacaggcaaaaaaatcagtgatggtgatgtgtcatgccaggtgccgtaagaaagttaaccactcacaggttcctatgggagcatagaggagcggcagccagccccatggacatcagtgaacacacagctttcattgttccccctttcttgtaataattataccagtagtaaaaatgagtaaaatggtttttattctctatttataaagcatgattcatattaggtgagaaagcgaatcactttttccaaatgaatcttaagctatgctttctggtcttggccttaaatttaatatttttgaccccaaagtgattaggtcttgttgcagcaaagtgccaggaatagnnnnnnnnnnnnnaattctgcaaatatttgaatacttactttgtctccaggttactgtattatctacttgggaaaacaatagcaaaaaaagccccatcctcgcagtcggtggcaggcagagaaggctgacagttaaagagaattgggaaggcttctgaggaagagatgtttgaactgaaacctagtggtcagagaaacgttaaccaggaaaagaatgggtgggggtataggcagggagggggtcccaccagaggctctcagcttcctcatttcagaacttgaggtggactaggcaaattcaaggtcccttttattgctttcattcctagcatatgtaagctagaggaagccctcattttgtctctttctatgttgaacgcagcttgcttgtttgnccctnaagttcatgtttaattaaaaccccggtatagggctcca

SEQ ID NO: 171218 - DNA, 258 bp, Homo Sapiens
tagtttttaatggtagtacaggtgagttttctctttcctgttaaatttttctcatcactaattcagtcagcaaatatttgtggtgcactttttacatcctggtgttcttatagatgctgagcgtataaaagtggacaaaaagtcctgctctaatggagtttaaaatctagtgaggggagattgacaacataaaagagtaaataatatgccagatgttaatgatagtgatgggcacatccaggccgcaaagggcgcaag

SEQ ID NO: 171219 - DNA, 201 bp, Homo Sapiens
gatgctccacgctcagagagagcaaatgtggaaagacttgggtttcaaaggatttcaataaagtaggtttggcggcagagatttaggaagagtccaacttaagagataatgggctcttaaaacatgtgcaaaagtatagttcaaagtcccaaatgttaggttaaaggtaatgccttttctattgcactaaattctagaaag

SEQ ID NO: 171220 - DNA, 489 bp, Homo Sapiens
atcttcttctttgtttcttcccgctttattgtcacatcctgaatagcctttaatatctcctggtgattcttcatttcctcttctctcctttgctgaagctgctttaattgcacttggagctgattctccacttgcctctgtttgtccaggacctcctggtaacgctctttcaacagggttctctctgtcatcattttatccaaattcttttcaatatcttgatctgtgtttacctctgaatcagctgtcttaaagtcagtctataaaggaaaaaagttatatttagaatcgttcagagacactttaaaagaggcagaatcactaacacctagaattccgccacaggtaactaactttttactctttccccttaccagcttccaagcaagctaagcaatgtagttctggcaaacggacaccaacatccacgctgcattaatcatcggtcccacaaaataacccaaacaagacccaatgactgactgagag

SEQ ID NO: 171221 - DNA, 454 bp, Homo Sapiens
  misc_feature (273)..(273): n is a, c, g, or t
  misc_feature (356)..(356): n is a, c, g, or t
  misc_feature (372)..(372): n is a, c, g, or t
  misc_feature (399)..(399): n is a, c, g, or t
  misc_feature (425)..(425): n is a, c, g, or t
tttattgacacagtaacacaacacacttgcctccctgacatccccgtccccctcacccaatctagatctctcccccttgctctccccttagaaaaagctgtttagtgaaaacagttaagggcaggccacttctacactcccagcgctaccctaggccctgcagagcagagtctcagacactactcggaacctggtggggaggcagctagtactatactcagccagccagaagtatccagtccctaagaacggattgccccacaattcccaggncctgagttgctatatattcctcttccttactgctgtttgtgaccccaagaaggggaccttggggcctgggctgcagccagggngcaagaactcctgggnagtgattttgaggatttaatttagagnttgggctagtgtttttaaaagggccnggggttcccccaaaaaagccctggggggt

SEQ ID NO: 171222 - DNA, 255 bp, Homo Sapiens
ggtaccgatagctcacctgctctttccctggctgccctacccttcccctccacgctgcctgggcagcaaggacagggaccaacaggagcaagtgtgccttcctcagggcccttcctgagagctccacagcccaccctgtggccccctgcttggcattggcctggcctgcccggcacccagccttccaatgctgctgcacgtcctcattttcctttttggtcccctcctgccccctctggctgttcatgccatttg

SEQ ID NO: 171223 - DNA, 738 bp, Homo Sapiens
ccagtaaaaaggcagagaaggaggcaagttggctgctccgagggcaggtgaacaggtagaggccatgaaacagtttgacctgaactatggaagtgccatcattgaaaattgcgggtccagccccggggaggagagtgaggtgggttctatggtgggcgaaggcttcatcgaagtcctgaccaagaagcagcgccgctgctggaggaatagagaagaaagaaggagcaggccgtgcaggtgcctgtcaaaggtcgaggcctttcctcccgtattcctcctcgatttgcaaaaaagcagaacaacttatgtctggagcaaggtgacgtgaccgtgcctggcagcagcctgggcactgagatctgggagagcagcagccaggctctccctgtgcaggccccagccaacgaatcctggaggaaagctgtcactgccttcagcagcaccgagactggctctgcggagcagggttttaagagcagccagggagatagtggcgttgacatgagtgctgagtctcgggagtcgtctgcgacctcctcgcagcgcagctccccatatgggactctgaagccagaggagatgagcgggcccggcctggcggaacccaaggccgacagccacaaggagcaggctccaaagccatctgagcagaaggattcagaacaacgctctggacagagcaaggagcacagaccaggacccatcggcaacgagcgttctctgaaaaacagaaagggc

SEQ ID NO: 171224 - DNA, 165 bp, Homo Sapiens
tggacaaattttagaagcgacacttccagtgtttatcacaatgctgtcaattcatttctttgttccaataaaaactgacaaactcgctcttccatacatagaaccctggaactcttttaagaaaagcgctcacgcctctaatcccaacacccttgggaggctcga

SEQ ID NO: 171225 - DNA, 173 bp, Homo Sapiens
ggaaggaatatagaggagttccgggacagtgacaccgcggaagtttgttggtagcacgtaagcctagataagataaatggcaatgccagagtcgtaaaacggaaatgtcagggagactgtcagagtcctgtgccaaaggtcaagtttaaataaaaaggtgcttatgttggccg

SEQ ID NO: 171226 - DNA, 256 bp, Homo Sapiens
ggggcgtctagaggtcccactgatgctcaccgctccagccagtgagacaacttttttaacagaaatgccaagaattatggctagacaggtagatactattttttagacaaatattagctttataaagatattttccttataaatacatttagaatcataaattaagtgatgtagtttaatccaaaaaactggtccggtttcagaatgttatggaatgatttcatattttcttgaaaatatggccgggagcggtgga

SEQ ID NO: 171227 - DNA, 230 bp, Homo Sapiens
gctggaccacatgattgtcaccgctccatcacatgtaatttgagtccttggggctctctgagcctcaatttctccatctctagaacataatgggtaggttaaggctgaacattccaccaaagaaaaactcctccccacaagccactcacagttctgctctccagtggaaataagcacagccagcatgcccaccctccagggtgatctctagccttgagcggtggagcatc

SEQ ID NO: 171228 - DNA, 450 bp, Homo Sapiens
  misc_feature (43)..(61): n is a, c, g, or t
tctgggggacactgaaaacagtctcaaaagaattcagctactnnnnnnnnnnnnnnnnnnnttcagccagcctgcacctcaacttcttaggacaaaaaaataatttagatacattctcgacgtatattttgctggtttatttaagtacataaacatgaagaaacattatccacacaatcccatgcttcactagtctctaattctcagtttagggtaggatcccccaaatacacaatcaattcctatatacctggggggagaggtgagcaatcacttatttcaatattttcaaagcttcacatcatctaaaagagtactattgcaggttgtaagcaaatccttcctgctggtagaactaaattgaagtttgacttacaatgttcctcaattaccttatgatccgttagtcaatgttcagctcttaccgagttcataatactgtgaggtatc

SEQ ID NO: 171229 - DNA, 773 bp, Homo Sapiens
ggggcgaccagaggattcttcccggaaggcattcctgccgcgctccccggggcacccctcaattgtgtactacgtccttgtttagtgtgtatccgtgcccacgtagatgatgtctgtaacgtagttttgtttgaaatatgagaatatgcggcttaaactttgatctgtaaggagcggggccgtggccgtttggagcacgctgtagacaccgttcctcatgctgccgggtgggttttgcagaagctcccttagtgatttcatgtttaacaggcagcatccattttcagaatttcctggcattgatttatattttgaagcatacaggaaacttctcgtttcctcgtttagccccacccagatcaggtgaaagggcagctttaatggtggtttttatggaccacattatcagagagcactgtgcaagccaaatggttcaataatgaatgaaaattctgggtgtaaagagtaaatatgccctggctctttctaccaatgtttgctcctggttggaaagaaaccaaagatttaagacgggctgctcttccagactggctgtgcctgcctgtgcccaacaacctgtgcagccggcagtgtgcctggtgtcacgccaggaggctgtggctgctgtggggccctctggaatttgtgctcctcacaaagtttccccaaaagggtgcttcaaaccttttattggccctggtaaaatgtttccgcggctgggcgccgtgggctcccgccctgtaatcccagcacttttgggagggccaaggccg

SEQ ID NO: 171230 - DNA, 1029 bp, Homo Sapiens
  misc_feature (729)..(745): n is a, c, g, or t
  misc_feature (843)..(915): n is a, c, g, or t
tccctactaaagggaataagcttgcggccgcggaggcctgcagcagcagaagcagcagaaaggccgcggcatgggcggcgctggccgaggtgtgtttggtggccggggccgaggtgggatcccgggcacaggcagaggccagccagagaagaagcctggcagacaggccggcaaacagtgagcgcccacccagaccggctgctgcgccccctcctgccagggtggcgattccgctccacagtctcggacggatctgctcagaaaggaagaggcaggcgccagggggaacccccttcgtgttttgtgaccctcccttttaggtgaagcccctttttcttgctaaaaccggcaattctccggttagaaatgttacttggtgttttttggttttgtgaaacggccgtcccaaaactggctggattcctagaagagtctgtgttgaaggcatctttcaagccctcgctctggttctcagggcagcattttccaggcgggtttgttttgcatttcttggagcctctccgagcagcaaccagacgggagatttttattttaagctgttcatgctgggactgacagcctgcagggtttccttggcgcggccccaaaattgccttcaaaacaaacccgggacggttgaaagccttcgaaccgtgcaggggatgcctctggccctggcccttcgcttcctctcttgtgttatggaaataaaaacaaataaaactaccnnnnnnnnnnnnnnnnnctcgaggcatctatgtccggtgcggagaaagaggtaatgaaaatggcacatgggtcataactgtttcctgacccagctttcttgtaacaagtggtaannnnnnnnnnnnnnnnnnnnnnnnnnnnnnnnnnnnnnnnnnnnnnnnnnnnnnnnnnnnnnnnnnnnnnnnnttgcgatacccggggaaatttaacccgcctaatgagcggggcttttttttggggatcccaaaggatcttccttgaaaatcctttcttttctgcaaataaatctggctggcttgc

SEQ ID NO: 171231 - DNA, 939 bp, Homo Sapiens
cggcggcggaagtggccggcgagcccggtccccgccggcaccatgcttcccttgtcactgctgaagacggctcagaatcaccccatgttggtggagctgaaaaatggggagacgtacaatggacacctggtgagctgcgacaactggatgaacattaacctgcgagaagtcatctgcacgtccagggacggggacaagttctggcggatgcccgagtgctacatccgcggcagcaccatcaagtacctgcgcatccccgacgagatcatcgacatggtcaaggaggaggtgtgtggccaagggccgcggccgcggaggcctgcagcagcagaagcagcagaaaggccgcggcatgggcggcgctggccgaggtgtgtttggtggccggggccgaggtgggatcccgggcacaggcagaggccagccagagaagaagcctggcagacaggcgggcaaacagtgagcgcccacccagaccggctgctgcgccccctcctgccagggtggcgattccgctccacagtctcggacggatctgctcagaaaggaagaggcaggcgccagggggaacccccttcgtgttttgtgaccctcccttttaggtgaagcccctttttcttgctaaaaccggcaattctccggttagaaatgttaccttggtgttttttgggctttgcgaaaaacgtccgccccaaaactgggctgggatccctagaaagaaccctgggctcgaagggccttccctcaagctccttccccttgccccttattggccctcctcctccaagcccgaattttaccttccctcctaccctcgacggccgtctttcctcgcaaccacatctaacacccgttatcctcttttctccttcgcggatcccgtgtccccgctacccgcaatatttcgcttcgctcactctacaatctgccgactttctc

SEQ ID NO: 171232 - DNA, 903 bp, Homo Sapiens
gccggcgagcccggtccccgccggcaccatgcttcccttgtcactgctgaagacggctcagaatcaccccatgttggtggagctgaaaaatggggagacgtacaatggacacctggtgagctgcgacaactggatgaacattaacctgcgagaagtcatctgcacgtccagggacggggacaagttctggcggatgcccgagtgctacatccgcggcagcaccatcaagtacctgcgcatccccgacgagatcatcgacatggtcaaggaggaggtggtggccaagggccgcggccgcggaggcctgcagcagcagaagcagcagaaaggccgcggcatgggcggcgctggccgaggtgtgtttggtggccggggcgaggtgggatcccgggcacaggcagaggccagccagagaagaagcctggcagacaggcggggcaaacagtgagcgcccacccagaccggctgctgcgccccctcctgccagggtggcgattccgctccacagtctcggacggatctgctcagaaaggaagaggcaggcgccagggggaacccctttcgtgttttgtgaccctcccttttaggtgaagcccctttttcttgctaaaaccggcaattctccggttagaaatgttacttggtgttttttggttttgtgaaacggccgtcccaaaactggctggattcctagaagagtctgtgtttgaaggcatcttttcaagccctcgctctggttctcagggcagcatttttccaggccggtttgtttttgcattttcttgggagcctcctcccaagcagccacccacacgggaagattttttatttttaaagcctgttcccatgccttgggaaccggaaaagcccttgccagggggttttcccttgggggtgtcgggg

SEQ ID NO: 171233 - DNA, 238 bp, Homo Sapiens
aggctatatattgtgcctaaactgaatatagcagcttcagaaccactgtgaggctaacgttacaaatgaccattatgccattactattaaatagatttctgattcatttctatcattggtaacagccaatcaatcaaaaccaaaaaactaacaatatttacaacccctgaggttttcagatactgggaattactggacacactatgtaagataactatttataaaatatttaaacatt

SEQ ID NO: 171234 - DNA, 501 bp, Homo Sapiens
  misc_feature (92)..(142): n is a, c, g, or t
atctggagaactttaaaagaaaaggcaattctacttgggtcccgccacaagagaatgatgtaatcggtctggtgggagactcagtcattatnnnnnnnnnnnnnnnnnnnnnnnnnnnnnnnnnnnnnnnnnnnnnnnnnnntggcaaaaggcacatgagaaaacagtcattctgaactctacatatatcaactgactgtctgcaggtatcattcactcagtgacatattctcaatcttaaggaattccatgtataaaagatagtcatggaagccaaaatgaagacatagtaagctttatacacatatagacatacacaatcccatgtatttatatatgtataatatatacacagagtattttggttaagcagaaactagcattgccataatttgttcttgataattaaacaaataaagcatcgccaagcaccaacgctttctaagacattttccaaagttttaacagacactaattttatagactgcgcaaaatgcattg

SEQ ID NO: 171235 - DNA, 667 bp, Homo Sapiens
atagcggtccacatgattgtcaccgctcatgttccagcctcctcctggacaccaatgctcctctcctggggtacaagggagggcaccctaagctcctctatctcctcaggcagactcccaaacttcctctatcaaccaggctcccatgtttttgtggactgggactaggggctcctgattcgtcccccagaatcctctgctgcttgggctccaaagtggccccttcctttcccagaatccgtctctctccaactgcttcctcctcctcgccaagcattctttggtccaggactgcctcctggccaggtgagcagggctgctgttctataggggtgcctgtgttgggtgggcccagagccccaggaatggggagtggaaggcccggggggcgctggcctgcacgtactttgaggctcttgggctgctggcgaacctgggccgcatgcttctgccgcaactcttgctcacgccgcttgttgtactccagctggttgcccagctccgtctggtgctgcaggcgggtgagctcagcccgcgtgcgctgcacggcctggagcatgccgcagctccagctcccgcgtggcctcgtgctgcacgaagcagcagtgcacactccaagtccttctgggtctgcttcttgttcaggtcctcccgcagcaggtcctgg

SEQ ID NO: 171236 - DNA, 697 bp, Homo Sapiens
  misc_feature (434)..(434): n is a, c, g, or t
ggggggtccggcctgctcgccgtccgctccgtccgcccttagacctgttgcccagcatccctgcagttcgcggtacagtctctagtagagcgcgtgtatagaggcagagaggagtgaagtccacagttcctctcctccaagagcctgccgaccatgcccgcgggcgtgcccatgtccacctacctgaaaatgttcgcagccagtctcctggccatgtgcgcaggggcagaagtggtgcacaggtactaccgaccggacctgacaatacctgaaattccaccaaagcgtggagaactcaaaacggagcttttgggactgaaagaaagaaaacacaaacctcaagtttctcaacaggagggaacttaaataactatgcccagaaattctgtggattaatataaagtctttaaaatatagtattttccttaattttnattggcattcaaacttagctttggtcccttaaaagcccctttaagtcctaaatggcctaaccctgcccaaaaaagggaaggggggcctccagagggggtatggttttaaaccccgaatatccctttggaaaaaattttaaatttaaccggggtttgggaatttggaataatttttccctttggaaaaactggggccccaaaagcgcccctttattccctttccaaacccccttttttccttgggaaaaaaagggggttttggg

SEQ ID NO: 171237 - DNA, 533 bp, Homo Sapiens
  misc_feature (276)..(276): n is a, c, g, or t
  misc_feature (309)..(309): n is a, c, g, or t
  misc_feature (425)..(425): n is a, c, g, or t
  misc_feature (506)..(506): n is a, c, g, or t
caccgctctcagtgtcacacaggtcaaactgacgctcagactcttggcacataatgtctggagactgctgtgggggtggcagtggctgtcactgtgctcggaatcatgattttgggactggtctgcctcctcaggtggaggagaaggaaaggtcagcagcggactaaagccacaaccccagccagggaacccttctaaaacacagaggagccatatgagaatatcaggaatgaaggacaaaatacagatcccaagctaaatcccaaggatgacggnatcgtctatgcttcccttgccctctccagctcnacctcacccagagcacctcccagccaccgtcccctcaagagcccccagaacgagaccctgtactctgtcttaaaggcctaaccaatggacagccctctcaagactgaatggtgagncccaggtacagtggtcgtcacacctgtaatcccagtctaactctgaagcctgaggtcagaatcaagtgagcccaggagttncagggtccagtctttgataatggagcg

SEQ ID NO: 171238 - DNA, 203 bp, Homo Sapiens
tcaaagaaacagagaattaattacatggtagatctacactatactgaatgccaagagggagccatcaccagccctctattattgctgctcccacgtcttgaaccaaagcagcatcctgttctcagacactaacttgggtttggagacctgagtgtttggagacacgatgtctaaataataagcttgagcgtgagcatcattgg

SEQ ID NO: 171239 - DNA, 176 bp, Homo Sapiens
tcgggtgactctagagatccctccacgctcccttccggctcttcccctctgtgcagtgggaccgaggctcaggccggcgagacaatttcctgggttctagaactaccttggaacccaaaccaagacctgtatgttcccaagactcactgcagagtgggggtggtggtagtggtgat

SEQ ID NO: 171240 - DNA, 747 bp, Homo Sapiens
  misc_feature (667)..(667): n is a, c, g, or t
cccccaggaagcacagatcagcttcattgaggccatgagccagctgcccctcttcggctacaccgtctatggggtgctgcgagtgagcatgcaggccctgtccggacccactctcctggggctcaaccgccagcatctcatcctcatggaccccagctcccagagcctgtactgccgcattgccctgaagagcctgcagcggctccacctgctaagccctctggaggagaaggggccccctggcctgggaagtcaactatggctcagctgacaacccccagaccatctggtttgagctgccacaggcccagggagctgctatacaccactgtcttcctgatagacagcagtgcctcttgcactgagtggcccagcatcaactgagaggagtgcaggccggggagagaagaggatgaggcctcccccggcccaagtctcacccacatggtctgccttggatgctatcagatcactgttctagaacctgcctcagcacagcccagccggcccacatgcaggccatgaggcaggggctgctatcacgtcaccagcaggcaaagaaaacagccagaccctcgaccaggacggcctggggccaaagcgggctgcaggaactcggctggggcacctgaggttgcccagtctgagggagatgcccacccgaacnccaggctccgcccaggccccacattagcacaagcccaggcatgggagaaacagctgctgaggaaataaaactccctggag

SEQ ID NO: 171241 - DNA, 646 bp, Homo Sapiens
cctgtaacaggctgatgctgagccagcggctgctttgtccctcatactcctcccaacagtccaaacccctaccagacagaagccacgtcgcttctgcacacgtgtctgagagcgtctgccatagacgtctgtgcgtttccgtgaagcaccgcgccctaaggacccaactctgactagcagctgcctcccactcccaaacactaaccccgctcaggagactcacactgggtgtagactgcgtctttgcagagggagatgatagaggcttctgatgacgccagagctgtaagtgtcgtgacgagctgggcgcccagcccttcttaagctgttctgtttctgtggctttaactgacatatttctgtagcatctgccttcatctcatctcagcgtaatgaaatattaatgaaaatagctgaaaagctttgccttcgagaggccagaagcctcgcggaatgtctgcaagtccaaagacgcgtgtgggttgtgccctgaagtgccgtccagcaggcgcgagcgcccgggccagcctgtgcgtgtggcctttgccttcttccctttcttcctgttttctgtttttttaatttggggattgagaaagctgtacgattttgttaaagaaaaaaataaaccattttttaaagttgt

SEQ ID NO: 171242 - DNA, 812 bp, Homo Sapiens
  misc_feature (53)..(83): n is a, c, g, or t
gtggtgatgatcagcttcttcctcccaagaacatttgctgcactgtctgcctnnnnnnnnnnnnnnnnnnnnnnnnnnnnnnnatgtctgctcaaactgactgcctgctcctgccttacagggtgctcagctaccaggactaggtttggggttgcccagggctcttgctataatttagcatagaccttggggagaactggtcacacatgggttgcctttgttgctagttgttctcaacaaagaaaaccctgaagcattcacatacaaagtagtctgagcttccccagtcacagtcaaacaccctcacacaacatcctcaaaagtctgaaatcttgcagcagctgagctatagttaaagctgcaaggcccacagaattatcaaggaagccagaatgagataatgcaggtaggaggtcccagcagttaatctcaatccgtctttccccagttcggataagctctaatatacctgatgtgggatgtagaaagctacactggagcaagccgggtcttctgctgaatttgtcatcaaataccaaggggaaacaagggtggggtggattttattctcaaaaagcctcagaagttactctattataaagggacatggctgaataggtaagaaacggattctccattgtgagttctcctgatggcttctgcaaggatcatagagatgtcaatcacctgtattttggagcatgcttcatcttgtcctcctgaggtatggtattggtgactactactgcctcaagcatgcgttgttgatgcgagaaatagcaggaccggagaagattccatgagtcagatgg

SEQ ID NO: 171243 - DNA, 823 bp, Homo Sapiens
gggggggccgccgccatcgctctcccgggcttagaaggcccggctactgacgcgcagtgccagaccttagccctcacggtccttaagtctcggtcgccctcgcctcgcagcctgccacccgcgctcagctgcccgcctcctcagccagccatgctggagcatctgagctcgctgcccacgcagatggattacaagggccagaagctagctgaacagatgtttcagggaattattcttttttctgcaatagttggatttatctacgggtacgtggctgaacagttcgggtggactgtctatatagttatggccggatttgctttttcatgtttgctgacacttcctccatggcccatctatcgccggcatcctctcaagtggttacctgttcaagaatcaagcacagacgacaagaaaccaggggaaagaaaaattaagaggcatgctaaaaataattgaggttttcatgattcagcacctgcttttgtttctgtgagatgagctaaattgctttcataccccagataagagctaaaaccacctaatgctcttatggcacagctgtgtatagatttagttctctttatacttcatttctagcccagttgggttttgatttatataagtagtttagaccttctcttcataatcttgctctgagatggggaacagaacacaccaagtatgaaggtttcttttcaggtgtaaataatgaaaaaataaatgcctcataaatgatagtacaatgtaactatcaaaggtttataaattcattatgaggttaccaattttaatggtttcccacttaaaccctcataggggc

SEQ ID NO: 171244 - DNA, 805 bp, Homo Sapiens
  misc_feature (74)..(89): n is a, c, g, or t
  misc_feature (98)..(202): n is a, c, g, or t
  misc_feature (204)..(212): n is a, c, g, or t
ggaaaaacgaattggcccgtttccctttcttttgggggccgcccgcccaaagaaaggttttaaaaaatttttannnnnnnnnnnnnnnnccccaaggnnnnnnnnnnnnnnnnnnnnnnnnnnnnnnnnnnnnnnnnnnnnnnnnnnnnnnnnnnnnnnnnnnnnnnnnnnnnnnnnnnnnnnnnnnnnnnnnnnnnnnnnntnnnnnnnnngcactatgaggtttaattggaaacattaaaatggttaactcataatgaattataaaactttgatagttacattgtactatcatttatgaggcatttatttttcattatttacacctgaaagaaacttcatacttgtgtgttctgttccccatctcagagcaagattatgaagagaaggtctaaactacttatataaatcaaaacccaactgggctagaaatgaagtataaagagaactaaatctatacacagctgtgccataagagcattaggtggttttagctcttatctggggtatgaaagcaatttagctcatctcacagaaacaaaagcaggtgctgaatcatgaaaacctcaattatttttagcatgcctcttaatttttctttcccctggtttcttgtcgtctgtgcttgattcttgaacaggtaaccacttgagaggatgccggcgatagatgggccatggaggaagtgtcagcaaacatgaaaaagcaaatccggccataactatatagacagtccacccgaactgttcagccacgtacccgtagataaatccaactattgcagaaaaaagaataattccctgcc

SEQ ID NO: 171245 - DNA, 831 bp, Homo Sapiens
  misc_feature (507)..(507): n is a, c, g, or t
gggggggccgccgccatcgctctcccgggcttagaaggcccggctactgacgcgcagtgccagaccttacccctcacggtccttaagtctcggtcgccctcgcctcgcagcctgccacccgcgctcagctgcccgcctcctcagccagccatgctggagcatctgagctcgctgcccacgcagatggattacaagggccagaagctagctgaacagatgtttcagggaattattcttttttctgcaatagttggatttatctacagccacgtggctgaacagctcaggtggactgtctatatagttatggccggatttgctttttcatgtgtgctgacacttcctccatggcccaatctatcgccggcatcctctcaagtggttacctgttcaagaatcaagcacagacgacaagaaaccaggggaaagaaaaattaagaggcatgctaaaaataattgaggttttcatgattcagcacctgcttttgtttctgtgagatgagctanattgctttcataccccagataagagctaaaaccacctaatgctcttatggcacagctgtgtatagatttagttctctttatacttcatttctagcccagttgggttttgatttatataagtaagtttagactttctcctcataatcttgctctgagatgggggaccgaacacccaaggtatggaagtttccttccaggtggaaattaatgaaaaataaatggcctccataaatggatagtaccaatggtaactattcaaaggttttaataaattccattatggaagttaacccattttttaatggttttccccatttaaaaccc

SEQ ID NO: 171246 - DNA, 420 bp, Homo Sapiens
tgtgaaagcacactttgtaaagcacaccctactttgtgaccttatcctcagagtaaaggctttagaggaaaagggaccccacagtctcacccattacctggctgtcagcatctccatatgctcctggctgagttttattgagcatcagctggggatgtgagcagaaacctgaatccttgagacaggtggttttcaaaaaggaagccataacaatgagtggcttagtactggcaattgatcagttggtccatgaaatggagccagtcaagttctgtccttccttcccctcccacatactttgtcaagtcccaggacctactgatatgggctcagcaatgacaaatgccagagtgctcagaggacacacccatcccttttcagggtgtgaacccagactggaaaggagaaccaaaggatggg

SEQ ID NO: 171247 - DNA, 392 bp, Homo Sapiens
acctcagaggctgaaattcctaatacctttcctttatcgtggttatagtcagctcatttccattccactatttcccataatgcttctgagagccactaacttgattgataaagatcctgcctctgctgagtgtacctgacagtagtctaagatgagagagtttagggactactctgttttagcaagagatattttgggggtctttttgttttaactattgtcaggagattgggctaaagagaagacgacgagagtaaggaaataaagggaattgcctctggctagagagtagttaggtgttaatacctggtagagatgtaagggatatgacctccctttctttatgtgctcactgagatctgagggacctgttaggagagcatagcatcgcc

SEQ ID NO: 171248 - DNA, 947 bp, Homo Sapiens
  misc_feature (807)..(815): n is a, c, g, or t
gggactgagcactgctatgactccagtgcccccccaaaggtacgcaggtaccaggtgctgctgtcactgatgctctccagccaaaccaaagaccaggtgacggcgggcgccatgcagcgactgcgggcgcggggcctgacggtggacagcatcctgcagacagatgatgccacgctgggcaagctcatctaccccgtcggtttctggaggagcaaggtgaaatacatcaagcagaccagcgccatcctgcagcagcactacggtggggacatcccagcctctgtggcccacctgatggccctgccaggtgttgggcccaagatggcacacctggctatggctgtggcctggggcactgtgtcaggcattgcagtggacacgcatgtgcacagaatcgccaacaggctgaggtggaccaagaaggcaaccaagtccccagaggagacccgcgccgccctggaggagtggctgcctagggagctgtggcacgagatcaatgcactcttggtgggcttcggccagcagacctgcctgcctgcgcaccctcgctgccacgcctgcctccacccaagccctctgcccggccgcccagggtctcctgatggccgcacggttctggcccaggtgcccgctgtggccaccgtcccggaactggctttacgcttccggaaacccacgcccgttcaattaaatcccttgccgcctttgccccctctttcctcttgcggctccaggccgtcgcgcggcgttcgcggtctctctctcccctcccgcgctgccctaaatgcacgccctcgtttaccgttnnnnnnnnntcatacatccggttcatcgccatcctccgcaccttcgtccctgtcttaattcccccgtctatggctcccgtccattcctcttccccgccttttccttctcttcgcctctcttcccctccccccgattgtttc

SEQ ID NO: 171249 - DNA, 828 bp, Homo Sapiens
  misc_feature (526)..(526): n is a, c, g, or t
ttggacctatgaaccctcgcttataaagcaggctggtacggtccggaattccgggatatcaaaccatatgtagccatggttacaacataccaaatggcagttcttcttgcctttaacaacagtgaaactgtcagttataaagagcttcaggacagcactcagatgaatgaaaaggaactgacaaaaacaatcaaatcattacttgatgtgaaaatgattaaccatgattcagaaaaggaagatattgatgcagaatcttcattttcattaaatatgaactttagcagtaaaagaacaaaatttaaaattactacatcaatgcagaaagacacaccacaagaaatggagcagactagaagtgcagttgatgaggaccggaaaatgtatctccaagctgctatagttcgtatcatgaaagcacgaaaagtgcttcggcacaatgcccttattcaagaggtgattagccagtcaagagctaggtttaatcccagtatcagcatgattaaggaagtgtattgaagttctngatagacaaacaatacataggaacgcagccaggcgtcggcagatgaatacagctacgtcgcgtgatgtcgctctcctccagcgtggtgtgagaagatcattgccatcaccatttggtgtgttcctgtgggaaaaagcaggactgtgcctccataatttggtcatttggcagcccctgttttctgctgtttacaacatcaccagtgccacgtcatgagcgtcaaagaaaatgcctagagatatttcaagctcatgtcattatgacatttcttaaaactttattaaaagaatgagtgaagtatg

SEQ ID NO: 171250 - DNA, 482 bp, Homo Sapiens
  misc_feature (45)..(45): n is a, c, g, or t
gattcggaattaaaaaggctcactaaggggaatttggccctcgangcccaaaaatcgggcacgagggtttttaatcatcaaatttaaccattttcaaaaactggttcccgggaggtgtgcagtgcccccttgcctcttcaaacctacagcttctctttgcccatttgtggatttcacatcactccacacagaaacattacagcctggcatccccagtctttgccttcttccagctgcctcgacacagcactgtggcctgtccctattgcccaggcacgccatttccaagggcaggaaggggcagtgtcctgaagcccatcttttctgtgactgtcttaggtgatgtgtagccccctccacctttccactcaacaacctcccacccctgtcctgctgcatggtccggagtctgggacctactttgttttttgttatttatgaccttgtttaaagaaaataaatatctcccaacctttaaaaaa

SEQ ID NO: 171251 - DNA, 1403 bp, Homo Sapiens
  misc_feature (33)..(33): n is a, c, g, or t
  misc_feature (42)..(42): n is a, c, g, or t
ttgggaagatatttaatttcctttaaaacaagntccattaantaacaaaaaacaaagtaggtccccagactccggacccatgccagccaggacaggggtgggaggttgttgaagtggaaaggtggagggggctacacatcacctaagacagtcacagaaaagatgggcttcaggacactgccccttcctgcccttggaaatggcgtgcctgggcaatagggacaggccacagtgctgtgtcgaggcagctggaagaaggcaaagactggggatgccaggctgtaatgtttctgtgtggagtgatgtgaaatccacaaatggcaaagagaagctgtaggtttgaagaggcaagggggcactgcacacctccaggaaccagttatgaaaatggttaaatttgacgattaaaaacaattccataggctttggcctgtggctttgtgcatgggctgtatttaacctgggttgctctgtggcaggtgagggcgcaggaggcccctggagcagcctggcctcagcccagggcaggtgcccagacatgtgggagtaggacagtgggctctcccagatgggaaggccatgtgcttggaccggctggacctgattttcaggctcgtttcttgtgatgctatccaccaccaccgctcgctatggctaaggatgggatcttggcctctctgggtcttccaaacctggaagagtacgactgggataaaacggtacctgactagtgttttatttgaaagggaaaaataaagaccaccccatgcattgtccatcccatgaggcagggctgggccatgccaagacaatctcaaggaatggaggtccctgagcctgggaagacatttgaactcagatgtatcgcctgatgctaggaagaggggctcagtatggcaaatctggaggctttaccctaggcaacgcagggagagcaggcaggagctaccccagtacagggaagggaaaggagcaggggagccctggactggggaagccgatgttggtcaagggccctggaaaacaatgcttttggcagaatacatgaaaaggttggtacatctcggggtgcccgtctaccgggagccagtgtcacatggctgggcgggatggagaggagacagtggcatcacagtggcctctggtgcgacgtatttacaacagagctcgatgttgaggaggggtggacagcaggtcactaacagccaggaaacacacactggaatccaccgatgggttctgcaaacctgtgccggatcaggaaagtggcaacagcttcagctaccttgtcaggggcatcctcatggactgcatggccacactggggtaggacctgcatctggaacttcccttgcatctggccaatggtcagatctttatccaatctatcgacccacgcgtcc

SEQ ID NO: 171252 - DNA, 867 bp, Homo Sapiens
  misc_feature (278)..(414): n is a, c, g, or t
  misc_feature (423)..(561): n is a, c, g, or t
  misc_feature (665)..(673): n is a, c, g, or t
  misc_feature (739)..(747): n is a, c, g, or t
taccgctctgattgctccccgctcatattataaattaagaatgacttcattatgatcatgatttgccacaatgtccttaactctaatgcctggactggccatgttctagtctgttgcgctgttacaatctgtattggtgctagtcagaaaattcccagctcacatagcccaaaagggtgcgagggagaggtggattaccagtattgttcaataatccatggttcaaagactgtataaatgcattttattttaaataaaagcaaaacttttatttaatnnnnnnnnnnnnnnnnnnnnnnnnnnnnnnnnnnnnnnnnnnnnnnnnnnnnnnnnnnnnnnnnnnnnnnnnnnnnnnnnnnnnnnnnnnnnnnnnnnnnnnnnnnnnnnnnnnnnnnnnnnnnnnnnnnnnnnnnnggttggggnnnnnnnnnnnnnnnnnnnnnnnnnnnnnnnnnnnnnnnnnnnnnnnnnnnnnnnnnnnnnnnnnnnnnnnnnnnnnnnnnnnnnnnnnnnnnnnnnnnnnnnnnnnnnnnnnnnnnnnnnnnnnnnnnnnnnnnnnnnggggggaacccggggtttttaaaaaaacccaaagggggttttggggggtcttttcgggatttctcaccaggggggccccagggggctcttatatataaatcttnnnnnnnnngtggcgaatttttggggagagtggtggataattatttaaaaaactttccgcgccccgcgggagaannnnnnnnnaaacgggggtgttggacaaccctttgataccccccccgggggattcaccaccccccttggcggccccttgtggagaaaataaattttctcccccccggtggagaaaaacgccgggggccc

SEQ ID NO: 171253 - DNA, 2156 bp, Homo Sapiens
cctgctcggcgctgcccgcccagttcctgttcccagactgaggcccagcccccttcgcccgtttccatcacgagtgccgccagcatgtctgacaaactgccctacaaagtcgccgacatcggcctggctgcctggggacgcaaggccctggacattgctgagaacgagatgccgggcctgatgcgtatgcgggagcggtactcggcctccaagccactgaagggcgcccgcatcgctggctgcctgcacatgaccgtggagacggccgtcctcattgagaccctcgtcaccctgggtgctgaggtgcagtggtccagctgcaacatcgttctccacccaggaccatgcggcggctgccattgccaaggctggcattccggtgtatgcctggaagggcgaaacggacgaggagtacctgtggatgcattgagcagaccctgtacttcaaggacgggcccctcaacatgattctggacgacgggggcgacctcaccaacctcatccacaccaagtacccgcagcttctgccaggcatccgaggcatctctgaggagaccacgactggggtccacaacctctacaagatgatggccaatgggatcctcaaggtgcctgccatcaattgtcaatgactccgtcaccaagagcaagtttgacaacctctatggctgccgggagtccctcatagatggcatcaagcgggccacagatgtgatgattgccggcaaggtagcggtggtagcaggctatggtgatgtgggcaagggctgggcccaggccctgcggggtttcggagcccgcgttcatcatcaccgagattgaccccatcaacgcactgcaggctgccatggagggctatgaggtgaccaccatggatgaggcctgtcaggagggcaacatctttgtcaccaccacaggctgtattgacatcatccttggccggcactttgagcagatgaaggatgatgccattgtgtgtaacattggacactttgacgtggagatcgatgtcaagtggctcaacgagaacgccgtggagaaggtgaacatcaagccgcaggtggaccggtatcggttgaagaatgggcgccgcatcatcctgctggccgagggtcggctggtcaacctgggttgtgccatgggccaccccagcttcgtgatgagtaactccttcaccaaccaggtgatggcgcagatcgagctgtggacccatccagacaagtaccccgttggggttcatttcctgcccaagaagctggatgaggcagtggctgaagcccacctgggcaagctgaatgtgaagttgaccaagctaactgagaagcaagcccagtacctgggcatgtcctgtgatggccccttcaagccggatcactaccgctactgagagccaggtctgcgtttcaccctccagctgctgtccttgcccaggccccacctctcctccctaagagctaatggcaccaactttgtgattggtttgtcagtgtcccccatcgactctctggggctgatcacttagtttttggcctctgctgcagccgtcatactgttccaaatgtggcagcgggaacagagtaccctcttcaagccccggtcatgatggaggtcccagccacagggaaccatgagctcagtggtcttggaacagctcactaagtcagtccttccttagcctggaagtcagtagtggagtcacaaagcccatgtgttttgccatctaggccttcacctggtctgtggacttatacctgtgtgcttggtttacaggtccagtggttcttcagcccatgacagatgagaaggggctatattgaagggcaaagaggaactgttgtttgaattttcctgagagcctggcttagtgctgggccttctcttaaacctcattacaatgaggttagtacttttagtccctgttttacaggggttagaatagactgttaaggggcaactgagaaagaacagagaagtgacagctaggggttgagaggggccagaaaaacatgaatgcaggcagatttcgtgaaatctgccaccactttataaccagatggttcctttcacaaccctgggtcaaaaagagaataatttggcctataatgttaaaagaaagcaggaaggtgggtaaataaaaatcttggtgcctggacaaa

SEQ ID NO: 171254 - DNA, 1074 bp, Homo Sapiens
  misc_feature (382)..(422): n is a, c, g, or t
  misc_feature (868)..(868): n is a, c, g, or t
ggcctgggtggcgaattcggcacgaggcagcagcagtatgtgcgctcacgcccggcgccctcgcctgagtccatcaagagggccaaggagatggaccttgtggggctgggcctgcaccccctcttcagctcgcgttttgaggaggaggagctgcagcggctgaggctggtggacagcataaagaactaccgctcccgggcgactatctttgagatcaacgcctccagccgagacctgtgcagccaggtgatgcgcgccaagcggcagaaggaccgcaaggccatcgcccgcttccagcagggacagcaggggcggcaggagcagcaggagggcccagtgggcccagccccgagccgcccagcactgcaggagaagcagcctnnnnnnnnnnnnnnnnnnnnnnnnnnnnnnnnnnnnnnnnncattttctcagaggtcgtgggccggaagcggcagcggtcaggacccaacaggggagccaagaggcggagggaggaggcccggcagcgggaccaggaattctacatcccctaccggcccaaggactttgacagcgagcggggcctgagcatcagcggggaagggggagcctttgagcagcaggcagctggcgctgtcctggacttgatgggggatgaagcccagaacctgacgaggggccggcagcagctcaagtgggaccgtaagaagaagcggtttgtgggacagtcaggacaggaagacaagaagaagattaagacagagagcggccgctacatcagcagctcctacaagcgagacctctatcagaagtggaaacagaaacagaaaattgatgatcgtgactcggacgaagaagggcatctgaccggcgaagccccaagcgaanaggtggggaagcgagaacgtggccaagcaggtgcatcccgggccccacgcccaggcaccccctgcaggccgaggtcgccccggaactcaggaacaagcaggcagatcttgaagccagcggcgccggggccccaaaaactgcactttcctggcagcgtggtgggcctccagacatttccctggccgaaaacccccgccgcgtccaag

SEQ ID NO: 171255 - DNA, 425 bp, Homo Sapiens
  misc_feature (337)..(337): n is a, c, g, or t
  misc_feature (375)..(375): n is a, c, g, or t
agtcagctcctacaagcgagacctctatcagaagtggaaacagaaacagaaaattgatgatcgtgactcggacgaagaaggggcatctgaccggcgaggcccagagcgaagaggtgggaagcgagaccgtggccaagcaggtgcatcccggccccacgccccaggcacccctgcaggccgagtccgcccggaactcaagaccaagcagcagatcctgaagcagcggcgccgggcccagaagctgcacttcctgcagcgtggtggcctcaagcagctctctgcccgcaaccgccgccgcgtccagggagctgcagcagggcgccttcggccgggggtncccgttccaagaagggcaagatgcggaagagggatgtnaggaccaggacccagccccgttggttccttgatttggctttagggttggg

SEQ ID NO: 171256 - DNA, 133 bp, Homo Sapiens
cgttctcctgcttcatcttgggcttctctgtcgagtatgccacaccagtacccgagtgcagttggcagcccgtggctccaggtccttgggatccacaaggtggctcagaagactgctctccaggtggccccgg

SEQ ID NO: 171257 - DNA, 618 bp, Homo Sapiens
gggggacctttccgagttggctgcagatttgtggtgcgttctgagccgtctgtcctgcgccaagatgcttcaaagtattattaaaaacatatggatccccatgaagccctactacaccaaagtttaccaggagatttggataggaatggggctgatgggcttcatcgtttataaaatccgggctgctgataaaagaagtaaggctttgaaagcttcagcgcctgctcctggtcatcactaaccagatttacttggagtacatgtgaaagaaaacgtcagtctgcctgtaaatttcagcaagccgtgttagatggggagcgtggaacgtcactgtacacttgtataagtaccgtttacttcatggcatgaataaatggatctgtgagatgcactgctacctggtactgctttcagtgtgttccccctcagcccctccggcgtgtcaggcatactctgagtagataatttgtcatgcagcgcatgcaatcagaatctcactgagccacccatcattgtgaaataattacctcagttgtacaggacttggtgatcaggatccaggcactcacttgtattctactgctcaataaacgtttattaaacttgatcctgctactt

SEQ ID NO: 171258 - DNA, 872 bp, Homo Sapiens
  misc_feature (422)..(435): n is a, c, g, or t
ggggcgcctgcgcgctcggtgacctttccgagttggctgcagatttgtggtgcgttctgagccgtctgtcctgcgccaagatgcttcaaagtattattaaaaacatatggatccccatgaagccctactacaccaaagtttaccaggagatttggataggaatggggctgatgggcttcatcgtttataaaatccgggctgctgataaaagaagtaaggctttgaaagcttcagcgcctgctcctggtcatcactaaccagatttacttggagtacatgtgaaagaaaacgtcagtctgcctgtaaatttcagcaagccgtgttagatggggagcgtggaacgtcactgtacacttgtataagtaccgtttacttcatggcatgaataaatggatctgtgagatgcactgctataacaacgnnnnnnnnnnnnnnccatgtcggccgccctcgggccctcgaagaagcttttctagacccattcggtttggcgcggcgggccccaagtaggtaaagtgaaacatggtccataggctgttttcctaggaaaatccttgggccatgaactaggggccttggaattcctcaccaataaaaaaacgccccgggcgggaaaccggagcgtttctggaacaaattccaaaatgggagttctggagggcatttactgggatctttccaaacaggagtcccaagcgagcctcgaatatcaaaattaacgccccggccctgccaacttttcggaagaaacgggtggaaaattcaatttaagcattttctgcccgaattgggaaagccctccccaaacgggccttgattgaaccctgaattcgcccagcgggaattcaccaccctggttccccttgtgcgta

SEQ ID NO: 171259 - DNA, 281 bp, Homo Sapiens; identical to SEQ ID NO: 79945

SEQ ID NO: 171260 - DNA, 791 bp, Homo Sapiens
cacctatatagatccccgcacaggaaaatctgccctagacaatggacctcagatagcctatgttcgggacttcaaagcaaaggttcagtatttccggttctggtgtcagcaactggccatgccacagcacataaagattacagtgacaagaaaaacattgtttgaggattcctttcaacagataatgagcttcagtccccaagatctgcgaagacgtttgtgggtgatttttccaggagaagaaggtttagattatggaggtgtagcaagagaatggttctttcttttgtcacatgaagtgttgaacccaatgtattgcctgtttgaatatgcagggaaggataactactgcttgcagataaaccccgcttcttacatcaatccagatcacctgaaatattttcgttttattggcagatttattgccatggctctgttccatgggaaattcatagacacgggttgttctttaccattctataagcgtatcttgaacaaaccaggtggactcaaggatttagaatctattgatccagaattttacaattctctcatcggggttaaggaaaacgaatatggaggaatgtgattaggaaatgtacttctccgtgtgacaaagaaattctaggtgaaattaagagtcatgatctggaaacgctaatggtggcaatattcttgtaacagaagaaaataaagaggaatacatcagaatggtagctgagtggaggttgtctcgaggtgttgaagaacagacacagctttctttgaaggctttatgaatcttccccaga

SEQ ID NO: 171261 - DNA, 809 bp, Homo Sapiens
aattgcactcggggagtcatcagccagcccaggacagcgccagttattaggccagccagcacctggtgagggaaatgtgctaagatgaagattcgcgacaagccaaccgccaaaaggaaggtgcaataagccaggcctaggcatcacccttacccagccgctgcgggcccgagtggccacctgcgaagacagggccgtcattatgggccagagggctgctcctgtgatcatgcagtgtccagaagggctgccctggaccagttctcacaagaagaggggaatctggtgaacccgggctggagcctggctgtagtaaccagactcatggacccaccaaaagggcctgtctccaaaaagaaacacatgactcagggccctcggggttggggaccaggatgccggagggcttctctgtctcaccacttgaagatgaggttgagccactcggtgatgaggctgatccagagcaccgcgatgcccacacggcgggaggcgtagtaggccgcggggaagtagaacagaaagaggatcttgggatcgcccagaaaggtgatccagagccacacgttctccagccaggctagctggttctgtagcgcctcggctatcacgatgcccgcgcccagcgtggactccatggcggcccagctgccgaccaggccccggcttgctccagggcggaaaccagagtccaggcaacgaagcagcgtcgaccctctgatctccaaagcccacccctctgagccccaggccccgccccgccagcggtcaccaccaagccccgagcgcgtgggtcgacccacgcgtcc

SEQ ID NO: 171262 - DNA, 453 bp, Homo Sapiens
agtcggtaccatgatgtccttcgctcgtcatgcagtcatgagtgggttggacattgtccagttttgctaaaggccacatctgggttcctctaaaccaagggataaggagtagacagagaaaagaaagagatgcatggatcggcgaccaggtgaggcagagaaggggagacgtcttctgctccgggaacatctgccccattctcaggcaaaactggaggggtgctgaggagtctcaaagcaaggtctcagctcttccaggccttctccagagggggtggagtgtggaggtggccctcaccctgtgatctgtcactcctgatctccactgcccctccagaatgaattcacagttgcttcaaagtttaataagccatttccctgaatgtggttcagtgctcagtacagcacagttactggcatggcaggccagtgaggtcacttcaggacccaagg

SEQ ID NO: 171263 - DNA, 586 bp, Homo Sapiens
  misc_feature (356)..(392): n is a, c, g, or t
atctgggggactgggagtgggggtcagagaggcagattccttcccctcccgtcccctcacgctcaaacccccacttcctgccccaggctggcgcggggcactttgtacaaatccttgtaaataccccacaccctcccctctgcaaaggtctcttgaggagctgccgctgtcacctacggtttttaagttattacaccccgaccctcctcctgtcagccccctcacctgcagcctgttgcccaataaatttaggagagtccccccctccccaatgctgaccctaggattttgccttccctgccctcacctgcaaatgagttaaagaagaggcgtgggaatccaggcagtggtttttnnnnnnnnnnnnnnnnnnnnnnnnnnnnnnnnnnnnnagcggtgggggtgggaaggtaaggatggtcgtggaagaaggcaggatggaactcggcctcatccccgaggccccagttcctatatcgggccccccattcatccactcacactcccagccaccatgttacactggactctaagccacttcttactccagtagtaaatttattcaataaacaatcattgacccatg

SEQ ID NO: 171264 - DNA, 818 bp, Homo Sapiens; identical to SEQ ID NO: 3596

SEQ ID NO: 171265 - DNA, 205 bp, Homo Sapiens
ctaagggcccctccagcttggaaagcctgattccaacaatggcccgtgccttgtgtgaacaaggggcgatttgtgcgaactacagagaacaactggtacttggagggcataaaatagtgcccaccagaggctgcaaaagcctggacattttcccaacctagatgggggtcagaaaatgatgccataaaactgtcagatgtggcca

SEQ ID NO: 171266 - DNA, 423 bp, Homo Sapiens
gttggagggagaaaagggacaccacgccaggcaaagacctggcagctgtgctcagccctggcccttgttcctcctcagccctgaaaagcctcacctgaacctgtggctggaagcccccgacctcctcttggccgaaattgacctccccaaactggatggagccctgggctgtcgctggagatcggggagaaccgcctggtgatggggggcccccagcagctgtatcatctagacgcttatatcccgctgcagatcaactctcatgagagcaaggcagccttccaccggaagagaaagcaattaatggtggccatgccgcttctgccggtgccttcttgatcagggtgtctccttgtgcttctgagatgtggagaagaggctgctggcttccctaaaagttgaaataaaagatttttgcctttg

SEQ ID NO: 171267 - DNA, 810 bp, Homo Sapiens
gcctggtttctgcataaagaccaactcctcggaagggaaggttttcatcaacatctgccactccccctctatccctcctcccgccgacgtgaccgaggaggagctgcttcagatgctagaggaggaccaagctgggtttcgcatccccatgagtctgggagagcctcgatgcagaatctggacccaatgaaggccagggatgtaccgcctacgacgtagctgtcaacagcgacttctaccggaggatgcagaacagcgatttcttgcgggagctcgtgatcaccatcgccagggagggccttgaggacaaatacaacttgcagctgaatccggaatggcgcatgatgaagaaccggccattcatgggctccatctcgcagcagaacatccgctcggagcagcgtcctcggatccaggagctgggggacctgtacacgcccgcccccgggagagctgagtcaggccctgaaaagcctcacctgaacctgtggctggaagcccccgacctcctcttggccgaaattgacctccccaaactggatggagccctggggctgtcgctggagatcggggagaaccgcctggtgatggggggcccccagcagctgtatcatctagacgcttatatcccgctgcagatcaactctcatgagagcaaggcagccttccaccggaagagaaagcaattaatggtggccatgccgcttctgctggtgccttcttgatcagggtgtctccttgtgcttctgagatgtggagaaaaggctgctggcttccctaaaagttgaaataaaagatttttggcctttt

SEQ ID NO: 171268 - DNA, 926 bp, Homo Sapiens
gtaggacggagggtagtgcgtctagagacacatattcccaagcggatttgacgatggtgttcggtcttgaatggaaatgtagtcttaggccagtcttaggtttttgaacaggatagtaggtatccggagtcgattgagggccagagcaggcactggggttcggatcctgggcaaagtttcccacgttgagggtctcgaggacgcctagatctctttcccagggccatggcgaacccgaagctgctgggactggagctaagcgaggcggaggcgatcggtgctgattcggcgcgatttgaggagctgctgctgcaggcctcgaaggagctccagcaagcccagacaaccagaccagaatcgacacaaatccagcctcagcctggtttctgcataaagaccaactcctcggaagggaaggttttcatcaacatctgccactccccctctatccctcctcccgccgacgtgaccgaggaggagctgcttcagatgctagaggaggaccaagctgggtttcgcatccccatgagtctgggagagcctcatgcagaactggatgcaaaaggccagggatgtaccgcctacgacgtagctgtcaacagcgacttctaccggaggatgcagaacagcgactacgtgcgggagctcgtgatcaccatcgccagggagggcctagaggacaaagtacaactagcagatgaatccggaatggcgcatgatgaagaaccggccattcatgggctccatctcgcagcagaacatccgctcggagcagcgtcctcggatccgggagctggggggacctgtacacgccccgcccccgggagagctgagtcagggccctgaaaagcctcacctgaaacctgttggctgggaaccccccgaacctcctccttgggcggaaatttgaccctccccaaaactgg

SEQ ID NO: 171269 - DNA, 392 bp, Homo Sapiens
atgatcgtcacgctccgcgctgaacaccgcacctggcctgaaccaccgcacctggccagaatcatcttttaacagcttccaaacttggaggtcaaacaaggactttctggggaagcaagtggcaggcagcagctaggcgtgggctgcgcatccagcggattgagtgtgggcgggaccgccagcaaccaggcagaggggctgttctctgggttggggtcaggaacctcttctggcctcagcccaggttggcagacatttccctgcagggaaccgggtccaggactcaggaggagggacagtcccacgggggtgctggggggcaggaattcctgggtgggccgaggtaagggcagcacagggtgacctggggccctgggcccggtggagctgag

SEQ ID NO: 171270 - DNA, 846 bp, Homo Sapiens
  misc_feature (29)..(29): n is a, c, g, or t
  misc_feature (229)..(439): n is a, c, g, or t
  misc_feature (498)..(594): n is a, c, g, or t
ggggtgaaacgtctgcgccggagaagagntcgcagaggtagggttatggggggcgttggttgggtgaatacactatgtgcagtgtgggtgggcagagttttttagggtggtagagtgtgggaggtgggagaatggtggttccgtgagtctgggagggtaaggggcctattggtaggggggtgtgcggcgttagggtgttggaagctttctcggggagagtagcatctcnnnnnnnnnnnnnnnnnnnnnnnnnnnnnnnnnnnnnnnnnnnnnnnnnnnnnnnnnnnnnnnnnnnnnnnnnnnnnnnnnnnnnnnnnnnnnnnnnnnnnnnnnnnnnnnnnnnnnnnnnnnnnnnnnnnnnnnnnnnnnnnnnnnnnnnnnnnnnnnnnnnnnnnnnnnnnnnnnnnnnnnnnnnnnnnnnnnnnnnnnnnnnnnnnnntggtttggaaaggtgtttaaaaaaatctattggtggtggggcgaggctattcggataannnnnnnnnnnnnnnnnnnnnnnnnnnnnnnnnnnnnnnnnnnnnnnnnnnnnnnnnnnnnnnnnnnnnnnnnnnnnnnnnnnnnnnnnnnnnnnnnaacttagaacagaatttatttgtaaaattggtacaagcctaagttctacaataaatcagagtttcaaaactagctcccaaagtccagaatcatgactcagagattttactctgcagtgtagcacagctgggtttatccaaaccaataaataatgctacattagaatcctgagccagggactgtgatggtgttagacaatccatgatgtccacaagttaataaagaccccactttaagaacaaaatatggctg

SEQ ID NO: 171271 - DNA, 345 bp, Homo Sapiens
cgctcccctgtaccacctatcacagggtcacaagacaaatttgaacttcgcgcctgtgaacttggcgcctagctgtaacgcttccgggatcaggtctgtcgctttccactcccacggatgttgcttatttgtcccaaaaccgccatttcaatactagagcgtgggcacccgaggccaattctgcgattaaaagtccctaacaactttctgataaagagaaaccatgtgaaatcgttcataacaaacttttatcctgcgagaacttggataagcgagccttgttccttacttgaatggtccagacctctaagtccgttattgcaaccactgggaaagggcgcgggg

SEQ ID NO: 171272 - DNA, 256 bp, Homo Sapiens
cactgattggctgccaccgctccactgatccctggctacctgcaatagaaaaaaaattgaaccagatgctgcctgccgtctagtgttgcccaataggtgacaactgttatgaaacatctactgttagttgagctattaggcgattttgctgaatgattatttagaaggttgcaataggagaaaaagatgaactagtcattctagagttcagtacaaatttggcaatctaaaaaacattatttagccgggagcggtg

SEQ ID NO: 171273 - DNA, 337 bp, Homo Sapiens
accagatgtcatcgctctggtatgggacgttcaatacgataattgaaaatgagagaaagaaatcaaaagtaaactatcgtattataaagaacaaattagaaaggaaagagattaggagcagagagaccagatagagaattccttcctaaaagaccaaagactaagtaaagattatgaggacctcaaatggagcggtggaggaatcgagcacgtgatcgcacctcagggtcagtagctgctggcgaagagcagcatgccgggggggatgtaacactcgaggcgggggacgcggaagggggtaaccagagacccgaactccgtaatcagtggaacatag

SEQ ID NO: 171274 - DNA, 819 bp, Homo Sapiens
  misc_feature (143)..(143): n is a, c, g, or t
ggaggttgtagtgcaagagacacataaaatggccagctcttgagaggagtggtgtgcacacccagcggggttaggcagcccctagctgcggagtgtggccagccgggactgcatggcctccagagcctcttcctcctcctccntcatcctctgaggcagccatcgctcctggaggttctggctctggaagggcatcagtcactttactgggtgctttgcccaaggcccctgctgtaatttcaaagagaattctgtcaatttccatttctgcttcttcctccatttcttcctgatcgtccatgctttcaaaagtgtcctctaacatctcctctatgatcccagccttcatcatttctttggacaactccctcatggtggcctgaatctctggaatcttcacaagactttgcatggccttcatcacttcttgtgctcttctcgcagggaaccagccactcgcaagaccgcgagctggttcttcatccccatgagcactgagttcatgtgtgctttggatgcatacagcttgctcacagccttccttgacctgatcatctccttggccagaactatgcagacatccttctggcccttcttggcagcatctttcacagatcgtttcactttttcttcttctctttggatatcccttatttgcctgtcaacaactctcatttcctttcttatcttcaatgaccactcattgaccagttctttgggcggcttctcctgggtctttccaaacagccccatgacgaactgaacccgtcttgccccttccggctttcagttccccgcgcccaggcaggtcacgggccc

SEQ ID NO: 171275 - DNA, 604 bp, Homo Sapiens
tttgggtggtgttctcagaggatcccgtatgacccagagtagcctccccgaggcggcatcttatgtgtgtcttccaccatcctcatggtgggcacttttctaggcctgtctcccagcatggtgcaaggctcggaagagaaccagaaagtgaaacggggtgaaaacagaaagctcaatggatgggctaggttcccagatcattagggcagagttggcacgtcctctggtcactggaatccacccagcccacgaatcatctccctcttgaaggattttatttctactgggttttggaacaaactcctgctgagaccccacagccagaaactgaaagcagcagctccccaaagcctggaaaatccctaagagaaggcctggggcaggaagtggagtgacaggggacaggtagagagaaggggcccaatggccagggagtgaaggaggtggcgttgctgagagcagtctgcacatgcttctgtctgagtgcaggaaggtgttccagggtcgaaattacacttctcgtacctggagacgctgtttgtgggagcactgggctcatgcctggcacacaataggtctgcaataaatttatggttaaatcctg

SEQ ID NO: 171276 - DNA, 625 bp, Homo Sapiens
gagttactacttttattctttattgtcacattttccaagttttgcgcattcaaacttggcaaacatcatggagatttgtacaaacatacatatacatatatacacacatatttatagccccagcttcctcattaaaccttgtgctcaggctcctgttaaaagaggtaaaatggtgagaagataaaaatcagggaaaacatgaataaagtgctgacggacaaatctggtggttatgaatttgtaaggcagacattttaaagcaaaatccattaccttgctaaaatttccactaagctacagcttcagatatttacaagaaaaataaatatcttttaacagacttcatgtggtttaacagcaagctagctgaggagttgtattttgttgttatttcaggtaactttttattaagaaacagttaatatttcagtgattacaatttcaggtgttcaaaactcaagaagggtcatcattatactctgaagcagaattcttcaggtactcatctttaaattactacccaaatctatcacagtcacattcaggctttcaatttttaaaaacatttaatgtttgcggacgcgtgggtcgacgatatcccgggacttccggaccgtaccagcct

SEQ ID NO: 171277 - DNA, 850 bp, Homo Sapiens
  misc_feature (621)..(621): n is a, c, g, or t
gggattagagtaataattttgtcatttaaaaacacagttgtttatactgcccatcctaggatgctcaccttccaagattcaacgtggctaaaacatcttctggtaaattgtgcgtccatattcattttgtcagtagccaggagaaatggggatgggggaaatacgacttagtgaggcatagacatccctggtccatcctttctgtctccagctgtttcttggaacctgctctcctgcttgctggtccctgacgcagagaccgttgcctcccccacagccgtttgactgaaggctgctctggagacctagagtaaaacggctgatggaagttgtgggacccacttccatttccttcagtcattagaggtggaagggaggggtctccaagtttggagattgagcagatgaggcttgggatgcccctgctttgacttcagccatggatgaggagtgggatggcagcaaggtggctcctgtggcagtggagttgtgccagaaacagtggccagttgtatcgcctataagacagggtaaggtctgaagagctgagcctgtaattctgctgtaataatgatagtgctcaagaagtgccttgagttggtgtacagtgccatggccatncagaatcccagatttcaggttttattacaaaatgtaagtggtcacttggcgattttgtagtacatgcatgagttactttttttctctatgtctgagaactgtcagattaaaacagatggcaaagagatcgttagagtgcacacaaaatcactatcccattagaacatcatcaaaagcttaatttttattcttgcactgggaagaaatcgtaagtcaactggtttcttgg

SEQ ID NO: 171278 - DNA, 438 bp, Homo Sapiens
ctcccatgatgctccacgctccattgctttattattctctctttacatgggatatggggtgcaagtcgagttctgtggaccacgcttggggaagtgctgccagaaactatccaaaacagtaatctccagagcacttatgaggcagtcacagcttgaagtgtgacgcttagtgtgtcactgatgttggagctgggctctcaggctatgcttgcaggatggtccccacgtgcctgtggcaaggtctgtggtgaagcagagattatcaaggctttccagaggcagaggaggaacccagctgccctgcatcaccctggaggagtagggagtcagcagtcaaagccttgagataatgggggaacacaggatgtgataaaaaccagaagtctgtgatgttgtttgttctctactcgaggcatacagaggagcttcatgaacgtg

SEQ ID NO: 171279 - DNA, 187 bp, Homo Sapiens
gggtgatctagaggatcccagatgatgctccaccgctccatattactctccacaatagtctgggtaaggcaaatctgaaaatcttctccaagcttaaaatccttcaatggcttcctattactctcagaataaactccaaagtctctactaaaaatacaaaattagccggagcggtgagcatatggtc

SEQ ID NO: 171280 - DNA, 764 bp, Homo Sapiens
agataatactgtcggaaaggctccaagaggtgagcaagtgggaactcatctagatcaggcatgattgggatcagtacctggtgccatccgatcatcccaaaggcaacttcgttccccaaggatgggtccttcccccgctccccagcaacgacatctgggcaactgctgttaagctgcattagtaaagatgctccaggagtgtggtccagccagcgctctttccagctgtaaatattagcgatggtgccatcttttgctgtagactaaactgcaacttctaaattccatgtggcattcccctaccctgaagttatgctttccttctgtgctctgtgctggccagaggtgcctcttgaatcagattaatgtggtttttcaggaaaggacttaggtgaactgaggtttttaccacaggcagtgaatgaccttggttcaccaaatttgcctctgttttgaggggcttggtccagagtgacttgttaatttactctaacttccttgtgtgttgatgggtaagtacactcaaacactgaatacaggtgtgtgatgggtacatttcacagcccttctactaatagtgagtgtgaaggcaagcttgatgcaaaacctcctgacctttcctaccctgaagagccctttgacttctaggaagaaaggtcaaacaatgttatcttcagttgtgttaatcccagtgttagtgcagcttaggaggctgctagttaggaagatggcagtggctgtaggctggggtgccagaaaagatg

SEQ ID NO: 171281 - DNA, 365 bp, Homo Sapiens
tccctgcgtatgggcccagccacccttctccagttcccttttgggcaaacacgagggctctccccggacccaggccagcttccgctccttttagttctcctctcaccctgggggtacagcagtccctgccagcttgaggggactgtgggaaggcagcgccccacctctccttccccagagcaggggctccagaccccagggatgtggcagagctgccaacttcctgtgtgactccagcaagtcaggcttgcctacctgggcctcagtttccctacattgtaaaatgagaagaattgcccacgccacgtctgcctcacctggggccacctggagtgcatgaccaggtagagaagaacggtggccaa

SEQ ID NO: 171282 - DNA, 169 bp, Homo Sapiens
ccgatagctcaccgctccttctagccataccctgttctccacagagctatacgaatgagcttttaaaaatctaaattagatcatgtcatatcaatcttcaagttcttattccagtgactgaaacagtcccataagttgcagtaactttccatcttggagcggtggagca

SEQ ID NO: 171283 - DNA, 661 bp, Homo Sapiens
aaggagcgaggctcggtggcgatcccggcacgagggtcttcgcccgccatggccgagagcgactgggacacggtgacggtgctgcgcaagaagggccctacggccgcccaggccaaatccaagcaggctatcttagcggcacagagacgaggagaagatgtggagacttccaagaaatgggctgctggccagaacaaacaacattctattaccaagaacacggccaagctggaccgggagacagaggagctgcaccatgacagggtgaccctggaggtgggcaaggtgatccagcaaggtcggcagagcaaggggcttacgcagaaggacctggccacgaaaatcaatgagaagccacaggtgatcgcggactatgagagcggacgggccatacccaataaccaggtgcttggcaaaatcgagcgggccattggcctcaagctccggggaaaggacattggaaagcccatcgagaaggggcctagggcgaaatgaacacaaagcctcgaaatcagtgcgctccagctgatctcgttccgccggttccccttggccgccagttccgttctcctcacgggccgaacggaacaaggggtccagcttgcgggggaccctccccagcccattcctgctgtcaaacaaacaaaaccttgcaaagcga

SEQ ID NO: 171284 - DNA, 860 bp, Homo Sapiens
ggacgtagcgtcgccgcgccaggtctctagcagctgccgctgagccgccggacggacgctcgtcttcgcccgccatggccgagagcgactgggacacggtgacggtgctgcgcaagaagggccctacggccgcccaggccaaatccaagcaggctatcttagcggcacagagacgaggagaagatgtggagacttccaagaaatgggctgctggccagaacaaacaacattctattaccaagaacacggccaagctggaccgggagacagaggagctgcaccatgacagggtgaccctggaggtgggcaaggtgatccagcaaggtcggcagagcaaggggcttacgcagaaggacctggccacgaaaatcaatgagaagccacaggtgatcgcggactatgagagcggacgggccatacccaataaccaggtgcttggcaaaatcgagcgggccattgatgtgggaaccaggagtgctcgtgtgctgagagcccagtgaggcacgggagcggcgtggccccccttccctgggaagatgttgaagaggggcagcgtaggggggaggagggagctggtgctgcagtggccagtggctgtggctcatttcaggcctcaagctccggggaacaggacattggaaagcccatcgagaaggggcctagggcgaaatgaacacaaagcctcgaaatcagtgcgctccagctgatctcgttccgccgggttccccttggccgcccagttccgttctcctcacgggccgaacgggaacaaggggtcaagcttgcgggggaacctccccagcccattcctgcgtcaaggaaaaaagacttgcaagcgaacaaggacggatagccacggc

SEQ ID NO: 171285 - DNA, 304 bp, Homo Sapiens
gttacgctcctactggacacttcatcaagattggcgagggctccacgggcatcgtgtgcatcgccaccgtgcgcagctcgggcaagctggtggccgtcaagaagatggacctgcgcaagcaggcagaggcgcgagctgctcttcaacgaggtggtaatcatgagggactaccagcacgagaatgtggtggagatgtacaacagctacctggtgggggacgagctctgggtggtcatggagttcctggaagggaggcgccctcaccgacatcgtcacccacaccaggatgaacgaggagcggtgg

SEQ ID NO: 171286 - DNA, 182 bp, Homo Sapiens
tgagccggaccacataatgctcacgctctggcagaagtacacttaactgaatgctgatttgatattgagtaataaattaactttttagttgctttatattttcttattaccactattagttgtgaagttttttaaaaaggcagtatagtcagtttctttttggtggagagtggtggttttat

SEQ ID NO: 171287 - DNA, 186 bp, Homo Sapiens
cttgctccaccgctccaggggtcatctaaggatgcctttctatctccagcctttccccagcctgaacccttcctttcttccccacagtgccttttacctcagttatcattctgaaagtttcatctggttatttttctccccaaacagagtgtgagctccataaagataagaagtcatcttttgccg

SEQ ID NO: 171288 - DNA, 985 bp, Homo Sapiens
  misc_feature (783)..(807): n is a, c, g, or t
ctccacgagggaaggatgcacccaacctcatctgcaccccccatgctgcatggtacagcgagcaggcatccatcgagatgcgagaggaggcggcacgggagatccgcagagccatcacaggccggatcccagacagcctgaagaactgtgtcaacaaggaccatctgacagccgccacccactgggccagcatggaccccgccgtcgtgcaccctgagctcaatggggctgcctatagcaggtaccctccgggcgtggtgggcgtggcccccactggcatcccagctgctgtggaaggtatcgtccccagcgccatgtccctgtcccacggcctgccccctgtggcccacccgccccacgccccttctcctggccaaaccgtcaagcccgaggcggatagagaccacgccagtgaccagttgtagcccgggaggagctctccagcctcggcgcctgggcagagggcccggaaaccctcggaccagagtgtgtggaggaggcatctgtgtggtggccctggcactgcagagactggtccgggctgtcaggaggcgggagggggcagcgctgggcctcgtgtcgcttgtcgtcgtccgtcctgtgggcgctctgccctgtgtccttcgcgttcctcgttaagcagaagaagtcagtagttattctcccatgaacgttcttgtctgtgtacagtttttagaacattacaaaggatctgtttgcttagctgtcaacaaaaaagaaaacccttaaggagcatttggaaagcccattttgaaggtttcnnnnnnnnnnnnnnnnnnnnnnnnnggagggtgggaaacgcgcccccacaaatggagggaagttgggcaaaccttcctcgaggaaaaagaaattccttcccggttttctctttttattgccccccaggggcccttgcctttttctccccccggcctgggccttatatttttagaaaacactcttcgaaaaacccacccccagg

SEQ ID NO: 171289 - DNA, 189 bp, Homo Sapiens
tgtcagaggatcccaatgatgctcaccgctcctatttagggaattaaggggcatcgatcactcacacgttagtggcatgtcatcaaagccatttatattatatatatcctaactttctcgggtgcagaaggaacaggcaacaccttgggggatctggtgccttgaagagaatcaagatctatcctgcca

SEQ ID NO: 171290 - DNA, 468 bp, Homo Sapiens
caccgctccattaggaggattacgcgaaaagcagaagacagtgacagtgaacctgagccagaggataatgtcaggttatgggaagcgggctggaagcagcggtactacaagaacaaatttgatgtggatgcagctgatgagaaattccgccggaaagtggtgcagtcgtacgttgaaggacttggctgggttcttagatattattaccagggctgtgcttcctggaagtggtattatccatttcattatgcaccattggcttcagacttggaaggcatcgcagacatgccatctgatttggagaagggtacgaaaccgtttaaaccactagaacaacttatgggggtatttccagctgcaagtggtaattttctacctccatcatggcggaagctcatgagtgatcctgattctagtataattgacttctatcctgaagattttgctattgatttgaatgggaagaca

SEQ ID NO: 171291 - DNA, 169 bp, Homo Sapiens
cgctcctgaaagagtatccagttcacaccataattttaacaagcctggggcacctggactaaagacacactccagtttacttacttccccccaaccatcccgcttctatattcccagacttgctctgagtagcaaaaggataaatggaagtgaagcccggagcgtggac

SEQ ID NO: 171292 - DNA, 483 bp, Homo Sapiens
aggcaccgctcctgaaaaacacaaacaaacacacatatttaccaagtgccccgtgggcagaattttaagtttcactcaaggtgaaataagagtaaatataatcgggtcttacttataggggtgactgaaattatctaataaccttcaacacagaaatattctctactctgtgaaaatatactctaactctgagaaaagagattggcataagatccaaaatatcagtatttatatgatacttttccagatgatgaagacatgaacactaacatgtacatttttgagtggtatatttacatcatacagaaagagttgtgtaaacttttcagatggaaaagtcacattgagttagaaggtactgctcaaattgtaacgtctacaataaactgaagatcttgttaatgcagtctgtgtcagaaggtctggaataaagcctgagtttctggatctgagcgtggagccatcatgtgggatcctctagaa

SEQ ID NO: 171293 - DNA, 332 bp, Homo Sapiens
atctgctgcttctgggaagggaacttcttgcaggggaggagaccaacacagcaggctgccaaagccatgcagcgcttcgagccaggaggtgatgggagctcagggcgaaatgctccccggcagaggctcttgctactagaggttgtggacaagaagctacagctgctgacctacaactgggctccagacctgggggcagcattgggccgagcgctggttcgcctggtgcagtggcagaatgcacgagcccatctcatcttctgcctactcagccagaagcttggcctcttccatcattatggccagttggacttccccgtgcgagatgaaaa

SEQ ID NO: 171294 - DNA, 885 bp, Homo Sapiens
  misc_feature (630)..(631): n is a, c, g, or t
  misc_feature (634)..(634): n is a, c, g, or t
  misc_feature (637)..(639): n is a, c, g, or t
  misc_feature (641)..(641): n is a, c, g, or t
  misc_feature (644)..(655): n is a, c, g, or t
  misc_feature (668)..(763): n is a, c, g, or t
  misc_feature (769)..(769): n is a, c, g, or t
  misc_feature (772)..(773): n is a, c, g, or t
  misc_feature (775)..(775): n is a, c, g, or t
  misc_feature (787)..(802): n is a, c, g, or t
tggctggaccacatgattgtccacgctcctcctgtctctccccaggccctacatggatgtggtcgtctccctggtcactatcatgttggacacgggcctgccctgttttcgcggccagacaatcaagctcttgaagcacaggtttagccccaacatgactgagcgcgaggctgcaaatttcatcatgaaggtcatccagagctgcttcctcagcaacaggagccggacctacgacatgatccagtactatcagaatgacatcccctactgaggaggggaccttcgagggcctctgccccatgtgccctcaaagctgtcccacaatcatggagccctgcgacctccctgccctgccgccacatgcagtggaggagaggcctgtggcccaaagaacctggtagcgcctcctggggcagcacgtgggtggcgcagccttggtaacgccatggactgcagcgacaatcaatggatggtgctgtctatgcacaggtgtgagtcctctgtttgcactggacatattccctacctgtcttatttcataggtacatgaagtattgtgtataaaaaaagagataagatttaaccaacatcaacaaaataaaaacccaaaatagtgctgtattggaaaannaanacnnncnacnnnnnnnnnnnnccacacaaaacannnnnnnnnnnnnnnnnnnnnnnnnnnnnnnnnnnnnnnnnnnnnnnnnnnnnnnnnnnnnnnnnnnnnnnnnnnnnnnnnnnnnnnnnnnnnnnnaacaanaanncnaaaatggggggnnnnnnnnnnnnnnnnaaaaaagtttttaaaaaaccttcttttgggggcggcggccccccacaaggaaaaaggaaaagggggctatactttgttccccc

SEQ ID NO: 171295 - DNA, 163 bp, Homo Sapiens
agactggtgacacaagtgagactctctcccaaagaaaaagaacacgcatgaggcccggtgctgtggcttacccttgtaatcctagcatttgggaagcccacgggggtggatcacttgaggcccaggagtgccccggtcaacatggggaaacctcgtctctatt

SEQ ID NO: 171296 - DNA, 213 bp, Homo Sapiens
tgggagcactccgcctctgggtgcccccgtatcacctcatgctttcctctagacctgcaccggcactgggttgaaggaaaataatagtagccaacgttaattagcacatactctgggccaagcacccttctaggcagtttaaatgtattcctttatgtcatcctcaaaaatcccatgaggagcctgtgagccatcatgtacatgatgctcccc

SEQ ID NO: 171297 - DNA, 191 bp, Homo Sapiens
cagccaacttcatcctgttattatagcataaagcattcttattaccatggcatatgttttagcaagaagttcaacctccataacttcattttcatgttccctttgttaaaaaaatgaaaagtttctattaggcattaactataacattaatatatgatgaaatgaattttagtgacacaaagggttactat

SEQ ID NO: 171298 - DNA, 141 bp, Homo Sapiens
tcaagatagctctgtggagttatcactagagatgcctctggatcaactaagaggtgtgcctgggtgtgggtgaggagtcagaacctttgagagctttgagatgacagtttctatgagcggtgagcatatgtggtccggctc

SEQ ID NO: 171299 - DNA, 493 bp, Homo Sapiens
tgtgaagagatcttgaggtgatcccttcttctccatggtcaggcagatatccaggtattgggagtgcccacttgtctgatttaacagcccgaccggccccaccattcctagacatagatagtggtgcagtgagaccctctctgcttcatgtccaggcagatcctgaggcattcagagcacctgtttccctggttcagcagcctgagtcataccacccctgccatgcagaaatctcggtgcaggggtgctgtctcggccccatgcctaggaagatctccaggtatcaagagcacccactctcctagatagagcttcagctgcccctattaccatgcagagatcttgaagccaaggtttctcagctccacatgtaggcacacttctgggtacatggtgaccacccactggattctcctttggcactagtgcctgtgcctgccatcagggaacctgctggcagacttgcttggtccagccctacccttcatggctc

SEQ ID NO: 171300 - DNA, 292 bp, Homo Sapiens
ccctgtcgttctctgcccggatcacgtcaaggaggctgatgatgttgggatggtccccaaactcctggggagagagtcggaggcggctggaaggccaggaggggctgtgctctggggcccaagaaggccagtttctctcctgtctggagagatctgtacctgggcaaggggattggactggagggcccaggccactcacctggaggagcgtgatttcccggaatgttctctgaagagacagaaacacaggtgtgtgggtggtggagcgtggagcaatatgtgaccggctatc

SEQ ID NO: 171301 - DNA, 200 bp, Homo Sapiens
tgatagctcaccgctccaaaagtgtcacaccccaaaattggtcaatttaaaatgggaacacaaatttagcaactgccagactgtgttacattaaggcagcgtaatctcaacacgaggcacctgttaaataccagcctgtctgctcaggtcacgcatgagagttctgctttgcttgcactcatactctggagcggtggagc

SEQ ID NO: 171302 - DNA, 638 bp, Homo Sapiens
gctcggtacctccatgactgccttcagactcaagtggaacttcaggccaggttcagcacagagctggaaagagagaagcttatcagacagcagatggaagaacaggttgctcaaaagtcctctgaactggaacagtatttacagcgagtacgggagctggaagacatgtacctaaagctgcaggaggctcttgaagatgagagacaggcccggcaagatgaagagacagtgcggaagcttcaggccaggttgttggaggaagagtcttccaagagggctgaactagaaaagtggcacttggagcagcagcaggccattcagacaaccgaggcggagaagcaggagttggagaatcagcgtgtcctgaaggaacaggccctgcaggaggccatggagcagctggaggagcttgagttagaacggaagcaagcacttgagcagtacgaggaagttaaaaagaagctggagatggcaactaataagaccaagagctggaaggacaaagtggcccatcatgaaggattaattcgactgatagaaccaggttcaaagaaccctcacctgatcactaactggggacctgcagctttcactgaggcagaacttgaagagagtctgaagcagtcatggagggccgg

SEQ ID NO: 171303 - DNA, 297 bp, Homo Sapiens
  misc_feature (202)..(211): n is a, c, g, or t
acacgctccggactttctcttgatttttcattcaatttacaacacgttactgaggacaacagtgtagcctggttttgacaaaatttttttattgtcttcatcattttgttgtattctgagttctttcacatagttcttttttttgtgttggttacttagaataagaataatctcaaaagtattgtcagtgttcatagtttgnnnnnnnnnnggtaaaaaacccatttcagatttttacctcctaaatgattagaatcagattaaaatagtttggtttcgagtgaaaaatgctgtcag

SEQ ID NO: 171304 - DNA, 533 bp, Homo Sapiens
  misc_feature (190)..(213): n is a, c, g, or t
  misc_feature (221)..(471): n is a, c, g, or t
  misc_feature (491)..(491): n is a, c, g, or t
  misc_feature (510)..(510): n is a, c, g, or t
  misc_feature (520)..(520): n is a, c, g, or t
gagatggggtattgctatgttgcctaggctcgactcaaattcctgggcctaagcagtcttctgcctcactctccagagtaggtggaactacaggcatgagacacagcatctacaggcatgagacacagcatcttcctgtcttttgggctcctttagtcccatctttgtccctctgccccacccctacagnnnnnnnnnnnnnnnnnnnnnnnnggatggannnnnnnnnnnnnnnnnnnnnnnnnnnnnnnnnnnnnnnnnnnnnnnnnnnnnnnnnnnnnnnnnnnnnnnnnnnnnnnnnnnnnnnnnnnnnnnnnnnnnnnnnnnnnnnnnnnnnnnnnnnnnnnnnnnnnnnnnnnnnnnnnnnnnnnnnnnnnnnnnnnnnnnnnnnnnnnnnnnnnnnnnnnnnnnnnnnnnnnnnnnnnnnnnnnnnnnnnnnnnnnnnnnnnnnnnnnnnnnnnnnnnnnnnnntgagccaccgggcttgggcnggttggttggttttttganacagggcttnttgggcacccagc

SEQ ID NO: 171305 - DNA, 638 bp, Homo Sapiens
  misc_feature (159)..(159): n is a, c, g, or t
gtgtatctagaggatcccattcggcagcggggttgggaggagcatgaagctgagcctcaggctgaagctgggcctggggctgttctgaatcctgacccctgacaggggacttaagatgcctaggttgcatagacccgggcttagtttttcgaggtcggnctcgggccccgggcaggagaactggcagtggtgttggagccagctaactccatcttcatagagaagagggcagggttgagtgacgcatgggctgccacttttaaggagtcagtttccttctttatcacctcctcaggaactaagttcccctctgttccttctacaaagataccagccaaatacggcaatacccagtagcgacgtctgtaggcggtcctgacccaggggagaacgcccgaagcatctgggatgagtgaagcaagctttttgcgaaagaaaaagctgcaccctttgctgagttcacctaattctggcgctctagctctgggatgctagatgctgtggaatcaacctctccatctcttcgacccttgcggccaggcacagctgctatagactccttcttcttcctcttcttccattgcactggtctcctccatgatctgagaactgcgcctccgtccaggcttcctctggcc

SEQ ID NO: 171306 - DNA, 537 bp, Homo Sapiens
ttttgctgggccttgactctcacttcctgccccactcctggctcagccagtttgggcagtgcctagggagcccagagacccagttcttcccaggggccagccccgccctccctggccttggggattgagggcagcccaggtgtcagcctgctcctcatccaccccacttccctctctcctcctcctcgtcatcttctttccaggccttatccaccatcagtcccaggctccaagacctcttttcctgctcgctctctcaatctctcgcccactccatcccaaacttctctccaaatcggggtggagccccttccagccctccataatgccaagcgttccccaagctctttctcacccctgtgccaaggaagggtcctaattcagccaggctgacctgagggcccaggacaagaaactgggttcacaaactgctcggaggtgactgaccctgttaggaccatcccatgaaaatcaaagtgccaggtttttttctgtgagctttgactggagaaatccaaatcagagccttcctcctag

SEQ ID NO: 171307 - DNA, 250 bp, Homo Sapiens
  misc_feature (66)..(66): n is a, c, g, or t
  misc_feature (77)..(77): n is a, c, g, or t
ctagaggagtccaccccaccgcgtcccagcacctcactcccgtgcccccacacagcacaggactcntggagtttcangtgacattcctgagtggatgaacccgagtgatttctgtgatgcccatgccaaggtcaagaaggcagatgcccatgggtgcatggcacggaggccagccaggaggtccccctagctgctaccctttcagagggaggggccaagaaggagggagaggagcgtggacaatcatgtg

SEQ ID NO: 171308 - DNA, 162 bp, Homo Sapiens
gcttgttgtaaccaagtgagttatagagaaatgccacactttgagactaattcaggagtcctttattagccggtgactgagagacggctaacgctcgaaattctctcgggcccgaagaaggggctagattttcttttatactatggtctacacggagcggtg

SEQ ID NO: 171309 - DNA, 331 bp, Homo Sapiens
agaggatcccctgcgccaccgctccccaggacttcagagatgttgcacgcccctaggccctctatgctggggcatcaaagacaatgaatgaggatgaaggttggtggcaagtctggagcgggcgttgagcggagggcgagttttcttttgttttctgtaggaaaggtgcaaacgtcaaacaccgtggaaggagaaaaggatgggaagcccgaggggtgtccaagccctgtgagactgaaaaagcactttgaggaaccttaaagaccttgtttgtacataagaactgctagcaaaagagacctcactcttctcttgctttcgtgagaaagaa

SEQ ID NO: 171310 - DNA, 164 bp, Homo Sapiens
gcgcctcggcagattaaaatgggacatacatatgaaaacactaatttgtggttttgtttgaaaataggagctcagtagtagctgtccttttgagtcagagcttgtacttgcctgtacgtaactcctatgagaccaatttcactttatctaattggtcatataca

SEQ ID NO: 171311 - DNA, 454 bp, Homo Sapiens
gcagagcagcgggagcaggaacgggcagtgcgggaacagtgggcagaacgggaacgggaaatggagcggcgggagcggactcgatcagagcgtgaatgggatcgggacaaagttcgagaagggccccgttcccgatcaaggtcccgtgaccgccgccgcaaggaacgtgcgaagtctaaagaaaagaagagtgagaagaaagagaaagcccaggaggaaccacctgccaagctgctggatgaccttttccgaaagaccaaggcagctccctgcatctattggctcccactgactgacagccagatcgttcagaaagaggcagagcgggccgaacgggccaaggagcgggagaagcggcgaaaggagcaagaagaagaagagcaaaaggagcgggagaaggaagccgagcgggaacggaaccgacagctggagcgagagaaaccgtcgaattcga

SEQ ID NO: 171312 - DNA, 833 bp, Homo Sapiens
gtgtgtgtcgttgcaggccttattcatgggctcaccgctgaggttcgacgggcgggtggtactggtcaccggcgcgggggcaggattgggccgagcctatgccctggcttttgcagaaagaggagcgttagttgttgtgaatgatttgggaggggacttcaaaggagttggtaaaggctccttagctgctgataaggttgttgaagaaataagaaggagaggtggaaaagcagtggccaactatgattcagtggaagaaggagagaaggttgtgaagacagccctggatgctttgggaagaatagatgttgtggtcaacaatgctggaattctgagggatcgttcctttgctaggataagtgatgaagactgggatataatccacagagttcatttgcggggttcattccaagtgacacgggcagcatgggaacacatgaagaaacagaagtatggaaggattattatgacttcatcagcttcaggaatatatggcaactttggccaggccaattatagtgctgcaaagttgggtcttctgggccttgcaaattctcttgcaattgaaggcaggaaaagcaacattcattgtaacaccattgctcctaatgcgggatcacggatgactcagacagttatgcctgaagatcttgtggaagccctgaagccagagtatgtggcacctcttgtcctttggctttgtcacgagagttgtgaggagaatggtggcttgtttgaggttggagcaggatggatcgcaacaattacgcctggggagcggactccttggaggcacatggtacgaccacacagaatctcccccaatgactcct

SEQ ID NO: 171313 - DNA, 871 bp, Homo Sapiens
  misc_feature (270)..(270): n is a, c, g, or t
cccttccctttcctggcaaaggcttggaatgggaaaattaccttctttaattgggccctttttctgaatatttggtcttcattcaagaatgggcgggacggtaaccctgctatatcttgtttgggggagctttttttgttgggaataatgggcgattttcctcgccccacgcgcttgtttgttgtggaagtcgttgccccagccgcgtgtagttctttttctatgatgacccggggccgctttcttcacggttttggtgcgaacgcggcncctcccaccagcctttggcacctggggctcatggattggccccgaccacgacaagttcagtgccatgaagtatgagcaaggcacgggctgctggcagggccccaaccgctccaccaccgtgcgcctcctgtgcggaaaagagaccatggtgaccagaaccacagagcccagtcgctgcgagtacctcatggagctgatgacgccagccgcctgcccggagccaccgcctgaagcacccaccgaagacgaccatgacgagctctagctggatgggcgcagagaacctcaagaaaacatgaagccagcccctgcagtgccgtccacccgcccctctgggcctgcctgtggctctgttgccctcctctgtggcggcaggacctttgtggggcttcgtgccctgctctggggcccaggcggggctggtccacattcccaggccccaacagccttcaaagatgggtaaaggagcttgccctccctgggccacccaccttggtgactcgccccaccacccccagccctgtaaatgcctctcttcggagtggaaactagtgaatgacttgacctgtgacctcaatacaataaatgtgatcccccgccc

SEQ ID NO: 171314 - DNA, 1356 bp, Homo Sapiens
  misc_feature (944)..(953): n is a, c, g, or t
cttgcgcggtttaaacggaacgcgggtggtggctgtgcacgttagtgtgtgggttcgctcacctatacgagcccagggtgggattggggtggagcccgtgacttagggtgggggcgttgactagggggggtgagctgtatattaaggagggggggataggtaaactctgtctttgtttgggtgcccgtagggtgatttgcggtgggggaaaagggggcgaattacttggaaggcgagggtattggtatcggttggaaattcggttgccccagggcgctgtgggagtattgtttgtaagaatgagccaggggcccctttttttcaacgggttgtggtgggaaaaggggccccttcccaccaagccttggcccctggggctcatggattggccccgcccacgacaaagttcagtgccatgaagtatgagcaaggcacgggctgctggcagggccccaaccgctccaccaccgtgcgcctcctgtgcgggaaagagaccatggtgaccagcaccacagagcccagtcgctgcgagtacctcatggagctgatgacgccagccgcctgcccggagccaccgcctgaagcacccaccgaagacgaccatgacgagctctagctggatgggcgcagagaacctcaagaaggcatgaagccagcccctgcagtgccgtccacccgcccctctgggcctgcctgtggctctgttgccctcctctgtggcggcaggacctttgtggggcttcgtgccctgctctggggcccaggcggggctggtccacattcccaggccccaacagccttcaaagatgggtaaaggagcttgccctccctgggccccccaccttggtgactcgccccaccacccccagccctgtccctgccacccctcctagtggggactagtgaatgacttgacctgtgacctcaatacaataaatgtgatnnnnnnnnnnttacaacacaaccctcccaccccagcgcactctatgcccggtgccggccacagaagcgcctgaaagcgcgcctgggcccttaccttgttccctggcccccgccttttttggtaccaaagccgctaaacttttccgcggccctccttccggccggagccctcccttttctcgccccacgcctcagcccaacctcgcgcctctaccggatcctcgtccgcctcaccccgtggcatttctccccccgtttctcactgaccccggcccgttcttccgcgcgaatatgacaaaggcccatcgcgttggcgcaacctctgctcctccccgtgcacccaatccttctttgttcgcgccaaccacccagagcgtacctcgcccctttcctcaatccgctgagcaacgccga

SEQ ID NO: 171315 - DNA, 785 bp, Homo Sapiens
  misc_feature (30)..(30): n is a, c, g, or t
  misc_feature (736)..(736): n is a, c, g, or t
aatcttttgaaaggctgttggggccctggnaaatgtggaaccaagccccgccctgggccccaaagcaaggcacgaagccccacaaaggtcctgccgccacagaggagggcaacagaaccacaggcaggcccagaggggcgggtggacggcactgcagggggctggcttcatgccttcttgaggttctctgcgcccatccagctagagctcgtcatggtcgtcttcggtgggtgcttcaggcggtggctccgggcaggcggctggcgtcatcagctccatgaggtactcgcagcgactgggctctgtggtgctggtcaccatggtctctttcccgcacaggaggcgcacggtggtggagcggttggggccctgccagcagcccgtgccttgctcatacttcatggcactgaacttgtcgtggtcggggccaatcccatgaagccccaggtgccaaggctggtgggagagcccccgagtttgggtttctgcgagacaagcttgaaggggcagaggcggtagacgtattcgttggtggtgagctcgtagcactggctgtacaggtaagcaaaactccccgttggggccaaagtcaaaagaaatctcttgctccaggttcctgatggactcctccatgtccttcagcgaccgctcggcctcctcgaacttgttgcgggcctcctgggcagcatcgatgaaggcctgcgtctgctcgtcgtagggcggcattttgtcttcnctcagcagggctggccggcttgggctgctccccctgcacctcggactcc

SEQ ID NO: 171316 - DNA, 264 bp, Homo Sapiens
tgatacttatcactcaatactatgaacatttacatgtgtaagactgtacattctgagaagatgtgactttgtcttctctggctcacaattgcacactcattacttggcacaatgcttggcaaatctgttgaatgactgagtaaatagatgaatgatcggatgacttgaatataagaatatatttaagccccaggacaactgaagtatatcaacatggcatcacacaaatctgctcaaataaaagaagtaaaacattttggttaa

SEQ ID NO: 171317 - DNA, 233 bp, Homo Sapiens
tgctccaccgctccacaaaggctgttcccactcagcaagccacagtgacccttccaaaatgcaagtcagatcatgtcactctgctcagagctgagacttaaagccaagggctttccagcgctccctcagctgcattcctctgggccgtgcccactctgtcctcaccacctgccattttcctcttgctctctccactccaatgacatggtctgaaagggccacttcagagcggg

SEQ ID NO: 171318 - DNA, 777 bp, Homo Sapiens; identical to SEQ ID NO: 3593
  misc_feature (405)..(415): n is a, c, g, or t
  misc_feature (465)..(465): n is a, c, g, or t
  misc_feature (469)..(505): n is a, c, g, or t
  misc_feature (535)..(535): n is a, c, g, or t
  misc_feature (619)..(632): n is a, c, g, or t

SEQ ID NO: 171319 - DNA, 408 bp, Homo Sapiens
ctgggattacaggcatgaccacctcgcctggccaagaaaaatgtaaccttgtaaatagcacggcgttctcataatggaaacagttgcaaagaacataaagtacagctgcgttacatgtaacaaaagatgcaaaccaaatagattcaagttgttttgcagacagcacaatgatacaacattaggactacaggatctcagagtaaaccacaatgatttaaaggtaagatacacagaaataaaatgattttaacagaaaaatatgacattcctgaccttaggtctgggcacatgatgtctgacccctatagaggcaccttggctaaaatgggaatgacctagtgccatggctgacctcacttgtgcgatgcatgagaccatatgtgaacaaatccccttgatacagcacca

SEQ ID NO: 171320 - DNA, 180 bp, Homo Sapiens
gaggtgatcagcaacgcaccgctgagtgaactcttcctccccactatcctggcatagaagtcttcagtggaaataaactccattttccatgagttcacttactattttgcaataatgtaatactacttctactataaacacttagaaatggtggatttatgcgccgggtgcgtcgctgat

SEQ ID NO: 171321 - DNA, 329 bp, Homo Sapiens
taagcaaaacgtgatgtggtgtaagactgtatatttaaagctgaagtaaatatcagctctgcgagaaaatattgtaaggctattctatggaatttatctcaggttacaaaaccagggatagctataaagagagtatcctacgtctggagattggatctgtgcagtggacagctcttgccatgcccattcaatctttctccaaaaagctacatgcaagaaaggacacaaaatccttcattcaactagtttgcttttgcttggcttagattgtgatctagttgactcaaataatagaaaaggaattgataatcatatagacttggtctgtt

SEQ ID NO: 171322 - DNA, 438 bp, Homo Sapiens
  misc_feature (411)..(411): n is a, c, g, or t
aggtcctactggaaggagttcctggtgatgtgcacgctctttgtgctggccgtgctgctcccagttttattcttgctctaccggcaccggaacagcatgaaagtcttcctgaagcagggggaatgtgccagcgtgcaccccaagacctgccctgtggtgctgccccctgagacccgcccactcaacggcctagggcccctagcaccccgctcgatcaccgagggtaccagtccctgtcagacagccccccggggttcccgagtcttcactgagtcagagaagaggccactcagcatccaagacagcttcgtgggaggtatccccagtgtgcccccggccccgggttccgccttggctcggagatccgtgactttgttggtgttgagagcttgatttccagaggacggttgnctgggtttcagggggctgttgaatgtt

SEQ ID NO: 171323 - DNA, 199 bp, Homo Sapiens
ttgcactgagccagcccggacagctcaggatccgtgcagtggctgcgccgccaggccccaacaatggggaccctggggtggctcctggccaagtgttctctgtattcctcgcacctccttacactgtgtgacctgcagggcatgaggtattgatgtgttcgggcttcctttcccaagccagcagatgcaggtgttccaa

SEQ ID NO: 171324 - DNA, 635 bp, Homo Sapiens
  misc_feature (336)..(346): n is a, c, g, or t
taaaagtttggattttgtttaaaaaggctttattcatttttggatcagggaaaaaggacaatcttcaatgtcaactcgtcacctaatcataaatttgaacttacaggattcactaccctagacaccgcacctactgacaacacaacttaaaaatgaacttacttccattccctaaagttgcatgttgaatgaacagaatcccttctaacagccaacattggtacttggcctaagtttaagaatagcaaaacagcagcaaaaaagaggccaagagcattataatgtgatagcccaggaagtagaatcatagttaagaaagttgcaggcaccaaattnnnnnnnnnnngggagggctcatgagcataagaaacttaccagttttgtgagatcacccgttgtgtgagatcaactactctgcctgtgaacacgtatgccaatcccagtaaataacactgaggccaaggtcccaaaatccaactacactgaatgcaaaatccaaagctttttattattccaggtcctctgaaacctggatataaaacggattcttttcaatgcacccagagggtccactgtaatgactcagtcacatttgtaatgacttagtcacatttgttatgactttgtcataaccc

SEQ ID NO: 171325 - DNA, 146 bp, Homo Sapiens
ggatgatcagaaagcaccctaccccgtgatttcaatggttacctgggtacttagttatttcacagtgttgtcgtaaaggccacaagggattcctcttctttcccttctctgaaaataagttcagacttaggttgatatgtatagac

SEQ ID NO: 171326 - DNA, 204 bp, Homo Sapiens
  misc_feature (152)..(152): n is a, c, g, or t
ggttgatcagaacgcacaggttcttgaaataggacgctggacaggaaataatttctgttgccccacttttaaggaaaaattctacaaacaaatagagctctttatcaacagttcagaagtaaaggaaggcattttaaacagggtcaatcagnatgtagactttcaatctgtgtttgtgccaaggcacagagcctcaagcgtggt

SEQ ID NO: 171327 - DNA, 304 bp, Homo Sapiens
ggtgctctagaggatccgcctaggacccttctcagaaggaaagacacgtgcaggacaaaggaatccaactctgcatagtaatacagagatcaaaatattttttcacactgtgacatagcaattcatgtgcttcttcatgaatgcattaagtaaaaaatcacctgtggcagctttaataaccactgtgacttagaagcagagatgagcataaatgacatttcaaggtgcctgctggaagataacgtgataggaaatgcctgtgatttcttttggtaacagtcacaagttctgctaacactgctgt

SEQ ID NO: 171328 - DNA, 455 bp, Homo Sapiens
tcaagaaacaactataaccctgaatacggcttcactggccgggggtttacaagaggaaaccggtgtcaccgttaacacggatttagtgggcagtgttttgcaggcatcaagaagtttgacccatatttcgggtagaaatggcggttagttcaacaacttgcagtgcaccagctccaagaactaactggcaacttcttgaattgaagcacttagcgagatgaactttgtaaagttcagagaattccttccatgcacatttgaagccaggccaggttttttgacctaagtggcctcagtcatgttcagcaccttcaataaatctgacagacgagtaagcatgtcagtagtaacagatgggatgttatccacacactggcaatattcaaggataattcttattaacagcaatacggttccaacaactgcatactgttgcccctcgacaataagaactt

SEQ ID NO: 171329 - DNA, 219 bp, Homo Sapiens
gttacacagaggatccacattcagtgtagaaaggaccagcacagagctcgttcagtagagcatttcagaatcatcagggaggagcgcgtagcagaattatcccgttaacactgagaccacatttcacctgttacttatttttctaaatggagtaggagagaaagatgctaaaatgtgatcttgggaggagtcccccagtcccccgaaaaagaagaagag

SEQ ID NO: 171330 - DNA, 1675 bp, Homo Sapiens
tgttcttcaggatggagggaccacagggaccaccaagaaggcccggagtgaccctttgctttctgctcagcgccttccccctcatggctacccattggaacacccgtttaacaaagatggctatcggtatattctagctgagcctgatccgcacgcccctgaccccgagaagctggaacttgactgctgggcaggaaaacctattcctggagacctctacagagcctgcttgtatgaacgggttttgttagccctacatgatcgagctccccagttaaagatctcagatgaccggctgactgtggttggagagaagggctactctatggtgagggcctctcatggagtacggaagggtgcctggtattttgaaatcactgtggatgagatgccaccagataccgctgccagactgggttggtcccagcccctaggaaaccttcaagctcctttaggttatgataaatttagctattcttggcggagcaaaaagggaaccaagttccaccagtccattggcaaacactactcttctggctatggacagggagacgtcctgggattttatattaatcttcctgaagacacagagacagccaagtcattgccagacacatacaaagataaggctttgataaaattcaagagttatttgtattttgaggaaaaagactttgtggataaagcagagaagagcctgaatgcagactccccataggtgacataatatttaataaaaatggtgtcaatcaaagtatggcttacaaagatatttctgagaggggtttacttcccagccatctcactgtacaagagctgcacggtttccattaactttggaccatgcttcaagtatcctccgaaggatctcacttaccgccctatgagtgacatgggctggggcgccgtggtagagcacaccctggctgacgtcttgtatcacgtggagacagaagtggatgggaagcgcagtcccccatgggaacccctgaccaggtccctcctttctgtcaagggactttctgggaataatactgggggttttggttttggtttttgaactgtctcaaatgttctcccaaagatgctaaaaacacagcctctccttttagcaagttaaaaggctgggtaggactgcgggagactgcctgcctttcaccattttctccccacttccagtgactgctcttattttgtgtaccataagccaacaaccgctgactccaggattgcataagccccctgtgaaatcggtgctgtactgcataccctgccagctgtgacttgttatcctactatattttctaaggagtgaataatattgtccgagtaactaacttatttaaaagacatttccttctgtgggcattgactgtatcccacctgttttccaaggaaatggtaacctgtttctgagaacacctgaaatcaatggctatacattccaaaccaatctaaacgctatttccttttggtgtgggtttggttttgttcattttgaaatacacttttgaacactgagatccgtaaaactactagatctctggaagtgtaattgtgaaagaaacttgcttgcagctttaacaaaatgagaaacttcccaaataaaacttgttttgaagtttatgtgacactttgcttcccttcagattgggtgcctcttggtgacagtgtt

SEQ ID NO: 171331 - DNA, 445 bp, Homo Sapiens
taaggaagtataatggagatttcgctactcttctgtatgggaaggactgatggcagctagaactttagtttgtggtatgaagtgctttaaaagaaacacttggatgaaaaggaaattccttgaatgttaattgtgactgtaaacgtgttaaaactagccaaagaggacgcactggtgtcggtctctgcctttcttacatctttgataaaacccataggcaccaaaatcctggctgtttacatttctgcagatttgggaattacccatctgctaaatcatttgtcttttattttctttcaaaggctaaactgtatcgaagtctaaccctgtatttcctcctagtaaacacaatagatgttaaaagggaattcttttcccaaaataaccttttattattacaaaagccaaacataatcatttgagatataaaatcctggcaaacata

SEQ ID NO: 171332 - DNA, 818 bp, Homo Sapiens
ataattgaattacgcgaccataccgatgacagacagcactttgtccaaagcactgtacaaagcccagaagtttggagcccaatatgcgtgacagaggcccctcttgaaaggaaagagtcgggaaaagacttgaggcagctgattcaaggccaggaaaggacccaatgaaagagcagaaactaagaaaacaaccagtcccagggaaataacacgaacaaagctgaaactcttccatcgaatagacccatctggtttatttgcagtgaaacagtaggatcgcagcagatatacaccataagctggtgctacatagaggtagatatgcttgaaatgtaggagaacagcaaagagaaatgctccttccatatgccttttctgaaataatcgtgcaatggagagtagcattaatccaaataaaaagccattgtactgaaaatgaatatggtccacaattaataacccgaagttccacagaagtaataccgacagaataaattttggcttttctgtaagttctttacccactttttttccatcaatgcatttacagcactcacggacagcatacacaaagagtacatccataaagatgacggaaaatctctggaaaagtaaggtccttgagctggagtaattcaaattatggacattcagcatttcttgatcaaatatttggcaacatgtgacaggatatactcaaaccatgcaaagaaaggggggtaatccaacgtccactctgaagttgctatgtggggatgagaaggcatttgagaagagtcaccccgagcgccaaagccgaaaaccattgccagtacccg

SEQ ID NO: 171333 - DNA, 624 bp, Homo Sapiens
ccatagaggatcccggtgtaaccggatcaggttggtgggaagcgtgcggtgccgcagcaatggcggcgctcacaactgccacgggtactggcaattggttttcggctttggcgctcggggtgactctcctcaaatgccttctcatccccacataccattccacagattttgaagtacaccgaaactggcttgctatcactcacagtttgccaatatcacagtggtattatgaggcaacttcagagtggacgttggattacccccctttctttgcatggtttgagtatatcctgtcacatgttgccaaatattttgatcaagaaatgctgaatgtccataatttgaattactccagctcaaggaccttacttttccagagattttccgtcatctttatggatgtactctttgtgtatgctgtccgtgagtgctgtaaatgcattgatggaaaaaaagtgggtaaaagaacttacagaaaagccaaaatttattctgtcgggattacttctgtggaacttcgggttattaattgtggaacatattcattttcagtacaatggctttttatttggattaatgctactctccattgcacgattatttcagaaaaggatatggaagggg

SEQ ID NO: 171334 - DNA, 648 bp, Homo Sapiens
  misc_feature (603)..(603): n is a, c, g, or t
  misc_feature (607)..(607): n is a, c, g, or t
  misc_feature (618)..(619): n is a, c, g, or t
ttaaagggacagtttgtaacttgggctgtaaagcaaactggggctgtgttttcgatgatgatgatcatcatgatcatgatgattttaacagttttacttctggcctttcctagctagagaaggagttaatatttctaaggtaactcccatatctcctttaatgacattgatttctaatgatataaatttcagcctacattgatgccaagcttttttgccacaaagaagattcttaccaagagtgggctttgtggaaacagctggtactgatgttcacctttatatatgtactagcattttccacgctgatgtttatgtactgtaaacagttctgcactcttgtacaaaagaaaaaacacctgtcacatccaaatatagtatctgtcttttcgtcaaaatagagagtggggaatgagtgtgccgattcaatacctcaatccctgaacgacactctcctaatcctaagccttacctgagtgagaagccctttacctaacaaaagtccaatatagctgaaatgtcgctctaatactctttacacatatgaggttatatgtagaaaaaaattttactactaaatgatttcaactattggctttctantttnaagtagtttgnngatcgggatgtcagagcgaaagggacaaa

SEQ ID NO: 171335 - DNA, 1074 bp, Homo Sapiens
  misc_feature (627)..(639): n is a, c, g, or t
  misc_feature (767)..(767): n is a, c, g, or t
  misc_feature (790)..(858): n is a, c, g, or t
agtcaactccagtagcctcagtgtggccccatggtgtgactgcagcaacagtgggaacgacctagaagagtgcttgaaatttttgaatttcttcaaggacaatacatgtcttaaaaatgcaattcaagcctttggcaatggctccgatgtgaccgtgtggcagccagccttcccagtacagaccaccactgccactaccaccactgccctccgggttaagaacagagcccctggggccagcagggtctgagaatgaaattcccactcatgttttgccaccgtgtgcaaatttacaggcacagaagctgaaatccaatgtgtcgggcaatacacacctctgtatttccaatggtaattatgaaaaagaaggtctcggtgcttccagccacataaccacaaaatcaatggctgctcctccaagctgtggtctgagcccactgctggtcctggtggtaaccgctctgtccaccctattatctttaacagaaacatcatagctgcattaaaaaaatacaatatggacatgtaaaaagacaaaaaccaagttatctgtttcctgttctcttgtatagctgaaattccagtttaggagctcagttgagaaacagttccattcaactggaacannnnnnnnnnnnnccttttaagaaagcttcttgtgatcctttggggcttctgtgaaaaacctgatgcagtgctccatccaaactcagaaggctttgggatatgctgtattttaaagggacagtttgtaacttgggctgtanagcaaactggggctgtgttttcnnnnnnnnnnnnnnnnnnnnnnnnnnnnnnnnnnnnnnnnnnnnnnnnnnnnnnnnnnnnnnnnnnnnntttaaacagtttacttctggcctttcctagctagagaaggagttaatatttctaaggtaactcccatatctccctttaatgaccttgattttcctaatgaaataaatttcagcctacctttgatgcccaagctttttttgccacaaagaaaaaatccttacaaaaaatggggcttttgtggaaacagcctgggaactggatggttcaccctttaat

SEQ ID NO: 171336 - DNA, 1328 bp, Homo Sapiens
  misc_feature (14)..(14): n is a, c, g, or t
  misc_feature (27)..(27): n is a, c, g, or t
  misc_feature (31)..(31): n is a, c, g, or t
  misc_feature (41)..(41): n is a, c, g, or t
  misc_feature (96)..(96): n is a, c, g, or t
  misc_feature (103)..(103): n is a, c, g, or t
  misc_feature (108)..(108): n is a, c, g, or t
ggtgggttctgtanctgggaaaaggcntggnctgccaacancggtcaccatcgggagccatttgccaaagggcttgaaattgcatttttaaagacnatgtatngtccntgaagaaaattcaaaatttcaaaagcactcttctaggtcgttcccactgttgctgcagtcacaccatggggccacactgaggctactggagtctatgtagttgggggtcatgactgtgccaataagccccgagtaggcgaggaggcagtcagcgtagttttcctttagacagctgctgacagaccttgactctggctggcagttggtaaaaaaatccgcaaggcgagatctgcagatgtaattcgtcttgcaggagtcctgcaaattcaaacagttgggcttctccctctcttcataggagcacacaggcacgatggtctgtcgcctccgctctgtgcaggcgatgtcccggcaggagcagaagagcattccgtagctgtgcttggccgggaccttgtcaaagaaactgccggagggccttgtggcacttgcggcggttgcagacatcgttggacacgctggtggtgcacggggtgatgtacgccgacctgtacttcttgcaaatgtcgtcgaggttgcaggccttcgctgcatccaggcagttgttccctttgggaatgtgctccactgatatgaatgggaccacccggaatatatctgacaatctgctgttaactggttcatatggggaatcctccagcagatcatttccctgcaggctctggtacatgctccagtaaatgcgcaggcagttcttctccttcttcataccccgcttgcagcggcagttgtagagcgacttctgcttcagggcctccatggcgctgcggcactcatccttggcctccaggccggatgccaggctgaagttggtctccttgcccgccacgcactgccttagcgtgcggtacttggtgctgcagctctgctccttcaggcactgatcactggctttcacgcaatccaggcggtctccgccgctcacttcggccgacaggagcaagtccaagagcggcagcgcgaagtacagggtcgccaggaacatggtgccggcgcggggctggtccccgcccccccaaaaaaatcccgagccgccgctgggtcttgccgagggagctcagcgtgcagcgatccccggacagctgtgctgctctggccgcccaaagttcagctccatccagtgaaagaggaaactccgggtctggcagcagccaccgccgccggcgactcagctccgggatggcgagggcgggaggcggttccgcttttaggggttcagg

SEQ ID NO: 171337 - DNA, 904 bp, Homo Sapiens
  misc_feature (802)..(802): n is a, c, g, or t
gatgcagcgaaggcctgcaacctcgacgacatttgcaagaagtacaggtcggcgtacatcaccccgtgcaccaccagcgtgtccaatgatgtctgcaaccgccgcaagtgccacaaggccctccggcagttctttgacaaggtcccggccaagcacagctacggaatgctcttctgctcctgccgggacatcgcctgcacagagcggaggcgacagaccatcgtgcctgtgtgctcctatgaagagagggagaagcccaactgtttgaatttgcaggactcctgcaagacgaattacatctgcagatctcgccttgcggatttttttaccaactgccagccagagtcaaggtctgtcagcagctgtctaaaggaaaactacgctgactgcctcctcgcctactcggggcttattggcacagtcatgacccccaactacatagactccagtagcctcagtgtggccccatggtgtgactgcagcaacagtgggaacgacctagaagagtgcttgaaatttttgaatttcttcaaggacaatacatgtcttaaaaatgcaattcaagcctttggcaatggctccgatgtgaccgtgtggcagccagccttcccagtacagaccaccactgccactaccaccactgcccttccggttaagaacaagcccctggggccagcagggtctgagaatgaaattcccactcatgttttgccaccgtgtgcaaatttacaggcacagaagctgaaatccaatgtgtcggggcaatacacaccctcctgtatttcccaatggtaaattatgnaaaaagaaagggtctcgggtgccttcccagcccacaataacccaccaaatatcaaatggcctgcctccctcccaagcctgtggggtcctgaagcccccactg

SEQ ID NO: 171338 - DNA, 289 bp, Homo Sapiens
ccctgaaattggctttcgctacctaaattgaggtagaggtagaccctaatgttactccttccatgtgtcaagtctctcaccttaggtctctaaggtcacctataacttaagtctctcacccttaacttaaatacattttccctcttagtacataagcatgattcattttggaatgtgttgtcatgaaagaaaaattaagatcattcaaatggtactttaaaaattctgaactcctagctaaaaaaattcccttataaaaatgtacacaagggccgggtgcggtggctca

SEQ ID NO: 171339 - DNA, 453 bp, Homo Sapiens
catagaccatgattacgggatcagcggccgttgatttaccagccgaaacctatcccacttacgcactggtaactttatatgtaagctccttcttataactaaagaattcacatggtggttagttatggttgcagtctgccttgcactaacgtattttcattttctagaatgtatatgcatgcctgtcttttcctcatggagtcttctagggaaatcctcagcacactgcgagagggcagtcatttccttgttaggtgtgagtgagatgtgatccattccccaaacagcgtgcatttcagtaagggcattgtttttatgtgaggccgatccatccgtatctatgctattgtctgttacttgaagaatattgactgtcttggagtcgtatttctatcacatctctaccctgctggcttcaccatctaagtggtccttcagcaaacttctcagact

SEQ ID NO: 171340 - DNA, 504 bp, Homo Sapiens
  misc_feature (444)..(444): n is a, c, g, or t
aaggttacatgattattaagagttcactagacgcgctacctcagaaagcatttaactggatatgtatggagatttgcagaaggatatagcatgatatgatagaaatacaatgaaaatcatgggaggaggcagggacgcaaatacttaaatcgttttaattttactaaaacagtaagaacacaagaacactcagtaattagctaatagttttcaaccatgatatcgttttaacagtaaagaataagcacaacacatacacttcagaaagatcactctggcatcagtacaaaagactaaaaagttccaaaagtgaaacttttcaactttttactctggtaaatataaggagctttaaacactgacttcatttccaggttcttcttccctcagacctaggctaatcccctccctccagtaaaccctgaaatcctgttttcttgaagngtcacatattagaggtgaaggtttgacgccatgcatacaaaccagctatgaaaagaatgt

SEQ ID NO: 171341 - DNA, 413 bp, Homo Sapiens
ggaaaaggttcaccatgataacggattcactgggcggcgattcacgccagagactcactagctccctgaatactctagactccaaagggcatgtatcgttcttagaattcattatgcgctgaattctgcgtagtggccacaggctgaacaacgccactggtccactctggacttacctaacaggctgcgccggggggccaggtatagatgtgctgatgtctgaagcagaggagccagactatgaaagaggtaaaacgctcctgtttgctgggcttttttacatgcatcatcatcttccttcagttcaaataaatacctgtatttgggaaataatcaaaccattacaaaaccacccttagttacctgtatagcattcatctttgagaatgctgtcgctgcatccctctcttacc

SEQ ID NO: 171342 - DNA, 340 bp, Homo Sapiens
acaacaggaaacaggttacacgaggattacggcatcatagggcatctctatatacttactacagggccaaattccagagctgactcaacattatcagcgtctctaccttgagcctagtccttcattgacatggctttcattaagaagcaagcgcaacataattatactcacatatatgcttcacctaaagtctgtttcttctgcaacacccctagaatggtcaaggagaaggtactttttgcttctccggtgtatttttcagttatgtctgtttttaacagcattatagatgtgccccaatttttaccttacacttcccttcttattatcctctaacacc

SEQ ID NO: 171343 - DNA, 382 bp, Homo Sapiens
gtaattggatttcgctgctcaaaagtcttttctgcttaattccaagtaaagagttgctgttccaaatggctgaagttggtcaacccagacttaacagtaagtgaaaagtctatactttaaattgctatcttgttcatatggaccattttctatgtaactttcactttttaaaaactgcttctgaaggaaaaaaagaggaaatgtttgaaatactttaaaatactggatcggcatgggatttaatgagaatgcaaaaatgcacagagagccaatggcagtaaatgccatctactttttgttactctttagtagccacctcatatttagtaactgaaaaactgactataaatatttgaaggactctaaagaatgtttcgattaa

SEQ ID NO: 171344 - DNA, 494 bp, Homo Sapiens
cttgataggattatggcgaaaggcaggccagggtgataagatatcaaggaattccaagggtggagaattttttctaacctgacttaggaggattgttgctcaaatgggattctataaggacacagggggaagttcaaggtcaatcagaggactcagaggagcctgactaaagttttggtcaagggaaagtctttgtcactggtaatgtagtaggtacccaataaataattgttgattcaacaaatcaacattcttccccagatccgccagactaattacttctcacaacaactttgtgtggcagcacctatctatggcagtggttaaattctccctccctcggagctcattctgtattctatcaagtcattttctaacagaattctttccatcactcgtgtactttcttaagagtgaggaaattaaaacggggagagaaggttcaaggccctgagtcagtgcaaagacagagtagcgaaattcaattatcgggg

SEQ ID NO: 171345 - DNA, 244 bp, Homo Sapiens
  misc_feature (42)..(76): n is a, c, g, or t
  misc_feature (105)..(114): n is a, c, g, or t
gttggccatgttggtcttgaactcctgacctcaggcgatctnnnnnnnnnnnnnnnnnnnnnnnnnnnnnnnnnnngcgtgagccaccgtgcctggctgaggtcnnnnnnnnnnactctgagtgaggtgacaagctttgggaaggttttgagcagaagagtggcatagtctgatgaaatctggcttactttgacctctgtattgagaatgaatgacggctttggaggcagcgaaatccaattat

SEQ ID NO: 171346 - DNA, 273 bp, Homo Sapiens
ccgattagcatcagtcaggacacacagaggggaatgtggccacacggtggatgaccaccaagccctgagatgaacaggtatttactgagcagttgtattcagatatgggtcttcatgaatcatgtttaacaatcagatgaccgctataggcaagttcctgagcttccgggtgccttgagtaagagctgagaaccggcctgctgggtgtttactgtatctgtttggaagcactggcggagggtcgaaataagatgtcctgatgatgctaggcgg

SEQ ID NO: 171347 - DNA, 510 bp, Homo Sapiens
ctcgtccgtacatcatcaggacagcttccctcactgtgtacagaacgcaagaagggaataggtggtctgaacgtggtgtctcactctgaaaagcaggaatgtaagatgatgaaagagacaatgtaatactgttggtccaaaagcatttaaaatcaatagatctgggattatgtggccttaggtagctggttgtacatctttccctaaatcgatccatgttaccacatagtagttttagtttaggattcagtaacagtgaagtgtttactatgtgcaagggtattgaagttcttatgaccacagatcatcagtactgttgtctcatgtaatgctaaaactgaaatggtccgtgtttgcattgttaaaaatgatgtgtgaaatagaatgagtgctatggtgttgaaaactgcagtgtccgttatgagtgccaaaaatctgtcttgaaggcagctacactttgaagtggtctttgaatacttttaataaatttattttgataaataatattga

SEQ ID NO: 171348 - DNA, 419 bp, Homo Sapiens
ctctttccaggatttttatttctttaaaataattcatacaaatggttacagtcacaaacatgattttaaccaaaatattgctagcctaccacatcagcaggacggcactggtgcaggcggggacgctgccaccctccacgtccccaggacagacgtcgatgggcagcgggcacgctgggcaccgcccaagcttttccttttggagctgcttcgtgatgccgtcttcatttggaacaagggggggttcatgccaaaattaggaaaaacagcctttgttttgtttttctaaattattctaaaaataagacaagcaggtagaaaaaacaatgcactgtgtggcataaaaagaaaaacgggaaggattcattgtcctgaggaagtttgccaactgcctcattctggggcacgttccaacatac

SEQ ID NO: 171349 - DNA, 773 bp, Homo Sapiens
  misc_feature (487)..(578): n is a, c, g, or t
gtcatcaggacaaacggatgcagctggtgaaccaataaaagaaggagataatgactacttcacttgcataactaaagcttatgaaatgttatctgatccagtgaaaagacgagcatttaacagtgtagatcctacttttgataactcagttccttctaaaagtgaagcaaaggataatttcttcgaagtgtttaccccagtgtttgaaaggaattccagatggtcaaataaaaaaaatgttcctaaacttggtgatatgaattcatcatttgaagatgtagatatattttattctttctggtataattttgattcttggagagaattttcttatttagatgaagaagaaaaagaaaaagcagaatgtcgtgatgagaggagatggattgaaaagcagaacagagcaacaagagcacaaagaaaaaaagaagaaatgaacagaataagaacattagttgacaatgcatacagctgtgatccaaggatnnnnnnnnnnnnnnnnnnnnnnnnnnnnnnnnnnnnnnnnnnnnnnnnnnnnnnnnnnnnnnnnnnnnnnnnnnnnnnnnnnnnnnnnnnnnaacaaagacaagctgaattagaagctgctcggttagctaaggagaaagaagaggaggaagtcagacagcaagcattgctggcaaagaaggaaaaagatatccagaaaaaagccattaagaaggaaaggcaaaaacttcgaaactcatgcaagacctggaatcatttttctgataatgaggcagagagggtttctt

SEQ ID NO: 171350 - DNA, 182 bp, Homo Sapiens
gatcctccgcctacatatcaggacaccgacggcaagctgcccgaggtcaccaaggacgtggagcgcacggacggcgccctgttagtcaacgccatgttcttcaagccacactgggatgagaaattccaccacaagatggtggacaaccgtggcttcatggtgactcggtcctataccgtggg

SEQ ID NO: 171351 - DNA, 274 bp, Homo Sapiens
acagagaagagtttagtgactgaggccgaaaattcacagcaccaacagaaggaagagggtgaggaagccataaactcaggccaacaagaacctcagcaggaggaatcttgtcaaacagcagctgaaggagataattggtgtgaacagaagctgaaagcttctaatggagacactcctacacatgaagacttgaccaagaacaaggagcggacatcagaaagcagaggactttcacgactattctcctcgtttctcaaaaggcccaaatctcagg

SEQ ID NO: 171352 - DNA, 561 bp, Homo Sapiens
gggcccctagcagcatcctctgacggcattctccgctgtccactggaagctctgatctacctgagcgtactccgtgagtacaggcgctttggcaggagacgctcaagtcccagtgaaccatggtaatccccttttcaagagcgccactacgacgtcatgaactcccaagttagctgagagttcggagcacttgatgatgacaaggccgtcaggacccaccatgtctgccccatcacgcggcagagacatggcttcgcacagctctgagggatgtcaccatttaaccagagatccagttattttccgccctcaaaatgacaccgatgcacgaccgcgtgcttctggctgctcgtctcggtgacagctccactctgactggcacagtcttcgcatggagacttgaggagcgagagcttgaggatggtgagcctaggtgcgtgtttcctgtgcaagtcaggacatcagtctgattaaaggtggtgccaatttatctacatttaaacttgtcagggtataaaatgacatcccattaattatattgttaatcaatcacgtgtatag

SEQ ID NO: 171353 - DNA, 144 bp, Homo Sapiens
tgaaggtacaagagaactgagttcagatgagagataaagagtgagaaagaggtaagagaaatagatggaaaaccagaagattgtggtacacagaggcaaacaaaagggagacagtgaagaagcaccaagaaaagagctgtcccc

SEQ ID NO: 171354 - DNA, 240 bp, Homo Sapiens
gcaaggcagaacacactagctggcgagaaggcaacatctgttgaatgtcagtctgtaagttttagtcttgcattattatgattcataatacagaactaaaactcatgaaataagtggccttccatacaaaaaagtgttctaaactcaagttgaaaatttatgagctcaaaaattcccatttcacacatctgcaagaaccccaccacagccaaagcaccaggtgacataaactctaaaacc

SEQ ID NO: 171355 - DNA, 426 bp, Homo Sapiens
gctgtggaatctctagggtgtatgggtaggtagggggcacagttagttctaagtgggcttttatgctaaaagcctctggggatatctgttttgaaaataaagataggtgtcccctccttgctgtcatctagcccagacactctgcttgctctctggctgtctgctccctgggaaggctttaggaggaccacccaggacaggatgaccatgctgccatctgttctggagctgggtctcagtgcagagggacagtgactgtggatggttgcagtctctggtgggaggtgaggatagaagtgataaagagctaagaggagcttctgggagccttggaggaggtcagtcttgcagtggtgaagccaggacataggagatggagcagggctgtgagaggaggagattctgaggaggatgcaaggtccttct

SEQ ID NO: 171356 - DNA, 438 bp, Homo Sapiens
  misc_feature (212)..(212): n is a, c, g, or t
gattccgagctcggttaccccacccgccgtctttctgatggtcatcatcatcctcaggggagaggacataagggtcattcatctcgcgcagccctgattcccgcatccgcttcttcttccgccccccgggtggcttaggagccacactgccacctccaccaccacctccgcctccttcctcggttaggctcgatgctaccttcttggagagntcagggacaacctgcagggcttgtgagccaggaggaagagctgagacaatcatgggagccgaaatggggaaggtctgagctgatgatgctgtggtcacaagagagcctgagggggacgtgattaccagacccggaccccttgattgactcccttctcttctccacctctgagaacaggagactccagcagtcatcagtcctgtagacgccagtttcccgagggatt

SEQ ID NO: 171357 - DNA, 142 bp, Homo Sapiens
acagtgagtgaggacggacctcaggctgtctcttcgggtcacacccgctgtgagaagaaggcaggtacagcaccagggcagacacttgcccccaggggtgactcccccagatcccagcctctagccccgcatcatagcacag

SEQ ID NO: 171358 - DNA, 276 bp, Homo Sapiens
gcagacacgtgtgctgtgctgctctccccttttctctggcagacattgtacccatcctgacgtcaactgtgattgagtgtcacagggcaggcctgaagaactctgctttcagcttcgcagctatgttgatgaggcctgaataccgcagcaaaatagatgccaaatacaaaaagaagatcgagggaatggtcaggagacccgatatatctgagatagaagaggccacgactccatgtccattctgcaaatttcttctcccagagtgtgaactctctc

SEQ ID NO: 171359 - DNA, 601 bp, Homo Sapiens
aaccgtaaccagaaaggggttgcgaatgacatctagctgtcaggtctttaaagtattgtatttcttagagtgtcctttaaaggtacttttgcattggtaaccttttgagattagtttttatcatagcaacgtgtggaaattctgaagctgacatgaagttggtttgatccgtgtgtgaacattgtgcctttccagtgttaagtgagtcagacagagcatcgctgcccgtgatagcccactgtttttgataaactcaaccatgagtataaaaagtacctggatgccgagcagagttatgcgatggtgagttacatggagtatgacaaagggtcctcctcccccaacccctcccgggtattttctaagtaattatgatgcaaaattgtttcctatatattagaataaggtcgctgagatttgccgcctgccatagggcaaggtggcagtagtgggggatagtggaggagtagtaaattcagggtccctgcatcccacgagctggcggctgcatctcacttcataccttcactgtttttgtttttcccatctgtgtttgatcttgcctgtagatccttggtctactgttatagatgagaaaaat

SEQ ID NO: 171360 - DNA, 602 bp, Homo Sapiens
tctccgacgtagcatatcaggacaagcagtttactcatagtctcccgaccatcaaatggcagagatgggattcaaatgtaagcttgaaaaaaacattagcttcagttcactttcctctctaccacaatatctcccatgagatacagacactggaaattcgttgaaatcccagcttaatatcacacaggagttgatcttcatgattaacttaatttctactcataggtatgtttctcaccttaaagtataattatgagactcctcagtgaagtattgggtctttactgattggtggctgcactaaagtctagtgaagataaagcatttaagcactgcatgtataagagttgcaaagaaggctggtagctgcccagcatcattggccttgtatcttgtatcattattcaactgtatgcactgttggtgcctaaccatttattgatggttgatgtgtctttccagtgaagaagacatggattttagagctagagatgccttaattctaatccactttgcttcttgctaccaagttatttaaactcctgagttatggagataataataactacctccaaaaaaattctttttgggtttaaatgaaa

SEQ ID NO: 171361 - DNA, 897 bp, Homo Sapiens
gggggctcgcgcttcgttgtcagatctgaggcgaggctaggtgagccgtgggaagaaaagagggagcagctagggcgcgggtctccctcctcccggagtttggaacggctgaagttcaccttccagcccctagcgccgttcgcgccgctaggcctggcttctgaggcggttgcggtgctcggtcgccgcctaggcggggcagggtgcgagcaggggcttcgggccacgcttctcttggcgacaggattttgctgtgaagtccgtccgggaaacggaggaaaaaaagagttgcgggaggctgtcggctaataacggttcttgatacatatttgccagacttcaagatttcagaaaaggggtgaaagagaagattgcaactttgagtcagacctgtaggcctgatagactgattaaaccacagaaggtgacctgctgagaaaagtggtacaaatactgggaaaaacctgctcttctgcgttaagtgggagacaatgtcacaagttaaaagctcttattcctatgatgccccctcggatttcatcaatttttcatccttggatgatgaaggagatactcaaaacatagattcatggtttgaggagaaggccaatttggagaataagttactgggggaagaatggaacgggagggctttttcaggacaaaactcctttgagaaaagctaatcttcagcaagctattgtcacaccctttgaaaccagttgacaacacttactacaaagaggcagaaaaagaacatcttgtggaacaatccattcagtcaaatgcttatccttccctggaagttgaggcaaccatatcaagaaaaactccagcccagcctcagagaagatctcttaggcttcctgctcagaaggatatggaacagaaagaaaa

SEQ ID NO: 171362 - DNA, 757 bp, Homo Sapiens
tgccctttgagccatgagcagcatctggcacactccaatcactgcgctgagctgtggataccccactccagtttttcttccgagttagtacacacagagcctggccccaattcccactttgatgatgtcagcccccagaaaggatgagctcttctaccatctctcctgttaccacattccctgccatgatggtgtgctgggggaagcgcttccgtacatcttttacaattcaacaaagtgttcagagtagccatttgccacatccaggcatatatacttcacctggggaatagcttccaggatctgttccagctgctcaaagtcagaagagcctgtgcctgagctggcagccagatgctcaagacagtcaggattctggccagcaaactcttgccactgaacgaggctatagtgcttatggacagcagtgaagagagagaacttctcagcaacaagtatagaggcaggtaatagtactgacaggagcagcatcttccatttcaaagtgaacaacttgtatataagaaaaacacatcccatttggggcacatcccagaaactcccaggaacctaggacttacagagaacattggccatctcaaaggtgcccacagtatccatattggcagcatgatgggaaccccagagtatgtctgctttgagttccgaaatgaaaaggatcttgtgagatccacctcacttcgagacttaagggtcctgcgtttgggcctcaaaaggacatccttgaagtccagtt

SEQ ID NO: 171363 - DNA, 320 bp, Homo Sapiens
  misc_feature (47)..(108): n is a, c, g, or t
tatatggccgcaaacaatcctcccaccgttagcttccgaatagtagnnnnnnnnnnnnnnnnnnnnnnnnnnnnnnnnnnnnnnnnnnnnnnnnnnnnnnnnnnnnnnactatgttgcccaggctaatctcaaactctcaggctaagtgatccacccatcttggcctccaaattgtcactttctaattcatattttctgtagaaggctgtaagtcccttgaggacatggtcagtgaaatcagtgattaatatttgtagccctctggggtgtagtgccttaccctagcactgtctgtttgcgccatataaacagggatcgc

SEQ ID NO: 171364 - DNA, 613 bp, Homo Sapiens
cttatatggccgcaacacaaaaatagagtatatcaaaacaataccacaaagtagttgctaaataaattcctattgaaagactaagcagttcagtgttaccttaagacaagccattttaatcaggcagacaaagatatacaacacaatttataaattttagaatggtctcatctacaaaagcgtatgtatatgtgtgttatctcttaaagaggtaacaggaaaagaggtcaaagacaagcaaccttcattattttgatgagacagaactgtttggactttacctggtctgctgttgagtatcaaaagaggttattactctctttatgttttgctaccttaaatatatggtattcatgataaatttacctctgttaaataacattcttaaaatttatgacatattatagtttaatatgtgtagattttaagacaggttttctgagcagaattacaaaatagagacataatctcatatcggaggaaaattgtgggcaactactgggaaggaggaagtcttagatttattcagtaaaatagtttgctaaacttctttctggtgggggaaagattcttcatagctatcttatgctgcaggtaacttctctccattagc

SEQ ID NO: 171365 - DNA, 140 bp, Homo Sapiens
tttttatattggcgcaaacaaacaaaagttggtgatcattcccaaaacaggaagaagcatgagtacagctaaggaacaagagtggattaatatttattaagcacctactgtgtacaaggtactctgctatctctaaaggc

SEQ ID NO: 171366 - DNA, 629 bp, Homo Sapiens
  misc_feature (101)..(101): n is a, c, g, or t
  misc_feature (151)..(151): n is a, c, g, or t
  misc_feature (326)..(559): n is a, c, g, or t
agcggatcccttgcttatattggcgcaacaggataaataaaatgaaaaccacatgaaattacaccattgtaaaactgctgataacccaaagatggaaaaangtataaagaaccccaaaagaaatattactttgaagaggagcgacaattanagctaaatagctggcattttttcttttcttttcttaaatgcttgatagaatacaacagtgaaactatccagacctggagttttctctgttgaaaggttttaaccacgaattccatttcttttacggatataggacattgtgaagcttttcttgagcaagctatggtagtttgatnnnnnnnnnnnnnnnnnnnnnnnnnnnnnnnnnnnnnnnnnnnnnnnnnnnnnnnnnnnnnnnnnnnnnnnnnnnnnnnnnnnnnnnnnnnnnnnnnnnnnnnnnnnnnnnnnnnnnnnnnnnnnnnnnnnnnnnnnnnnnnnnnnnnnnnnnnnnnnnnnnnnnnnnnnnnnnnnnnnnnnnnnnnnnnnnnnnnnnnnnnnnnnnnnnnnnnnnnnnnnnnnnnnnnnnnnnaagcctcatttccttattggccattgacaggaggcctcagtttctcactgatagaaaggctcaaggtatt

SEQ ID NO: 171367 - DNA, 579 bp, Homo Sapiens
ccagagaatctggagtgggcattagctgagttcagggtaaaataggcatggaaagatgtgggcagagcccagatttgggaagccaaggatccactcttaggagcttggacactgccccgtaggccactggaagactccgagcagggaagtggtgctgtcatatttggtttctgatacttagggtctggttttctgggctagggagaagacccactgccttctactgctaggactagtgctcagtggcagaaaggcagaacagtgaagtgctcatatgctgacatcaggctgcctggacttgaatctcagctctgccacttgctgaccgtgtggcctcggggagaagacttgtcctctctgagccctggtttctagaactgtaaaatggtgacaatagtctctgccactcaaaattgaatggtaccaggattgagagagaaaatctgtaaatcactgcgttgtacattcaaggcaggaagaggcaggcagggcaagggtacctatccatgtattagggaagcacaagcttattcagaatgcctgtgcacgcacctctgttgtacctgttgcgccatataa

SEQ ID NO: 171368 - DNA, 367 bp, Homo Sapiens
ctcacatcaaataccctaatcctctgtattaagtacaacttcaggccaaggtattaatgtgtcctggaccttaaagaaagtatttgcagtcacaaatagcttcattttaagcaggtttgttttcatgaaaacttttatacctgaaatggaagctagtaactagactttggagaagaagggatttcaccaactcactgggaagtccctgtggtttctaagttccatttctatttcatttcatgaaggtattaatacagttggtcctgtcatttcaaaccagcagagtcagtttttttcaccattgaccttgcaattgaagaagtcaagtctgcaatttccgtacagttgtacaatattggattgcccc

SEQ ID NO: 171369 - DNA, 531 bp, Homo Sapiens
cagcctgggcaacatagtaagtaagaccttgtctcttaaaaaaaatacattctgaagaaagttctacttatgaatacattttatttataacaaactggtgaaaattttagaccaaaccatgtctttctgggttgtagtgattaaaaaatggttaagagaatgttccctatacaaggcatatgttattaaacatgaaatttaggattagttttctctttgaaaattcttttgatatgctgaggttacagtttggaggttacattagagaaagaatatagggaagatggcagtggtaaaacatttccctgctttacatttttatattggcagtatcttggtttcaacttttctattttcagcaagatatttgcaagtttttactttgaagatgtttggtttatagtagtccatgctatactaatgccgttgctgagataattaaattagatactaatatgaaaaagaatatttgtgtaaaatattttgaagttgtaattagtgtatatacaagttgttataattacgaagaaa

SEQ ID NO: 171370 - DNA, 520 bp, Homo Sapiens
  misc_feature (501)..(501): n is a, c, g, or t
atggccattgtcttccaaactttgggaatcaaaatctcggtgcaaatactgaattcataaattgaaacagactcttgggttctattatgaaggcaaataatacttctatgtattttgtagggttatacagtataatacctcgaatccatggttggatctgactgaacctacatagatactaatctgaataactcatatatagaaaatgtgcaatattctaagtacaaaaaattaaactggactagtttgcttttgttttatagtataaatgaaaataatctcgatggcaaactattcaattatctgagcagaaattatgaatgaaagatgtattccagacctatatgattgagggacatttcaacttgaattccccagcggcaaaagtggtgtataaactaatgctagtgtatacactactaaagtgccaagttacgtaacatctcctaattttaaaaatgaaagatttttctttttttcactgtgaagggcagtaacacnaacttccccgtgggaagac

SEQ ID NO: 171371 - DNA, 1267 bp, Homo Sapiens
  misc_feature (595)..(656): n is a, c, g, or t
  misc_feature (1181)..(1181): n is a, c, g, or t
  misc_feature (1222)..(1222): n is a, c, g, or t
taaggctaggagtatgggaccaatctgggcaagatagcaagaccttgcctctacgagaaatttaaaaatttagccaggttatgtgccacactgccttgcctgggcactgatacctgaacgctgagtttgggcccgaggagatgaaccctttaactaaggtgaagctgatcaacgagctgaatgaacgagaggtccagcttggggtggccgataaggtgtcctggcactccgagtacaaggacagcgcctggatcttcctgggagggcttccttatgaactgactgaaggggacatcatctgtgtgttctcacaatatggggagattgttaacattaatctcatgcgggacaagaaaactgggaaatccaaaggattctgtttcctctgctatgaagaccagaggagcacaattctggccgtcgacaattttaatgggatcaagatcaaaggaagaactatccgagtggatcatgtgtctaactatcgggctcctaaggactcagaagaaatagatgatgtgaccagacaactccaggagaagggctgtggggctcgtaccccctcaccaagtttgtctgagagctctgaagatgnnnnnnnnnnnnnnnnnnnnnnnnnnnnnnnnnnnnnnnnnnnnnnnnnnnnnnnnnnnnnngagaaagccgaccgggaggtacaggcagagcaaccatcctcttcgtcacccagacgcaagacagtaaaggaaaaggatgacactggccctaagaagcacagcagcaagaactcagagagagctcagaagtcagagcccagggaggggcagaaactccccaaatccaggacggcctactctggtggagcagaggacctagagagggagctgaagaaggagaaacccaagcacgagcacaagtcctcaagcaggagggaggcaagagaagaaaagaccaggattagggacagagggcggagctcagatgcacattctagctggtataatgggcgttctgaagggcgtagttatagaagtagaagtaggagccgagataaatcccataggcataaaagggcccgacgctcccgggagcgggagtcttcgaatcccagtgaccgttggcgtcactgaagacttcagctgcacagtagatttggaaataattatgtttttttaatgcagtcaaattcagttggggtgggntactattttttgtatctaaaactttctgggggctgggattncttttaatccccttggactattttagaggtcatttggggaagggg

SEQ ID NO: 171372 - DNA, 1228 bp, Homo Sapiens
  misc_feature (461)..(628): n is a, c, g, or t
  misc_feature (638)..(650): n is a, c, g, or t
  misc_feature (760)..(818): n is a, c, g, or t
  misc_feature (920)..(935): n is a, c, g, or t
  misc_feature (1032)..(1108): n is a, c, g, or t
cagcccctcaaatacctcataaaattgtaatcaaagatatctcactctgtcatgttaatctaagaataaaaacactgactttaatacggttttactaagtttcaaccttctaattaggtaggcctctaggtattctgcagatcactgctggtcttgatagccattaatatatgtttgtattatgttatttttcaactaaatcgcagttggaaaaaaacatatttaatattatgcccttggatctgttactgcatcactagcacttgtgatgcaatagaacacttcgcctgtactgaaagggccaagagtaaatgccttgtttggtttttttagtatggtaaggtttggctttttgtaaaacatgtctatagagttggcagttaatgctgaatttgtcaaataccccttccaaaattatacttgtatttaaaaaataaatggatctacctaatttctattgnnnnnnnnnnnnnnnnnnnnnnnnnnnnnnnnnnnnnnnnnnnnnnnnnnnnnnnnnnnnnnnnnnnnnnnnnnnnnnnnnnnnnnnnnnnnnnnnnnnnnnnnnnnnnnnnnnnnnnnnnnnnnnnnnnnnnnnnnnnnnnnnnnnnnnnnnnnnnnnnnnnnnnnncggggggggnnnnnnnnnnnnnaacaaaaaaaccgcccgaaaacaccaaccgctcgggggcgaccccccccgggaagaaaaaaagccacggagcccgacacctatccaccaaaaaaccccaggggaacaccnnnnnnnnnnnnnnnnnnnnnnnnnnnnnnnnnnnnnnnnnnnnnnnnnnnnnnnnnnntttctttagaaaacattcccccagacctgggagggtgttgccccacacgggggaaccctaacccgagacccgccccggggggatctttaaaaaccattaagnnnnnnnnnnnnnnnntttatttgcccctatgggctgatgaattgtccccccaaaaaacactcccccgcggggtggaacagacttttacacaaccggggcggcgaaatactcnnnnnnnnnnnnnnnnnnnnnnnnnnnnnnnnnnnnnnnnnnnnnnnnnnnnnnnnnnnnnnnnnnnnnnnnnnnnnagtggtgggaaaaacaaagcctactcttttgtgcccgcgacaaaataatttttttgggccgggtggcacccctcccccccacaattgtgtgtttaagtaacaccaataattttttcttct

SEQ ID NO: 171373 - DNA, 182 bp, Homo Sapiens
aattgtcttcctcatttactctgagcaaaggtggcagcagcaatagcagaagacgtagatgcagtgactcattttgcatgatgtctgcaagagagccgggcctcccgtgtgctgtggctctcgttcaggcattgcttcagaaacttgattcttctggaattgtgcataagagggccttttag

SEQ ID NO: 171374 - DNA, 1196 bp, Homo Sapiens
gatcaacaacttcgaggtgaagggaaaataattgatagaagaccagaaaggcgaccacctcgtgaacgaagattcgaaaagccacttgaagaaaagggtgaaggaggcgaattttcagttgatagaccgattattgaccgacctattcgaggtcgtggtggtcttggaagaggtcgagggggccgtggacgtggaatgggccgaggagatggatttgattctcgtggcaaacgtgaatttgataggcatagtggaagtgatagatctggcctgaagcacgaggacaaacgtggaggtagcggatctcacaactggggaactgtcaaagacgaattaactgacttggatcaatcaaatgtgactgaggaaacacctgaaggtgaagaacatcatccagtggcagacactgaaaataaggagaatgaagttgaagaggtaaaagaggagggtccaaaagagatgactttggatgagtggaaggctattcaaaataaggaccgggcaaaagtagaatttaatatccgaaaaccaaatgaaggtgctgatgggcagtggaagaagggatttgttcttcataaatcaaagagtgaagaggctcatgctgaagattcggttatggaccatcatttccggaagccagcaaatgatataacgtctcagctggagatcaattttggagaccttggccgcccaggacgtggcggcaggggaggacgaggtggacgtgggcgtggtgggcgcccaaaccgtggcagcaggaccgacaagtcaagtgcttctgctcctgatgtggatgacccagaggcattcccagctctggcttaactggatgccataagacaaccctggttcctttgtgaacccttctgttcaaagcttttgcatgcttaaggattccaaacgactaagaaattacacaaagaaaaagactgtcattcataccattcacacctaaagactgaatttcatctgtttaacaaatgaacttctcccggtacacagaagtaacaaatatggtagtccagttggtatttagaaatgtactggtagcagggatgttttcataattttcagagattatgcattcttcatgaatactttcgtattgctgcttgcaaatatgcatttccaaacttgaaactatagggtgttgaacagtgttggtaccaaaaatgacacaacaaaaacaggggggc

SEQ ID NO: 171375 - DNA, 984 bp, Homo Sapiens
ggggggaagagctgaagcaggcgctcttggctcggcgcggcccgctgcaatccgtggaggaacgcgccgccgagccaccatcatgcctgggcacttacaggaaggcttcggctgcgtggtcaccaaccgattcgaccagttatttgacgacgaatcggaccccttcgaggtgctgaaggcagcagagaacaagaaaaaagaagccggcgggggcggcgttgggggccctggggccaagagcgcagctcaggccgcggcccagaccaactccaacgcggcaggcaaacagctgcgcaaggagtcccagaaagaccgcaagaacccgctgccccccagcgttggcgtggttgacaagaaagaggagacgcagccgcccgtggcgcttaagaaagaaggaataagacgagttggaagaagacctgatcaacaacttcagggtgaagggaaaataattgatagaagaccagaaaggcgaccacctcgtgaacgaagattcgaaaagccacttgaagaaaagggtgaaggaggcgaattttcagttgatagaccgattattgaccgacctattcgaggtcgtggtggtcttggaagaggtcgagggggccgtggacgtggaatgggccgaggagatggatttgattctcgtggcaaacgtgaatttgataggcatagtggaagtgatagatcttctttttcacattacagtggcctgaagcacgaggacaaacgtggaggtagcggatctcacaactggggaactggtcaaagacgaattaactgactgggatcaatcacctgtgactgaggaaacacctgaaggggaagaacatcatccagcggccagaccctgaaaataaggagaatgaacttgaaagaggcaaaagaggaagggtcccaaaagagatggactttgcgatggagtggaaagcgctaattccacattcacgcgactggcgccacaagtaaaaaatttaattatccccc

SEQ ID NO: 171376 - DNA, 980 bp, Homo Sapiens
  misc_feature (823)..(823): n is a, c, g, or t
  misc_feature (836)..(836): n is a, c, g, or t
  misc_feature (855)..(855): n is a, c, g, or t
  misc_feature (952)..(952): n is a, c, g, or t
ggggacggcccccctctctcggcccggccatcttgtgggaagagctgaagcaggcgctcttggctcggcgcggcccgctgcaatccgtggaggaacgcgccgccgagccaccatcatgcctgggcacttacaggaaggcttcggctgcgtggtcaccaaccgattcgaccagttatttgacgacgaatcggaccccttcgaggtgctgaaggcagcagagaacaagaaaaaagaagccggcgggggcggcgttgggggccctggggccaagagcgcagctcaggccgcggcccagaccaactccaacgcggcaggcaaacagctgcgcaaggagtcccagaaagaccgcaagaacccgctgccccccagcgttggcgtggttgacaagaaagaggagacgcagccgcccgtggcgcttaagaaagaaggaataagacgagttgggaagaagacctgatcaacaacttcagggtgaagggaaaataattgatagaagaccagaaaggcgacccacctcgtgaacgaagattcgaaaagccacttgaagaaaagggtgaaggaggcgaattttcagttgatagaccgattattgaccgacctattcgaggtcgtggtggtcttggaagaggtcgagggggccgtggacgtggaatgggccgaggagatggatttgattctcgtggcaaacgtgaatttgataggcatagtgggaagtgatagatctggcctgaagcacgaggacaaacgtggaggtagcggatctcacaactggggaactgtcaaagacgaattaactgactttggatcaatcaatgtgactgangaaacacctgaangtgaagaacatcatccagntggcagacactggaaataaggagaatgaagttgaaagagtaaaaagaggagggtcccaaaagagatgacttttggatggagtggaagggctatttcnaaataaggaaccgggcaaaaagtagaaa

SEQ ID NO: 171377 - DNA, 827 bp, Homo Sapiens
  misc_feature (225)..(235): n is a, c, g, or t
  misc_feature (612)..(612): n is a, c, g, or t
  misc_feature (663)..(667): n is a, c, g, or t
  misc_feature (669)..(669): n is a, c, g, or t
  misc_feature (671)..(680): n is a, c, g, or t
  misc_feature (683)..(687): n is a, c, g, or t
gggggaaggcccggcaggggaggacgaggtggacgtgggcgtggtgggcgcccaaaccgtggcagcaggaccgacaagtcaagtgcttctgctcctgatgtggatgacccagaggcattcccagctctggcttaactggatgccataagacaaccctggttcctttgtgaacccttctgttcaaagcttttgcatgcttaaggattccaaacgactaagaaattnnnnnnnnnnngactgtcattcataccattcacacctaaagactgaattttatctgttttaaaaatgaacttctcccgctacacagaagtaacaaatatggtagtcagttttgtatttagaaatgtattggtagcagggatgttttcataattttcagagattatgcattcttcatgaatacttttgtattgctgcttgcaaatatgcatttccaaacttgaaatataggtgtgaacagtgtgtaccagtttaaagctttcacttcatttgtgttttttaattaaggatttagaagttcccccaattacaaactggttttaaatattggacatactggttttaatacctgctttgcatattcacacatggtcaactgggacatgttanactttgatttgtcaaattttatgctgtgtggaatactaactatatgtatgnnnnnanannnnnnnnnnaannnnncctggtcggtcgcctcggcccctggcataggttaacttacccaaccctttgccttgggggcccccgcccccaaaaggaaattggacaaggggccaacccggggtccccagggaacacccggacatccctcgattgctttc

SEQ ID NO: 171378 - DNA, 677 bp, Homo Sapiens
aaataatagatcattcagtggacaagtccttgttaactacacagctatgatggaatgatatatccaagttccttgcctcagtgaaatatgcatatgtatatcatgaaagtgggatgccaagtaagcttaaaatggcattctctagcaaagagattagacttttaaataactcttataaaacaggttggcgatcatttcccaagattggtttcccttgagtttttgctaaaacaaatcttagtagttttgcccgtttaaaacaactcacaatcgtaaatgctactattcctaagatatcttacctttttatttcagtttagccatgtattgtatgagtgtattagtctaagcagtgagaatcttttctatgcctctattccagcaaaaagtagaagtatcaaataaaaagggcaacttttaaaatattaagcctgaagacttctaaaaagacaagaaacatggcctaaataaccaacatagatttacatagtaagtttcacactaccttattaccaaaagcaaacacctcttactttaaactacattatcatgtatatctattgtatgctggtctttactttttgccaaaatcaacatataatgaagagatgcctttgtttcatgagattcaaacttgatgctatgctttaaaataaactcagtacttttagaaacat

SEQ ID NO: 171379 - DNA, 708 bp, Homo Sapiens
tagttgttcagtccgtaagctattcccgggtgaataagccttgatgaaatcgaaatgaaagtctatttaatatcacctatgaagtatctgtgaatatatgtaatacgtttaataattttattggtcatgtaaatcattgtaaacttttttacattgcttaatgttttaagcttaatagcctttgcacttttaaaataaaaaccaagtatgcaaatcaaagatatttggtagtcaaaataagtaaaagaaatataggaatattccagtcaatctctgaaatgtttatgaaaaacaggttaatatgttgtatttttttccttgtaacaagatgcaaaacataatttgcaaaattttataattgaaataaaacttggtatgctgttttataataaattagcaatatactttaaaaaaaatccagtttctcctataacatgatgtaaattaaatattcaggaatatttcaggtctgaaatctgctgctgaacttgttagacatttttgaaaggaaaattaggttagcgtacaatttatcataaatatatgaggtaaaatttgcaaaactttccacagtactttcttgaattataatactgaatgttttctgttccgatagagaaaagtgaagcaaatatgtgaggaatgaagtgatctagtgcaagttggtaataccagctgatggaagacgatgcatcggagatcctcgga

SEQ ID NO: 171380 - DNA, 430 bp, Homo Sapiens
cggggacccaattactgtcattgatgagatccgggacttgctatacattggcaaggatcgcaaaaacccaagggaggattatctggatgtctatgtgtttggggtcgggcctttggtgaaccaagtgaacatcaatgctttggcttccaagaaagacaatgagcaacatgtgttcaaagtcaaggatatggaaaacctggaagatgttttctaccaaatgatcgatgaaagccagtctctgagtctctgtggcatggtttgggaacacaggaagggtaccgattaccacaagcaaccatggcaggccaagatctcagtcattcgcccttcaaagggacacgagagctgtatgggggctgtggtgtctgagtactttgtgctgacagcagcacatgtttcactgtcgactcaggatgtaccagtcagcata

SEQ ID NO: 171381 - DNA, 875 bp, Homo Sapiens
aaacgagaattcactgtttatttgtgcaaagaaaaaaagatatgctgctactgcaatttagccactgctctgtttggtggccagcctcttatctctctcttcagcaacagtaagtcgaatgccctttcccctgggcagggaaatccaaggtttattgccattgccaatgacaaaaatgttggaaagcctcgtggcaaagctgttgccattggcatccttcacatgcaccacatcaaaagaaccaggatgtctttccctgttggtgatcacaccaacacgaccgaggttggctccaccaatcaccatacacaaattgcctgtatcaaatttgataaagttgattatcttgccagtccctaaatcaatctgcacagtatcgttcaccttgatgacaggatctgggtagcggatggttcgagcatcatgagtcaccaggtgagggattcccttcactcccacagtaatcttcctcactttgcacaacttgtactttgcctcttccactgtgatgcggtgaacagcaaaacggcccttggtgtcatagaccaggcggaaatgttcacctgtcttctcgatgctgatgacatccatgaatccagcagggtatgtgacatccactcgaaccttgccatcaattttgatgaaacgttgcatacatatcttctttacctcatctccagtcaacgcatacttgagtctattcctgaggaagacgatcagaggaagacattccctcagcttgtggggacctgtcgatggacgaggtgcaaatacacccgttagtttgtcaagcatccaatgcttcggcgctgcaacacgctttaagtgcttcttggggccccgggccatggcgaaactctgcgacggaagacccc

SEQ ID NO: 171382 - DNA, 667 bp, Homo Sapiens
  misc_feature (54)..(74): n is a, c, g, or t
tccccggattgcattgtcttccagcctgtgtgacagagtgagacctccgtctcnnnnnnnnnnnnnnnnnnnnntaattagggccaaatggagattaaaatattagcttcatccagggatctctgaaaatagattaaaaaatgcagcaggagctcttcgaccttaccatgaatgaatgataaggtccttattacctgaacgaagacaacttgggtcctcatgacacaatcaaactctctacccacccacacagaggctgggcaacgtagacagagagaagaaatgggactggactctgaatacaccaccatccagtgggtgtcagcctctcaggctcttactcctctactagaaaaagatctggaaaaggtagagaggtggatggaagcttccttcccagcacttctcccaaagagtaaaagtacaatctcctgttttgttgaagaggaaacaaaaaaagacaagagtttccttcccctctatatctttcaactctgaagtttaatgtgaagcacaaattaccagtttctccattttctggagtatctcgtccagttttactagaactcctactggtagattctggactggtagctcgaacaaacatcttccattatcctcttttagacataaagctacgcattccatcttgagatgctggtggcta

SEQ ID NO: 171383 - DNA, 710 bp, Homo Sapiens
  misc_feature (672)..(672): n is a, c, g, or t
  misc_feature (682)..(682): n is a, c, g, or t
agaactcgcagagctgggctggtaaaattgcagtgctgaagacactggacccgcaaaaggctgtccctcccaaacctgggattctgggctcactgagttcacctgcgagtcagccctacctgcactgctctggtctagtacaaacaggctgctggcattgaggtctgctacaatgctgctgctgcacagagctgtggtcctcaggctccaacaggcctgcagactcaagtcaatcccctcaaggatctgcattcaggcctgctccacaaatgattcatttcagccccagcgccccagcctcaccttctctggtgataactccagcacccagggatggagagtcatggggaccctattaggtctcggtgcagtgttggcctatcaggaccatcggtgtagggctgctcaggagtcaacacacatatacactaaggaggaagtgagttcccacaccagccctgagactgggatctgggtgactctgggctctgaggtctttgatgtcacagaatttgtggacctacatccaggggggccttcaaagctgatgctagcagctgggggtcccctagagcccttctgggccctctatgctgttcacaaccagtcccatgtgcctgagttactgggctcagtacaagattggggagcttgaatcctgaaacaaggtancccccaccgnggagacctttgacccttatgctgatgaa

SEQ ID NO: 171384 - DNA, 1232 bp, Homo Sapiens
  misc_feature (1032)..(1032): n is a, c, g, or t
  misc_feature (1132)..(1132): n is a, c, g, or t
  misc_feature (1148)..(1148): n is a, c, g, or t
  misc_feature (1178)..(1178): n is a, c, g, or t
gtcccattattattgacagattgcaactaagagatgtcctcattgttctcttggtgtgttcacagagtcattaccagctccagctgtgccctggtgcagactgccccatggttattcgggtacaggagcctagagctcgccgagtacagtgcaatcggtgcaacgaggtcttctgtttcaagtgtcgtcagatgtatcacgcacccacagactgtgccacaatccggaaatggctcacgaagtgtgcagacgactctgaaacagccaactacattagtgctcacactaaagactgtcccaagtgcaacatctgcattgagaagaatggaggctgcaatcacatgcaatgctccaaatgtaaacacgacttatgctggatgtgtctaggagattggaagactcatggcagtgaatactatgagtgcagtcgttacaaggagaatcctgacatcgtgaaccagagccaacaagcccaggcgagggaagccctcaagaagtacttattctactttgagaggtgggaaaaccacaataaaagcttgcagctagaggcacagacataccagcggattcacgagaagattcaggagagggtcatgaacaatctggggacatggatcgactggcagtacctacagaatgctgccaagctcttggccaagtgtcgatacaccctgcaatacacctacccatatgcatattacatggagtccggacccaggaagaagctgtttgaataccagcaggctcagctggaggctgagatcgaaaacctctcatggaaagtggagcgtgcagacagctatgacagaggggacttggagaaccagatgcatatagcggagcagcggaggagaaccctgctgaaagatttccatgacacctaagttgggatgtggatgtgccggggtgaggaagatgtggctgcaaggtctcccggctgccatactgcatgctgcaggctctgcctttcatgaccccaggcaacagccagggccccactcctgagagacactggcaacacctcttagntgatttctggtttcttctcttttcactttttggttctaccaggggtagaggccatgttgaactggcctcttttcaggacttttatttccccctggatggntgttgggagggaaggnaaagtgtttttctgaatggctattaatagnattagatcctttacacttatggtaactttcaaaggggtgtgacaatttataccc

SEQ ID NO: 171385 - DNA, 530 bp, Homo Sapiens
aggacccaatgtgaacagttttccccaaaataagtccaaaggtaaacacataacattaataagatagatggatgatgtcccacaaaataattttgataaacttggattttggaaatattcttaatgcccattctgtctagctgtaaagttaggctgtgctatccaaaagagctttactttagagtcatgagaagcagcactgatctttacaaaacttaccccaaaaaatggggagagagaaaaacaggaagaaaagtctctttcttaggctaccagtcagttaacaaagtatcttagattaagatttggaaaccaaagaatgcataattaggagtgtaccatatcatgcaaagtctatgaaatactaaataaggtaaaacagttaatcatttaaagcacgatgagcaaattctcttatcatacggctattctcatcacccgacgaagggtggttttgcattattcctaaaataaaacaagtcgggagggaaatactgtcaaataaaaacttgcaaaacacaggcaatgat

SEQ ID NO: 171386 - DNA, 1380 bp, Homo Sapiens
  misc_feature (107)..(119): n is a, c, g, or t
  misc_feature (1268)..(1268): n is a, c, g, or t
  misc_feature (1295)..(1295): n is a, c, g, or t
  misc_feature (1357)..(1357): n is a, c, g, or t
attgcattgtctccctaactaactgggtaaaacaaagcaactgggtcattaaaaccagctcaaagggggtccaaaaaagaatatccagcccatccttggaggctgannnnnnnnnnnnnaaagtccgatttaaaaagctatcaaacagcgacatagccatacatctgactgcctgacatggactccgtgcccactggggggaaacctttatacccagaggaaaatacacaccgggggagtacattggacaaatttcccttaggattccgttatctcaccttgaccctcagccaagatgggtaaagctgcgtccgggcgattccaggagacccagctggaaaccgtggcttctccatgtgaggggatgggaaaggaaagaagagaatgaagactacttagtaattcccatcaggaaatgctgaccttttacataaaatcaaggagactgctgaaaatctctaagggacaggattttccagatcctaatgggaaatttagcaataaggagaggagtccaaggggacaaataaaggcagagagaagagacagaactaaaaatacgaggacaggagagtgaggcatttcattaaaagtctcagcagtgggttcctggggttatttaaaacatcacctaaataggccttttcttcctaattggccatcaaattaaagcctatcctttctcaagcaggagctggtattgtagggagtggccgggtattctgggctgggctcttctggagtagggggtcagcaaacattgtctgcaaagggccagatactgaatccagtactttcagtttggcgagccgtgaggtctctgtcgaaactactcaactctgccgtcctagcacaaaagcagccatagacaacacacaaacgagagggcttggctcccttccaggaagatttatttaacaggctcccagctgaatttcactcacaggacacagtttactgatctctgttctagtgagtgggtcaaaaagcatatgcatccttatccgtcaactcatcagctcttcctcaaggcaacctgaggccagacaccaagaaaccaagccgtatctgctctaaaatgacttggtcctggggaatgcctttcaaccaaaacacagctagtatttctatgccccaaatccaatcccagtctttcatgatccatgccggcggttgggtggggaggggaatcattggttgggggaagggaggaaaccccacctccagcccccgccaccgggcttccctggggcacccagcaagatctnggggctgcagaggaacagaaggagctnggtgcactttaattccagctctgccctttgggggggagggaggacctgtgttttcaaggttntgccattggggaacgagttttta

SEQ ID NO: 171387 - DNA, 417 bp, Homo Sapiens
ggattcgatgcatgtcttccacttaggggtctgctccagtggcgtaagggtgtcccctctcaccctagtttaagcaactacaggggtggggccaaaaaagtatcaccaaaaaaagagttggagcaaaactacccatggtccctcaccttctgatttctcaaactgctccagcagactggacaggtccgatgcctcaattcctgtggaggcacacaacacaggattgaaaacgagcccctatcaacttagtacacaggtcccaggaagcccccaaatcatctcacttctccctttccactccccctggcctctgtactaagtgaaccaaggtagcagcacaaagcatgaaggattcaaaccaacccagggctctgcctctgaagaaccctccacagccaggcacggtggcacacacct

SEQ ID NO: 171388 - DNA, 1171 bp, Homo Sapiens
  misc_feature (226)..(236): n is a, c, g, or t
acaaacataaaaatctgtcatacttacgatcttatgttaatgaaaaacgagagaaaaatagccatttatttgatttctttttggctcttttcctcctaagatccctaaatgcttcatagtaagtatgtcagtctttctcactacaactgtgttaggtaggttgataaaatttcataaaacagatgagaaaatatataatgttattcagggcttgttaagccactannnnnnnnnnnggtagttcccctaaaataatgtggtaatggattaaaaatgatataatttgtagaaaatgtgctccttttttctggtataagcttggatgggagtcatttatagttcctcaccaatcacaagaaattgtggggatcagtttgggtttagtcttgatgtgggatctgatgcaaccaaccagaggtatggtttatgtcatctggttttagactttctgccacagtaatggtttcctaatgtttttgttttgcaattctctaatcaaaagaaaacccaggaaggtgtatccatataaattgacataaattatccaattaggtgtcaggccgagtggctaaagatttcgcttcaagtgccagaaggataagaacgtacacttttgggtacagaccttcgttactgtaccattgtctcatgtcgctttttgccactaaggtcatctccggtgtctacttgtttttatcctgtgtataagctgattaaggctacaagcttttacaaggaagctgagcatcaagttctccatgtgtgatatttcggtggcctttgtctaatgtagagaaccacaggactaaataggtagaatggacaattgtcttgaaccatgagattgtctaagggaagatccttgcgacacactttggtaatcttaaaatactttccagtcagacttctcgtctattataggtgataaataaatgattcccttgttcaatcaggactcttgattttctgaaggaactttatgtctcaaattaattttaaagttacctggaagaaaatttttgtatttaggaatagatataatacatacagaacactctgctttaaacctttagtactaaattaaatttcttaaccaaaggaaagtaccgtgttgcagtttttcattctaaaacttcattgtcttaaagccacatgattatagtttggtagg

SEQ ID NO: 171389 - DNA, 377 bp, Homo Sapiens
  misc_feature (15)..(15): n is a, c, g, or t
tgatcacggagcttnatgcattgtcttccttcccgaagtagtatccccattatgcaatacaatttgggtcaatgctctgggccccatttccttgagtttagaaaactattataatttccttataaacatccaaatattcgtggcattcataaattgactactaccttatctcaaactgaattttctattatcactataatttattgtgtttataaaacatagagtggaaagagctaaacaaaaaggtttccttttcattcttgagatgggcgcttctcaactgggaaggatttaaataacacaaccggaaacctctcatttctaagtcgaattaatagctgaggatggctgaaaaagattatacatatccagaagat

SEQ ID NO: 171390 - DNA, 900 bp, Homo Sapiens
tcttccttgtagtatgataccattattaacatgaaccaaatactctctgaatgttggctaccttcttcatcctttaatcattttttgatggtaatggtccggttgcttcattcttggcttcctagttcaaattcttatgcttgaataaccaccagtcttgtatggacagtgttttactccaggctaagtcagaggccattagcaagacaataggctgcccatgactctggggcctgccccagttcagtcagctgggcccagagcatgaaggtcatgcggtgtataacatggcttgctttcaagatgcttgtttcagcaaaggctgtgaacaaggcttaaagggggctgttggcacagcaggcatcaaggagaaagatattctcttccgtatccccccagcctactccctggctttggcacagagcaggtgttgacagaccattgttgacagtgtccatggaggagacaaatggggaaatggcagaagtgttgaggcccagtgcacctgtgatggaagcagtgctcagcagggtaactacaggaagcagaaaacctggtatgagcattcaacactgagtgcctactggcttcactgtgtgctgggtcctatgcatggtgggaaatatataagatgtgactactgtccccgaggaagacatggcatgtataggtggaaaatttgtaagtgttctactttttaattactttaaaaataaatataggtactggtaactccccctgacacaggtattgactggtcagtggtcattttctcttgcccattgagcatgttccctagctgctcacttattttaaggctacctcttctagtccatcacactcaccctcaggagtcagaaaggaagagcagagtaagattgtagtgaagacaatgcatcg

SEQ ID NO: 171391 - DNA, 386 bp, Homo Sapiens
attgccattgtccttccagtgtaggcgacagaatgagactctgcctccaaaaacaaaaagggaattttccttcccattctatctcactagttctcgtatccccaccctgttattaaatatcattgaccccaaggtttcttcatagcccttatcacattttataatcccatatttaacttattgtttacgtgtctgcctcctcatctaggtagggaaccccagggccaaacctgtcctcagcactgctcggcacaaggccaggtacagaacaggcgcataataaatatttattgaatggatgacatcagaaataactctcatttgaaaccaaagatctaggtcttggaccagaaaagtctcagccctggccgggcacggtggctcat

SEQ ID NO: 171392 - DNA, 672 bp, Homo Sapiens
  misc_feature (434)..(443): n is a, c, g, or t
attcagaatttcctaataataatcatggaaaaatgcatctggaatagagaagacatatagccagagttgaagtcaaaagagagaggatattggcaaggaggggtgagttatagtatgtaattataacatacagtagtttatgtgtatgcaggtaactaatgttaatgtcctacatatgtatgtagatgtctgctattcttgtcctattttcctaatcacctttctatatgaatgactacataagtctgagaataccaaaagagacagacacagaaccaatcggattcctttcttcttgaagcttctgcacagcagaagaaactgtcaacagagtgaacagaccacctacagaacaggagaaaactgttgcaaccatgcatgtgaccaagatctaatgtcccacactgataaggaacttaaaccaatttacaagnnnnnnnnnntctcattagaaagtgggcaaaggacataaacagacacttcaaaagaagacacacatgcggccaacaagcatatgaaaaaaagcccaatatcgctgatcattagagaaatgcaaatcaaaaccacaatggcataccatctcacaccagtcagaatggttattattaaaaagtcaacgccgggcatggtggctcacgcctataatcccaggtactcggaagacatgcaatc

SEQ ID NO: 171393 - DNA, 925 bp, Homo Sapiens
cattacctcagcacccccaccacaccaatacaatacaatgcagactctctctcattatatcacccattcatactccatcctcattcacaatggtcacagaaggaaggaaaggttacagcaccagaagccgaaagcttggtgtcactcagcacatataggggctactgtgtctaggacaccaaaaaagagcaaagaagtaaaaagcaacacctccacttaggaagtgtggcagggaaaatgaaaaaaatgccgcaacatgtacggagaaatatagcaagaatcactcactgagcacaaatccttacccccactccagccgacaaggccctagtgaccaggcctgtacttgcctccaaagctctccatttctggcagccacagtggtctctttgggtttcctcacaccaaactcattctgtcttggagcctttgccctgcctgtactcactcccacctcaaatgcccttccccctgatcttcacaggacaggctcctccttgtaatccagatctcagtttagatgaaacctcttcagagacacctcagctgacctcccaatctgtagcacccgccccaggcaccttcccattgccctatttgaattctgtgtattgcaatatctcatatttttctcattatgttttattattgacattaatagagtcaaaccttactgtttacagattctgtatttgcaaattcacctaacttgcagaaatttacgtgtaaccccaaaatcaatatgcatggtgctttcctgctttctcaaacatgcacagagcagtgaaagttctaagttgcccaacacacattcccagctgacgctggacaaggtgacacgctgccttcttgtttcagcttcaatcatgtaaacaagtgtcatttggaagacaatgcaatcgaatccttggagtcacctgcagca

SEQ ID NO: 171394 - DNA, 733 bp, Homo Sapiens
cccattgtcttcctcggcgtgactataccttaggatgtatggagagatcactgcattgggaaaggcgattggaaaaggagatgggggctagaactttttaagggttttagatgctatttaataaatcatatgtagttactgacaaattatgaggaaggtggcgattttcaacttgtaatttaggatgaatattttggtagaaagtgcattagagaagatgcagtagcaccatttataggtccattgcaataacccacctgtccatttaagtatatattcattagatatctactgtgtgctaggcccaattttagactatagaggcacaggaatgagcaaaataggaaaacaaagtttcctgactcgtggggctcatgctcttgtggagaagacagagagtgaatagcataaataaatgaactatgtttattttagtgataactgataaagagaaggaataaaacagggaaagggggtatggaggtgagggagaagggttaatttctgtacattttgcaatatatattcaaggtaattaaggaaggcctcttggagaaagaacttgagggaagacctgaaggaaggaggctttaggcagggtctctaaacatctggggtaagcctgggtcaagcagaggagacagatagggcccaggctcttgacgctggtgagctgggatgtcacaagtgactaatgatgggcgtgtggcaaacaggaaagggagaaacaggt

SEQ ID NO: 171395 - DNA, 596 bp, Homo Sapiens
taagatttagacaaaataagctcattcactttcaagttataaaaaatgttagataataacatttcatttttgtaaaaatctacctcctatgtgctactttagctcaaatgttaaaattttaaatagcatttatgacaagattatcattcttagcaaagcaagaaaattaacttgggttaaaggctttagctttttcaagggttgtcagaatttcagcaggaactggattcttgtacaagatggtccaggaaaaacacagccactctaaatgacattcttttttcctcaccttttgtatgagagtcaagaaaggatatggccaaatcataacaactcttcagatccttcttaggccccatgttgtatataaagattttgagattcagtgaaaacagcagaggaataaatgtaggatgagagacagagtgaattgaattcattgttttctacaagaataaacataaggatgaaaatacagaccaaaggaccattatctgtcaattcaatgtggtttccatggatattctaacaaaccagtgacatatccaaacaaaagtatggagtgggtaaaacttccacaacagtgacctctcctt

SEQ ID NO: 171396 - DNA, 662 bp, Homo Sapiens
  misc_feature (552)..(618): n is a, c, g, or t
cacaaaggtaggaaagccagtgagtcccaaatgaatggtcatgaccctgagggtggagatggagaaaacattgaggagtggggtaacaggaagaaacttcctagaggaggccagacttcaccagagatgttatttggatttgggaagagtgaaggagcctttcaattgaggagaagggcttgagcagaggcacagaagtagaaaatcttatggtatgtttgtgggcttgagcaggtgtgtcttttgtgcagtctcagaaataaaaccctaaaggcaggctgggaccctgctgaagaggatcctgaattctaagccaagggatgggcaaagatggtcacagaaggctttgaaatagagaagtgacatggtaatagtgctgctttggggagatgaatatgtcagccatgtgcagagtagtgcagagtgagaagaggtgaggccggaacctggagaacacttaggaaacaaagcacagtactcctgagagaaggtggtaagtgtctgtctagggaggtaaccatggaatggaaagaaagctataaaaagaattannnnnnnnnnnnnnnnnnnnnnnnnnnnnnnnnnnnnnnnnnnnnnnnnnnnnnnnnnnnnnnnnnngtactggggttaggaaggagggaaggttgaataggccgaacacg

SEQ ID NO: 171397 - DNA, 653 bp, Homo Sapiens
  misc_feature (75)..(188): n is a, c, g, or t
cttgacctagaggatcccgattgcattgtcttcctgagtagctgggactacaggcaagcgcacacgccagctaannnnnnnnnnnnnnnnnnnnnnnnnnnnnnnnnnnnnnnnnnnnnnnnnnnnnnnnnnnnnnnnnnnnnnnnnnnnnnnnnnnnnnnnnnnnnnnnnnnnnnnnnnnnnnnnnntgagccaccgtgcctggcctaaagtgatttatatgtcaacattacaatactacggaagtctgtatttgtctatatatttacctttaccagagagcaatatttttgtgttgctgtctagtgttttcactttaacttgaaagacttcctttagcatttcctgtagggcaggtctagtagtgatcaactcacttggtttaagtttgtctgggtaggtcttttaaagaattttaatttttatttttgagacagggtctcactctgttgcccagactagagtgcactgcgccgatcatggttcagtgcagactcaacctcctaaggttcaggtgaacttccaagtagctgggactaccggtatgcaccaccacacccagttaaattttgtattttcagtagagatggggttaaccatgttgcccaggctggtctaaactctgggctcaaatatcatcaataaagctccaa

SEQ ID NO: 171398 - DNA, 662 bp, Homo Sapiens
gcgacctagaggttacgattgcattgtcttccacctgaaagtgacttagcaattacgtaatccaaatacctgcccccatgcaagaatccttctattacatctctgacaaatcacatagtctccacttggatacaaggtctgacagggacctcattactttgctataatgtctactttattactggacagctttaactgttagaaaatgcttttctaaactaaaacaaaagctatcaccagcctcacaccccaactataactttcacataccggttttgattctgttctccaggacaataaaatctacttcccaaggatgatggaattttcatgcaaaattgttagacaaagcatttctttacataaacatttgttgtagatcagcatcatgatgttgttatgagccaaacagtggccttattttacaaaatcctgtcttatatcagtacttgcttgtacctatattcattcataaatatttgtgctgacctcattgtataaacttaacaggctgaataaattatgttgttcaaaattcgcttctgctatctttgcctctcacccctacttccacttccagaccatcttgaagtaatgacgcagtcaagaataaaaactaacaagttaatattagttaagcacttctaaaaacactcttactc

SEQ ID NO: 171399 - DNA, 259 bp, Homo Sapiens
  misc_feature (48)..(119): n is a, c, g, or t
catgtaagacaactatgagcaatcatatgccaacaaattagataaccnnnnnnnnnnnnnnnnnnnnnnnnnnnnnnnnnnnnnnnnnnnnnnnnnnnnnnnnnnnnnnnnnnnnnnnnttaaggaagttgaatcagcagtcatagactgcccaaaaaaacaacccaggacctgatgcctttactggtgaattctaccgaatatttaaagaataaacaccagtgtttctcaagctctctcaaaaaaattgaaaattgat

SEQ ID NO: 171400 - DNA, 435 bp, Homo Sapiens
  misc_feature (115)..(130): n is a, c, g, or t
ttctcgggagtcttaagcatggggttctgcttgtacctcggtggttgaggtttcagttgagcccagatttcacccctgcactttggcctggcgacagagccagactccgtttccnnnnnnnnnnnnnnnnttacttcaaggagagactgctgagggttcctctgtctcctgtgtggatggaatttggcctccatttggaatcgggaatcttgcatatttagttctgcagtattacgtgaatctacggaagcaactcatttggaattagattccaagccgttataaataataaattttttgtctctgtcatttttgtagtaacagcaagagaaaagaatttaggaccaaaacttatgagagttttaaatattttttgctaagtgcttatatgtgatttatgggaaaatcataaacttaacgtggagacatgcatct

SEQ ID NO: 171401 - DNA, 637 bp, Homo Sapiens
tcttccagataatggagttgccacatatctacctgggcaacacgcaacctcagcaaaggaaatcccatcctatacaaaggccctgaggcctgtgctgttcaataaagagcaaagagtcaggtgtgtctggaatagaatgagcaaggaagaaagagaaaatgaggtcagagaaataaagaggacagaagaaagagcttggaaggtttttagttcattgtaggactccactcagtaaaacaggagaaactgcaagtttttcacacatcccgagtaaaggagtgacataatctgacttgcattttgaaaggatcattctgattgctctgtcgagattacattgtgcaggcaaagataggagcaagggtacctattaggaaagtatattatgtgaatctggtaagagatgacgatggtttaggttaaagtgatagtaataaaagtaatgggaagtggtcaaaatatggctatattttcatggtagagccaatgagattttcttgtagattaaatgtggaatggaaataaagaaaagagtcaagaataactaagatttttggctaaacaacttacaatggagtcagatcaattgagatgtagaagttcgtggggttaaccattggggagacaatggcatcgg

SEQ ID NO: 171402 - DNA, 616 bp, Homo Sapiens
  misc_feature (249)..(299): n is a, c, g, or t
tagaggattacgcatgccattgtcttccgaggtagctttaattacaggcatgtgccaccacacccagctaatttttgtatgaatagtagagatggggtttgacatgtaagtcaggctggatctcaaactcctgagcgtgggtgatctgaccacctcggtctcccaaagtgctagaattacagatgtgagccactgtgcctggccccttattactcttctttttggagacagggtctggttctgtcgggnnnnnnnnnnnnnnnnnnnnnnnnnnnnnnnnnnnnnnnnnnnnnnnnnnntgggcttaaagccaacctcccacctcagcctcccaagtagctgggagtgtaggctcatgccatcacgcctagctaacttttctactttttaaaatgtgacgttttactgtgtcacatttatgatttacattatatttccattgaacagcactgccgtagagctatagagagaaagactgatttagaaataaaggatgaggtgtagttggtgctttgggcttgtgtaagatcatcctaggacagattgtagagtgactgtagcagacgtcttgggagagaaactgagccagtgctgacgtataggagcaaatggagat

SEQ ID NO: 171403 - DNA, 736 bp, Homo Sapiens
aattgtcttccaagtactgggacgtaggcgctgccaccatgccagataatttttgcattttcagtaccgagggggaatacatgtggccaggatggtcttgatctcttgacctcatgatgcgcccacctcggctcccaaagtgctgggattacaggcgtgagccactgcgcctggcgctcctggagcagctttctaagcctcagagtttgcacttagagaacagcattttaggcaaaggggattaaacatttacataccctggaggcggtgggcgtcatgatctccctaacccaggaattctcaaactcagtactatggacatttggcaggctctgtttgggggaactgtcctgtgcattgtaggaagtttagcgacctctctggtttctatccctggatgcaaacagcccctccctccccagtcatgataaccaaaaatgtctgtagacactgccagatgtccactgggggaccaaaattgccaccggttgagaacactgacccctctccctcagggaatttgtgagttgtacatgctgagtaggtctcctggtcctttacccaggagccatggacttacctagcagaggagctggtgagggaagagcgcccccacggactgcaaattttgcctgtccaacctgccatgtggctgacttgtggaatgtgtcacatcttacagatctgagagcgactgtccaggcgcggggcatgtggggctggctgatggctgtaa

SEQ ID NO: 171404 - DNA, 666 bp, Homo Sapiens
aggtaaacagtcatgtaacctggaaactgggacagttttctttctttctgatctgtatgtcttttatttcttttttatgccttactgcactggctagaacttggtattatattgaataaaaatggcaagagtggacattcttgtcccgttcctgatcttaggaagaaaattattcagtttttcaccattaagaataatcttagctataggatttttgtagatgctctttctcaagttttacagatacaaatttatcaagttctcccactacaacttttctgagagttcttaaaatcatgaatggatgattatgtttgataatcatcaatggattattgtgtttgatggattgttatggattattatgttagatgtacgaacttgaccttctcaaaatttgcaacaggaaattactgaattatcgcttcgaaatagttttcaagtaggttcatttatgttaagtatggaacttgtgaatacagaaacatcgctcactacatcaaatctgaattaaaacacattcctccttattatgcaacatatgccttacatcaccagcttcaagccctatatttttcaggcagcactccacaacattaccattcaggccacctgtcaaacgatctcatactttttgctaaatcacttaatcgaaactcagtcatc

SEQ ID NO: 171405 - DNA, 672 bp, Homo Sapiens
  misc_feature (267)..(267): n is a, c, g, or t
aggtgcagtttgcaagatcatagctcactgcagcctggaactcctgggttcaagccatcctcccaccttagcctccaaagtgctgggattacagatgtgagacaccgtgcctggtggaaagaggaatcttggctgggaccctagcatcgtctagggaacagagaggttgtgattaagaggtatctggatgaaatcttggtgaaaggaagcacttgtttttaatcccaccatggtttttcatatgcatacaaccatcctcaaacatcntgcccatcagcagagctcctaaaaaggcaggacatacccactggatatccccttctggcagttctaaaccagccttgcccggaagtgggagccttatctatgtggcccagactcaaataaggcctcttggaaatactctcacccttcccctttgtttaccctccaacccctgtgaatcttgtgaacagagggttgaagaaacatgttctgcacatgtgctagtacctgtgaatcttgatgtcccctggaccctctgtgtaagtacatcatggcagaattgctctagatccttcggagctgcagggtgagttaccagccactcaaggtggaggcaaacatgccaggctgcacaagggaccaggagcagctctgcctcttccttgcaggaggaatgagaacggggta

SEQ ID NO: 171406 - DNA, 620 bp, Homo Sapiens
tcttccctgccgaattatcaacaagcattaattgagcaatagccacagtatgttgtaaacatactgtgggaaaacaatgaccagtaacacagatacaacaccggtcaggcaaggcagatgattaagaagtaaacaaacaataactacagattatggtaagtactggttgtgctaggggatgacaggagagactacttagataggtttgtaaggaaatatccctatgaggaattaacacctaaactgagacctgaaaaataaggatttatctatatggagagtagcggaaagagcatttttatgtagagagaacagtgagcattgaggctacaggtaaagtctctggcatgttctgaggacctaaggtcacagtagataatgatcgtaagtgtaaacagagtcagctggattgatagatcatacagtgtctactagaccacagaaaggagtacgggtctcatttcaatcgcaatgagaagccactgaaatgtctctaagcaggctgtgtcaaactctgatctccatctctaaaatacttcctggcaactgtgtggtgaatagttggggactggacaggagggaggaaggaataggaagaccatggcaatcgggtaccgcgc

SEQ ID NO: 171407 - DNA, 219 bp, Homo Sapiens
tgttgtgattataggcaagagccactgcacccggccatagggactcttgcttgcacatttcagtgtgttgtcagatgcttgggttgaggttcgaagctaagttgttagacttaataatagactttgggacgtttaggagagtcgtggtaatataacttaaggaataattgcatgatgataggtagtgagggagaaatgtggctggtttgaccagtggag

SEQ ID NO: 171408 - DNA, 667 bp, Homo Sapiens
agaacatttctatagtgctcagcccaactgttgcagatcagcaatcgagtcctgtatgtgtttttcacacatgtgcaagaactctttggaaatgtggtactaaagcaagtgatgaaacctctgcgatggtctaacatggccacgatgcccacgctgccagagacccaggcgggcatcaaggaggagatcaggagacaggagtttcttttgaattgtttacatcgagatctgcagggtgggataaaggatttgtctaaagaagaaagattatgggaagtacaaagaattttgacagccctcaaaagaaaactgagagaagctaaaagacaggagtgtgaaaccaagattgcacaagagatagccagtctttcaaaagaggatgtttccaaagaagagatgaatgaaaatgaagaagttataaatattctccttgctcaggagaatgagatcctgactgaacaggaggagctcctggccatggagcagtttctgcgccggcagattgcctcagaaaaagaagagattgaacgcctcagagctgagattgctgaaattcagagtcgccagcagcacggccgaagtgagactgaggagtactcctccgagagcgagagcgagagtgaggatgaggaggagctgcagatcattctggaagacttacagagac

SEQ ID NO: 171409 - DNA, 453 bp, Homo Sapiens
agacatccccgggcgttgatgattacggcgtgggcctgttcacgccccgcacctacatctacgaccacggcttcccctacacggaccctccggatgtgctctatgaggatggtgatgacacggtggcgacccgcagcaccgagctctgtggcctgtggcagggccgccagccacagcctgtgcacctgctgcccctgcacgggatacagcatctcaacatggtcttcagcaacctgaccctggagcacatcaatgccatcctgctgggtgcctaccgcccagggtccccctgcatccccgactgccagcccagagcccccgcctcctgaataaagaccttcctttgctaccgtaagccctgatggctatgtttcaggttgaagggaggcactagagtcccacactaggtttcactcctcaccagccacaggctcagtgctgtgtgcagtgagg

SEQ ID NO: 171410 - DNA, 419 bp, Homo Sapiens
agtgctctccccaatgactgggacggctgaaggtggtgcagggaaaaaggcacgcgccagctctcccagcaggatctgtgggcaagaccaagatggagtcttttggccttccagcccatcccctcacccacccttaccggcccacctgcctcctaggaggtcttcattgtctcaccgtgagggtgggcccggcagtgaccagtgcgtagacaagagcaggaggcactcggcgggcagcctcaggccctgggtagggcgtggcgtaggtactgtcacagcagaagaatccctgggtgtgcacagggaaggtgtccgtgaactccaggcggtaagcaagcaggatcacaatgcccagcagcaccgactccaccaagacaaagcaggggatgatggagaaactcctcgtcagagtcgttcgg

SEQ ID NO: 171411 - DNA, 657 bp, Homo Sapiens
  misc_feature (83)..(124): n is a, c, g, or t
  misc_feature (542)..(550): n is a, c, g, or t
cggagcgggggctcaggcggcggcggcctcgacgcgagtgagtgtcgtggttggggtgctggacccagagtgcctaccctcgnnnnnnnnnnnnnnnnnnnnnnnnnnnnnnnnnnnnnnnnnnccatccctgccctgctggctgccaggagcggctgtgagtcttcaggcgtggatgcagcctgggggaagccatagggcgctttcacaggcctggccttcaccatggcgggagggagaccgcatctgaagaggagtttctccatcatcccctgctttgtcttcgtggagtcggtgctgctgggcattgtgatcctgcttgcttaccgcctggagttcacggacaccttccctgtgcacacccagggattcttctgctatgacagtacctacgccaaagccctacccagggccctgaggcctgccagcccgagtgccctccctggctctttgtccacccccatggggtccactgcccggggccccaccccttccccaaaaccctggcctggggaaaaaaacttgggccccccgtggccccnnnnnnnnncccctggggaacccaaccttttcaaagccggtccccaaatttattttcgggggaaaaaacaccccttccctgggttctggggggcccttggttgtccccctttttta

SEQ ID NO: 171412 - DNA, 975 bp, Homo Sapiens
gtctctgctattaccggcgtggtataccgcagcgacgtgcgagcattacactgttatacgatactctcctctggtctctggtgcccggtgttggtttgtacgatgtagggcaggaggcggcaggacggttatgtaggggttggggcggggcactccgcggattagatgtcccagatccgcgcttctggtagactgcgtagcgtgacgttgatatcagcctgcgcccggttcgccgggcggtgagcgtccacgggaggggcgcccggacatcgtgctggtctgcaagtgtgtctgggtgtaggacggtcgagggccagggctagttgcgctgtgcgtggcgtcgcggcctcctcccggtcaggtttggggattagggagtctttgggggcggggaggcggccggcggggggtgcgcggtggttctgtttttgttttctctggagggaaaagtgttctgcttactggtctggccaggtcttcctgtgcgtctatcagaaagctgctctgcccttgtggctccaggggtcgcagtggtgtccccctgcggcctgcctctgctgcccacctggaagtggcctcagtcagtcttcctgaaccctgtcagcctaaacttctggaagagggggatgaagccttggaggacgctgtggatacggtacactagtccgaagtagatgccaacggtttccagggaggcgaaggtgagcaggccgaccccaagagacatgaaccagtctgcgtaatagtgataacacaccagcaaggccccgatggcaaagcacaggaggacgaaatggaaaaactcatcatctttctttatattcagtcttcttaactgagaggcctccacttctccacttgctgggtcagagcctctccttcggagtcctgattccccagagggtaccacctctccaggagcatctccatagagttgaagctcatccttcaaaacgtcaggctccccatgccccc

SEQ ID NO: 171413 - DNA, 662 bp, Homo Sapiens
  misc_feature (575)..(575): n is a, c, g, or t
  misc_feature (631)..(631): n is a, c, g, or t
aagacggatgggggggcaggcatttgcgggggagctttctgatgtcgtgcctagccccagaatctgtgcggagaccctgggagaagaacagcacaaccttgccaaggatgaagtcgtcttcttcggtgaccacttccgagacccaaccctgcacgcccagctccagtgattactcggacctacagagggtgaaacaggagcttctggaagaggtgaagaaggaattgcagaaagtgaaagaggaaatcattgaagccttcgtccaggagctgaggaagcggggttctccctgaccacagggacccagaagacccgcttctcctttccgcacacccggcctgtcaccctgctttccctgcctctacttgacttggaattggctgaagactacacaggaatgcatcgttcccactccccatcccacttggaaaactccaagggggtgtggcttccctgctcacacccacactggctgctgattggctggggaggcccccgcccttttctccctttggtccttcccctctgccatccccttgggcccggtccctctgctgggggatgcaccaatgaanccccacaggaagggggaaggaaggaagggaatttcacattccccttgttctagaantcactttaacgcttaatgccttcaaaaaaaa

SEQ ID NO: 171414 - DNA, 814 bp, Homo Sapiens
  misc_feature (329)..(337): n is a, c, g, or t
  misc_feature (350)..(350): n is a, c, g, or t
  misc_feature (358)..(358): n is a, c, g, or t
  misc_feature (375)..(383): n is a, c, g, or t
  misc_feature (589)..(639): n is a, c, g, or t
tcctttttccccacccctcccccatctgttcatctgtctgtctgccttcagtctgtctctcctctttgtcaacccgactctccctttcccacctctctctgcgtctgtctcttgcatctcgtttgtgtgttgccctgtctctcctgatctgattttctttcctgatctgtctcccccgtctccttctgtccacgtggctcctgcctccctttgctggggatgcaccaatgaaccccacaggaagggggaaggaaggagggaatttcacattcccttgttctagattcactttaacgcttaatgccttcaaagttttggtttttttaagnnnnnnnnntatatatatattntgggtttntgggggaaaagggaaannnnnnnnnctctttggttttgataaaatgggatgtgggagtttttaaatgctatagccctgggcttgccccatttggggcagctatttaaggggaggggatgtctcaccgggctgggggtgagatatccccccaccccagggactccccttccctctggctccttccccttttctatgaggaaataagatgctgtaactttttggaacctcagnnnnnnnnnnnnnnnnnnnnnnnnnnnnnnnnnnnnnnnnnnnnnnnnnnnaccccttggaggaaataagatgagggagaaaggaaaaggggaggaaacttctcccctcccaccttcacctttagcttcttgaaaatgggcccctgcagaataaatctgccagtttttataaatgctacaacacaacacctcgacacaattaaaactaccctgtcggcccgtctct

SEQ ID NO: 171415 - DNA, 1237 bp, Homo Sapiens
tggccatgaaaagattgttttattccatgtaaatattctcaacagagaacactatctttaaatgaaggatttaccattaagaaatcaacatgtgcacaaaaagagtaaaaattaccaaaaaattaaagattttttgggacaattcacatgttcaaaatttaagaatgatttaaactgtgcaagtacaaatgtctttcctattataaaaaccccatatacagggtgcactattccacatcaaagaaattgcctcctacgggaagcaaatcctgcttttagaaaaacaaacagtagctggaaaagaacagttagtccttacaagaaagtcttaaactttgccctctggggctgttagccaaaaaaccataaacacttcaggctttgtacagaagacaaacacagccagatcacatttctccctcattggtaacctttaaaataaaaaatagcactagattttaaaactacttcatgtagtctgtcagtactgaataatgtcacattatataaaataaccctgtaacgagatgtcaatatctaaactttatagtttactagctgcaaaggtaatacactatatgtcagctgtgtaacagtggtgacttgatcttatgaaggcagtaactttcacacaattgtcattcagctttagtataacgggtagtatgattcgaaataacactgggaaaaagttattaaagcagtcacacagcttctaaaatattgcttaaaattcaataatacacaaaccatttcacgttctttctcccctcaaaacagtaaagaaccaaattaatgaagattcagtggtacaaataaccccccacctgccccatctccctattacaacaccactaagaaattagttaagatacatgtcattaacagaatcacaaatgcgaggcaggacaccatgagcaacaggagcactaacaacaatcatatttacaagtataaacatacagaaattccattttacaagtaaaagtgcacatagatcattacaaagtttcactaaattttatcaggttcaaacaacaagcatcacgtggaaagagactatcattgtaattatcaaacatgatcgtcataacccaaaataaaaagacaatcgggggaggcccataaaacttctcataaaaccactgaggaaattaaaatggacttggacatgtctttagtttgatgcataaatttgaagatgcaccactgtatatggtagagctccgacgcgtgg

SEQ ID NO: 171416 - DNA, 887 bp, Homo Sapiens
tgagtatatccagagggccaaggatgcggaccaccattttgcagaactcatatctcgagcagtttaaattaaaaattagcctccttcatccatgtaaccagcatccatggtatcataatatccaggaaatttttcaaagtataaatgcttgaatgcttcctgattcttccagagtcctgaaaaagccccaggtggcaatggtaactttaccacaatatttcctaaacaccgagccttcagtttttgcatgttgtcatccaaaatcataacattgtatcctgggacgctttttcctgcttgccctggtggaggtgttttagaattgcctaatccaacacatgacgcagtaattggagatccagtctcagtttgccaccaatggtctaagacaggtactctgaggacatttttggaccattccagggtctctacatcacatcgttctccagccacaaataatgttttgaaccttgtcagagagtactgcttccccaaagctgccccagggtcctgttgacggattgctctaattgcagttggtgctgtaaacaaggcagctactccatgctctgcaagcacacggaaataagcgccagcatctggtgttcccacaggcttcccctcatataaaactgttgtgttcccatgaagaagaggtccatagcagatataggaatgtccaacaacccagcctaagtcagaagctgcccaccacacctctccgggttgaagtccgtatatggaagacattgaccagtgtagcatgacagcgtatcccccagtgggcctaatcacacccttaggtaaccccgttgtgccagatgtgtaaagaatatacagtgggtgttctgaaagaacaggaacacagtcatgtgactgggcttttg

SEQ ID NO: 171417 - DNA, 431 bp, Homo Sapiens
ccatgcacatgccagtgctcttcgccctctgagtctcccggagttctgtgcctcctgcgagtcagggtgacagtgtcagtcctgggcaagttgctgtgcctgagctgaaggggaggcctcgtcctgggcctgggcccccctgccagccactgtctgccttgttgtctctgtccctcgcctcctctggtatcatgcgaggcactggctcatctggaagctatatgctctggatggggttgggcagccacacccgctctccaatctctccccactgtttggcccagtgtttctgtgagaggatcaggacaaaggcaagaaagcccaggaggttcactggctggcctgtggtccacacctcccgttttcttcacccagatgcaggatctaatgtggttccaaagctcaaggctgaggctggctggtgattatag

SEQ ID NO: 171418 - DNA, 590 bp, Homo Sapiens
tgcaaatcaccatgtatttagggcggaaagacagagaactagtaacctgggcaagaaaaaagagaggaaaaatgctctttctcatcaaatttccttatgcattggctaattccttccctctgatttgtcaatttaccttccatcttcaaaacaagcttccttagccattgtgtaacatctagatttggagcgactgtcgggaatgctttggtgaagagggctgctgcacttgacaaacaactccgtctctgaaagtctaaccaaaagaaccaattcacagtgaacggtcacctgccactcactaggaacaggctggcttgacgaaatggaagaatcaacatagtcacacatcgtgaaataatttccccatatagttcagatgcatttgcctggacagacaaacatgaaaggttgcatctagtctctagggtcataactcagttcatttcacataggtgggtagagtgaagtctagtggccttggccaggtgagttcatgggaagttaggaaaaaacagcctgtggatactgctcaagcttgaaaatcctaacacacctcacgagactattctgaatactcaatcttaaat

SEQ ID NO: 171419 - DNA, 265 bp, Homo Sapiens
acactgcatatcccaataaataaaatttaaaacatacatattacaacggtttatcagaacaaatcattccaatctatcacaattcatatgtcacagataaacacttctcctgccactatacaagcacaatggaacccatttaacattgctttaatacccacatttataactactggatttcaaattaaactcaagctctttagttacttcacaaagcaatccatgaagtagccatttacatgcttcttcaaaaactgtgctttga

SEQ ID NO: 171420 - DNA, 213 bp, Homo Sapiens
cacactgcaatgcgtgagtatccatattcatgcaccaagcaggcattcttcttcattggcagcatcacagcagtctccatttgtcacctgcctggactgcagtgcacataaacacggcttgctatagccttgacctgccaggctcaagtgatcctcctgccttaaccccttcaagtagctacaggtgctcaccaccatgcccagctacttttt

SEQ ID NO: 171421 - DNA, 403 bp, Homo Sapiens
gtctcagcctcccaagtagctgggactacaggtgcacattatcagatccgggctaattatggtatttcttggtggacccggactttggccatgtcgggcaagttggatctcgaattcctggcctcaaacaatccatctgccccaaggctcctgaagtactgagattacaggcatgagccaccacacatggccaggggcttaagtttcaacatgagttctgcagggacagacatttaaaccacagcaaagaggatgagccctcaaaagatactgagaagcagcaaccagagagatgggaaaaacagctggtgagtgtggtgggacagagctaacaccaaatcagaaggaagtgtcagcagcatcccaaggaagaggagggagcctgtatagtaactgctgggac

SEQ ID NO: 171422 - DNA, 338 bp, Homo Sapiens
agtgatgctgcaggctacctagagtatccaatcgccacgacaaggagcagctgcgcttgcgcattggcatccacacaggacctgtgtgtgctggagtggtgggactgaagatgccccgttactgtctctttggggatacagtcaacacagcctcaagaatggagtctaatggggaagccctgaagatccacttgtcttctgagaccaaggctgtcctggaggagtttggtggtttcgagctggagcttcgaggggatgtagaaatgaagggcaaaggcaaggttcggacctactgctccttgtcgtgcgattgggatactctaggtcaccctcagcct

SEQ ID NO: 171423 - DNA, 434 bp, Homo Sapiens
  misc_feature (33)..(33): n is a, c, g, or t
  misc_feature (235)..(235): n is a, c, g, or t
caaaggcttctccctctaaccttcatttctaanatcccctcgaaagctccaagctcgaaaaccaccaaactcctcccaggacagccttggtctcaagaagacaagtggatcttccagggcttccccattagactccattcttgaggctgtgttgactgtatccccaaagagacagtaacggggcatcttcagtcccaccactccagcacacacaggtcctgtgtggatgccccanatgcaagcgcagctgctcctggggccggtggcggattcggaaggagcgcacagcatccagcagtgccagggccatgcgggctacctcgcagcgtgtagccgcccgttccgcacagggagccctgacaccaccatgtagcatcgccaattgtctccaccttgtacacatcaaagttgtctatgacagcatcaaagcaagc

SEQ ID NO: 171424 - DNA, 313 bp, Homo Sapiens
agcggcactgggacatctcgtcgtccgagcgcctggacatcctgcgggacttcaccaactacggcctggagcactggggctcgacaacgcagggcgtggagaagacccggcgctttctgctcgagtggctgtccttcctgtgccggtacgtgcccgtggggctgctggagcggctcccacagaggatcaacgagcggccgccctactacctggccgcgactacctggagacgctgatggccagccagaaggcagccgactgatccgcatcagcaatgctccttgtcgtgcgattgggatactctaggtcaccc

SEQ ID NO: 171425 - DNA, 437 bp, Homo Sapiens
tttaggatcccaatcgccacgacaaggagcagcggcactgggacatctcgtcgtccgagcgcctggacatcctgcgggacttcaccaactacggcctggagcactggggctcggacacgcagggcgtggagaagacccggcgctttctgctcgagtggctgtccttcctgtgccggtacgtgcccgtggggctgctggagcggctcccacagaggatcaacgagcggccgccctactacctgggccgcgactacctggagacgctgatggccagccagaaggcagccgactggatccgcatcaggtgcctgggtgggctggagttggggagctgcagtcgggggcccggggtcacggagggtactttgcaggtcctgggcctgacctcgctttccacctgctctcccacaagcaagatgctccttgtcgtggcgatt

SEQ ID NO: 171426 - DNA, 585 bp, Homo Sapiens
gagcagcccagaacaaaatcctggacctggagacccagctgagcagaaccaaaacggaattgagccagctgcggcggagccgggatgatgcggaccgccgctaccagagccggctgcaagacctgaaagatcgcctggagcagtccgagagcaccaaccgcagcatgcagaactacgtccagttcctcaaatcatcatacgccaacgtgtttggggatggtccctattccaccttcctgactagctctcccatccgctcccgatctcctcctgcctgaggccacttatcagggcctggagccctgatggaagccataggaactccagagttgccaagccatagctgagaagcctggtggttttcctctcccagtgaaaaaatgggttcagggtcttgtccttagctactagctctagaaaagtcccaaaagcagcagaaggtgaagcaggaagcacttggttttctccttcctgatatagtcacctgttggaagtgttaaaatttcctcgacaggccttaaatttactactacattagggtaccacattttaacttaccatgactttgctcttgtcgtggcgatt

SEQ ID NO: 171427 - DNA, 601 bp, Homo Sapiens
taggcgactcttaggatcccaatcgccacgacaaggagcagtcagtttccgccgagcgtgccgaggcgggggccgtccgcagactggccggcgccagggaggaaacttggtctgtacctccagctgataactccgcgccccacgctgcccccacccagttggcgccaaagaccacaggcggagcttgcgctacccctcctacttggaattgacactagctgggagggggctgccgaagacagctccctatacaacatggaacagaaagacttgtatttagtcggacccatgtctactttgccagaccctcggccactgcgggagggcagggcccaggcgcatttaaggcttaaatgcacatcacatggaaactgactctgccattcatttgatgcaaccatgggcaagtcacttgtccctctctggcctcagtttccctaaaccgagtgagtggcaatttttcaaaacgtctgccaactccaggacttgccgtttaaacctccctctccaagagaggagatactcacctggaggtgtcaggacacggccgagtcagtggcaaaagctccttgtcgtggcgattgggataactcagagtcac

SEQ ID NO: 171428 - DNA, 894 bp, Homo Sapiens
gggattggctggtgagccggccgcacgcggaggatcctaaggagcagctctgttgcgacataggccgagcagcgaggcccagctccctgaaacaacagtaacctacccctgtgggtcatcatcatgccctccgacctggccaagaagaaggcagccaaaaagaaggaggctgccaaagctcgacagcggcccagaaaaggacatgaagaaaatggagatgttgtcacagaaccacaggtggcagagaagaatgaggccaatggcagagagaccacagaagtagatttgctgaccaaggagctagaggactttgagatgaagaaagctgctgctcgagctgtcactggcgtcctggcctctccccccaacagtactgatgttcacatcatcaacctctcactcacctgtcatggtcaagaactgctcaaggacaccaaaccggaaattaaacccagcccgtcgttagggcctcagtggtttaaatggaattggaaagtccatgctgctctctgctattgggaagcgtgaagtgcccatccctgagcacatcgtacatctaccatctgactcgagagatgccccctagtgacaagacacccttgcattgtgtgatggaactcgacacagagcgggccatgctggagaaagagccagagcggctggctcatgaggatgcggagtgtgagaagctcatggagctctacgagcgcctggaggagctggatgccgacaaggcagagatgagggcctcgcggatcttgcatggactgggtttcacaccgtgccatgcagcgcaagaacgctaaaagacttcagtgggggctggaggatgagggttgcccttgccagagccctctttattcgcccttcatgctgctccttgtcgtggcgatt

SEQ ID NO: 171429 - DNA, 371 bp, Homo Sapiens
gggtctgcaaaccactgcgtgctttgcagagtgattatcagcacagttccctgccctggataaggaacagctacagtcgctgttaaatgtgcctgaaaagcaatttgcaatctttgcattaggcatttcggccgtggaaccccaggctcggaggactgggtgtgagcgctgcccgggagaggctgacctgccgggaccggagtgcccggggacgctgtgcccccacttgcccaacgtgcggaatcggctaagcgcgtcggcctgcgcggggcacaagggacgacgcccgcctttctctctccgagaaggatccccaaacctcactctcttcactccgccccgttaaaaaaccccccaaccccccaaataac

SEQ ID NO: 171430 - DNA, 993 bp, Homo Sapiens
gactgaggtaaatcgcacgacaagactgctgttagagcgatggtgtcatgaagcctggcacagagaagatgtccaactccccagttctgtctgaaactcagacctcgggtgggttcctttctccacacagtgcttgcccgcatggctcattcttggattgatggtgctgctgcctgacagacacattaggcagaggcggaggggtctctggtccagccctgtcaaatactgacagttcagggctccacttatttatgtaacattccttccctccactagtctgaaaaagtctggacatttcgcagtctccagggaagaggaatatgacagatgtatttggcactaatgcttaaattatgcagggcagggaaaccagagacactgagggacctggacaacagacaagctggctgagggtttctcttcaaggccagcatttagtcacactgcgtccacggtgggtggacttggatgtggtgcacgagaaggagagcacctgtccgtctccctgacatgcttctggaagaggctgctggggatgtggagactggggtggggaggacagggaaatgcctgctgctggtgacacaaacacattcccggaggcttccgtgtttcatttgctacagagctgtctccacaagcgccttcactctcctagcttcctgaccctgccatgcatcggttctgtacacaacatctgcaggtccaaatacagagagaatttcagcctaaagtacaactttaaagcatatctctgacactcccttccttcaacaattgtagtgggtgatgggtcaccactgaaaggtaatgagtgtggaacttgtatactcaagagagcttttccttcattgtcaggagagctcaaatcctaagaggcccttctgtttataactgattctcgaaaggtagacaaattgcctctctctgtgcaacagacatgcgcctttctctctctttctcctataacctggctttctcctttatgac

SEQ ID NO: 171431 - DNA, 159 bp, Homo Sapiens
  misc_feature (11)..(11): n is a, c, g, or t
tggactccaantgccacgaccaaggagtcaaaataaaacaaaaccaaggtggtgatgcaggaagggggagactccttcaagtctctagaaaactaactcgccttcttgctgggggtgcagacaagtccggaagtatcctgtcgtggcgattggggatcc

SEQ ID NO: 171432 - DNA, 588 bp, Homo Sapiens
gattaggaatctgagaacagaccgtgggcggctatgctgaccagggctccggatgtggaagctgggccctgcgtccttgcaggggactctgcccagctggaaggggcaggcagctcggcaggccctgaccggcaagcgggcagtgcaggcagcccagcagcagctggagcttccagaatggcacagcactgggcctgtggagaggctggcgtcaattgaaggagaactggagggctgacacgcgtggctggcgggcaggcaggccaaggagcagagggcacgggcctacgagagggcggggcggcccagccgccagcaggtgggggcccgaagccactgttcgccgcccggtgccactcttgcaggctgatagtggtcgtccgcgtcactgctgctgccaacactgtccagctcaccagggccaaactccatgccctctatgtccacttcttgctctgagtcgtccgtggaaacagcagagcccctgctaatctgtgcgcacgcgctcacagctctgcaccgacagctgctccaggcgccgcttcaggaaacatgctcctgctgcagctgctgggatcctaaaagtca

SEQ ID NO: 171433 - DNA, 1057 bp, Homo Sapiens
gggtcaggggaaggtccccgctcctgcacactctctatggatacttgggttgtgggggctctcttggagagtaagtttgtggtttgtttctggtttacagtggtggctgacaccccttgtaagaaagcattcctgggaagtcttctgtgggtccaaacatgttgctccgatcatcacaggagagcaaaaggccctagataccccctttggaatgtgagagtcttgttgtctgatatttgccactgagctggtgaagcccctctaaagagatctcgaccctggggagcagaattcttgtcatctatgaggggtcctgagaaagacttgtcattttttttcctggagttcttcccattgaggtcctaggatttgcacaccactgtcccacaagagctttcctgcctaatgaaaggaggtcttgtggtgtgtgtctcctctcttctctatagttcccgagttggcccccattgcagcccccaccctgtgggtagtcttccagaagtgatgcagtggtgtgagatgccctacaccttgttatttgggagactttgagagtcattcacttccatggtgactagtgtttgttttgcctgattttatattctgtgttgcatttctccccactccctgccctgctttaataaacagcaaaccaatatctaggaagaatgactgagggatagtattgggtattggccccatggcaggaacagccacttgcatctggtcccggtgccacactgcggtgcttggtgtggttgtggagcctgtccctgcgcgccttgctcccgttgagccacgctgtctggtgggtgattctctgccctgagccaccaccctggactggcccagtctccagagctggcacaccctgcctgttttctctttttagacacaacagccgcagtttggccagccactaagtcccaccagctgaggtccgaggaaagcggggtgactcatttcccttgtccagggcccgaggagagtgaggtgtccagcctgcaaagctattccagctccttggtgttggtttgcaataaattggtatttaagc

SEQ ID NO: 171434 - DNA, 335 bp, Homo Sapiens
tgctgaggtactctagagttatccaatcgcacgacaaggagctggggccaaggccagtctgccccagagacactccaagtccgccagggcacagaccagttctgcagtgactgtccctggacaatgggtctttattctgagtttcctatggtttacaaagagggccccagcccagccccaccacagatcccagagataggggcccagtctccatgggggcaaggagcatagagatgttttccaggaaggggctcagaagctgcactaggccccgagtccccatgtgtctccttgaattgatgaggatgctccttggtcgtgccgcacgcgtcccg

SEQ ID NO: 171435 - DNA, 1238 bp, Homo Sapiens
  misc_feature (807)..(807): n is a, c, g, or t
  misc_feature (1121)..(1121): n is a, c, g, or t
  misc_feature (1187)..(1187): n is a, c, g, or t
tgaggatagaatgttagataaatatatctatggagcacagggagtcctctaggtatatgatattacaaattatcaaagcttgagaatttagaagatggtatactgtggtgaagaaagtgagcgaggagtcagaaactcagccactggttgcctaggtaggcaataacatagatttggagcatatgcgaacaataaaacctgaaaaacacttacggtttagccaggaaaatggtgtgagtagccacttagtctcagccaagacaggagactctgtcttcctgtgctttcagaaagttgctgctgaaatccttgggatcaaattaaacaaagcagaaatagaacagtcacagcgtatagtcagggcagaaatagtgaagtacccggaagaagaaaatcaacataccacctctactcagagtagaatctgttcagtacagtagtgcagagggtggtgaaggcagatattgtaaactacaaccaggaacctatgtcaaggactgttaaccctcctagaagctctatgtgtgcagttcagtgagcgcatttttcttttgtgttgatagttctggctgcccttcacctctgggtgggcccgaggacttctaggaacttgttttatcagtgaccatctctgtagttcagttaacactttactcccaacttgcttcatcattgctattgcctcacagtggcaggcagctccttggatttgaaagaattcaactttgggaccacacacttttgaattcaaaatggaaaacccattccctggaattagactgcttcattgcaaaagaatgatggtgntttctttgtatggcctttgcttctttttttcattgatgtaaattttttttaacttaatatgaaaactctccaagtcttgatcatcagccaggattttgccacagcaatttcattctcttatcggaacttgtatgtgtcaaagtatacttcagagtgcaaacattaagcaagtaatatattttacctacagatacttatgaagacattctttcgctatcgtgagtaaaagtatataaagctgtttctaactgaaaatgcttgaaataagcctgtaatagaaatattttttcattttttaaaaagggcctaaatgnttaatattggagtttgtaactcacaaagtaatatttgatattggatttttattaccggatcgttgnccgtatgtattggggaaaacctccgggttaaaagctttcctgaattctgaa

SEQ ID NO: 171436 - DNA, 489 bp, Homo Sapiens
  misc_feature (351)..(351): n is a, c, g, or t
atgagcaccgcgcccggccggacaccattctttttcaatgaaacagtctaattccagagaatgagacttccagtttgaatgcaaagtgtgtggtcccaaagttgaattcttttgaacccaagtacatgcctgcggttgggaggaacacttaaagatgaaagcaagttcggagggaaagtgttaactgaactacagagatggtcactgataaaacaagttccttagaagttcctcagacacacccagaggtgaagggcagccaaaactattcaacacaattggaaaaatgagctcaccccaacttgcacacacagagcttcttagaagggttaacagctcttgccataggtncctggttgtagtttacaatatctgcctttaccaccctctgtgaactgttctatttctgctttgtttaatttgattcccaaggatttcagcaacaactttttgaaaacacaggaagacagagtctcttgccttggtctg

SEQ ID NO: 171437 - DNA, 485 bp, Homo Sapiens
gggcgctctagaggatctcaatcgcacgaacaaggagctttcgagcatgagtcattgctcttgaaccgaaaggtatcacaagctaaccaaggctgagaaaaaagcagcaaagaaaagctatgaggaagacaaacgcacatcagtcccctatacccgcccatcgtatgcgcagtattaccctgccagcgatcagagcctgaccagcatccccgccttcagccagagaaactggcagccaactttgaagggtgatgaaaagcctgtggccagtgttcgtcctgtgcagtccacccccatccccatgatgccccggcatgtcccattgggaggaagtgtaagctctgcctccagcacaaatccatccatgaactttcccatcaactacttgcagcgtgcaggagtccttgtgcagaaggtggtcaccacgacagatattgttattcctggactcaacagctccttgtcgtggcgattgaatcctctag

SEQ ID NO: 171438 - DNA, 303 bp, Homo Sapiens
acgccacgagcaaggagctcttataccactgtctcttcctctgtgattgggggggctccatgcctctagctgggatgatgatgtccagacctgggaggagcccagggctacccacctctaaacatcagagggcaggaagcaagaaacagtcataggactgccctggagggtgctggggtcacctgccctcaggctgcagctgcctctgtcctggcacctccccttcccagaggctggtgactgcctcccagccattattggatgggtcacaggttaccgtctctttcagctcaccaagcttca

SEQ ID NO: 171439 - DNA, 359 bp, Homo Sapiens
  misc_feature (328)..(328): n is a, c, g, or t
gcaaaagcacagtgggcctccagtgcctgaggagcgactcgaaggaagggccatatgtctccgtcccgctcaactgcagctgtggggacacggtccaggcacagctgcacaacctggagccctgtatgtacgtggctgtcgtggcccatggccaaagcatcctctacccttccaccgtgtgggacttcatcaataaaaaagtcacagtgggtctctacggccctaaacacatccacccatccttcaagacggtagtggaccatttttggggcatgactgtgcccccaaagacgctcctggggtcaggcgagggtcacacgccaggggnacccaacccttgccccggttggcccttgcag

SEQ ID NO: 171440 - DNA, 935 bp, Homo Sapiens
  misc_feature (879)..(879): n is a, c, g, or t
ccagccgggcccggtggcggagaggaagtgcggtccgcgccaagcccgtccccgccgacgccggctccccgcggctcgggtgacagcgtcgcggccgccggacgcagcgcggggcaggcgcgggcagagccgagcgcagcggaggctccggcggaggcgcggggaaaatggctgatgactttggcttcttctcgtcgtcggagagcggtgccccggaggcggcggaggaggacccggcggccgccttcctggcccagcaggagagcgagattgcaggcatagagaacgacgagggcttcggggcacctgccggcagccatgcggcccccgcgcagccgggccccacgagtggcgctggttctgaggacatggggaccacagtcaatggagatgtgtttcaggaggccaacggtcctgctgatggctacgcagccattgcccaggctgacaggctgacccaggagcctgagagcatccgcaagtggcgagaggagcagaggaaacggctgcaagagctggatgctgcatctaaggtcacggaacaggaatggcgggagaaggccaagaaggacctggaggagtggaaccagcgccagagtgaacaagtagagaagaacaagatcaacaaccgggcatccgaggaggctttcgtgaaggaatccaaggaggagaccccaggcacagagtgggagaaggtggcccagctatgtgacttccaccccaaggggcagcaagcagtgcacaagattgtgtcccgccctgcggctcgggggccccttgtcccctgaaagcaagaacgccacctgtccccccctaaggggcctctgctaaggttgcattgggcacaccacaagcattggggctgggggccctgggggnaccagggaaggtagccagccttgctttctcggttcccgggggttggcaaacaaccc

SEQ ID NO: 171441 - DNA, 926 bp, Homo Sapiens
  misc_feature (823)..(832): n is a, c, g, or t
gcctgagtggcgaattcccacgaggctgctgatggctacgcagccattgcccaggctgacaggctgacccaggagcctgagagcatccgcaagtggcgagaggagcagaggaaacggctgcaagagctggatgctgcatctaaggtcacggaacaggaatggcgggagaaggccaagaaggacctggaggagtggaaccagcgccagagtgaacaagtagagaagaacaagatcaacaaccgggcatccgaggaggctttcgtgaaggaatccaaggaggagaccccaggcacagagtgggagaaggtggcccagctatgtgacttcaaccccaagagcagcaagcagtgcaaagatgtgtcccgcctgcgctcggtgctcatgtccctgaagcagacgccactgtcccgctaggtgcctgctaggtgcatggccacagagcatgggctgggcctgggcacaggaggagcagctgctttggtcggggtggagactcgcagcagctgctacccacagcctattccactcctccccatctccaggcgctgggaggggggccctcaccccatcacgcctcgctccctcctggccctctggtccagcccctcacgcctcctctcagtctactcaattgtgactgtccctcctgatgtattttttttcttggcttaaagggtgtgttgttgactcttttttacctttccatcttgtatatttccccccatctcgattgctattttcggggctttttattgtcggggggggaaaaaagaaggtaatgaaatggccccatgcctttaaccctggtttcctgaacccatcnnnnnnnnnnaccaatgggtataaccttgcccggttctccccaatatggtatcccctatttatttcccaatatcctaggccaaacactgctctcacggaatcgg

SEQ ID NO: 171442 - DNA, 332 bp, Homo Sapiens
  misc_feature (165)..(229): n is a, c, g, or t
agttgatcccaatcgccacgacaaggagcagctacacccagacacaagattcatctaacttggttaggtccttgacatgtgtgtgtctgtgagaagtggaagagaagggggtaagggcataaactgagtcaagaatttaataaacaccatgtacagtggctcatnnnnnnnnnnnnnnnnnnnnnnnnnnnnnnnnnnnnnnnnnnnnnnnnnnnnnnnnnnnnnnnnnatggcaaaatcctgtctctacaaaaaataccaaagtagccaggtgttggtggtgcagtcctgtagtcctagctccttgtcgtggcgattgggatactctaggt

SEQ ID NO: 171443 - DNA, 471 bp, Homo Sapiens
tcccaatcgcacgacaaggagcttggctcccgggcctgagcctccttctccaccttctgtttcgcctcctgactggcccgcaggccctgctgggcttccagcttctggcgttggaggtctgagttctcgcgggccacgcgttcgatatccgcccggaggctccgggccagctcctccaccttggagctcatgaggctgggcatgtggtcgcaggctctgcggatggaggccaattccgagcccaggggatggtagaggttgtaacccaggttgtccaggctgcgtgggataatggagtccctccacaggttacgaaggtccatctcaaacttgtccttgtccaggggcaggcagagggcttgcaccttttgcagttgctccttggccagtggcgctcttggtgctgcagctcccgggttttcacgcattcaaccagctgttccttcgccacgcgtttgttcagtcacacgc

SEQ ID NO: 171444 - DNA, 429 bp, Homo Sapiens
taaatcgccacgaccaggagcaacaggaattatcttgttagagacaggggaggtgggtggggttagtgccccagtgccgggcattaatacagccaaggaagggtgtcacagacaggccgagtaggagggacagggagagcctggcagccttcttaccaagaggaaaagaggaaagacctgtttatctgggccttggaggcagggatggttaactgcaaagcaggaaaaggcggctcggggctggaacgttactccctctgctcatgatccagggagaagttttgggcccccttctctctgctgctgatggccgataacttgataactcggctggctggggccaagaagatcccaagacctcgatctgccaggagtggccagacacgtgaaaaagcagctccttgttcgtgcgattaagatcctgtaggt

SEQ ID NO: 171445 - DNA, 319 bp, Homo Sapiens
  misc_feature (227)..(244): n is a, c, g, or t
ctaaaacaaaaacataaacaaacacacggaccaaaaacccttagtacccaaaaacagaaattcaatttaaaattttagaatgtagtaaacaggaacttagcaaaacttaggctaggggcagtggctcaaacctgtaaccccagcattctgggaggctgaggtaggcagattgctttagcccagaagtttgagatcagcctgcgcaacatggcaaaacctcatctccnnnnnnnnnnnnnnnnnnctagctgggcgtggtggtgcgcgtcagtggtctcagctccttgtcgtggcgattgggatcactctagagtcaacc

SEQ ID NO: 171446 - DNA, 362 bp, Homo Sapiens
  misc_feature (15)..(15): n is a, c, g, or t
aatcgcacgaccagnagcggattatctcatcttcatcctgtaattccagtgtttgtcacgtggttgttgaataaatgaataaagaatgagaaaaccagaagctctgatacataatcataatgataattatttcaatgcacaactacgggtggtgctgaactagaatctatattttctgaaactggctcctctaggatctactaatgatttaaatctaaaagatgaagttagtaaagcatcagaaaaaaaagtgggtattcctacaagtcaggacattctacgtgactacaatataatctcacagaaatttaacattaatacattctaagatttaattcttagattcttggtaaaaccaatgc

SEQ ID NO: 171447 - DNA, 257 bp, Homo Sapiens
accaagtgggagggaagccagggtaaatgatccgagcccgtctatgaaacagcccgcctcagcttgcgcgctgggtgcttactcagtgaagcaataacaactctgtcatggctgacacagctggagctcctccatgttagtcagctgcaggaaaccagcctatgtccattgtgcaagaagagtctgaacactagagacacaggcacacaagattgcatctctactccgctgctccttgtcgtggcgattgggaacct

SEQ ID NO: 171448 - DNA, 350 bp, Homo Sapiens
cggggttgacctagagttatcccaatcgccacgacaaggagcaagcttgggcaggttactttctctgcgccttctgcttttcctaaggctggaatgagatgatccttattttccccttgtgaatgccaacctaaaagccatgcatgagaaggctgaatctcattcagccaggacttgatatatcccatcactggctctggaccttggtttcgtgattcaaaccatgttgctattttcctgccctgtactgaaggcactaaatttgaatgactgaaatgtgggaatgacatgtttggcagattgtaccctcccaaagatgactgcattaaaacctcccgtcctatgcgctc

SEQ ID NO: 171449 - DNA, 380 bp, Homo Sapiens
  misc_feature (144)..(145): n is a, c, g, or t
  misc_feature (197)..(197): n is a, c, g, or t
  misc_feature (240)..(240): n is a, c, g, or t
  misc_feature (271)..(271): n is a, c, g, or t
agatccatcgcagacagagctctaccggactagacactgggccttctgactcttcctccatcaccctctccccaggagatgggagactcttcagagtccctgtggattgataagggaccaagacttagaagcagttggatcaanngcagattctggtggatataattgccaagcagtttcttaaaaagtcccagggncaggggagagttggatactgtgagcatccatgggagagggaanaggcaggattctgaaccacagctcggtgttngggggcagttctatgggctctgagggcttcagagaaaaaagaaactaagaggcaaataggacaggttgggtgggctttctaattgagacaagaggaggctcttggtcgt

SEQ ID NO: 171450 - DNA, 336 bp, Homo Sapiens
aatcgcacgacacagagctgacatgacgatagtgacacaaagcgtgtctgcttggtacttgagaatcagcatggagttctgcaccagacagagcacagtttaggggtgaaaacaaaggctgaaagacaaactgagaagtgttctcagggtacacgaatcaccctttaataaaaccgggttatacaaactactttgacgaaattaggttgaggatgtgtgtaaatgtttgcagtcaggggcctcagttccagccttggatctggggttgctggatgatgatgtgggcatgaagtgctacatttaaattgaacaaacaatgatttaacaaagttgaag

SEQ ID NO: 171451 - DNA, 563 bp, Homo Sapiens
tgcagacaagcagccactagccaggccacatagccacttctgcctggaagagggcagaagaaataggggcagtgctcctactacgcccaccacagcccagatgaacctgtatagatagccccagctcctaagaggaggtggctcacctggtggacctccaagagcacctgcctgatgtcctcaaatgtggtgtgtctgtgagcagtactgagctctacctctgcatccttccgagaaccctttggtacggcacaaatgagcacctctctgcaaggcatcatgctaggcgttagggatatggaaacgtatggcacattccctggccccaagaagcttacaacatgggggaagagagtctgtatatataaatgcctagcactgggccttacacatagcaggttcacaaagcaataggaacagtaggtaacagatgccaaatgatactgcacaagacctacacataccctgtgaataagggctggcccatcgtacttacctggacagatccatcggactcatccaaccctgcctctctgatccccctgttgaatcaggcagtctcc

SEQ ID NO: 171452 - DNA, 890 bp, Homo Sapiens
acgcggccaagggcggaagtgagaaagttgtctgcgtctcgaggcgagttggcggagctgtgcgcgcggcggggcgatggggggctcgggcagtcgcctgtccaaggagctgctggccgagtaccaggacttgacgttcctgacgaagcaggagatcctcctagcccacaggcggttttgtgagctgcttccccaggagcagcggagcgtggagtcgtcacttcgggcacaagtgcccttcgagcagattctcagccttccagagctcaaggccaaccccttcaaggagcgaatctgcagggtcttctccacatccccagccaaagacagccttagctttgaggacttcctggatctcctcagtgtgttcagtgacacagccacgccagacatcaagtcccattatgccttccgcatctttgactttgatgatgacggaaccttgaacagagaagacctgagccggctggtgaactgcctcacgggagagggcgaggacacacggcttagtgcgtctgagatgaagcagctcatcgacaacatcctggaggagtctgacattgacagggatggaaccatcaacctctctgagttccagcacgtcatctcccgttctccagactttgccagctcctttaagattgtcctgtgacagcagccccagcgtgtgtcctggcaccctgtccaagaacctttctactgctgagctgtggccaaggtcaagcctgtgttgccagtgcgggccaagctggcccagcctggagctggcgctgtgcagcctcaccccgggcaggggcggccctcgttgtcagggcctctcctcactgctgttgtcattgctccgtttgtgtttgtactaatcagtaataaaggtttagaagtttgaccct

SEQ ID NO: 171453 - DNA, 922 bp, Homo Sapiens
  misc_feature (853)..(853): n is a, c, g, or t
  misc_feature (883)..(883): n is a, c, g, or t
  misc_feature (885)..(885): n is a, c, g, or t
gcgtctcgaggcgagttggcggagctgtgcgcgcggcggggcgatggggggctcgggcagtcgcctgtccaaggagctgctggccgagtaccaggacttgacgttcctgacgaagcaggagatcctcctttctgtgtacgtggttttagctcctcacctggttgacaatgagcagcaggcaaggagtgggaatgaacacacagggagaccgatcgctgagaacaccgacagttcccctctctctaccagagcccacaggcggttttgtgagctgcttccccaggagcagcggagcgtggagtcgtcacttcgggcacaagtgcccttcgagcagattctcagccttccagagctcaaggccaaccccttcaaggagcgaatctgcagggtcttctccacatccccagccaaagacagccttagctttgaggacttcctggatctcctcagtgtgttcagtgacacagccacgccagacatcaagtcccattatgccttccgcatctttgactttgatgatgacggaaccttgaacagagaagacctgagccggctggtgaactgcctcacgggagagggcgaggacacacggcttagtgcgtctgagatgaagcagctcatcgacaacatcctggaggagtctgacattgacagggatggaaccatcaacctctctgagttccagcacgtcatctcccgttctccagactttgccagctcctttaagattgtcctgtgacagcagccccagcgtgtgtcctggcaccctgtccaagaacctttctactgctgagctgtggccaaggtcaagccctgtgttgccagtggcgggccaagctggccccagcctggnagctggcgcctgtgccagcctcacccccgngncagggggcggcccctccgttggtcaggggcccctctc

SEQ ID NO: 171454 - DNA, 692 bp, Homo Sapiens
  misc_feature (66)..(66): n is a, c, g, or t
aatcgcacgacaagagcagttcaccaattcctggaagcaaagggcaggagaagacttgccgggaanacgaggtaggagacctgctggcaatgagctggctgagcctgaggctagcggatcgactgtaggatggacagacggcggacgggtagacggaggaggcagcagagcccggggagcagctacagactcagaagagtggccgggcacaaaacaagggctgccccatcgacctcgtgtacaagaagggtgggggctgtcccctcatgaatcgctccaccaagttccagcagatcgtccgtggcatgaacccaggtgctggatgtgccgctgactgtgaagatcctgcacaggcgtccagggagcgtgtgaacctggcgcaccgcctgctgaccgagctgcgggactggggcgtggcactcgtcacgctccacggccgctctcgggagcagcgctacaccaagctagccgactggcagtacatcgaggagtgcgtgcaggccgccagccccatgcccctgttcggaaatggggacatcttgtcatttgaggatgcaaccgcgccatgcagactggtgtcaccgggatcatgattgccgtgggcctgctcaagcgtgctcttacggagatcagggcagggcctggacattcgagtcgacgctgaatctgggattacaataggcgacctgggc

SEQ ID NO: 171455 - DNA, 782 bp, Homo Sapiens
  misc_feature (730)..(741): n is a, c, g, or t
ggtggcgatgccaatgccgctggtgcttattatcaggattattacagtggtggctactatcctgcacaggacccggccctggtccccccccaggaaattgccccagatgcctccttcatcgatgacgaagcatttaagcggctgcagggcaagaggaaccgagggagagaagaaatcaactttgtggagatcaaaggtgatgaccagctcagtggggcccagcaatggatgactaagtcattgacagaagagaaaaccatgaagtcattcagcaaaaagaaaggtgagcagccaacaggccagcagcggcggaaacaccagatcacatatcttattcatcaggccaaggagcgggagctggaactgaagaacacctggtcagagaacaagctcagccgccgtcagacccaagccaaatatggattctagggctctggaactgattgctcccaggatctcctgccagcccagctggcctggcccccagcttcacctctgggaccccagctgctctaagcccaggatctctttccccaaggacccagccctcgcctctgcgagaatgaacatatttgatagatttttcttaacaagttagaaaattcagctcctttctgtcctggagctagcaaagacttgtgtgatgcctccgaaggggctctgagttctggggtgggagttttgctctctgtcaggtgtgataaaatgttgaaccctccccaccaccacnnnnnnnnnnnnaaaccagggatgtctgttgaaataaaacattcagtctgaac

SEQ ID NO: 171456 - DNA, 493 bp, Homo Sapiens
gctatatgcctatatgcaatccacttgtacagtgttagttcagtactagagaagttctgcctatatgcctatatgcaatccacttgtacagtgctagttcagtactagagaaaaaattatcttcatttaggtctctacttaaagtacatctcattaatgggatcttccatgaccattctatcaaacctcagctcctcccaccccttttccctattttttttaccattcatactactatttgaaaagttgtattacatacttattatctgtctcaccatgagagcaggggctttttcctgttatactatcctctagcatctagaacaactcagatgtacctcataagattggcagataccatcaatgtgctacaattcagctggacttccacctgcctattagatttaatctcacatatgttagtaaggatggggatgataagaagagacctgtgatccttcatcgagccattttgggatcaggggaaagaagc

SEQ ID NO: 171457 - DNA, 635 bp, Homo Sapiens
  misc_feature (602)..(602): n is a, c, g, or t
  misc_feature (607)..(607): n is a, c, g, or t
cacaccagctcggggttggaggtgctgggcaatggaacttcaaattcaatgtcggccggcagtgaggggagtcgggaggtgaggcctgtaggacaaccaattggtggagtctcagcgatagcccagcgtgagaagtggttcacccagaggggcagggtgggggcctcgggcagatctgtccctcttggcacctctgtcctcaaatgtccaaaatgttggaggacctctgttcatatcccacgcctgggctcttgccagcagtggagttactgtagagggatgtcccaagcttgttttccaatcagtgttaagctgattgaaactctcctgtgtctgagttttgcttgtgcgtgtgtgtgagagcacatcagtgtgtgcaggctgtgtttccccatttctctcctcccttcagacccatcattgagaacaaatgtaagaaatcccttcccaccaccctccctgcctcccagggccctctgcgggggaaacaagatcacccagcatccttccccaccccagctgtgtatttatataggatgggaaatatactttatattttgtatcatcgtgcctataggccgctgccaccgtgtattaaatcnggggngtatggctccttatctggggggcatgga

SEQ ID NO: 171458 - DNA, 502 bp, Homo Sapiens
gacctctgttcatatcccacgcctggctcttgccagcagtggagttactgtagagggatgtcccaagcttgttttccaatcagtgttaagctgtttgaaaactctcctgtgtctgtgttttgtttgtgcgtgtgtgtgagagcacatcagtgtgtgcaggctgtgtttccccatttctctcctcccttcagacccatcattgagaacaaatgtaagaaatcccttcccaccaccctccctgcctcccaggccctctgcgggggaaacaagatcacccagcatccttccccaccccagctgtgtatttatatagatggaaatatactttatattttgtatcatcgtgcctatagccgctgccaccgtgtataaatcctggtgtatgctccttatcctggacatgaatgtattgtacactgacgcgtccccactcctgtacagctgctttgtttctttgcaatgcattgtatggctttataaatgataaagttaaagaaaactc

SEQ ID NO: 171459 - DNA, 583 bp, Homo Sapiens
  misc_feature (83)..(83): n is a, c, g, or t
  misc_feature (96)..(96): n is a, c, g, or t
  misc_feature (121)..(121): n is a, c, g, or t
  misc_feature (189)..(189): n is a, c, g, or t
  misc_feature (222)..(222): n is a, c, g, or t
  misc_feature (275)..(275): n is a, c, g, or t
aaaagtttcaaaacagcttaaaaactgattggaaaaacaaagcttgggaacatccccttctaacagtaactcccactgctggncaagagccccagncgtgggatatgaaacagaggtcctnccaacattttggacatttgaggacagaggtgccaagagggacagatctgcccgaggcccccaccctgncccctctgggtgaaaccacttctcaccctgggntatcgctgaaaactccaccaaattggtttgcctacaggcctcacctcccgaantcccctcactgctgggcgaacattgaatttgaagttccattgcccagcacctccaaccccgactcccaagttccctaaagaaatgagcaaaacacacgcacacacatacatccacacttgcacatgcgcacacacgtcctgtgttaccactggccaaggaaacgcgagtctcaggattccagggcctggacctggggtaaagggctgctctgggactctgccccccaacctcttggaggaccccgagtgtgggggcaggattgggtgtctgccttgactcacaggatctccccaggtcctaaagctga

SEQ ID NO: 171460 - DNA, 735 bp, Homo Sapiens; identical to SEQ ID NO: 14811
  misc_feature (632)..(632): n is a, c, g, or t

SEQ ID NO: 171461 - DNA, 1107 bp, Homo Sapiens
  misc_feature (1087)..(1087): n is a, c, g, or t
cagattctcgcttacaggatgacttcatgtcagaaagggccgatcgggaacgggctcaaagtaggattcaagaactggaggaaaaggtcgcctctttgctgcaccaggtgtcctggagacaggattctcgagagccagacgctggccggattcacgctgggagcaaaactgccaagtatttggccgccgacgcattagagcttatggtgcctggtggctggaggcctgggactgggtcccagcagccagaaccccctgcagagggcgggcatcctggcgcggcccagagaggccagggggaccttcagtgccctcactgcctgcagtgcttcagtgacgagcaaggggaagagctcctcaggcatgtggccgagtgctgccagtgaccgagactcacccgtgcccttgcggcctcctggcccggtgcagctgccctcagggacagggtgggtgctctcagatgccatgggttgagctctactgagagccaaggcccctagaatagttgcggggcactctgatcgttcactttggtccctttggctatggaacaggctgggtcacagggaactgccagtgaggctggaggctggaggtggagatggggtcaggaacatctggcagagggaggtcccagtctgtgtctccatcaggcttaagccagagctatctggtgctggtgtgccagcccctcccccagcctgcctagaaaggggtggctgcctgagggagtcacttgtatggtccccagggtgggagccccatcctgttctatggaataaagcgtcgcctctctgcctcgaaccagtcaaatggagtattgcggctgcacgtcacactagggtggccacccccgccattgcgagccacatgtctgcactgagaaactgcatttcagtagcatttgtcatccagccggaagttaaagcacacttactttattcacctatttttataataaacgttcttgcgtgctgtgacatgctctgatgaatttgtgttcggaacgctggggtgcagggcactgaacagtatttacacgcagctggcatggtgaaaacactcctgcttgttgccgttctgccangggcacccaagacaatgggg

SEQ ID NO: 171462 - DNA, 998 bp, Homo Sapiens
  misc_feature (11)..(11): n is a, c, g, or t
ctggcttgtgngctggcagtgacggtgactgtgttgcatccggacttcaccctgaggctggctacccaggcactcagccagctccatgcccggccatcctaccaccgtcttcgagaggatgtcatgcggctctctcgcctagcactgggctcagaggcctggcgccgagtctggagccgcagtctgcagctggcgagttggccaaaccggggaggggcacctggagctccccagggtgaccctatgagggtattctcagttaggacccggagacaggacactcttcctgaagcggggcgcagatcagaggcagaagaggaggaggccaggaccatcagagtgacacctgtcaggggccgagagaggctcaatgaggaggagcctccaggtgggcaagacccttggaaattgctgaaggagcaagaggagcggaagaagtgtgtcatctgccaggaccagagcaagacagtgttgctcctgccctgccggcatctgtgcctgtgccaggcctgcactgaaatcctgatgcgccaccccgtctaccaccgcaattgcccgctctgccgccggggcatccttgcagaccctcaatgtctacctctgaagcctccttccctgccgtgcccaccccatccaatgctccacgcagggcactcacggctaggacagcattaacacctcatctcccgggtccctggtctgaatccccgtcctaacccctgtggccatccttgccatacatccaggacattgagttggaagactatgatctgggtgggggcaggataacatggcttctctttacccagtgggtcccttcaatgctgagggtggtgagtatgtcactatgcaacgggccctgagactatttgctgtgggctctcctccagcctggccagggcccatccagatgcctctgggggttactcctgtctgcttctggttttctgttggagatctataggtccttttcctggctccttcacatttcctcccca

SEQ ID NO: 171463 - DNA, 817 bp, Homo Sapiens
gtttaacagcataccacagaacatattaatggaataagtttacccataaaagcaggaactttctatataatactttgggacttagacaacaaaaatccttcgttacatctgtctgggtttaagtgtctcatcttgttgggtttgcagtaaaagttaaggagtggcctcctttggaaatgatcattaagtataagggcttttttataaagagagtagtcagtcactatggtaaacttaaaaccaaattcagaggttggggacttaaattagaatatggatctttgcaaaggcggccacaagtgggaaaactgctaataagagcacttctgtattccttgggcactagcagttcactgtacattgtaacagcagctggtgtagaagaatactcctgaggcactgaagaagtaatctggatgaatgaataaaatgtggggcataatgcagaaagtgaagactggtcctttcttttctaaactatttgcattaaagcttgtttgcaatgaatcctatcttgtacagaaaagattccatttgcacatgttccaagtcttgttaaagaaatcacaagagagagagcatcatttagacaatttccttgcacaaggtaacttgtgctcgaatgggcaaagatacgtcttagctatggttaagataatggaattttcatcttggctgcaggtactgcatcgtcctccattttgcatttcactttttgttcttgcttggcccagaaaattttgacttgctggtgaatgtgcttggcctcgcgaagtttcttctgccactgacgcagttcttgaatctcaggatcaca

SEQ ID NO: 171464 - DNA, 417 bp, Homo Sapiens
  misc_feature (350)..(350): n is a, c, g, or t
  misc_feature (361)..(361): n is a, c, g, or t
  misc_feature (391)..(391): n is a, c, g, or t
  misc_feature (401)..(401): n is a, c, g, or t
aaaaggctgtaaagcatgggcagataggtttttattttcaaaatgctgttcttaacacaaaaataaaggctttactatttacttaagacgtgtggtagcttgtcaaaacaacccagtgcaactaactactaggctttcggatctgccttgagggtcggtctgtggcattttaaatgggagaatcttggttaacagcaaaccacagaacatattaaggtaataagtttacccataaaagcaggaactttctatataatactttggggacttagacaacaaaaatcctttgttacatctgtctggggtttaagtgtctcatcttgttggggtttgcaggtaaaagttaaggngtgggtctccnttgggaaatgatccattaaggtataagggnctttttttantaaaggggagtaggtc

SEQ ID NO: 171465 - DNA, 411 bp, Homo Sapiens
agggactgggcctctagatgatgtcgagcggcggcagtgtgatggatatctgcagaattcggcttactatcttgagagtggtcgcacaaaaggggacaaaagacaaaagtaggaaatacagtccttggtctgaacaggtttaaattcttgatttgggggtaggggcagacagataagatttttagttctgaaagagtagagtcaagtgctaacatatatttcagacttgaaaacatttagaaaaatgagtgataggcttgtattggaaatctctatttagtggtaagggaggggcttaacatttcctgcctcaaacttctagaaatcttctggagggtcacatccatgtcagcgccatcccagcataccaacagttgatggaccgcctgccctacatgatcagactgagca

SEQ ID NO: 171466 - DNA, 845 bp, Homo Sapiens
tgcacacacgggctgagatgaacgtgggggctccgcgctgcaggcatgaatgctgctgttcgctccactgtgaggataggccttatccaggacaaccgagtgctcgttgtccatgatggtttcgagggcctggccaaggggcagatagaggaagctggctggagctatgttgggggctggactggccaaggtggctctaaacttgggactaaaaggactctacccaagaagagctttgaacagatcagtgccaatataactaagtttaacattcagggccttgtcatcattgggggctttgaggcttacacagggggcctggaactgatggagggcaggaagcagtttgatgagctctgcatcccatttgtggtcattcctgctacagtctccaacaatgtccctggctcagacttcagcgttggggctgacacagcactcaatactatctgcacaacctgtgaccgcatcaagcagtcagcagctggcaccaagcgtcgggtgtttatcattgagactatgggtggctactgtggctacctggctaccatggctggactggcagctggggccgatgctgcctacatttttgaggagcccttcaccattcgagacctgcaggcaaatgttgaacatctggtgcaaaagatgaaaacaactgtgaaaaggggcttggtgttaaggaatgaaaagtgcaatgagaactataccactggacttcattttcaaccggtactctgaaggaggggaaggccatctttcgacagccaggaagaatgttgcttggtcaccatgcagccaaggtggggagccccaacccccatttgaatagggaattttggccc

SEQ ID NO: 171467 - DNA, 998 bp, Homo Sapiens
  misc_feature (14)..(14): n is a, c, g, or t
  misc_feature (44)..(44): n is a, c, g, or t
  misc_feature (90)..(90): n is a, c, g, or t
  misc_feature (92)..(92): n is a, c, g, or t
ccaagaggtatttncatccttcaaaaaattggaaggaatttggncatttctaattaaaatgattctagagcatccatttattcccagttncnaaaggaaaagaaagaatcagatctatagtcatttaaatatttcccatcagcatttacgtaaacaagtatactaaaaatagtagttttggttgagatttttgcacattaacttcctttagtttgtaagaatcatgcattttggatgtgttctcttatctgacaacacagttttaaatgctgtctttatctgttttgtttgttttactaataacacgtagttttgaaccagtaattacttaacagctaggcatgggggagacagaattggactgagcaccaatcattgttctaccttcagtgagctgtgcagccataggcaactcccagcttctgctgtgcacctgtcttgagctggaaacaggtggcgggaagcattctcaaaggccccttctagcactaactttgtatgttcagtaaatatcagttccctggaccagctccttttattctggtacagaattattcttagcctatgggttggggttggggggacagtagtgtctattatttgtgaattttggaaccagtgtcattactttacagtcaaggaggcatgttagagtgtttggatttttatcccttgataagggcccacatccccacatacagagatgctcaattccaattgaaaaacctcagaatttctaagtgtcaaagcaatagtctagatttttttctgaaaattcaagaaatgtgttttctcaaatctcttttttatcctttctcataatcctgccacttaatgcccagtttggaaccagttatttagtcacatttcaagttagtttttatcatcacttatagttaaggattgtaattaatcttgaatttaaagcttggtgcttttcagttttcttgtattagactgtccttcttcatgtacaggtgtgtaccttggactaggtt

SEQ ID NO: 171468 - DNA, 794 bp, Homo Sapiens
  misc_feature (186)..(186): n is a, c, g, or t
aattatagagctagcttaccgtgtgtatcatgtaaaaaaaattcataagattaacaatttccatgagaatatcataaactcagggcacacattctggccattcctgactaaaaaacttcaagcagaataagcagctataaaatagaaaagaaaaattaaaggataaacggcattgtgaaaaaaaanccgagccacacagatgagaattaaaaattaacagccagcaaactcaaaagaacctttgtcctccttgagatatggtgatgatcaaaaagttagcaaggaatattaatcaaggaattaaagggcattaggaatgctatagtattggaagaaattacatcttaacatttcaaagccccatttcacttaagagtaaaatctaatctgatgttttttactctgaattttattcagtaatttttattcataattcatgataattggtaatgtagtataattgttagtaaatgcagtacaaatggttctactgttttaaaaagttttccgcagaacagtgcatttatggcaatgctatgtttaatgagttagggacatcaaatatatagtagttccttattttcagttgtgaaaatgaaatggctaaagcagaagagacgtctattttagtcttttaaaaatgtgtgtgggtggtcttttttcctcagaagcccaaagcacatgtatattgtgttatttctccttgctatattcctgagactatactagaaactttaagacaaggaacaagaaaggtaacttcatgtgttccccactgctgtgtctagaaccaa

SEQ ID NO: 171469 - DNA, 677 bp, Homo Sapiens
  misc_feature (14)..(14): n is a, c, g, or t
tccacactagtcanaggagcatgactggagtaaaatctaattaacttactaatcaaaatagagtgtgtagatgcaaatttactaaatgtttacatacgaagctctgatttcctactatgtctagtcatggcttaatcggtaataggctacacagtgtagtaattgacaaacatattgtattttagaatgtaaataaaatttatttctatatttagaaaatgaacaagtagaaaagccaagaattctgtgggctctttacttcaatatgagagattcgtcagacatcagcaggagctgttataatgatttaccatccaacgtttatgtctgctctggcccagattgtggtttaggaaatgataatgcagtcaaacaggctgaaacacttttccaggaaatctgccccaatgaagatttctgtccccctccaccaaatcctgaagacattatccttgatggagacagtttacagccagaggcttcagaatccagtgccataccagaggctaactcggagactttcaaggaaagcacaaaccttggaaacctagaggagtcctctgaataatggatatacaccaaactggatacccaactttggaaattctgactggtctcagagtctacttgatagaaggactgtttgagaaatgttagaaagcagcagcaattataag

SEQ ID NO: 171470 - DNA, 1395 bp, Homo Sapiens
cccatcgctttctctcggtctctgtatgtctcccctctatttgaagtctctcgtcctctcgagtcttgacctttgggtgggcatactccctttagtatgtcacggcctgaggatagattcaggctgcgcccctggtcttaagttgttgccccttctgtgttgaccgagatgtaatcatggcttactggctcagcttaccttggaccctgcctttggttattccgtcatcccagggctgcctaagtcggcctcaggcctccctgccctcccctttccttgctggcctccaggcagctgagctgtaatgtgatgtttgagagagcacaggccaagagagaaagacagggtcaggttgctgtgagtggccaccccagaggaatatccccttgagcctttaggcacatgctgcaggtcaggacagtctgcggctccgctgaggagctgccgcggtcacaggacccacattagcttgcacggccaaccaactccttggcttcctcaaggattgtggggaatgtctcactgttcttggacaccttggcaggaacagcagccatggcatcatccttggtcagctccgaagctagcagagatgtgactgcacacccggccttcctgttggcttgacggggccctctcttccgtcggaatgctgcccctgactgcagggcttctagaagactgtccatcacacctgtctcatcgccctctgcattcatgtctatgagttgctctctcttctgctgcttctctagccgctccttctctgccttctccttggctagttttgctcgcctcatcttttcttctgtctcccgccgcttctggttctccttgactgcttgcaaaaacatattccgaaaattgtgaagatccatgaaaaattcttcaacagacaacttcttggggtcaaagaggaagtactcgcccagctccttatagagggtctccatgttagaatgcatcatccgcagcttgttatactgttcctgtgcatccttcacaaagctggtcattttttcaacaaacttgtctttttcatctgtggcagctgggaaattctgaacatcacgttccacatcagaaatttgtttcttcatctgatctaggttcttttgcaagttttcagcagaaactcggctggctttctccacatgggcaagctcgtctggaaacttgaggacatcgggatagtcattctcacacaactcagccaagaagtgtaacaacgtcatcttctgatctgtggacttggtgtctcgaagcttacagaggaagctgatattgaagccaaaagcaccagcatttctggagccagcattcatgtaatttccaacaagcaaggtaatctctaggagattggaaaagctctcactcttacgtaactcctcacat

SEQ ID NO: 171471 - DNA, 706 bp, Homo Sapiens
aacctagtcaaagctccaccacagaactctgcaaggacgacaccacctggactcgagacacctttttggggggttgcgaggctgctgcattgattattgcctgctttatttgttgctgaggtttggttaacaacttggcggagttcagaggtggcctgggcaccctgaggcaaaaggttaaggttggcaaggtgcacagtctttggcacgagtttggcattggccaggctggatgccggcaccacgacagtttgctgctggatggcgttggcagctttaatgatggcgctgctggcactctggacagaggcagcagatatgaccgtggctttcaccgtggtgttgttagcgagcttcaaattaatgacttgggatcctgccgtcttcacagcagacactgggaggaaagcagtagccacaggcttgattgtgacctgtttgggggtgagctctgcaggggaaactgcattggtcacgaccgcagactggagaggcgccctggcgggagaggaaaggacggcagctgatgcgggagacgacagaagggatgtcacagaggccatcacagacaccgtctgctcggaaggtttcttcccaaagtcaagatccacttctggcaatagcctggtcactgttctctggatctccccagaagacgtcttaatgggtattatgcggactttggggattggtgggtgtggaccct

SEQ ID NO: 171472 - DNA, 567 bp, Homo Sapiens
  misc_feature (107)..(126): n is a, c, g, or t
tcacacctagtcaaagtgactcctgtatttcctgggtctagcctatacacatccaccctgttctctttctgccgtatgtctgttcttaacccagaaggcagaatggnnnnnnnnnnnnnnnnnnnncaaagccacatctaactttattgcttcctgttgaaccctctgatatcttctcattgctatcagtataaaagtcaaaatttcttaccacggcctccagagcccctcatgatatgggccctgcatgtcccctaggcattggcattggcatgccttttactgtgtctgctttaggcccactggtttcctttaagtcccaagtactttccatcccctcctccccaccgcacttttgcacatggcctgttatcctctgccttagagactcttggtgatagttccggttagtgcttacttcatcagctgcttctggaccaggttaaaagcccttcccctatgctgcctccaaactgtgcatctcaccttcctgcaagtgtgcgattattggatcctgtcttctcccctcctttggactagtgtggagggatcctctagatcgcctca

SEQ ID NO: 171473 - DNA, 661 bp, Homo Sapiens
tccacacctagtcaaaggtatgtttgcaacatggccatttgtgaaaccatcactgaattaccgagtaaagctctaacaaaatgcaagtgacagccaaggtttctgaataataggatttattgtaaccaattactagtcttattatcctcattataaataacaacaataatgctacgttaatacatgagacaccatgtcacagacgatccactgaccgtgaggccatcgaagaatgtctgaatcaaagataaatcccaagggctctcatgccaagagaatgatttttatatttcagtgctctctacttcaatgctaccactcaaaacacttggaaaatacctcctgtgttcagggacagattattttgttacaaactcagtgatggcaaatctttggtaggtatcttggttctggattttggaaaacaataaaaggacttcattgtcctgtatggtgaataatataggcccccaaattggataacaccaatttggttcaaaattaaagggtgaccataaattaataagattgctttcctggaatggttcaaattagaaacgtatttttaagggaagtttcaaaaatattttaagcagtggcaataatgtttggataatatccttccagtgtgactactctgaagagtactgctttgactagg

SEQ ID NO: 171474 - DNA, 560 bp, Homo Sapiens
  misc_feature (144)..(146): n is a, c, g, or t
acttcgccctcccaaagtcctgggaggtgtgagcatgagctaccatgcctggcctgctgctgttttataattcttatactcaaagccaaatacgactacaaagtcaaatattttcttcaggaaatttcctagattaaaaaaaannntggtccttgactatataaactttgaggagtcagcctttaatgaaactaaaaattctctttgtgccctttgcagaaaggaaaatttaactttggaaaagaaatagccaaagggcccaaccttgtaagtaaggacttggaaataaccttgcctgtaaatcaactggctgaagtgctcagtcctttccaacaccctctcacggtgcctcccttcccttccttcaatccccttcctaaaagacatgttcttagtacctatatttagtgtgctcacaacaagtgggacggacctgacaaaccctgacttctccaaaggaatgctggtggctcatcttggaaaaatgcattcctgtcctgtggtctgagtcacaggaaaagtcctcagtcctccatcttccttgttctctggactaggtt

SEQ ID NO: 171475 - DNA, 916 bp, Homo Sapiens
tcaaagatatgatgagaaaagacaggcaggctcatgtttgtgtagtctaatgggagctccttcaaggagcctggaaacacaggcctctccctccgtgcccagtgaggaagaactttacctgccaggatgtgagcgcggagggcagcacacacaactccagcaccagggtttgctcaggataactgtgccaggactgagcctgggcaaggtgccaccgaactgctcccttctctcacagagacaccctgctcctcactgccaccatctcagaacaacccccgttccacctcccaggctcctctggctggctctggccatgttcttgcaggatccacatagacacacacaggggcctggtgaggagctcagtccggcaaatgatcagcctcatgaggtcggctcagatctgatcctgggacgcccaagtgctccaaggccctggtggctccccgagcccatggcaacagcacttacctgggaactccgggccccttctctgcaagacttcagacgtgtccaccacctgtgtaagtcccctctctcaggcccctcagggctgctgcctcctcggcctcccagcctggctcaggggcaaccactcgctggcaggtaaagctgtgccctgagctctccactggcctctgatcagaccaggtggacacccctcgggcctgagccctgggccatggccaatatcatcggatctgacgagtgattctctgagaggaagatggcctgattccacccctcccagctcctctgtgctctgtccacgtaagccttagatttccttgtgtgtaacatggtccacaactaacgtcctctccatgcctgtcttgagagttgtggctccatatgaggtgacaggaggacaacacttcccaaacggtgagaacagcctttgactaggtgtgga

SEQ ID NO: 171476 - DNA, 439 bp, Homo Sapiens
cctagtcaaagtctaggatttaagtgtgagccactgtgcccagcctacattcttattgtatcacaatatcacagtgggacagaaggaatcgttatgatatattattaattgataacaaattgatataattgatatgatgtttatgattaaaagggtcagaacccttttagtagtaagtcctgtggacacacctggttgctaggaaggttgggacatagagtgtttattctcattggccacagacttactattaccaaggaagaaagggaaaatgggtattgggggacaactggcaattcctgtcacaattgtctgcaaagatagcaaataatctgcctatggattaactaacaatggcagcctccaaagctgtgttgagaagaattctgaaattttacagtgagaagacgatgtgatagattgcttatgtctaaaatgt

SEQ ID NO: 171477 - DNA, 279 bp, Homo Sapiens
tcccacacctagtccaagtgagttaagagacaaattaacttcctgcctgaaataactaaaacactggacaaaatatatgaaacaagggttttcggacattggctatatgactgtgttcaggtagtaaggactgtgaatacttagaaaggggaaacaaagaaggtgagacctacaactgcctcaacttatagatcggagaatttccagaccacagggcaaaggagaaatgcagacagagcctagcagtctccctgacttgaggataaagaactggggagt

SEQ ID NO: 171478 - DNA, 689 bp, Homo Sapiens
acaggtttcatgtggaatgatgaaacattctgagatggatggtgtaatgattatgccacaatatgaatgtgcttaatgccactgaactgtacacatgaaacaagaaactttaggttatatattttcccacaaaagaagtcataaagcacataagcaaatcaaaaggttactttctcagaaatggggtgggggataagtaatgagagcttttttaacgtcaaaaagttaagggaatgaaagaagctgaaaatcagaaatcagagactaattggtaagcagtacaatacctataaattctaaatagtttcatttagtgctgtgtgaacaaatggtaacaaatatgaaaatctctaggataaaatatccaagagggagatggaaatgcaaaatacttaatgaacagaaacctattgtcaagctaactcaagaaatactaagacttccactccttgctaatacaaatctttatatcaaaatctgaaggactagtattttactcttaatctacaatgtttagaaaacttacagggcagattttcctgtgcggggatctatataggtggtagttcttctattgtggtccacaaaatatggaattccatccactgtgaatctcatttcccaaccttcaggtaagggcttttcatttaatgacctgacatactgggtcttcccattgtttcattgtg

SEQ ID NO: 171479 - DNA, 1143 bp, Homo Sapiens
  misc_feature (1063)..(1097): n is a, c, g, or t
ttttgttgtgttgtgattttaggttgctaatttgtagtattgttctgaacagttagaaagctcgaagtacaatgagagtttacagatgagaaggctcagctcctaggatccttatcccccaggtatctagttctgctccttggagactaccaatgtgatcaggttcttccatatatgtcttcagagacagtctaccatatacaaacaaataggaatacatacacattttttcttcttatacatcaattgtagcatgccatacagtttgacaccatgcttttctcaataaacattattatgccttagagatcttttcatctcagtacctaaagcacttcttcattcctttttccattgggcaaattagtttcaccaatcctctgtaatttattatctaaagtgagacattgagaatgaaagcactattaataattatccaagaacagcaggtataaactggtagtgttcaaaaagccaaagcatatggttatcctacctatggcagatatttaggttgcttccaattctttgacattaccaagttgcaaagaatatacttgtaaatacatacttttgcacatctatgtgctttgtttggtaggataaatttctagaagtggaattgcagggcaaaaggttatgtatatgaatttaaaagtttcacagactgccaattgctgtacataaagagtataacaagtcacacttccctagcaggcatagagaatgcctgccctacttattgaataatccttttcccattgtgatcccgtctttataacaatgttttaagccctcacatgtgatgtactgaagtcttttttctgggtgagtacataccattgatatctagttgtgcattcagttctgtactacctttcaaaaacagttaatctaggtttacattaccctttcaaaaatttcttagcaattttcaccaccttatttttccagatgaactatgggatagtttatctatgataccccctcagaaattttaacagtggcagcattcaacatgtaaaggttaagtagctccatctgttatcatttctttttctannnnnnnnnnnnnnnnnnnnnnnnnnnnnnnnnnnaaatctgccacctcatttctaaaagacatttttcatttgtgacggt

SEQ ID NO: 171480 - DNA, 553 bp, Homo Sapiens
  misc_feature (12)..(12): n is a, c, g, or t
  misc_feature (22)..(22): n is a, c, g, or t
atctgccatagntaggataccnatatgctttggccttttgaacactaccagtttaaacctgctgttcttggataattattaatagtgctttcatttctcaatgtctcaccttttagataataaattacagaggattggtgaaactaatttgcccaatggaaaaaggaatgaagaagtgctttaggtactgagatgaaaagatctctaaggcataataatgtttattgagaaaagcatggtgtcaaactgtatggcatgctacaattgatgtataagaagaaaaaatgtgtatgtattcctatttgtttgtatatggtagactgtctctgaagacatatatggaagaacctgatcacattggtagtctccaaggagcagaactagatacctgggggataaggatcccaggagtgagccttttcattgtaaacttcattgtactttgagtttttaactgttcaaaaataataaaattagaaataaaatatttcaacaaacaataaaatgggatatttggggaagaaagttgtctcagggctctccaaagaagcag

SEQ ID NO: 171481 - DNA, 717 bp, Homo Sapiens
  misc_feature (186)..(186): n is a, c, g, or t
ccagcaggactgtaagttatgtcaaaggctgaagctatttaaaacattattttgactactaagtggggacagaaagatccatcctgagttgtggaaacattggtccatgccgtgagcctgtctgcctgtggacacgtgagcttcccggggctcagctgggcttttatcacacattcccgtgaacanctcattgaagtcagcctgtttgcgccatgtgggcatcagccactgcggtcttgggaggacacttatcctgttctcttatttccccttcatcctatttttaacttaaactgctcagatgtttgaaacttctgtcctctttggatgagatcagtgtccacaagtggccgacatggaacatgctgagcagtggctcctctgaatgttcactttattagtcatgtatattttaaaatgctaacatttgatgaatgtaagtttccacattgttgctgtttctgcatttaaacataattgggaacaactgacattctctagtcgactgccagggccttagactccacatgtccatttttgttcaggtatagctttttatagcaagggctgcatctagcttcttttattagaagtgtgtgtgctaaattccttattaatgtgtaatcagtttacattgttttgtatagtgaaggtgtattttcagtgctacccgctagctgattttaactttaggaataaaattagttttaaaagcta

SEQ ID NO: 171482 - DNA, 1184 bp, Homo Sapiens
  misc_feature (963)..(963): n is a, c, g, or t
gttaaaaatggggccagccatttataccatattcttacaaatatttaattccccaggtccatttttgagatggagggatgaataaaggcaaggcctgccccctacccgactacagggacatggctcatgctacttaaaatgactacaaacaatatataaggcattattaatacatcacagacttgattgcaagagctttttcaaacattaaccactaatgattcaatgattacagaattctgcattaactattaaaattttacacctaggaacaaatagagagaaatgatcttttcaacagtactttatttttttaaagcaggtgattattcctctgtgttctgcatcttgattcacttcctgcaggtgttctcttgcttcttgagagagaattcataaatgcaggaaggcctttgccagaaaacatctaaaacaaggaacacccaccagagccagtactgaccatcaaaatatccagggaaaataggtgggaaaacctgacaatcaggatccatttaattagagagagaccaaatcctgaaatggccccataccttcctgcagctgaagtggtcaggcaaaaagacaggaaaaacccaatccagttaaagaggaatgccatgaaaaaagttaacatgaaaatcccatcatttcctatcctcagctggtcagcatcatcaaaatcatcccgacccacaaaatcctcatctctcccaggaaccaaagggatagtagcttcagccttggtcctctccgcttcatcataactgggcagtgttgtagctacattgtaagatgggggctttggaaacccagactcatccttgtagtcaaaatcatgctgcgctctctgcagaaatgctgctgtaaggtggaggagcatcacctgcagcctgttcaggttctccagactcttcttcattctgcaactgctggtaaccggctgccgcaggccggctcganccgccgccagcgccgccaacgccaacgccatggcgcagccggcagcagggaagcagagcgagcgagcgagctagctgaaggggcgcggccgctgcggcttgggagcgctgggaggccgagggggacgcgccttgggtgggtctcgatggccgccgccgctcccgggcgagacgctcttctcaggctgtaagcaccgccgccgccgccgaggctccgacccc

SEQ ID NO: 171483 - DNA, 538 bp, Homo Sapiens
aaggtacccatgtgccaaggggaactgaggcattggaagaccggtcactacactttaattcatgaccatagcaaggctgaatttgccctagacttaattctgtactgtggctgtgaaggctgggagccagaatatggcggttttacttcttacattgccaaaggtgaagatgaagagctgctaacagtgaatccagaaagcaattctttggcattggtctacagagacagagagactctgaaatttgtcaagcatattaaccaccgaagcctggaacaaaagaaaaccttcccaaacagaacaggtttctgggacttttcattcatctattatgaatgacagcactgggcaaagctgaacaaaaatgtgacccttcgtaattactgggaagtctgaaagagctaagcatggagtcaaggagaactacatggtagcttgcctgacagtgttcttaaaactggttgtcttttactaggactcataatgattgtcctcaaccgagaacttgagcttgcagctaagtacttatctcttgatt

SEQ ID NO: 171484 - DNA, 606 bp, Homo Sapiens
cagatgactacaacgagaatcctgaagacaataacaagaacactgatgacaacgaagagaaccctaacaacaacgagaacaccttacggcaacaacttcttcaaacggtggcttctggggcacccatggcaacatagccacggacagcagcgacagtgacaatgaagcagatgaggccagtgatgatgaagataatgatggcaacgaagggtgacaatgagggcagtgatgatgatggcaatgaaggtgacaatgaaggcagcgatgatgacgacagagacattgagtactatgagaaagttattgaagactttgacaaggatcaggctgactacgaggacgtgatagagatcatctcagacgaatcagtggaagaagagggcattgaggaaggcatccagcaagatgaggacatctatgaggaaggaaactatgaggaggaaggaagtgaagatgtctgggaagaaggggaaagattcggacgactctgacctagaggatgtgcttcaggtcccaaacggttgggcaatccggggaagaggggaaaaccggatagggtttccccttttggggatcactctctttatcccccgcccactatcccat

SEQ ID NO: 171485 - DNA, 703 bp, Homo Sapiens
tactttactacccacacagcaaatatttaggactgattactctgtatttctatttttatttccctgtggataaactggtccaaataattggaaaagtttcacatctgcagagacttctcctgaaagttgagaaaatttctactaaattgaaccaatcaaactacatctgttttgaggctcacagtataaactggtaaataagaaaaataattgactattaattttaaaaagcttgacaacagtcttaaaaatttcaacaaaattatgactaccacaactgactaaacgatctacactgtagagactgtctacactcttctgtcactaatggaatcttatataatatagccagtgctctcagccctacaaactatgaacagctcagtagataaatctcaataagcctccacatcaaacagactggaagaaatcaaaagaccgctgagctaagccagaccaggctgatattttggtttattggttaactgttatgcttggaaaggtctaaagcttaattgcaaggcttgaggtgtaagtaaaaaatgcctgacttaagtaaaaatactgatcatagcatctgtcactagttaaaatatgtggagatctttatccaggatattttttgttgtttatattttaaataaatgaaaatagccaatcacacggtgactaaacatgatcatttttcatttggtggggtcct

SEQ ID NO: 171486 - DNA, 807 bp, Homo Sapiens
tcaatgaaacaatgctgtacggtgtgggttacagaatgggagctaagaaactgtccaacaaaggtagagaaatctgggaaataaatataaagaactgtggaaactgattagggcctgaaacacacagctatgaccccttctcaaacctagaaaagggcagtacgtaagggaaaaaagctttaatccttaaaacattgttactttaaattcaagaagacagttcagcctatactatatgcagatcagtggtaattattatgcaaattatacagggcatttggattctgggcaaacagccaatgtggtcaacaatgcttcaaagtctatgcaccaaagtcatggaagggaaacatttggcaggagaatggaagtgggtgtcacagcttcctgaggagagtcaaagaaagtggaaagcttcatctctgggccagtcagttttgaattttttcaacccctccaagtcacataataataagcaagttaacactgtgcaaaaggaaaacacacaaaatcttttaaaatatgactcaaaatattttatacataaaacaaacaaaaagatgttaaatacttatataaaatggaactaaaaacaagacagcaccaggtaatttttttcatgtatgttgataacaaataagaaagtccaactgccaaaaaacatggcacttcaatagctttctgtggcatagcaactgcaaggaaaggctttgtaaagaacaaatctggcccaagttgcttaatgtgaaacggatgtaatccttgactgtacaaagcccttttgtgaagagttaaggagttctaggt

SEQ ID NO: 171487 - DNA, 469 bp, Homo Sapiens
aatatacggacaaaatttaacaagggtctgacctgagattcctaggaaagcttagacccttgtttctctgctctatgcatctcctaaccttctttccttcttcacaaattcctctactccctcaaaccccagcagaccaaacaatagttccagttagtcatgttctacaaattactgatttctcactttcttcctgaatactccaatgccctccaactcccctgtttacatttgtggcactggtcattttaaagacactgtctcaaaacaaaagccagatttcaaggtcaccaaacatctgccagttgctggtttattttgttttacctaagtatcttaaaaataaactttacctatatctcatctgtcctccttgaagcatattccttaacagtcaatggaagtggatatgtgaatacgaaaagcataataatttaattcactaaacaatttcatagtgttatcaaag

SEQ ID NO: 171488 - DNA, 1013 bp, Homo Sapiens
cacaatgaaacaatgatgtgattgacatgaagacccacagctgataacaggcaaaaaacctgatagttattttaatataagtaaatgatacaatttactacatatacatggctatctagaacaaagttagagacaaagttaggatgtggtgggtgagtttccccagcctccatctatagtggggtgccagccactggtggtattgcctaattggagtgaggattctagccagtctttctgaaatgccttgcattcatcctcacagagttctagccctttccactatgcctgcccactagctgtatataattaggaacactccagaacagtggtgctgccttgtagactgagtgaactgggatttggtttcccaagtcattttctcagccttttaccgtgtttaggtaccaggcctgtttgtaaagtagtattgcttaggccagcaaaaattaggggcaaaaagagatgccttgagcttggataatttagaatggagttgcttctccttaagtggccacaaattaatactgtttttcactgattaaggtttatgtaagacatatattaagggtgtcatagtctgagggatacgaagaacttaaagatggcactaaattagaaaatgaaagtggttaaattggaaatttgcagttatttgagaatgggtctttcaaaggtgttaagtctgaggtcatttgttttatatgctttagtttatcagtttgtcagagattgattatttcttttatcattcctgggcagaataaggaatatttggaatatagatgttcaaggagaaattttctaataagaagaactattaaaaacactggatttgtttgatagcaaggagttaaccaaatttgttagtttccatacaactttttcttcccccccaaagaaacttgtagtatatgtaaaccgaatcttcactgtggtagacagtaatgattatctgtttagtaaagggaatgatgagtacacattgttcattgtggtgcagatcctctaga

SEQ ID NO: 171489 - DNA, 640 bp, Homo Sapiens
  misc_feature (391)..(414): n is a, c, g, or t
tgctctacaggatccccaccacaatgaaaaaatgctgctttttaaaataaatttaagcaacatagagggttagagaagaaggcaagaaatctccccaagtgccaccctccagacccagaaatcatatgaacattcttaagacacagttctcaacatctgcctctgcatagttacatgcaatttacaaaataagtattaaatttgattttacttgaatttaactaaagcataagaatctgaaatataaagaaattgctaaactttaaatatctcttcaccaaaagaaatattcattcaaaaaaagaaccattaaaggtaagaaaaaatagtatgaacaccatgaagaagctggagttgttatgcttaaacaatatagagtaattttgtatannnnnnnnnnnnnnnnnnnnnnnnggttagggacaccaaacctctgcacagacaaaaatccacatgtaacttttgacccccaaaaacttaactactaatagcctactgttgaccagaagccttactgctaacataaacagtagattaacacatattttgtatgttagttgtattacatactgtattcctacaataaagtatgctagagaaaagaaaatgttattaagaacgtcataagagaaaacatatt

SEQ ID NO: 171490 - DNA, 148 bp, Homo Sapiens
acaatgaaaaatgaaacagggagaggaggcaggagaaaaatcaatatgaaaacctaaatcaaagcacaagaacaatgccattcaagtgtcaattataagtgggtaaagtgaggctttgtaagtagagaaggaaaaaagacattccagg

SEQ ID NO: 171491 - DNA, 452 bp, Homo Sapiens
  misc_feature (134)..(159): n is a, c, g, or t
atgaacaatgaagaatatagatgaatattcacaaatttggcaagagaatcaactttcagattcaagaagctgagtgaaccccaaaaaggataaagccaaagatatatgttccatgacacataattaaacttctnnnnnnnnnnnnnnnnnnnnnnnnnnttcttgacagcagcaagaaagaaatcataccttagctatagggtaaaacaatttgaatgatagtagatttctcatctgaaaccataaaggttagaaggaagtggcaaaatatttttcacgtgctgaaaaaataattgtcaacccagaatcccatgcctggcaaaaaatatcttccaaaaaatgaaaggcaaatcaaggcattctcagatgatgaaaaactaacagactctgacacaagcagagttactctaaaagaatggttaaaggaagttctttaaacaaaaaggaaaatt

SEQ ID NO: 171492 - DNA, 633 bp, Homo Sapiens
tgagccgagatttgccactgcactccaacccgggagacagagtgagattccatctcaagaaaattaaataataaaagctacttgggaaccatttgatgcattcaagtcttgctgttatgccctgttaggtgggtattaggcagtgtgcaatctaaggctaattttcccctctaatgaggcaagaccttgcttagtcctctacccaatgacctgtgaattctgaacaggcattgttcttggccctgtctgagtgtcaagcactattccaatgcattcagatggttctttccctagaagcaagtgattatgtcacacgtgtatgctgatgtactctgctacatactccaggggttcctctgcagatctccggggttctctctctgtgcaaaactctctctctggtacccttccttataagctgcagttaccttgttctttctggacttagctctgttacaaccaaggaagtcagctggtctcttgtcttagttctccttccctgtgtgatgacctgataaactctcaagtctgtaagctaagcaattgcagggctcacctcacgtttaccatctctcgaacactatcttttgtcacctgatgtctagtgtcattgaaaaaacattgtttcattgt

SEQ ID NO: 171493 - DNA, 940 bp, Homo Sapiens
gggggtccttagtactgcggccgtgtgggtgagttggctgccggtgagttgggtgccggtggagtcgtgttggtcctcagaatccccgcgtagccgctgcctcctcctaccctcgccatgtttcttacccggtctgagtacgacaggggcgtgaatactttttctcccgaaggaagattatttcaagtggaatatgccattgaggctatcaagcttggttctacagccattgggatccagacatcagagggtgtgtgcctagctgtggagaagagaattacttccccactgatggagcccagcagcattgagaaaattgtagagattgatgctcacataggttgtgccatgagtgggctaattgctgatgctaagactttaattgataaagccagagtggagacacagaaccactggttcacctacaatgagacaatgacagtggagagtgtgacccaagctgtgtccaatctggctttgcagtttggagaagaagatgcagatccaggtgccatgtctcgtccctttggagtagcattattatttggaggagttgatgagaaaggaccccagctgtttcatatggacccatctgggacctttgtacagtgtgatgctcgagcaattggctctgcttcagagggtgcccagagctccttgcaagaagtttaccacaagtctatgactttgaaagaagccatcaagtcttcactcatcatcctcaaacaagtaatggaaggagaagctgaatgccacaaaacattgagctagccacagtgccagcctgggccagaatttccccatggttcacaaaggaagaacttgaagaggttatcaaggacatttaaggaatcctgatcctcagaacttctctgggacaatttcagttctaataatgtccttaaattttatttccacctcctgttccttggaaaatctc

SEQ ID NO: 171494 - DNA, 546 bp, Homo Sapiens
cccaaggtttctcaatctggtttgcagttggagaagaagcttcacctccagtgccatgtctcgtccctttggaatagcattatcattgggaggaattgatgagaaaggaccccagctgtttcatatggacccatctgggacctttgtacagtgtgatgctcgagcaattggctctgcttcagagggtgcccagagctccttgcaagaagtttaccacaagtctatgactttgaaagaagccatcaagtcttcactcatcatcctcaaacaagtaatggaggagaagctgaatgcaacaaacattgagctagccacagtgcagcctggccagaatttccacatgttcacaaaggaagaacttgaagaggttatcaaggacatttaaggaatcctgatcctcagaacttctctgggacaatttcagttctaataatgtccttaaattttatttccagctcctgttccttggaaaatctccattgtatgtgcattttttaaatgatgtctgtacataaaggcagttctgaaataaagaaaattttaaaa

SEQ ID NO: 171495 - DNA, 305 bp, Homo Sapiens
ataccagcaagtgtgcagaaggctttgtgaacctgctgagagtgaaggcgtggcaatgtcagtgctaggtttgtccttactaacctggggccatgggaattgataagaccagattcccaactctaccccacaatgtgatccctgtggtgacccctcacagggctctttggtcgagcttcccagaagggatcaccatctgccattgtatgttgaaccccattcattcattcattcattcagccaaccagcaactatttgttgagctcttattgtgtgagaagcagtcttcaaggaactgggtgaat

SEQ ID NO: 171496 - DNA, 640 bp, Homo Sapiens
  misc_feature (71)..(71): n is a, c, g, or t
tgtggtagggttagaacttctgggagtacccattacattataacggtaatgaggaagccacgtttctggtnggagacgtgcctagagcagtggatctcaaactgtaacatgcttccaaatcactgaggctcccctattaaaccacaggtcactgggctgcattctgtgggtccagggctgggcctcggaatctgcatcttgacaaagttcctgcatgctattgctggccagggaccacacattgccttagaaggtgcctaccagaggcttaacctgggtgacctgcttcgactgttcaaagggggcatgccattgaactttagcatttcactggtttaaacactgaacaaaaacccaggccccaaaccaacttgaagaatttttcaattaaaaatgaagcttaggcttgtatccaacccaagtaagcattttatttcctaaagttattttttagtccttgcaagtcatttttttaagaacaaaaatgcaaagacaattttttaaaagtgcgaacttagtctttgaagtgtaagaatgacttttgagaaaagtcatgtcaaatgtaaagtaacacaaatcaaactaagcctaagaaataatcaacttcacaataattaagagtagagaagcagaggaaatc

SEQ ID NO: 171497 - DNA, 1165 bp, Homo Sapiens; identical to SEQ ID NO: 98022

SEQ ID NO: 171498 - DNA, 866 bp, Homo Sapiens
tgccgtatactggatttatagtagtaaaaaagattgaggagtctgaaacaattgagatttctagtaatcaagcagcagccagagaatgggaggtagtgtcggtggctgagtatcaccgcaggatcgatgctctaaatactgaagaactgcgcacactctgcagacgcctccagattactacaagggaagacataaattcaaagcaggttgctacagtgaaagcagacctggagtctgaatcttttcgaccaaacctaagtgatcccagtgaacttttactgccagatcaaattgaaaagcttaccaagcatcttccaccaagaacaattggctatccatggactcttgtttatggtactggaaaacatggcacaagcttgaaaactctttatcgaacaatgacaggtttagacaccccagtgctgatggtgattaaagacagtgatggacaggtttttggtgcgttagcatctgaaccactgaaagtgagtgatggcttttatggtactggagagacctttgtttttacattctgtccggagtttgaggtctttaagtggacaggagataatatgttttttatcaaaggagacatggattcactagctttcggtggtggaggaggagaatttgcgctttggcttgatggagatctctaccatggaagaagccattcttgtaaaacgtttgggaatcgtacactttctaagaaggaagatttctttatccaagatattgaaatctgggcttttgaataaataaaatgctctctgtcttagcaggagaatggcccaaacctgacatggacaagcattgtttggaaagttcaagaagcaatacagtgtaacatgtcacttgtgctttaa

SEQ ID NO: 171499 - DNA, 168 bp, Homo Sapiens
tatacggctgcgagaagacgacagaagggggcacctggaggcgtctgcagagtgtgcgcagttcttcagtatttagagcatcgatcctgcggtgatactcagccactgacactacctaaatatggagacaggaagacaataattccactgacagttgagaaaaacagc

SEQ ID NO: 171500 - DNA, 490 bp, Homo Sapiens
ttgcgatggtacagtaagaaaagctccagaggggaaaagcgaatatgtgaattatctaatctcagccactgatccaactccatagtctgtgacttttggagtcctccaatacttccaagctgcatgttcacatttaaagtttctgggggaaaacgaacagggtagagttttaggaaataccagatgttgctgcgattttctacagtgaaggggcgtggaaggggacaatgggagtagaatgcgggtttctgaagttgtgtttgtacttgattttaagcaagctgtgaacaactcgtgtccaaataagtggctgagaggtggtcctaagtaagcacaagtttagtagtagagtactcgtaacacagaactggctgaaaccccgccctcttgtctacgggcgttctttcagggcgactttgtcagtaccccaaactgtccccgcatgaggtcactctgcacggtcacgtgctcgagcccgcgggagcgccac

SEQ ID NO: 171501 - DNA, 453 bp, Homo Sapiens
cgatgaaagtcaaccacaaaggagaaatgccagacatgacaagtgaagcaatatgagcagaagatactcagcgaatgactgtttcattcacacaaccatcagaagccaaaggactacaacaacattccctcccatttaagagctcacagactcaaaactatatccacaggttccagcagtatatcattggatttcaaggtctccatgtaaaaactaccccattaataaccgaattctgtcacttaggaggtcacaaaatcagacacagacatgtgacactgaatggcagtactagttatgaagagacattatcaatcagtgcccagttaggaaaacagaaaccactctaggtgtttcagagtgttagcagtgatggaagagcaaaaggggatggttgaggtgaaacccatgtgaccggggaagcaaaaggaaaattgatattccccggagccc

SEQ ID NO: 171502 - DNA, 369 bp, Homo Sapiens
ccagaggatccccggcgatgtacatgtcatagttaggaagaccaatgtcataaaactgtgaagatcactcaaagactcaagtcaagaaaacgccaagagttcggaacgaagagccttccctaacagatatttccctgaacagatatggaggttagcttatccctaacagatatcaagaaaattggaggtattttccttttctgttcctatgaaggaacatggctttaggagttaacactcttggctctctccatcctctcactctctcagaggaggaggcactttcctgattggtgaatctagagggcaaaatagcaactgagtattcttggctcagccctatctgggctcctgaagaaaagtcacctg

SEQ ID NO: 171503 - DNA, 484 bp, Homo Sapiens
catgtctgtcacttgatcaaggctcctccctgatacttctatgccactaacttctctaactgcatcattaacagctaatagtcctgtactttgagccagacctcctgggacaagcctggatatgaagatccctggaccttttctaagccatgtggtgttaccctgacactggagccatcccggatgtagaatcctaggggtttctccgtgccgtatttgtaaagacgtaccctacgatgcgtctctgggagaatatccacgtctataatagaagacacaggtctaaagtcttggggcatactaatgactatatgtggcttttttctatggttgtcaggacgcaatacgttggttaaaacattcttcttctttattagcgtgtctgtaccaaaggcactgtagtctgcttcttccttcttttgtataaatatcctaagcagtggattggccgttgaaacagctttgtgatgttaggtctaccttg

SEQ ID NO: 171504 - DNA, 300 bp, Homo Sapiens
cggacccgcttacgaggcacataatcttcagccgggcgcttttcggcggccgcggctggctctctggctttgcctgggaggctggcttgccctcgccttgtggttgccctcaccttcggacctgccctgcttttcctggcttccctcatcttccagttgtccctcatcacctggctctccctcatcctctctctttccctcgcattctgtcttcccctccacgtctggcttttcttcctcgtctgactttccttcatcatcaggctctacttcatcttctggctttccctcgttaagctt

SEQ ID NO: 171505 - DNA, 195 bp, Homo Sapiens
tgaggatcggtgtggcaaggaacaaaatcaatgaaattggcattaaacttgtaaaagggccaaatggacacaagccctcgagggtctatcgtgaagtgcttgggggcaagtggcctcaaagaaacttgggagtgagaggtttgcactgagcttgggaagggagccttgggaaaacaccacacttgtgaaatcagg

SEQ ID NO: 171506 - DNA, 287 bp, Homo Sapiens
acgcttatgagggtacatcgggggagaggagaggagaggagagcctctctgtgccttggtttcccatttgtgcattcaaggcctctgcaggcctcacacagggagtctgaggggatagtgtttaagtgagcactcaggcttcctctgaggaaaagaaatgaccaaagtgcagacttttattactgccattcctgctcctaatgggagcaggagtcaaaaggaaaaacaaattaaaaggggctaatgagaaaggaggagagatgagacagagagtgtgcctcgttaag

SEQ ID NO: 171507 - DNA, 690 bp, Homo Sapiens
aaggatcccaagcttaacgaggcacagcaagcagaaacatacattagcagtcaaaaggttagtgttgcatacaaatatagctttccttttttgtagccttggcaaatagccatagggatgtaaaataacattctgtagcagcaggtaaggaaactatggagcactcaccagtggtacagagcacattaacgaaaagacatgagagtggattcggctactttagtgcaaaatgtctaggacagaactgtaaattcagttcagttactaagaagcaaacactagaacttgatataacttccaaaagcgctcactcaagtagtagtacatattattctaagtgacaaaaaggtgctaagttatttacagatataatggttgtacagtaccttttaaatctgcaatttaggtttcagattttccattaagaatgaactgcactgaaattctataaattatacttaagcaattcagttatgagagtttacaaaaaagagataaattctgccatccaaattattaattatagttcaacaataatctcaacatcagcaaccattgtagttactattatctgacttgtttgggcgtcttctagtctcacgtacttcacggttcacaaaatcatcctgggcataggaacagatccaacttttatgaaacaacaattagactgcaatcaacttaaaaaaa

SEQ ID NO: 171508 - DNA, 450 bp, Homo Sapiens
gacttagattgcgcctgtcataaataaaaataaattctagatagaaaaacatttttaatgttaagagttcccgttatggctcagcagtaacaaacccaactagtatacaagacgacaggggttcgattcccagctctgctcagtgggttaatgatctggtgttgctgtgagctgtggggtaggtcttggatcagagcccacgttgctgtgccataggcctcgttaagcttaagcttaacgaggctgaacaaggcaacttacctctctggccacagttctctcaaatataaaagaaggggatgtgtattaaactggtatacactttgctcacagctctaaaatccctattcagcagtgaatctgtttctagaacatgtcaaaaagtttcccacatttggagatcctgttgtacctcagcagtttaagatccaacacctataagcgtggccg

SEQ ID NO: 171509 - DNA, 427 bp, Homo Sapiens
gaaagaagttaaagcaagaagagagagaggaagtctcagtacatatattggctgattcccttggggttacgataagtggcagggcccacggcgtaccagtgaaaaaaaggaccaaccgagtaaaatccaagattaaacaacaaagctctcgcgccgacggagctccctggctctgagttacaagtttcccaccaggaggcctccagggtggtttggaacatcccctgggtttgaggctgactttggtgagctgtctacacttgtgtttagtggcccttggcctgggtcccaatggcctgggcagcgacgagcggatcccctggtgctctcctggtgcgcctggggtcactcacgtgctgcagcaccttgcgcggcaacttctcggagttggcgatccattctttcataaagttaggatgagggggtg

SEQ ID NO: 171510 - DNA, 716 bp, Homo Sapiens
  misc_feature (157)..(157): n is a, c, g, or t
  misc_feature (268)..(268): n is a, c, g, or t
  misc_feature (360)..(360): n is a, c, g, or t
ccatttctactaagatgcaaacaagaagaaatgtttaaactgcaataagtcaacatcagacataataattatttgctgcagaatgaactagcaacagagtttcggaaatctcctctcactacagagcatgaaatattgtcaatcacaaaaccaggantcagttaagaacagctcagactgcaggtaacttataagctaaaaaacttgctaaataaatgggcttttcccccaatttttaaaattctgaattcataattatgtgtagaantaacaatcaatttataaactgaatacaacatactttaaaaacagatggcccatatctgctgatcctacctcagcatcacttttctagatatnttgcagaaacaattacatttacaaaaggcccatttcataatgcaatctggttactaaaccaaatcaaactactcgaagagcagaaggtctgctgttgaaatattgtaaaatacctttggaaaaacggtatttatagattagcttttttaaaaagggataaatatgtggaagtaattctagcatatccctgaaaataattatactgccacctatgcattttttatgaggtggaaggataaatcaacagactgctagattatacaagccaattattcctgttgaaatttgggcataagacaaagggactttctccatatgaattcttactgtatcccagaattaactggtgccagcag

SEQ ID NO: 171511 - DNA, 512 bp, Homo Sapiens
  misc_feature (112)..(181): n is a, c, g, or t
aagcttaacgaggacattagttaaattgtatttctctttgtagtcttgggtaatgtacttgacacacagtagatactctgcaaaaaaattttgtttttctttttgagatggnnnnnnnnnnnnnnnnnnnnnnnnnnnnnnnnnnnnnnnnnnnnnnnnnnnnnnnnnnnnnnnnnnnnnngtccaagcaattctctgactcagcctccagagtagctgggaccacaggtgtcttgccaccacgcccggctaacttttgcatcctcagcagagatggggcctcaccatcttggccaggccggccctgaactcctggcctcatgagagccagcggacccagctgatactctgcaaatgtttaatagatgttggagctgaatttcaggctttgtaatgtcacagaaccaggcatcagaagagctgatccaacccaagatctgcccctaacttgcctcttattctttctggcctctatttccacaattataaaatgcagctcgtaagcttgggat

SEQ ID NO: 171512 - DNA, 554 bp, Homo Sapiens
gcagacatgtaaggtgacactaccacgtcaaataagactacatagtttgcttccttttgacagactgtgcttgtccttaaacataggttgtcaacgactaggatattcgagtgtgcaacttccgtatccattgtccacttctgaaccagaaattatgtgttgccaaaaccaaacccaggttcatgaatatggtgtctattatagtgaaacatgtacttcgagcttattgtttttatgctgtattaaatatttgcagggttttaaacactaatcacaaactgaatgacttgacttcaaaagcaacaaccttaaaggccgtcatttcattagtattcctcattctgcatcctggcttgaaaaacagctctgttgaatcacagtatcagtattttcacacgtaagcacattcgggccatttccgtggtttctcatgagctgtgttcacagacctcagcagggcatcgcatggaccgcaggagggcagattcggaccactaggcctgaaatgacatttcactaaaagtctccaaaacatttctaagcctactaagctt

SEQ ID NO: 171513 - DNA, 138 bp, Homo Sapiens
agcttagtaggcagcaaaaccaacagcccaaagaacagtgttcacaagctagatgtgtctagaagcccccctctctgaggttcaaaggccacatcactttgatttgtgagtaacggctgtgagtaacattcactgggt

SEQ ID NO: 171514 - DNA, 972 bp, Homo Sapiens
  misc_feature (646)..(646): n is a, c, g, or t
aagcttagtaggccgctgctgagtggcagtttacagaagaggtcgcggggtgagcctcttagcaggacagaaaacaaggcagcagcgcacctgccaccccttcacgagctgctccttgagcctaaaaagtaggctttattcatcccttctgttcatttaccaacctgggggattgatacgaccggggaaaatgttcctaaaccaggaagctgcgttagccgatcaggctttgtaagatctcgccaacagctagctgcttaggagtacccccacgatacgcacagcacaccactgtcccttcactgcactttcttcctgccttaggtagttgggcttgcccaccctagtttgcttttgtagtggtttggcaaggttagaaggcctcggcctctctgtcatgctgggaagtgcctactctctgggccactgctgcagaggccgtggcacttgtcatgggtttggaagacccagccatctgcagcagaggcagcctatcccattgcaaggagaggaactgaacggagtaattattctactcttctttttacataaatgtttatttaaatattctaaattggattttctttcacagatactgattattctttccagttcttaaataaaactgcacttgatttcactcccncgacagggagcgcgacagcaaacacccgagcgcacaaaaaccagacccaacacttcccgaccacaccacccacacgaaagccacaaggcggggcggcagagtcaccaacacactcagcgttatcaacatcacaccttatgtgcgcggcgtccccactatcgtacccaggcactccgaggcctcccccctgcgcactgaagcgagtcgccggcataccctgccccttgggttcaaccgagaagaccccggagtccacacctagcccccgttcagggaatgataagcactcacgtggctctagtaagaaccacccgcgcaacctcatc

SEQ ID NO: 171515 - DNA, 608 bp, Homo Sapiens
aagctttggtcagtgggtcagtgacctgcacggtgattctcccacctccaaaaggtaggggtgggactggaggcgtccctaggtcaggccgttgagttcgagctccgatgggccaccttgaatccaggactgaccgcccgtgtgtgcacagtttgttcttggacgaggactcgtgaggatcgagggctggggaccccggtgtgagcaggatggggccctgccctcccgtgggagttgtggactcgagcccaggggctgcccgtcacagcggtgtcccaggtccctgccatccgattttacctgggatgtcttctctggagtttggaattgcttgaggaaccctgcgtgtgcttggagaggccagagggcttgctgagaaccccatggacagtggagagcgggattcgaaccaagggctggactcccacacctctggcctgcgtcgcccagttctttgtggctctgaagaattggccgctgtggaaaagagcaaatgtccgagacccccaacagaagagtctaaaaatccagttgcaaccacttctgacctacaaaaaaatggaaatttagtgtttttcagcctaagacattaaatttcatatcagaac

SEQ ID NO: 171516 - DNA, 823 bp, Homo Sapiens
ttccacgagggtgttctcgacttcgtcgctgatgcttgctctgtcaaggcacagcctattgtctcctttgctcagtgtgacatcattcagacgcttctacagaggtgacagcccaacagattcccaaaaggacatgattgaaatccctttgcctccatggcaggagagaactgatgaatccatagaaaccaaaagagcccgcctgctctatgagagcagaaagaggggaatgttggaaaactgcattcttcttagtctttttgctaaagaacatctgcagcacatgacagaaaagcagctgaacctctatgaccgcctgattaacgagcctagtaatgactgggatatttactactgggccacagaagctaaaccagccccagaaatatttgaaaatgaagtcatggccctgctgagagactttgctaaaaacaaaaacaaagagcagagactgcgtgccccagatcttgagtacctctttgaaaagccacgttgagctgtgctccacggccctggcatgggggttcagtctgtggatggtaactacttatgatggacgttagccttgctttccggcttcttagatgcccagctgcccctaccccagaccactggtcctgcctccagtggatggacataacccctctcctaggacatacatgtaaatggcacaaaggggactcatttctcatacttttttttggttcaacttctgaacccctcaaaaagtggaatttgtccaccaaccgcttggccatgccagggcttttgcctgggcctggctattctcccaaaaaggcaaagttctggccacccgaaaagg

SEQ ID NO: 171517 - DNA, 1090 bp, Homo Sapiens
  misc_feature (74)..(74): n is a, c, g, or t
cgttgtgcgcacaccactcctgcctgtggccctcattctgcctgctgtgcctttgaaggattcagctcaggagnctgggatcagcttcccttcgcaagaaggacccataccaggttggaatcggggagttccacttcaacaaagccctgggccactgaggcggggagctgcagggaggccgggaggctttccgtacagcacgcacagctggctgcctcttttctttgagtacacttgggctgaggcaatgagcaagcacaaactgcttcgcctgcagtgccctctcgtggcagacttgcctctagagatagcagccaggcaaagcctgcatgccagcgctgctgacaaatcactttttgaaggctcagagctgaacaaaaaagtatgagaatgagtcacattgtgcatttacatgtatgtcctaggagagggttaatgtccatcacttgaggcagaaccagtggtctggggtagggcagctgggcatctaagaagcccggaaagcaaggctaacgtccatcataagtagttaccatccacagactgaacccccatgccaggccgtggagcacagctcaacgtggcttttcaaagaggtactcaagatctggggcacgcagtctctgctctttgtttttgtttttagcaaagtctctcagcagggccatgacttcattttcaaatatttctggggctggtttagcttctgtggcccagtagtaaatatcccagtcattactaggctcgttaatcaggcggtcatagaggttcagctgcttttctgtcatgtgctgcagatgttctttagcaaaaagactaagaagaatgcagttttccaacattcccctctttctgctctcatagagcaggcgggctcttttggtttctatggattcatcagttctctcctgccatggaggcaaagggatttcaatcatgtccttttgggaatctgttgggctgtcacctctgtagaagcgtctgaatgatgtcacactgagcaaaggagacaataggctgtgccttgacagagcaagcatcagcgacgaagtcgagaacactgtagacaccgccattttccccacctccc

SEQ ID NO: 171518 - DNA, 422 bp, Homo Sapiens
tcggtcggcccgctcgttcagaaactccaagacttaccagagcacagtgatcccgaagtgagagataaagtcatacgatgaatactaaaactctgaatacccctctgttctcataaagcctcaaacagttttttggagttgcaatatgaaaccaatgcatattgtaattataaattcaatacttatgttttccatgttgattgagggaggcaattttatggataccaattaatcttgagatcctgaacatgtgctgatttttattgcgctatatagtatataaattgagatatttttggtatttctgcaacgtgacctgataatgaatctattcatcctgagtaagctatacttctgtgctttatattgatatgtgtattcttttgagattttatttacatgttgttaataaagttgcatgc

SEQ ID NO: 171519 - DNA, 231 bp, Homo Sapiens
tggcggacacgcttggtaggaagcattatcatctccagcgtctaaaggggcagggaaggattattagaacccagaaagatgtgtaactatagatggctggcagagagggccattattgaatacaagttgtgaactactcacaggaacatgcttcggcaacactaaatccagcaagagggaactagcttttagggagatcctttctgatgtccctcccactgaccaaagctt

SEQ ID NO: 171520 - DNA, 287 bp, Homo Sapiens
tggcggacacgcttggtaggctggctgaactcctgatctgtgatcatcgcgtggcctcccaaagttaaatttattttatgttctttattggattgttctagtagactgaactttatagggtctaatgctgttgttagtttgctgatttttgttcatggtacattgcttcaattttgtcaaaaatttgagttcctcttcagtgagactttatcaatggacatatgtctctagagagagtttgtgattacttcttctagatatctttgggggtattctgaccaaagctt

SEQ ID NO: 171521 - DNA, 476 bp, Homo Sapiens
  misc_feature (274)..(274): n is a, c, g, or t
cggaccacctcggttaggcatactggcagacttacatggaaggtccctacttataaaggtttgactcaggatttttccactttctgatggtgagaaagcaatatgcattcagtagaaactgtactttgaattttcatctttcccccggctagcaatatgctatatcaatactctctcaagatggtggcactctctctcaatagtggcaatgagccataggtcccagacagccacatgatcatgtaagttaagaacacaactggatactcaacangtatactgtgtgggccagatgatttctgcccaactaatgtaaatgttctgaatacttaaatattaagtgctaagttcaatgttgggtaggttaggtattttgaatgtatttcaatgtacgatattttcagcttatgatggtgttattgggatgtaactccatcacaagtcgaggagcatctgtactctactgaccaaagctt

SEQ ID NO: 171522 - DNA, 588 bp, Homo Sapiens
gtgttaagatgatatggtactagtacatgattcagtcgtggctaggacataggtgatctcaggactaagatcaccacagatgggatgcatggctgtggccagactcgcatcatggcctctgacattattcctttccactgtctacttgggtaaggaaaacataacttggctattcaattaacttaccagcggcagcactcaaatctagttgactgtaatggctgtagcagaaagtacattccacgtccttttgtctgttctgccaaaataaataatagggattctgataatgttgaataactacaattagatatgaggagtttggtttcagtccagaaatagaaaaactattccatttttatacactatcctcgcaagtaaatcctgtattgattcttaaatgtggagaatcttactcagtagaatgatcaggagagtctatttgaagctcaggtgctacttctgagtgagttccgcttgtactgcattgtatgcattatactgggtagctttgaaagtgaagcaccctcccaaatgaagctgactgtttgtttgttaatgagaatatactagtgctgaccaaagctt

SEQ ID NO: 171523 - DNA, 473 bp, Homo Sapiens
aagctttggtcagtagagaaatgcaaataaaaatcacaataagctatcactatacacccactagaccggctgaaatttaaaagagctacaataccaagcactgacaaggacatggaacaactggaactctcatacctaccttggtggttgaattgtaaagtcgtcaactactttggaaaatagtttgtcaatttcttgtaagcttaaacatatacttacagtagcatgtagcaatcctactcctaggtatttcctcaaaaggaataagaacatatttctacaaaaataacttgtatgaaaatgcccatggtgcatttagtcataaaagtcagacactgaaaacaacccaatgtctgcctatagctgaatggataaacaaaataattcaacttagtatttaaaaaaacaaaccaataatacacacaaaatgtgaacgaatatcaaaaagcttatgcgaacaaagcgtggtccgg

SEQ ID NO: 171524 - DNA, 1003 bp, Homo Sapiens
tgtaccggtcggaagccgcttatatcgtcgacccacgcgtcggtggacccaagctttactactggcatcacctgtctgggttcaggtgtctgctctctctgctgtcatgggtgtgactatgacagctgctattgggggtgctgacatgcccgtcgttatcactgtgctgaacagctactcaggctgggccctgtgtgcagagggcttcctgctcaacaacaatctgctgaccatcgtgggtgcactcataggctcgtctggtgctatcctgtcatacatcatgtgtgtggcaatgaatcgctccctggctaatgtgattcttggaggctatggcaccacttcaacagctggtggaaaacccatggaaatttctggcacacatacggaaatcaaccttgacaatgcaattgacatgattcgagaagctaatagcattattattacaccaggctatggtctctgtgcagccaaagctcaataccccattgctgatttggtaaagatgctcactgagcaaggcaaaaaagtcaggtttggaattcacccagttgcaggccgaatgcctggtcagcttaatgtgctgctggctgaggctggtgtgccatatgacattgtgttggaaatggatgagatcaaccatgatttttccagatactgattggtccttgtaattggagctaatgacactgttaattcagcccagctcaagaagatcccaactctattattgcaggcatgccagtccttgaggtctgccaatcaaagcaggtgatggtcatgaagaggtcttgggtgtggctatgctgcaggtggacaatccaatcttctaacaaactaggaaggccatgcttctaggtgatgccagaaaacctgtgacgcgcccaggcggacagttagagaatcctatcagaaagtacttctcaagggttcagcggacgctagtaagtccacctcgggaggttgggaacaggcaataagtatacgttcactgcggcataaacaa

SEQ ID NO: 171525 - DNA, 252 bp, Homo Sapiens
atactcgcgcgactccatccactctctaccctacatgtcactcctctgcttaaaaccaaaagatttccactgtacttagaaaaaaactccacattcctctctctgacctacagactctatgtgaccaaaccccaattatccgacctcatctcctaccactctttccctttcttaccatactttagccacactagcttgctttctgttccttgactatactctcagttgatttctgccctgcggtaaaagctt

SEQ ID NO: 171526 - DNA, 247 bp, Homo Sapiens
acctttctgcacaacaccaaagatattacacgaaacaactccctactaaaatctaggtaaaggtttaacagctagtgaaataatttattgcagaccgtatttattataaatgaaactgtaggctcattctactgtatccacactccctcacaatcttaagggaaatacaataaatccactttcttctcctacaaatgatatatagcacatctggcaaggagtagtccctttactccttcttcttatc

SEQ ID NO: 171527 - DNA, 480 bp, Homo Sapiens
accacctgcacatttaaaattgtgaacctctctatatacttcagtaacttttcaaagatttctttgacacaaagttctcagaaatcttaaagctagcatttcacaacagaaaaaaagagcttctggttcactggtgaaattttactaataaaatttaaaaacaaaaagctactaacacatatcagctcagaacaaagactaaacactaccagcagatctttcctttaacctcgtgaagcactgggattcattctttcggcaaagaaaggatgaacaacactgtaacccaaagaaaagataccactgcaagaaaagacttcttttcgaaagcagctctagcagcaaagataggaggaaagcaaggaaaccatgccaacgtcttggttaactcttcggagaaaggacgccaatgagaagatctaacaagccagaaagacagataccgggaaatcacagcaactctttggagtgcaacaccaa

SEQ ID NO: 171528 - DNA, 448 bp, Homo Sapiens
  misc_feature (422)..(422): n is a, c, g, or t
  misc_feature (434)..(434): n is a, c, g, or t
tcggtccgtgggttcttgcagacgtcagggggtcgtggcggccgcggcgagggccggccagcccgcctgagatgatgtaggactgcgggttgtaggtccggtgggggttgacctgctcctgcagaaactcataggtgatgaagtggatggactggaaggggatgttcatggtcagctgcgtggtgtagctccggtagaaggcccccaacccctcggtcctccacaccgtccggatgcagctgattgctgaccggtgctgcgagttgtacatctgcaagcgctgcttcaccacttctgctggattcattaccgcatcgtgggagcagggtgggccatactcccagctattccctggcaaaacaaacttccagaaaatttacccttttgcgattcgggtgttttttagggaagtttctgggggnaaccttaaaatnaagacgggaaccca

SEQ ID NO: 171529 - DNA, 549 bp, Homo Sapiens
cctcactaaagggaataagcttgcggccgcggcgagggccccggccagcccgcctgagatgatgtgggactgcgggttgtaggtccggtgggggttgacctgctcctgcagaaactcataggtgatgaagtggatggactggaaggggatgttcatggtcagctgcgtggtgtagctccggtagaaggcccccaacccctcggtcctccacaccgtccggatgcagctgattgctgaccggtgctgcgagttgtacatctgcaagcgctgcttcaccactgtgggttggaaccgcggggcaggccagacggacagccagtgggcagtgggttggatgtggccccaccccaggtcggaatgaagccaagccataaagagaaacaagccagttagacaccggaaacaggcgagagcaagcacacacagccctagtctgagcagccgcggagggccagctcccggcagtcctagggttaaaatccatttttatctccaggactcacgcctggaaggtggctatttccgtctctcctgcctgaatcttgctga

SEQ ID NO: 171530 - DNA, 474 bp, Homo Sapiens
  misc_feature (33)..(33): n is a, c, g, or t
  misc_feature (39)..(39): n is a, c, g, or t
  misc_feature (51)..(51): n is a, c, g, or t
aactccataggtgatgaaagtggatggactggnaagggnatgttcagggtncagctgcgtggtgtagctccgggtagaaggccccccaacccctcgggtcctccaacaccgtccgggatgcagctgattgctgaccggtgctgcgagttgtacatctgcaagcgctgcttcaccacttctgctggattcattaccgcatcgtggagcagggtggccatactcccagctatccctgcaaaacaaactccagaaaattaccctctgcgatcgggtgttctcaggaagttcctggaacctaaaatcagacggaacccaggacttagctttctaagaagcaaaatgtactacccagtccgcccaggtgagcactgactcttaaaaccctgaagtgatggtggaaatatgataaaaatggggatggttaatttaggcacactcaaccacattttaatcttgcaaaaacatggttttctt

SEQ ID NO: 171531 - DNA, 299 bp, Homo Sapiens
aagcttgattgcctttgaccagggatattatggtttactctagaaagttctagaatcataattataaactttgtttagtagggatctcaaagactaattacccatctgatacttagatctagcaatggagaaactcactacccacagaagcagtacatttaatctttggactgcccagattgtgaaaattgtgtattacataaaaatctggctcatatatcttcaaaacatcagccctacttttatcactaaggaaacagtgaagacaactattgtgttttcccttggcaatcaagctt

SEQ ID NO: 171532 - DNA, 911 bp, Homo Sapiens
gtgggtcatccagcttgctccaggaaccctaacattatcacataggtctaacttgtttccagaatgaaatcgcaacatgtccgtgcggcaaggccacttcactctgcatttctgtgtacaaagtccagtctcctgaacctaatggacataaaataccttgcagccaggtctctgtcctgtcactgtatatttcatggtgcctaacggtgctttgtctgaatggacatgaaatgagaacacactcccagcttccaagaaagatgtgtattctccctaacaacaacaaaagagacctaaatgggctgctccctgaagagagccctcagctcttttaccgtgatgcacactcggggctgggtgtaggctgtgtgatcaaatgtatgaaggaagaaggaacggagagaacgtgggcaatcaaggcctggcactgccctacaggaggcttacaggtcacactcccagaactgtctctatccccatgcctctcctagtaagattcattacctatggtttcaaagaaagtgcagtttctagggagtgaaggaacacgtgaaatatagaaaataaagacagaaaaacacacaaattattaaataaaatttaaacaatagagggaaaaaaagtgtagttggttctgcaagccacagcccaaagaagtctatttcctcccacaggatggctagagtttaggagccacgttctcctctatagctcaccagaggatgcagcctgaagagctcagggtttgaaggttgggccttgggcgggagtcagctactattcctagctgttctagaaagacctagaaacttcctgtgtgaaaacaggattaggaagctctgggggtgaaaatgccatgcacggagctggcccatgccaagtcccttctaactattttaaattacatcttt

SEQ ID NO: 171533 - DNA, 505 bp, Homo Sapiens
  misc_feature (27)..(27): n is a, c, g, or t
  misc_feature (59)..(59): n is a, c, g, or t
  misc_feature (456)..(456): n is a, c, g, or t
acaaaacacagcacctggtagaacagncttaagtgtcagagacgaggaatcaagctggnacctgttctccgcactgggtcgatgcaaagcggtcacttcgtagattgtcccaagggacaaatccttcagaaagatcaggaaatcaaggacctaaaacagaagatagccgaagtcatgggccgtcatgcccagcataacatacagtgccgccaccagccccctgagccctgtttccccccactactcttccaaatttgtggagaccagcccctctggacttgaccccaatgcctctgtttaccagcccctgaagaaatgaaggccagctgtgtgttgtgcccaaaaatttggttaccggaaggcattgcaaaggagcgtctctggcaatcaagataaaaaaacagttttattgtattttttggactgtatctgttgttatttttaaaaggggggtanagatacattcaagtttgatttgacttgccattagtttttttgtaatttt

SEQ ID NO: 171534 - DNA, 320 bp, Homo Sapiens
aagcttgattgcccatacctacattataataatgctgtttacaaacaaaccagaattcacaaagtgcttggctcttcaggaaactgacatttccagagatccctaaactaatcaactagttctgccaaaatacccggggcacctgccacacaggttccctgctcctggggaggaacacaatctgaaggctgccctgggctccagggagcccgtgctgggtaagcccagaagaagtctgcacaggtcccgggaccttgccaacactaagtcactcagattggtctggggccacgtgctgggcacccttggcaatcaagctt

SEQ ID NO: 171535 - DNA, 606 bp, Homo Sapiens
  misc_feature (463)..(502): n is a, c, g, or t
ggatccccaagcttgattgcccagggtcacaaaacagcaagagtggatccaagtaactactgcattagactgcccttcgctacactataaattctcagtctgttggtttaagctatcgtatgaagatgactagtcacaatgatttttctgccccagtaactgatagattgtctgcaaagatctcttcaccatctttcctgggcactggagttgcttgggagctatcttgttccttgagagccagttgttatcacccagggtattgttgagactttgagagtaagatcatatttcctcagaataccttcattatgaatttcattcatttctggccataagccttgctctgttgacacaagaatgatatacgttaaattttggttagtagctacctgttggaaagtagaaagatgaaaggtgttgaagataggtaaacaggaagcttccactcattggttctggnnnnnnnnnnnnnnnnnnnnnnnnnnnnnnnnnnnnnnnnaaggttggaatttgttagattttactttcgttatattatttttatttgtcttcaaaataattcccaattttaaaaataaggaaagtgaatagaactggatgtat

SEQ ID NO: 171536 - DNA, 1061 bp, Homo Sapiens
cccagggactgaagttgttagtaaaaccatgccccaaaaacttaaaccagtaactaacagaaagtcttgagtttgcaagatagcagataagaaacaactttctgaaacactgaaactccttctgcttgtaagataacaaaactggctgaaatcagttgcaaccaatatagccaactagagttcactctgaaggagcgtcatcacagcctgaattgccaccacatgcttcatattaactcctcccaaatttgaacatgggacccatgaggagtcatgaagagataactgggtactgccaaggactttctagacctcccctttccttccaccaatcacctagtaatcccagaatctacccgctaaacctgttctaataaaattactgcaccaggagacagatttgagcttgactcctgtgagtcaactggcaatcaagcttaagcttgattgcccagggtcacaaaacagcaagagtggatccaagtaactactgcattagactgcccttcgctacactataaattctgtctgttggtttaagctatcgtatgaagatgactagtcacaatgatttttctgccccagtaactgatagattgtctgcaaagatctcttcaccatctttcctgggcactggagttgcttgggagctatcttgttccttgagagccagttgttatcacccagggtattgttgagactttgagagtaagatcatatttcctcagaataccttcattatgaatttcattcatttctggccataagccttgctctgttgacacaagaatgatatacgttaaattttggttagtagctacctgttggaaagtagaaagatgaaaggtgttgaagataggtaaacaggaagcttccactcattggttctgggtttggtttgtttgtacttgtgttgtttgttctttttttaaggttggaatttgttagattttactttcgttatattatttttatttgtcttcaaaataattcccaattttaaaaatttaaggaaagtaaaatagaactggatgtataggcaatcaagcttggggatcctc

SEQ ID NO: 171537 - DNA, 955 bp, Homo Sapiens
aagcttgattgcccacgatggcagaatgtgtctttgacagaagctggttttgaatgtaggtccagctttcctcacaggggcactgagctggggccatctcttgcctcctgaggggtgggtgatggtttccttgtcaacatgtttttgtaggatatgttgctgattgtgggttgagggaggaggctgcagggtagggttggaagagcctagatgaagattttcatcctggttggccccttacacaaccccttctattccttgatccttcgttttcttcgttcgtcaaaagtagtttatgatcagggacagagcagagggctgggagagccaaggtgaccagagtcttggccctttaagacttcatcgtccagtggcagggacagtcacccatacccaagtacccaaatcatccctggaagctcgggtggggtctgctgggggtgtgtgcagagtgcagtgaaagcacagggccagaggtggcaggagggatgatgtggacacaggttgttttgcctttcttctgctaacagcaacctccttcctttgggaattgttcctccccaattccttgtggtgcatgggacacgcctactgagtttagccgattaaccaggctgtcaatcacagcatcaggccccacctctactaagtcacaggggagggcacaggaaacaggcctggccaatcagagttcttccctgggactttctaattcagcccagggagagagaaggttttttttctctagggctctcagctaccacaaggtaagcctggccgaattctctgggtgtgaaggatgtctaatctcagagatgagagtgaaggtaacacacaaggggaagatgaggcatggaagatgaggcaggggagagaaatctagcagcagcatcagaactcctggatcgtctcctgcctgatgatcctccctccctccctctgaggcaacaagctt

SEQ ID NO: 171538 - DNA, 345 bp, Homo Sapiens
aagcttgattgccaagaactaaaggaagcagtgatactggaaagaaagagacaataaggtaggagataaaatcacagagaaatagctcaggagtagtgagtggctctggtgatgtgagatccaaagctggtgttttacgcaggagggagggagggagaatggtttgaaagaaataggaagtaagaaggaagcaccaccccccacgtctcggcactaaggcccaaagataagcagcatgtgggaaaagcttctcctgaggcttggcaggaaaaacagggaaatcaggaaagagcaagttttgacagaaaagtaaaggacactcaaaagaaagggtgaggcaatcag

SEQ ID NO: 171539 - DNA, 489 bp, Homo Sapiens
aagcttgattgcctttcaaatatttactgttgcttggccccaagaatggccttgtccaacttatccagaatgtctattaggattctaatgttatgtccacttacaagtagagacagtaaaaggatgaatacccaatctttagttgacaatgcagctgatttatgaaagagagggctacactgctatggaaacttagcttcaaagaaaatgcaatgtatctgcaattaggtgttcattttttactacattttattaaaacctgctttatactttcaactgcttgtaggcacaacttctgcaagtttaaatatttgagctttacaaataaacatacacatgcccagttttttaagtaaacctgtaacaatacccaggaaggcaaatgttcattgtttaattagcagctgggattttataatataatgtttggtatttttgaggcattgttaacatgaaagtcaaccactggctttgtgggccatcaagctt

SEQ ID NO: 171540 - DNA, 333 bp, Homo Sapiens
aagcttgattgccacaaagccactaaaatctgtgcctcaatctgtctgcttcatcagtatggttaaatacaaaccacttactagtgtctgctaaaacttagtatcatcaagtctagaatgccattggtctgttctactggggcaaaggccaaaatacacaagcatgtgctcatatgctcttttccctacaaactaaccatattacctactataacagtaaagcttaatgacatctctggctacatataattcatacccaatattataaaataaaatgttaggccagtaagctttcacaatttttattaaatcctagtctaggcaatcaagctt

SEQ ID NO: 171541 - DNA, 1403 bp, Homo Sapiens; identical to SEQ ID NO: 5602
  misc_feature (809)..(866): n is a, c, g, or t
  misc_feature (877)..(877): n is a, c, g, or t

SEQ ID NO: 171542 - DNA, 225 bp, Homo Sapiens
gctctagaaccaacccaaagacccagccagtgagaatgggtgaagtatgatataaccacactgtgtaatgttattcagcagtgaaaatctatgaaccacagtgacctacagtgtggagttctcttcttcatataatgctgagagaagacaatatatatcatgatgtactatgaataaagttctaaacaacaaaaacattcactattgtttagcaatcagctggtc

SEQ ID NO: 171543 - DNA, 288 bp, Homo Sapiens
ggcatgctgcgaataagcaatagagaaggctgactgcaggtgctgaaagagcaggagcttgctgaaaaaggagatcatgcttgtggggccagtcaattaagaagagtctgggaaagtgataatctttggcattggccttagaggaaggtagaattttagtaggcaaagaggcagttgagaagaagtggagaaggaagaggcattccagacaaggggatgctgagttaaatgacagtgctgaaaccatattgggtatatttggagggcaatcaagctgggtaccgagct

SEQ ID NO: 171544 - DNA, 179 bp, Homo Sapiens
ctgacctcagactgactgatgtgatgagggaagggagacaaagcaatgagctccgaaaggacatttctgggcaacgaccagaataattagcaaatgcatgtgatcccccacttaacaattttataaattccaagactcatttcaagtttctcccaactgaaagaaaataatatcaaggc

SEQ ID NO: 171545 - DNA, 921 bp, Homo Sapiens
  misc_feature (195)..(210): n is a, c, g, or t
aagcttgattgcctattacaaaaaaattcagtacaaaagttcaatatattgaaaaatgcttttcccctccctcacagcaccgttttatatatagcagagaataatgaagagattgctagtctagatggggcaatcttcaaattacaccaagacgcacagtggtttatttaccctcccctcctcataagaactttnnnnnnnnnnnnnnnncacacatacgtattaaagtcaaaaaatttgaggaaccccttccgaacagtacacagttattaagttcagtgtcaataattcacatcttgcaacaaagtgtatggacatgatttcttttacaaaactttcagtgtcaaaaaggaaattaaggccatcagatttgcagcttaaaaattcacataaaggaaatataaaaatattctgtgcttctgagaaggctctgcactgtatacaggtaaggattaccatacttctttattttgaggaagacagttgaaaattttacataattgcacagcttctattggatgctcttggggttccctgctggtggaaaagttcttcctcaacaaccactccagctgcttcttcctcctcctcctcttcttcaggtatggttgttttaaagactgtacttctttgagcaacctcctctccctgagaatttttcaatataaccttcacatcttcgccagtgccccacgagttctggttcttccagatgaggtcagttggggggctggctgtgacaccagcgtttgcagcccaaattgtaacagtctggcctgccttcagcacatatcttgaggtatatttataactgactgatgtgtctccaatttttatgatcatctcccagcctcccattggttgatcctgttcagaagtgttcttcaagcggataaatttcccatcaacatcaatttcttc

SEQ ID NO: 171546 - DNA, 698 bp, Homo Sapiens
ccctggatgacgcgccagccagcttgcagctgcagtcgatctagagatcccgcttgatgcctctgagtatagggtcttctcatcaacactctgaacatcacaggaaacaaaaaatttccttccttcaactgtatcaagtgggctatttatcataacaacagaacaaagagggataggtcttttataatggatgttgagattggcagtcatgacgattcccccagccatcattgcacacataccaacagtagcatcaatcatggttgcaatggcacctccatgaatgaatccaggtggtccttccaggtaagggcctccttgaaataagcaaaccatccttttctcaatgtcattgtagaacatcacgtattcaaagcccaggccatcatcaaagcttctggtgaagagctgggcctgtgacatttgttcttctttcataagctttgggtctatagaaaatgaggtggatggcaaatgagaaacaagggtgagagaaatgccatggcagagccaagcacctgtaccctgctagaatcacatgtcaatagatgattgattcaaatgtccacagggtgcaaaattgaaaggaatgggagcgtctcaatgaaacagaagataggatctttgcccttgtggaattaacagtccaactggggacagagtaaactagacatgaaatcaaatgaagacccacacat

SEQ ID NO: 171547 - DNA, 812 bp, Homo Sapiens
aggctagagcaagcgcggcccgcggccggagccatggggaggagctgcgccgcgcgcctccgcacgctgggggctctgtgccggccgccagtaggccggcgcctgccgggaagcgagccgcgacccgagctgaggtcattttcttctgaggaagtcattcttaaggactgttctgtccccaaccccagctggaacaaggacctaagactgctctttgaccagtttatgaagaaatgtgaagatggctcctggaaacgtttgccttcatataaacgtacacctactgaatggattcaagacttcaaaacccattttcttgacccaaagcttatgaaagaagaacaaatgtcacaggcccagctcttcaccagaagctttgatgatggcctgggctttgaatacgtgatgttctacaatgacattgagaaaaggatggtttgcttatttcaaggaggcccttacctggaaggaccacctggattcattcatggaggtgccattgcaaccatgattgatgctactgttggtatgtgtgcaatgatggctgggggaatcgtcatgactgccaatctcaacatcaattataaaagacctatccctctttgttctgttgtcatgataaatagccaacttgataaagttgaaggaaggaaatttttcgtttcctgtaattgtccagagtgttgatgagaagaccctatactcagaggcgacaagcttatttataaagctgaatcctgctaaaagtctgacataaagagctgctggtgaaatccatctcattctcgcccctcagaaagaaggagtgtccc

SEQ ID NO: 171548 - DNA, 268 bp, Homo Sapiens
aagcttgattgcccgcctgttccataaaatcagcaaacaactgacaggtgagacccacaggtggtgaaggtttatacttcccacctgatgatgaaaccctcagaatggaggaaacaattttacagtaagagaaaagggtccccgagatgggaagaaaaccaaatacggcagacagggaaatacatgttgatgttcctggtgaaggtgtcacagaaggttcccagaagaaattaggattccacatccgtgaagcaggtcatttgtaagc

SEQ ID NO: 171549 - DNA, 467 bp, Homo Sapiens
aaagtggtatgtgtcttaaagcggccaccaaagctcgattgcccttccaagtgagcccaactacacgatggagcctcttccctgcccttggatctgggctgagcctctgacttgcgttgaccaacagaatgcagtgaaagtgatgccgatactaccctccctgccctagacttgggatacctggcagctatattcttccattcctcaggacttgcaaaaacgggtctcagcatgccttcccagagccatgaggtgtttctttgcccattcattgatctgagaagtgagtgtaaggagtttaaatcaacctctgttctgtgctagttaaggtaataaagttgctgcagtccagggggtaggtacctgtggacggctctgcgaataggacagttgcatttcttggcaatcaagtgcatccctaggctggcagtgcagcagaaatactgaataaaatgtgacaaatctcc

SEQ ID NO: 171550 - DNA, 685 bp, Homo Sapiens
aggatccccaagcttgattgccaataaggaggatgaaatccaccttgcggtggaccaaaagcagccccatgctgatagtcaaactggttcactggccccactgcaaaattatcgggtggtccaccaaagttgtgattgttctggttaaatatatgcctgttgtcaggggcaaattccccactgtcctgactgttgctgtcttcagaaggaggaacaatgtccattgggcctggtgttggtggcatccatggctgatctggaggggggtgtgggggttgctgatgcattccccattctggttgccacattctgttgaagtttgaatccccttggaaattcccatgattgtttggaccagattccattgtagacatatcttgtccatttggcatcattcctggtggttgttctaccatgctttgctgtcctgaagcttctctttgggcaatccaagcttgggccaatgcagcccaatcaatctggcttggatcctgttggtgctggaatgactgcatccattgttgctggttcaagggccactgctgccaaggctgtcctccttgatcccacatcccttcttttaaaatatacttgattttctatccactctagttcgggaacacccttgtcgccgccgttccggtaacacctctccaacgctttcgatgctcctacttcttccccc

SEQ ID NO: 171551 - DNA, 841 bp, Homo Sapiens
  misc_feature (516)..(516): n is a, c, g, or t
  misc_feature (579)..(589): n is a, c, g, or t
agaggtgttaccggaacggcggcgacaagggtgttcccgaactagagtggatagaaaatcaagtatattttaaaagaagggatgtgggatcaaggaggacagccttggcagcagtggcccttgaaccagcaacaatggatgcagtcattccagcaccaacaggatccaagccagattgattgggctgcattggcccaagcttggattgcccaaagagaagcttcaggacagcaaagcatggtagaacaaccaccaggaatgatgccaaatggacaagatatgtctacaatggaatctggtccaaacaatcatgggaatttccaaggggattcaaacttcaacagaatgtggcaaccaggctgacaggggctgggaacactctggaaacctcacttggcatctagggaagagagcattctttgtctctctattgcaacctctggccttttcagaagcagcactggcagagtaaaacatgtctagcctccaattaaagaaaaaatggtgtcactgtgntgacaaaattagtctggtcaaatatactctgcccctaccatccgccctacctttttcttcccnnnnnnnnnnncagatagtgaagatctttcataagtttggtgtgtttaactttttggtaggtttaatttcacagtatgatgtagatttctgtgatgctaattcagtcttccagtggctgtgtgtttattcctttttaatagtcacttgaaactatggaggaatcagcctctcattggggtatgctgaatggtgaagtcataacctcctttcgctattaatactttaggactccttataagaatggggacctcagatcgaaaac

SEQ ID NO: 171552 - DNA, 454 bp, Homo Sapiens
  misc_feature (218)..(244): n is a, c, g, or t
  misc_feature (321)..(321): n is a, c, g, or t
gctctcccctttataaacagtctttaaaactggtttgtatcaatgccccttgatgtacccagagatatgtttaaaccaacctagttttgttgattctgacaatctcacacacatttaagaatttaccatttttcagtgcacttttcaatgttaaaaaaaattaaatccaattattgaaaatcagtttgacaaacaacccccactccatagccctggcnnnnnnnnnnnnnnnnnnnnnnnnnnngcagctaattcagtgatacaaactctgtaaggtggcaaattcccccaactcgccaaggaaatagcacatatttattntctcccatctttactccaaatttgggacctcttcctctgataacacagtcttttaggttacttgaaatcagcccccatttaaagactctttgcggcaccaagcttaaagagtttactgacagacctcgtgccg

SEQ ID NO: 171553 - DNA, 1489 bp, Homo Sapiens
  misc_feature (1222)..(1222): n is a, c, g, or t
tccgttgaagagaggagaaactccaggatgctccagaaggtggtctgccgtcctacgagaaaccctgtcttgcccatcgaaagacccagaggggcgcccagcactaccccaatactcagaggtgtgaccttcgccagccccagctccagtgctgggaggggtggagctgcttcataatctgctttttggctttggtgcccctgtggcctgggtggccctcccgcccctccctggcaggacaatctgcttgtgtctccctcgctggcctgctcctcctgcagggcctgtgagctgctcacaactgggtcaacgctttaggctgagtcactcctcgggtctctccataattcagcccaacaatgcttggtttatttcaatcagctctgacacttgtttagacgattggccattctaaagttggtgagtttgtcaagcaactatcgacttgatcagttcagccaagcaactgacaaatcaaaaacccacttgtcagttcagtaaaataatttggtcaaacaacagtctattgcattgatttataaatagttgtcagttcacatagcaatttaatcaagtaatcattaattagttaccccctatatataaatatatgtaatcaatttcttcaaatagcttgcttacatgataatcaattagccaaccatgagtcatttagaatagtgataaatagaatacacagaatagtgatgaaattcaatttaaaaaatcacgttagcctccaaaccatttaattcaaatgaacccatcaactggatgccaactttggcgaatgtaggacctctgagtggctgtataattgttaattcaaatgaaattcatttaaacagttgacaaactgtcattcaacaattagctccaggaaataacagttagttcatcataaaacagtcccttcaaacacacaattgttctgctgaagagttgtcatcaacaatccaatgctcacctattcagttgctctgtggtcagtgtggctgcatagcagtggattccatgaaaggagtcattttagtgatgagctgccagtccattcccaggccaggctgtcgctggccatccattcagtcgattcagtcataggcgaatctgttctgcccgaggcttgtggtcaagcaaaaattcagccctgaaatcaggcacatctgttcgttggactaaacccacaggttagttcagtcaaagcaggcaacccccttgtggncactgaccctgccactggggtcatggcggttgtggcagctggggaggtttggccccaacagccctcctgtgcctgcttccctgtgtgtcggggtcctccagggagctgacccagaggtggaggccacggaggcagggtctctggggactgtcggggggtacagagggagaaggctctgcaagactccctgggcaataccccccttgtgtaattgctttgtgtgcgacaggggaggaagtttcaattaaagcagcaacaagctttcaa

SEQ ID NO: 171554 - DNA, 278 bp, Homo Sapiens
aagcttgattgcccaccatagaacgactgtccatgacaagatatttctacctctttcctggcaattgaaaatggttaagtattgagagttgttggtggtatgtgaaataaataagagagtgatattggtggttaagttcaatgacaaatgacagctgagtacttggatggtcaaattggtgtttttgttgatatagtctggtgattatctgctacttctttccgacttacatgtatttggattcctccaactctacaattaatcaggcaatcaagctt

SEQ ID NO: 171555 - DNA, 437 bp, Homo Sapiens
  misc_feature (368)..(368): n is a, c, g, or t
  misc_feature (400)..(400): n is a, c, g, or t
  misc_feature (406)..(406): n is a, c, g, or t
gactctccagcatccttggaagtggcctcttcacagtcatctgagaacctggaggaagatgctgtttacaagacccacgtggagaaggacttcattgctttctgctcttcaacgccacacaacgtgtcctggagagacagcacaatgggctctatcttcatcacacaactcatcacatgcttccagaaatattcttggtgctgccacctagaggaagtatttcggaaggtacagcaatcatttggaaactccaaggggccaaagctcaaatggcccaccataggaacgactgtccatgacaaggatatttctacctctttccggggcaatttgaaaattgggaaggccacaagcagcccagcccttcnttaatcaactttaaggggggcaccttcattangtacanctttgcaaattttaacatttttggatttttc

SEQ ID NO: 171556 - DNA, 488 bp, Homo Sapiens
  misc_feature (356)..(417): n is a, c, g, or t
taacctagctagaaggtcctgtatgatgcgaacagaaatagttaagagtgcagatccttgacctgttccgtgatcttacagaaaaagcatctagtctttcaccattcagtatgttagctgtgggtttttcatccatgtcctatgggttgaagaagtttttctcctagttgtttcagtgcttttattatgaaaaggtattggattttgccaaatgctttttctgtgtctattgagatgatcatatgtgtgcaattttgcaacttttactaatatagtgaattacattaattgatttgcagatgttaagtcaaacttacattcctaggagaaattggtgattatatattttaaagtcnnnnnnnnnnnnnnnnnnnnnnnnnnnnnnnnnnnnnnnnnnnnnnnnnnnnnnnnnnnnnnattgtgataatatatacataacacaaaatttaccatcccaaccatttttaggtttataggcaatcaagctt

SEQ ID NO: 171557 - DNA, 317 bp, Homo Sapiens
cacatcagtcaactgataaaagacactatctggttagcctgtccagatccattagaaacctcaccagaagattaggtcttactttcagataggtagttatcaggtaatgaagtctctcctcaatgcgcctggctcccgagcgaggttggcacttcatcctccactacatcttctatgagtatctaaatcctctccacccatcttcccttaccttgtccctcagtctcaaatgagaagatggccttcctcctaaggctaaagcaatactttcggttcagcctccttacctcctctctacaacttcgctctatcaattg

SEQ ID NO: 171558 - DNA, 613 bp, Homo Sapiens
gtatcagagtaccagctctcaccatcacttcgtctatcgcggaacactcacagtgctcaggaatccttgcattcctttattacactcctgggaaactttctctaccagcctttctaagcctttactacttttaaagactaatttccatgccctgaatcctttatcctcagatcatctcataaaacaatctcagtgaagcaggatacaaggtaaatgtcatacatccccaacatcttaatttatacctctcaaaattttctctccacccatcttcccttaccttgtcctcagtctcaaatgagaagatggccttcctcctaaggctaaagcaatactttcggttcagcctccttacctcctctctacaacttcgctctatcaattgttctgtatttctcgtattttcaatggtttacgccaggttccttgctattgttttgttttaataaccctaaccttgctaccatcagaataataattatatttctactaactgcaaaatcttataacattggtatatatacttcacactaccattcattagctattactcttttatctaacttcctatccatcactcaactgcaagtgcttcctctaaatctttattacc

SEQ ID NO: 171559 - DNA, 220 bp, Homo Sapiens
tgcttcacccaaagtcattccatctgtcatacacctaagtacactatctacattcttgtcagtagttacactggggggagataaaaatattttccatttcagtaactcagtatttgtgagtaatttgcttagtaataatcccaaaattaaattgtcttcgtataaggactactaatagtttgtgtgggatttgccaaataaactaccttcgggaaacttc

SEQ ID NO: 171560 - DNA, 367 bp, Homo Sapiens
aagcttgattgccacgtattaacttcaacagaagcatttgtgtaccaaagtacacagagaaatgcacaaactctaaaaaaataacacgaaacaggacgcgcagaggggagccagacgcacccaggcaggagacagcattctcaagcggctgagcatccgaccgcggccaacaacccacggggcagacctgctgtggagagacgaggaagaccaaacacagactcaggcatatacggagactgtgtgggggacagagggggttccccaaggcagtggggtaagcagggaccttttttttagacgggggtctcactctcgtctcccaaggctgcagggcagtggtactaatctcagctcactacaatct

SEQ ID NO: 171561 - DNA, 456 bp, Homo Sapiens
aagcttgattgcctgccacaggtttggtctcactgaagtctctaagaactcagcactgaacacaaataattttcaggtaacatagagtgttgttcttggtgactaaaattgccatcctcccttttttctcctctctgtaagatacaattgagagagccctgaaatagaagccagaaaactgaagctctatacttctgtccaacatcctctgcatcattcattccttgtagattcagtgtcctcatctttaatctgaggttctgagaatgtatgcataaaagaagtgggaatgcttcatgaattgtataatactacttatatgtagtgtgatattattatttgtagaggcagaagacaccaaaaataaatgtcaacagagtatagaccactagccaactcagaaaaccctgactttgtctctaagaaagcctttctatatcttgggcaatcaagctt

SEQ ID NO: 171562 - DNA, 666 bp, Homo Sapiens
  misc_feature (317)..(556): n is a, c, g, or t
ataggcccagctgtgccggtggaccagaggtacaacaaattgtgtaacagttcatgcagttgattttaaagccaaactccccagactctaaagaatagtgggccaaacagcaccacagaagacgtcacatactaatcaggcccagccctgcttaggacaacagcatcaaaccctggatacatggaatgccattccaaggtcccacccaacagcaaactgtcagatgtcaaaaaacacttgggccaaacagtattaccagataacatcagtttatcaaactctaatttcccatgatttgcctggcgtggtggctcatnnnnnnnnnnnnnnnnnnnnnnnnnnnnnnnnnnnnnnnnnnnnnnnnnnnnnnnnnnnnnnnnnnnnnnnnnnnnnnnnnnnnnnnnnnnnnnnnnnnnnnnnnnnnnnnnnnnnnnnnnnnnnnnnnnnnnnnnnnnnnnnnnnnnnnnnnnnnnnnnnnnnnnnnnnnnnnnnnnnnnnnnnnnnnnnnnnnnnnnnnnnnnnnnnnnnnnnnnnnnnnnnnnnnnnnnnnnnnnnnctgacacgagcaagactctgtctcataacaagaagcaaataaaacccctaccctgacttcccactccgtgatgcgatgggatgtcatacatacctcacaatcttatcact

SEQ ID NO: 171563 - DNA, 635 bp, Homo Sapiens
acgaagaaagaatcaggacacagcatcaatggagtcacagagttttccaaaatcggtctagaccaatagtgccaacagacccaatgttttgatgtacttgccagtgtagaggccatgcttgaaaaggtagaaaactataacccaagcagttagcccagctatgtcttaagatatcaagaaacacctacctgaggatgattttcatcagcttttgtagccaaaatgcagaaatctccacaggtagtaatagaaatgagacccttcacatatttaacatatttttcattgttttacgtatcccagaagacaacacaatattctggacgatcaggtctggtatatgcataaactacagtgttggagcaataaccccacttataattaggtcgaatgtttgcaaaatatataaaggaatcaacagctagtgcaattttcagtccacctccttcccaagatagtgcagatatttcctttccaggaactttcaaagtacccagatgctcaccaaacggagtgtaaaactgcacaatgttcacatctttgtcctgcatggctgccttctggaagcctgccacagctaacacgctgcccatgtggttccactggatacctaataagtacatgccagtgtcaat

SEQ ID NO: 171564 - DNA, 395 bp, Homo Sapiens
gagctcggtacccaagcttgattgccaaatgtggtaagatcgggtggaaattattagaggccaacaagaaatcaaatgagacaacagacccctgttttcggtcaccttttggttagaagttgaagcacaaaggtctctgagttacacgacccttaagggaaagagacccaggacatgtctgatcccagctcttcaacccctttgctgtgtgatttggggcaaaccaaggtcacccctctgtccatgttttctcatcttctccaatgaggagattaaactgatgcttagaagcttcttctatgtctacgtttttatagtcccacaaggcagctcctcttaattaaccccagaaagacataattcgtgtcccttaaaatgatgcaaacagctgggcg

SEQ ID NO: 171565 - DNA, 525 bp, Homo Sapiens
actctggaatagcactatacagcaataaataatgggaatgacagccagcagagtggggatctttattttaggccactgttaacatacaaaagtgtataactttcttgacaagtagcttattgttgatttaaataaacccaaaattatatttcaaaaatgttaaagtccacctaaaaatgccattaatttacaccctacaaacttctgaattaaaatgttttcaaagatacgttaaagatcaaaatttctaatatggtttaacagcatctgcttaatactaaggtaagtcaaagcgttaaattactatcatgaatcataggtgatttagcaactaaaaatatgtgcatacatatgcaaattttgaccccaaagtggccggttttattctaacaattgttctaacaatttttttgaatcaagtactggccaataatatcatcctaaagctaccaacatttcctatccgtgctgtcggtgattggtgtattacagtgtaatgctcccacatacagggcaatcaagctt

SEQ ID NO: 171566 - DNA, 529 bp, Homo Sapiens
tgcctggcctcttcactggtttttaatctctggctcatgggtactgcctctctcctgggtacttcactatgtgaagcttttcttccagcatccctaagcataaaccgtaaccctcagcaggtgttcctgaccagtttggtgggtggttaaactacacagcaagatgtatatttcctgtgagagatggtattatctaccacgtggtttgctcctaatagaacccacctcccataatagaggctgtaaattccaccaacttctgctcccagcctcccttacaaatggaggttgacaagggactcatttatggtgaataagacttaagaagtctccaaggggctgttccccctccttgatataaagagcacctcaaaagagagaaactctcttgcctgtcctcttccttcctgtcgctgaacacaatctgtgagagactgtgatgcctggagctgcagcagtgatcttgagatgatgaggcatagctgtggtggtcatcttgagaccgtgagcacatgctgtgcagccatct

SEQ ID NO: 171567 - DNA, 384 bp, Homo Sapiens
gtagtaacgtacggtcgagggccaaggctagcaggcctgtcaggtcgacgtgctagaggtatgccccaagcttgattgcccataagtggtggcagtggtagaattgagggggcaagtaggcttggagaatgttgttagccaggggctgttgagagatggcagaagggggtcttaatgtggggactgtggacagtggggcattcgtgggaaccagagggattttggacaagtccagatggaatgtgcagggcataggtagagggaaaagaaaatccctttctgggaaaaccatttattgtttattgaaacaaatgcaggacatcatcaaagtccgggtggacacattccattatctacaaattacaaaggtaggcaatcaagctt

SEQ ID NO: 171568 - DNA, 194 bp, Homo Sapiens
gcccaatgacttctctgttcatataatacttaatttatttttattagtgccttgtcatgttgaccaaggctatcgcaggattgcactagctccataatgcagtaatattgataactgaagatactaagtttcaaaaggatcttccattattttgcaaaaagaaaaatgaattttatatgggtttgtccatatgc

SEQ ID NO: 171569 - DNA, 405 bp, Homo Sapiens
aagcttgattgccatgtaaagcatagtttccaggttacatcaagtgattttatcttctcccatttcaaatgaaatgttgaaagcacaaacaatctgccatgaatgataagaagcaaaggcagcacatatcatctgcaagtttcttcccaagctataaaatatcatgttcatatttttcctgtttgtgatcccaaaacaggcaatattttcatttcatccactctattcttatgtatttgaaaagcaggtgttatccacctaccacaagagcactgttcaccataccagttgaaggaacccaacttggcactgcattttgggcaaagaagctgaaataaagcaaatgtgttactttattcattcacttttatacaaaacaaatcattatctttggcaatcaagctt

SEQ ID NO: 171570 - DNA, 443 bp, Homo Sapiens
cgggttataaaagattttaatatcaaataaaatgtacatgatcaaaaggctttgattgccatgtaaagcatagtttccaggttacatcaagtgattttatcttctcccatttcaaatgaaatgttgaaagcacaaacaatctgccatgaatgataagaagcaaaggcagcacatatcatctgcaagtttcttcccaagctataaaatatcatgttcatatttttcctgtttgtgatcccaaaacaggcaatattttcatttcatccactctattcttatgtatttgaaaagcaggtgttatccacctaccacaagagcactgttcaccataccagttgaaggaacccaacttgcactgcattttgggcaagaagctgtccatccatcactcccacaaagcagattccatccactgtacagttcaatgaaataagatgtacatt

SEQ ID NO: 171571 - DNA, 808 bp, Homo Sapiens
ggcaaaccagaggttaagatgaatgaggggtttgagtggcaactgaaattataccaggcaatgggatacgaagtggatacctctagtgcaatttataagcaatatcgtttacaaaaggttacagagaagtatccagaattgcagaatttacctcaagaactctttgctggtgacccaactaccgtttcacagggattgaaagatgaggttctctacaagtgtagaaagtgcaggcgatcattatttcgaagttctagtattctggatcaccgtgaaggaagtggacctatagcctttgcccacaagagaatgacaccatcttccatgcttaccacagggaggcaagctcaatgtacatcttatttcattgaacctgtacagtggatggaatctgctttgctgggagtgatgggatggacaggcttcttttgcccaaaatgcagtgccaaattgggttcccttcaactggtatggtgaacagtgctcttgtggtaggtgggataaccacctgcttcttcaaatacataagaatagagtggatgaaatgaaaatattgcctgctttgggatcacaaacaggaaaaatatgaacatgatattttatagccttgggaagaaacttgcagatgatatgtgctgcctttgcttcctatcattcatggcagattgtttgtgctttcaacatttcatttgaaatgggagaagataaaatcacttgatgtaacctggaaactatgctttacatggcatcaagcttgatcatgtacattttatttgatattaatcttagcctcgtccgggatccttga

SEQ ID NO: 171572 - DNA, 455 bp, Homo Sapiens
  misc_feature (59)..(82): n is a, c, g, or t
tcccaactttcaagccttccggttgacttttgaggatcccccagcttggttgcccgttnnnnnnnnnnnnnnnnnnnnnnnngtgatttcaaacatgttcagagtaactgtaatccagctgtggttgaaagaagaattttgagtggctaaagagctgactgaccatgttggtggctcttgaaacactatcagcttttcttaaccagaaggcaatcaaggacatacttgaggtcgggaacagatatttcataggccactggagtgctgcagtggaaggattccctccagatccttggttcacagacagggaagctgaagcctgaggagacttggttacttggtttccttggaggatcatatgctcagtgagctcttcctgaaaaccagccctgttcccatcagaaactgcagagacatagtattcccattcagcaggttacatggagtcagcgagc

SEQ ID NO: 171573 - DNA, 478 bp, Homo Sapiens
aagcttgattgccacctcacaacctatattatccgtcctagtctcagttaccacatctgactgctgggaagactgagggtgatttgtttggtctgtgcacaaaacctttaaagagaaatacccatgttagttaacttaaaaatccacaggtactgtggcaatagtttgtgtaacaagttagggtaaatatctttctggtaagatgtacaagggaagtcaatttacctggaagacaggaggtgtcaggcctccaggcaagacagaagcaaaaactgacaaaacaaagcctacaggaaatttgggtaataagtttgaatcttcttaaagttcttaaagtgtctagaaaaagcgttctaagacaaaactcctacaattcagcaagccttgggaaagaggctaaagctttctagcctctacctgaaaatacccactgcatagaaaacccaggagaaaaaattcaacctaggcaatcaagctt

SEQ ID NO: 171574 - DNA, 570 bp, Homo Sapiens
  misc_feature (56)..(74): n is a, c, g, or t
  misc_feature (369)..(369): n is a, c, g, or t
  misc_feature (397)..(397): n is a, c, g, or t
  misc_feature (413)..(413): n is a, c, g, or t
  misc_feature (429)..(429): n is a, c, g, or t
  misc_feature (512)..(512): n is a, c, g, or t
  misc_feature (527)..(527): n is a, c, g, or t
  misc_feature (554)..(554): n is a, c, g, or t
caagcccgcacgggcgactttatgaggagtccccacgccttgagttgtcccccccnnnnnnnnnnnnnnnnnnngaataaataaataactttttaaaaaaaggaagcttggtccacttgcttgaagacccatgcgggggtaagtccctttctgcccgttgggcttatgaaaccccaatgctgccctttctgctcctttctccacaccccccttggggcctcccctccactccttcccaaatctgtctccccagaagacacaggaaacaatgtattgtctgcccagcaatcaaaggcaatgcttcaaacacccaagtgggcccccacccttcaggcccgcttcctgcccgcccaggcacccccagggccnggggggaacctgggggtttcttcagganttgccaaaggaaggcntttgccatctgggggnttcccatgggctctttggcaacatcttccctttcgtttttttgagggggggtcatggccgggggggaggccaccaggcccttnattggggtttcgganggagagttcagggaagggggccaaggnaaggacaaaggcagga

SEQ ID NO: 171575 - DNA, 565 bp, Homo Sapiens
aagcttgattgcccatgtctgttaaaccaaaaaaaacacaaaagaactccagattcctggttcatcattctgtattcttactcactttttcaagttatctattttgttgcataaactaattgttaactattcatggaacagcaaacgcctgtttaataaagaactttgaccaaggctataaatgccacgtacattattttcagtattgttggttatatttaaattttccttacaataaagcacacttttataataaaatacatgaattattgtttttcatacttttttgcttgtttctttaaagttttctgacgtgcataatgcataattcattgaaaagcatgatagcaatgtggcatgtggaagcgaacccccagggcataacatagtaagaaagtatggttctgtatggcaataggtttttaaaattattagctattcatcatgtgtgggagaaataattgtggtgtgttgcagatttatttggccatttagaataaccaaatcaatctggctaactaggaatttatgtgtaaaattatctgattaaaacagctcaagtttg

SEQ ID NO: 171576 - DNA, 578 bp, Homo Sapiens
ttctagccctgacccagtgctgagacattattctacgagttgttgcttttaaatgagtgatttcatttgggaaacaggtttcaaatgaatatatatacatgggtaaaattactctgtgctagtgtagtcttactagagaatgtttatggtcccacttgtatatgaaaatgtggttagaatgttaattggataatgtatatataagaagttaaagtatgtaaagtataacttcagccacatttttagaacactgtttaacatttttgcaaaaccttcttgtaggaaaagagagctctctacatgaagatgacttgttttatatttcagattttattttaaaagccatgtctgttaaacaagaaaaaacacaaaagaactccagattcctggttcatcattctgtattcttactcactttttcaagttatctattttgttgcataaactaattgttaactattcatggaacagcaaacgcctgtttaataaagaactttgaccaaggctattaaatgccacgtacattattttcagtattgttggttatatttaaattttccttacaataaagaaaaact

SEQ ID NO: 171577 - DNA, 911 bp, Homo Sapiens
gtatgagacaggtgatgattaaaaataaacctccataatataaaagagtcatgtaaatttattccctgcatgaaaagaaagctttaatattaaagattagagttctcttttaatcctctttgagtaaagaaataatttgcaaacttctattttctactgtcatgaaaacagatcttttcttgggacttcacaaatgtcaatcacaacaatgcaaacagagtaattctttggaaagactgatctgagggtttaagggtagacttgtttcattgaattcctgaatttttacactgtgggattggctatgagacaccataaaatgtaaaatagttcagacagctcaagctctattattttcaggcacaaaatccatataattatgtacaaaactttgaattttttatttgtgaaattaaaaatatggtattatatatatataaacttctattcctctataaatatagatgatttagtgatagtgaacagaataaatgtataccaaattcaaagaccaatatcattttagcgtatgacagacatagataaatttaggtcctaagtaccggcattttgataaattcttaaagtttaaaacaatacaatcaggaggattgcttttctcctcttcctcacagagaactaaagtgaatatttttaaatggctttgaaagatttacatgtgacacatttctgtaaatccaaaagaggagcacacaggatttaatgcagtagacctgcacacattttccctttagcatgcatgcccatattttgtttatttcaggcgctatctccccgtcaattattccaccttctttacctcctgaaatcttaccaggttattattggtggtgtgaattgttcccccctcagaatgtgctgctgaataataatcgtaataaaatgttgcc

SEQ ID NO: 171578 - DNA, 1236 bp, Homo Sapiens
  misc_feature (223)..(224): n is a, c, g, or t
  misc_feature (333)..(333): n is a, c, g, or t
ttattctccaataaagatgaacaatgttacaaagcaaactgaaatttgggggatcttaacatcttcgggtgaggattagatagtagctgaaggcgtgggtatacaaatttcttggtaatacaaatgcaactcttttctgtgcatgaaaatgcacttagtagcctagtactttttgctttaccagatagatagggcatccaatacaactgaaacaacctgatanncaaattaattttatttttcaataaaaaggaatgctctggtttttaactggctcctgagggaagccagaagatggcatctgctctttaaacaggcttctcttatctgatntgagacacaaatccaccaagattctttcttacagtggaagtaggcaccacccctcagatcacgaggcccctaggaagaagcctgtggaaatcagcctgtgatgtgtggtggtgggccagcacctagaagacacatggtggttgtgcacataaatcccttcagcggactcagtggaaggatgagaattctgtaagttcatgcacattttattgagtagtaatataaaatgctttttctttttcattgttacaagtgcatgctttgattgccaacatgtcagaagtcaaattacaaaggcaaggctttaggctgtagtgaattacttgggcacttatacaattgttaaaaaatatgaatggacttttgttgttgttgttttcagaatgaaccagttgtaacccgtaactgatatacaaagggaaaaaagtgaaaaaagtacatattttgtggcacatgacagaacagaacaaaataactaaactgttatgacattaacagttgccatgcatttagagtttcacatgtaactacaaacttattataatttcacaaggttggctaaacatgctaaccatctacatgtgcattgacaagcttatgttaaaaactttaaagaatactctcccctttagattttttcaaagcttttattagattacaaaatttcaaaggcattaagcattttagagaatataaagtacgccagtatacatacatttccagtatatgtcagaccactaagcgcattacagtcccatacaggccgatacagccatattttaattcttaaaaaacatgcataggcagattattagattattaacagaatatagatgcttaatcacggtacttaatagggtgtcttgttaactaatacttaaaatgcccaatcaataattttac

SEQ ID NO: 171579 - DNA, 641 bp, Homo Sapiens
cacaaaaaatctgagggcgtagaatcatcatggccaaggagaaacaggaagttggtttagtgaatttaagaggggaaaacgctttcatacttagatgttgaaggaaattccatcaatatggtgcaaatgacattcctgaaacttctgactgcctctgctcggcaaaatttcacctaccactgtcatcagtcagcagcctggtatgatgtgtcatcaggaagttatgacaaagcacttcgcttcctgggatcaaatgatgaggagatgtcctatgacaataatccttttatcaaaacactgtatgatggttgtgcgtccagaaaaggctatgaaaagactgtcattgaaatcaatacaccaaaaattgatcaagtacctattgttgatgtcatgatcaatgactttggtgatcagaatcagaagttcggatttgaagttggtcctgttagttttcttggctaagattaagacaaagaacatatcaaatcaacagaaaatataccttggtgccaccaacccattttgtgccaccatgcaagttttgaataaggatggtatagaaaacaacgctgcataatacaggtaccatttaggaaataccgatgcctttgtgggggcagaatcacatggcaatcaagctt

SEQ ID NO: 171580 - DNA, 658 bp, Homo Sapiens
caggcgaattgcctaacttcctaaggtaactttcttcacgtcttttcttcccagacctcaggtcatgtgtgcatgtctcatttgtactctttgaccccaggtgtctggatagttttggggcaatgccaaccacttccagcctggatgagttttgagttttaagcatgaacctatgtcaaagtatccctgacaggttggaatggagtcactaaaaatttatgaatgcgttctacttgttcctattggaaccagggaccagggtcccattcttggaatatgggctgccatcacactgggaggagatagggcaaaggcaaataagaatgccgtaaagctttcctatcctttgaagttcttgattcagtgttcagttggttgctgtaagcatttcactgttttccagagttctgacaaagttagttctgacagttggtgcttgttttttgatggtttaggtgcagggaggtgtatgggcacttggaattgtctactctgacattttttcgacatctcccagtcagccttgttctcttgcagtagtccatttaaaaacccacagaagcctttccttctaccaccgccacacacgctgcaggccacagatgccaccttacttgtcataccctcttcctgtatctccctggcaatcaagcttggg

SEQ ID NO: 171581 - DNA, 430 bp, Homo Sapiens
cgtgcttgatacaactagccacagtgctgagcctcctccatgccagcatgctgcagccttttataatctaactaaattctaaggtaaagccataaccacctcattcttccctggacatgtataaacatagtaagatcatcctcatggagaaatagatcataggtattaactggtagtacataaaacaaaaacaacaaaaacattaggccattgcattttctgttaataagaagttgcagtgcccctattaaattttctggtgtacaccaaagcctcccagatagtagttacacacaaggcaactttgtcattgagaaggctcactgggaagatgggcctaatcttggcaagggcttggtgtaccaagaaccatgtaattatatttgaatcaaatgaccaacacacaaaaagaaatattatttaagccatc

SEQ ID NO: 171582 - DNA, 855 bp, Homo Sapiens
tttagtcttgatatagtgcaaccactatgaaacaagactacatccttaggagctatttcttaatagaatacaaagcagtttagtagctttatgttatttcagataatgtaatttttttaatgaaaaattcagaaaggacattctaactttcccaattagttaatttgtactgttgagttttttctctctaaagatttctcagaatcagttcagtaactatactttaaaaagatgagttgctcatctacagtgataactgacaacttagttttgtgattttgcaaatcaagatgcctgggtcatccccacttttgctgattctgaaagatttcttatagaaaaaaccctgattcagagtgcatgtgataggagataccaaaatagctgcatctggacagggaggttggctattgagcacagctgattctcagattcctggttcccctctatggtccttttacttactgtagtgatggaaggagagaaggagcgcccgagaatctgttcagattgtgactccagacagctctctgcactgtctccatctcttgcaaagtcctgggacctggaaagaggctggtccatcaatcttcactgtagatgtctcccgcaaagggcaggtgcatgtggctgccagtgacattgggcaatcgagataagtctggcaggctctggatccgggacctgagttctttgcgcaccagggaaactctggctagcttgcgcttgtactcttccaatttatgctctttctctgcaagggcttccttttgacaacgaagaaaatctgctaacattcgagtgagttgctttctatcatctatttctgccgccaatctgccattgtaatctgcc

SEQ ID NO: 171583 - DNA, 522 bp, Homo Sapiens
  misc_feature (156)..(182): n is a, c, g, or t
tgaagatagcacagcgaagtgagctttaaaagaaaaaatggaaaatccagcaaaccacagctcaaagaggttatgacccagtcgacaatactgtcagaaaaacaaaaagcattggagacagaatgctacctctcaaaatgtaaaccatatacaagnnnnnnnnnnnnnnnnnnnnnnnnnnnaactcaatgttaaacaagttagatacctggtagtcgtctttaaccagtaagaatgtgttacactttccatacacattatggcaacatgatcagcagaccaaatgcagagaagccggtaggaacccgaggccaaggaggctgctggaagacagctttccaagcttcagagatgctgcgcctgacgaggagcagatccaaacttccattcttcattatgacgtggggaaatcaagtccaaacattattcctacataatccctttcccaagtcaaatttgttttctccatgagccagttggtttcaagttccctaagtcatgtgtggtgattcggcgtgtgca

SEQ ID NO: 171584 - DNA, 442 bp, Homo Sapiens
aagcttgattgccattatcttgaagaatctgcatcaggttaaatttaggctctagctcctgagtctcaagtttgcagcagtgtccacctttattattccattcacgaactttcatggaattttctttgggtgtattttctaccaaagctgtcaatgagggtgtatatttggcttgattttctctaagaaatcctgcagactcctcctgggaagcctcctgttcttcatcttcattatctaatgcgacttcttcctcctcttcactctctgtctcagttttaacattcatttcagctggttgggtaatcactgggtattttggcctcattgccctcaatctgctactccgtcgtctacgttttcgcacctccagagacaggagcttcctctcgtaaagtgcagcatgcagcttggcctctgattcaatctctctatcttcgcc

SEQ ID NO: 171585 - DNA, 426 bp, Homo Sapiens
  misc_feature (46)..(46): n is a, c, g, or t
  misc_feature (56)..(56): n is a, c, g, or t
  misc_feature (79)..(79): n is a, c, g, or t
  misc_feature (231)..(231): n is a, c, g, or t
ccgcataagtcaaaacctcagggccccattctagaggtcaaggagntactgtaccnccaggttgtcttcctctttgagnaatccctcccctccctagtcagctccatgcagaaacatgccaggaggaagtcagatggtagtagggtaagggcaggggataaagagcacaggttggggaaaaaagaaacactggggagatcaactagaggagaggctgggaggagccgtaanccgcccatgggcccgtcaccccgacaggatatgcctcacaaacgctgcaggaaggaagagacattcatggtgaagacaagacaaagacatggggtgaggggtcaggcagtggggacagacattccattatttcacttctcattccttcccaccctctacaatactacccccttcctttcctgttataccgcccta

SEQ ID NO: 171586 - DNA, 864 bp, Homo Sapiens
cagagcctgggtggtcagaggccggggctagaggcagatggaagggaggcatttgctgacagaggacggggcacccgggctccccactgcagtcggccttgcctcctcctcctcctctacctccagtcaggctggacgggagggtagccttgtggctgagaggggtcagactaggtggcacaggggctcctggaaagacagcaggcttcctgctgggcgttcccttgttggagggaatagagtgggggtgggactctgcaggggtgtccttgtccactcgcacccctcgccgcccaccagggccatgctctgtgacttgggctgatccccaccctttctgggcctacagcaccacaggccgctgtacccccttagagctgcccctctctggcctggccggcaggcgtcttcttaactcctctgtcctctatattcagcatgttccttgtcagctgctgggccggccctgccttgcgctagcagagcctctcctggcagcttctcaggtctccctaatggagacaccaggctactaggacactggctggggccaccccctcctgcctaatgcctcaccttacagctggggaaactgaggcctggaatggcccagagtcaccaatggcaaagttggggctggtcccagcctgaggctccagctgatgccctcagctcccagagagggggtgccccatctagctgggtgcaggggtcactgcttgtaagcccagggccctgtgcccgcttgcctgttcccctacatctgtgcctgcacatccagaactgcctccttgccgctgcccccaggaagcccaccctggagccagagtcaagggctgcagcactgcccgatagaacacgccc

SEQ ID NO: 171587 - DNA, 1265 bp, Homo Sapiens
  misc_feature (848)..(860): n is a, c, g, or t
aggtccagaggtggtggcttggtgcgccgagaagaaggtgaagatgctggagcagcagcgcagtgagctgctggaagtgaacaagcagtgtggaccagcatttccggtccatgaagcagcagtatgagcagaagatcactgagctgcgtcagaagctggctgatttgcagaagcaggtgactgacctggaggccgagcgggagcagaagcagcgtgactttgaccgcaagctcctcctggccaagtccaagattgaaatggaggagaccgacaaggagcagctgacagcagaggccaaggagctgcgccaaaaggtcaagtacctgcaggatcagctgagcccactcacccgacagcgtgagtaccaggaaaaggagatccagcggctcaacaaggccctggaggaagcactgagcatccaaaccccgccatcatctccaccaacagcatttgggagcccagaaggagcaggggccctcctaaggaaacaggagctggtcacgcagaatgagttgctgaaacagcaggtgaagatcttcgaggaggacttccagagggagcgcagtgatcgtgagcgcatgaatgaggagaaggaagagctgaagaagcaagtggagaagctgcaggcccaggtcaccctgtcaaatgcccagctaaaagcattcaaagatgaggagaaggcaagagaagccctcagacagcagaagaggaaagcaaaggcctcaggagagcgttaccatgtggagccccacccagaacatctctgcggggcctacccctacgcctacccgcccatgccagccatggtgccacaccatggcttcgaggactggtcccagatccgctannnnnnnnnnnnnatggccatggagcacccgcccccaatccccaaactcggcgccctctttccattcttgccgggaaataacaccctgggcggttcttaccccgggggaggggttcgaaatccaaatcacaagctcccaagggatgggacacctcccacaaccaaggccctacagaaacccggaagtcccccaaaaaaatggacccggggaggggggccccaaggggagaaccaaaattggtggccatttttggcctccccccctttccattctttggcaaaaagcccaggcctggaatccctcaagaaattgtgccacaagaaaaaactttagaaaaggcccacactttgtgccccggcgtcggggggggccccagaaaaacccctttcaaccccttgggggataaagaaaaagagc

SEQ ID NO: 171588 - DNA, 810 bp, Homo Sapiens
cgacccacgcgtcgcccacgcgtccgcaaggagatgtcagtgtacgaggcctaccgcaagggcctgattgaccaccagacgtacctggagctgtccgagcaggagtgcgagtgggaggagatcaccatctcctcctcggacggcgtggtcaagtccatgatcatcgaccgccgctccgggcgccagtacgacatcgatgatgccatcgccaagaaccgtcatcgaccgctcggcactggaccagtaccgcgccggcacgctctccatcaccgagttcgccagacatgctctcgggcaacgccggtggtttccgctcccgttcctcctcggtgggatcctcctcctcctaccccatcagccccgccgtctccaggacccagctggcctcctggtcagaccccactgaggagacgggccccgtggctggcatcctggacacggagacgctggagaaggtgtccatcaccgaggccatgcaccggaacctggtggataacatcacggggcagcggctgctggaggcgcaggcctgcaccgggggcatcatcgaccccagcaccggtgagcgcttccctgtcaccgacgccgtcaacaagggcctggtggacaagatcatggtggaccgcatcaacctggcccagaaggccttctgcggcttcgaggacccacgcaccaagacccaagatgtccggccgcccaggccctgaaagaagggctggctctactacgaggccggccagcgcttccctggaggtggcggtacctggaacggggctggatcgagcccgacacgccggggccgcgtgcccc

SEQ ID NO: 171589 - DNA, 452 bp, Homo Sapiens
gtaaatgaagcccaactacctaaccctttcttatttgtatttgttttagtattgtgaagttgtgttaaatagtactagctagaaatacaaatttctggttatcatttctcttccctgtggcacttgacattttaattgtcttaaagttttggaagtacatcttctggccccttgagtactgccagaggcaaaagatgttggtttcttattcattccactttggtctcctgggatcccttctgtagcctaaagtatggctgggaaatggacttgagaagatgggcttgaattagatcataatcatgtgtgatcccatcatgaattcatgggaattggtgtggcatgtaaggcaatctttcctgttgtaaatcttccttttttaatgtacatatattttgaaaaatatgaataaacatgaaattttaaaagctgctgaaccgtagcttatattt

SEQ ID NO: 171590 - DNA, 460 bp, Homo Sapiens
gccggccaagctgatgccactttcctaggtttcttgagacctctacaagagttggagttgacacttggggtactttcttggtgtaacgaactaatagcgcattctggaattggtactctccaagctgctcaaaaagctcacaattttgtttgattaaattctgaggctcttccacaagaggtttaaattcatcgaacactttggcatagcattcatgaggatctgcagcggcacagcacttctctagagtggtttcatatgtcttggcaagtctcagcagcagcacgacagagtaatcaggatgccttcttgcatattcatacaaaaacatgcccaggaagacatcctttgcctcagcatagtttttgcaaacatccttactttcaacaaaatcagcagctaatgaaggcaagtcagcaggcatctcatcattttccacttcggcaatcaagcttgggta

SEQ ID NO: 171591 - DNA, 462 bp, Homo Sapiens
caaggacatgatctcatgctttttaagtggctgcatagtataccatgtatgtatatgtaccacatatactttatgcagtctactgttgatgagcatctaggtagattccatggtctttgctattgtgaatagtgctgtaacatcatcatctgctgaaactggtagaggccacaatgacctgcctcagcccaagagaagcaaaacacttaaatgtatcctaggaaaacctttatatcctaagaaaaaagacagacttagctgtcaccatcaagttccatccctataacctgccttgtacattatgcctccagcagtggtgatcttcatatcaagcattggggaaaggccaaaagattcaccaacactggtctagatgttatagactcaaaagtagcagccaacgttaacctacagactttagctgtgtgataaaaaatacaacatgtattggcaatcaagctt

SEQ ID NO: 171592 - DNA, 956 bp, Homo Sapiens
  misc_feature (865)..(865): n is a, c, g, or t
  misc_feature (869)..(869): n is a, c, g, or t
  misc_feature (913)..(913): n is a, c, g, or t
tcaatgacaccttcgacctcaagagacacgtccgaactcacactggcgtgcggccctacaagtgcagcctgtgtgacaaggccttcacgcagcgctgctctctggagtctcacctcaagaagatccatggtgtgcagcagaagtacgcgtacaatgagcggcgggccaagctgtacgtgtgtgaggagtgcggctgcacatctgagagccaggagggccacgtcctgcacctgaaggagcaccaccctgacagcccgctgctgcgcaagacctccaagaaggtgggcgtggcactacagaacactgtcacttccctgctgcagggcagcccccacctgtgagtggctctggccctgggggtgctcctggaagccccaagagcatccaggattgcctcccagctgcctggccagcccaccctcctgcaacctctcacccgaacaccagtgatcaggactggagcccccgtgccttggtctcccccctgggcacacgtgctcactcaggcccagcaatgacctctgctcatttttgcatttttgacttatgggccgaggctgttctgagcctgggaagatgtacctatgtcaagagaagggatgaggccaaggctgccttcaattagaagcagccgcctcacagagacaggcacctgtgtgccctggcagcagggacttcctacccaggaggagttcgagctaggatcccactgcccccgccctctcagcacagggcaggggctgcaagtccccagttggacatcagagtcaaaagccctggcaaaggggtacccctggcaacaaacttgtgggtgggggggctggcaaccaaaacccccccacccggggcaagggcctttcctatntgcntccaggggttcctgggaagggggctcctggttcctttcccgggncaaaggggagaagggggccccccattgggggttgggcccacgt

SEQ ID NO: 171593 - DNA, 1006 bp, Homo Sapiens
  misc_feature (828)..(828): n is a, c, g, or t
  misc_feature (903)..(903): n is a, c, g, or t
  misc_feature (932)..(932): n is a, c, g, or t
  misc_feature (960)..(960): n is a, c, g, or t
  misc_feature (973)..(973): n is a, c, g, or t
  misc_feature (986)..(986): n is a, c, g, or t
ccaggtagacctaaccagcaaatggccttcagctggagaaaacattgggtggagactctcacttatgttaatgcaatcttgaaatgactgaaaggtagattgccagcacagtgagtttcccagcctgctcccccactccacacttggaaattgagggagcatgaccgctctctgacttcacatgttaatagaggatcagagcagagttgggagtatattggtcaggatcatagaaaagaagacaaagcttgctcagccatgagatggccaggtatccagttttgttaactctctttgggaatttctttttcagcctgttttttagcttagtgccattatgtcattttgatttgtattcaagtactcttcaagtatctttgtaatgaaggtttggctacttgtataggtctgcctgcagggtgaaaatgccagtgtgaatattctagctaccaaacattgttttttgttgaaaaactgactttctgttgtctacctcaggccttgtgcatttgggttatctcaagccagtcaccacagagggtctctagggtctgcaaaatagaggccaaatccagggaccaggccctaactaatagaagttgtaccaaaatgcctgtggtacttgatggcctgttggtcaatataggaagtacaagtgtgtgatgttagaacctccctagttgctgctatatcaaacactgcacacttgacaagtgttttcattccccgccctctgacagaacaacattcctaattctttgaaggcaaccagtgcaaaggctactacacttgtgtaatgatatttaggcagatgcatacaggactggntcccaggggcactgtccagttcttccctccctctcgtggctggcttcagtttgtcctctggctcccatgtagggncttaaagttcacccccattcctttggtgnctggcaccttaccacggtttttgagggntggcacagggacntccaggggtattntccagtttgggtgttgggtt

SEQ ID NO: 171594 - DNA, 372 bp, Homo Sapiens
ggagggcaatcaagcttaagcttgattgcccatgatgcccagtttctgttctgttttctttccaggaacgtgtccctacctggaatccccaggggggcttccatgttccattagagaacttcacattcaaccctcgttttctgttttaaccaatcattgccagtaagtggtgagatccttcagggtaggacccaggatcttactcttcagtaaactcctagtttcaggtgttgaaatttggcagtcagtcaggcgttgttgaaatgacccagtaattgtttctgtactgtaggcaatcaagcttaagcttgattgcctatacatccagtctattttactttccttaattcttaaaattgggatatttggacg

SEQ ID NO: 171595 - DNA, 446 bp, Homo Sapiens
ttctcctgctgaaagtagtcgatataactgaacatgtaagatcttcaaacattagttacctaatatgcttaggcagtagagaacaataaagtctcatttgagatgtgggtactaggtgatctgctaggcttatacattgtttaggggatatcaacatgtaagcattgaggtgtgtaaaatttaggtatctgtcattgcttgttaaaaactttgagatcactttgaaataattatatctgggaatatagtgtgtataaaggcaagggttataatgaaaaaacagttggcaagatttataaaatacagaagtaaggattgattgttgggagaaggggatgggttaaaaactttgagatcacttagaaataattgtatctgggaatgtgtgtgtaaaggcaagggttcctgtgatatatataatgactaaacagttggcaatcaagctt

SEQ ID NO: 171596 - DNA, 408 bp, Homo Sapiens
agaaccttagactaggagacaatagttcagaacctttttaagagccattctaaaagtgaccagcaggagggatctagtagtgaataatatcttaatagcaattttaggagaaaatgactctgttcgtccagaagagctctgcagaaccagggctcccgtttatcttgtgctatctctgtagtattttcatttgagagaggaggctgagtttccagagctttgctttcatttatttttatacacattgtctctctatatctgcttgtggatatagttattttgaagagaaatggtttgtggttgtccagtggtatacaactgacaggcatttcattaagcacatagaccagactttgtgaatggttcagatattttttcattaaaaaacaaggtatggcaatcaagctt

SEQ ID NO: 171597 - DNA, 221 bp, Homo Sapiens
acaattatcttcttcttgactacggcatggcatatcttttaagttttaaaaaaactggaataattatatctatctatttgccgtatatatttaggggtttgtgttgataaaatcaagtctaggttgtggcttgctgaattaaatatttatgagtggtgcatttttaagtatagtgaacaagacaccatattaagtacagtgataaagcatctatattctgt

SEQ ID NO: 171598 - DNA, 472 bp, Homo Sapiens
aagcttgattgcctggtacagagtaggtgctcaagaaacactggttcacatccttttgcagctggtgtcagtgaggctggtctagctctcctcatgtgccctgtggtgtctcaggcttgtgcacaggaggcgggagcctgtgtttattatttgctgtttatcctctccctcctccgtctctttcctgacatggtttctatggagacgagggtccctgagcaattcttctgccagagcctcagtcccatcatcaagatctgccgttgccatcctgacaggctgccgaggtggtgctgtcacccggctgggaacaggagcccctggcctgagctgatgtggttgccatggagacagctctccgctagagagaagggaggtggcagaccctggccgagggctgcggtggcactgttgcccagctaccctcacttccagggtcacacccctccttgtgttttagcaatcagctgga

SEQ ID NO: 171599 - DNA, 364 bp, Homo Sapiens
cgcctggagtttttattagaatccacagcccatcttattcataaccaccttgctcattctgagaatttcattgttatgttaaagaaaatcagtgatagttttcctgctcatcaatttcaatatgaaaagtagagttgctgtgactattgtaatttgatatgttttttggaggggcacgaataggtaagtaacaagtcttagaataaaatatcaaggattttgttcgggttacttgtcctttgccatcttagcgcataatagagaagagccgatgatgtttcctttcaagaattgtcggctgtataactgacgcaccacgctcggcaacggaatacctgcattctcgtttctttgccaacgggag

SEQ ID NO: 171600 - DNA, 773 bp, Homo Sapiens
  misc_feature (671)..(674): n is a, c, g, or t
  misc_feature (676)..(679): n is a, c, g, or t
  misc_feature (690)..(697): n is a, c, g, or t
ggagataggtaaagagttccaagttcgtccagcccatgtgcaaagtcaacagtatttgccttaagatttcatatatatatatttttttgcattgactgctgagagctcctgtttactaagcaagcttttgtgtttattatcctcatttttactgaacattgttagttttggggtaatggaaacccactttttcattgtaatgactttgggggcttttgttagtaagggtgggtggggtgatgggttgcagacggaggtcaggtcttcctctttcctgagactggatctgttcaaacagcaaacgcccacagatggcccagaggtggtggtagtcagggtgtgtgggtgtttttagggttctttagtgttgtttctttcacccaggggtggtggtcccagccagtttggtgctgacggtgagaggaaattagaatctgtttgcaaattgtccaacccaccccctcaacatgaggggcttccattttctgtgttttgtaagggaactgtttccttcatgccgccatgttcctgatattagttctgatttctttttaacaaatgttatcatgattaagaaaatttccagcactttaatggccaattaactgagaatgtaagaaaattgatgctgtacaaggcaaataaagctgtttattaacccttggaaaaannnncnnnnccccaaacaannnnnnnnccctttgtccgggccccccctccggggcccctcccaaaaaaagctttttcctaaaaccctttttcggttttgtggg

SEQ ID NO: 171601 - DNA, 521 bp, Homo Sapiens
  misc_feature (22)..(22): n is a, c, g, or t
  misc_feature (65)..(65): n is a, c, g, or t
  misc_feature (115)..(115): n is a, c, g, or t
aggcgttccttaaaggaacctnaaagggccgagaagtcctgctgtgtttgggtgccatcatctcntactttgaacagtttttttgaaactgttggaattttttctggcaaatcancagtacgtttcaggagcggcagcgaggctaccttgcatggtgtggtggacgagctggtgcggttccggcagaaggtccggcagtttgcgctggccatgcccgaggccacgggggacgcccggcggcagcagctcctagaaaggcagcccctgctggaagcatgcgacaccctgcgccggggcctgactgcccacggcatcaacatcaaggacagaagcagtacaacatccacgtgggaactgctggatcaaaggacaaaagaccaaaaatcagcgggctgaggatggagcacagccatgaacctgctcacgacaagacgcacccatgcttctcagggtcaaggctttatgttaaagcttcctgtcggggctgctaggtcagcattaaagtaaggcaaccaacagcg

SEQ ID NO: 171602 - DNA, 549 bp, Homo Sapiens
  misc_feature (160)..(193): n is a, c, g, or t
aagcttgattgcctcattcatttcaataatgccctgggggcatatattgtcccacagtctaatccagttgacgtcaagcctctttgcagtggtagtttttgaggcaaatctataaggtttgttttgactccagaagggctgctcttagctgtctctttcnnnnnnnnnnnnnnnnnnnnnnnnnnnnnnnnnnctggtaaactagctgcattatgggttcatttgttgctctaatggagttaccagaatccttttagttgcttaccactaaattctccattgttcttgagagctatcttaggctgtcctttcacacactctatttcaaataaagttcgttcctgtggggacagctttagaactctgttcttttggattatctctccccgctgggcaaaatatctgagctcctgttgtagagaggtaggcagggaaagcggcccatttatctcagaatgacacccctactttatgagtcagacactgagtggaagtgggagcttggtgtgaatctctgccgtatgaatgagctgggataaggccaccgct

SEQ ID NO: 171603 - DNA, 1689 bp, Homo Sapiens
  misc_feature (81)..(81): n is a, c, g, or t
agcaaccatgggaaaaacaaagggcctacagccaccacttgatcacctccacgttagacagatagggattaggatcaggancacagatcagtacagaaggccagaacaaaacctttggctaatatataaaaccagcagtgctccaaggcagattcagccaataattaagaaaaaaaccatcaaagcctcaacctttgcttacaatctttattgaagttatacaaaaagaatcctccgaaaagtgaaataaatacattatatacaaaaacacttgcccttgggaggagggctgtgccccctcttaacatgcagtgctttcaactgtagctccagcctccactgtcccctccactgctgcccggctttcagcctgattctcagcctcctcctccatgttttccgaaacttcatttccactggggacagcatccccactgcctccgttcacctccggctcttgtttggctttctttgcatcatctttccggggactctcttcctctggttacctcttctttctgacaaggtgggaaatatcagtcacacaatttgatgaggaagcaccgtctgttggctttctactggccaatcatggagactgaagagccctcctccaccaggagtgaaacctgaagtagaactctccacccagagtagctttcagagccagttcagctacattcccactacgctgagactcctttgcatcttctatcttctctctaatttcgggtagcagttcctttagttcctcaatttctttcttgtattcagcagacgatccttcagcctccttcacctgctcgtttagtacagccattctgttctcaatgacttcaatagatttgctgaactgtgccactgcctcatcatactgagagttgtacccataagccaagcccagctggtagtgggtctctgcaaggagacggtcgtgggcttccaggtactgttcctgcaggttaaggcaggactggaactcctccacagcttgcacatagttttcagattcaacactaacttctccgagtttaagatgtgcctgggcagcataaagctgtgcttcttttgtttcttgccttttaaaaatgatctttgctaaatccagcatatcccaggcaagctctaggttcccaatctcctcctcctcattttcttgaagagacttgttttcaaggactgaatcatttggcatttcttcagtcttatcattttctttatcatcctcttccgagccttcagtttcttcaccctctttcatctgttcttctctctcttgtgtctcttcattagcagctatctgaactttgtcttcaggtgatttctcagtagctccctgggctaccttggtatcaaccccatctccagctgcctcagactcttctacagacagcttagtctcctcctgactaggaaccagctttgccctgaccttctcctctagtcctgagccatcttttgtttctgtcagtctttctatagaagtctgtggttcaataggagtctgatctcctacaactgacggtccattgactgcaccatccttagggagaactggagcctcctgcccaggcttttcagagacttctgatccagcctctacagctgaggcctctgcagcctctgttgtcacctctggtgactcttcagcaggtggtacttcttgacctaccagttgttcaagaaccc

SEQ ID NO: 171604 - DNA, 857 bp, Homo Sapiens
tgttatggtctcgcaaggagacggtcgtgggcttcccaggtactgttccctgcagttaaggcaggacttggaactcctccacaagcttgcacatagttttcagagtcaacactaacttctccgagttttaagatgtgcctgggcagcataaaaactgtgcttctttggtttcttgccttttaaaaatgatctttgctaaatccagcatatcccaggcaagctctaggttcccaatctcctcctccctcattttcttgaagagacttgttttcaaggactgaatcatttggcatttcttcagtcttatcattttctttatcatcctcttccgagccttcagtttcatctatgttatcattattttctaccagagattcatcttctgttttttctccttcttcctcttccacatgcacaccttccaaggcgtttcccaacacaccattctccattcttgccaactccagaagtgatttcccatagaaaaagaaggcttctccacactcattagctgtctctccatacttcttacctaaaagactagctgcttcctggaatgcattgacagctgctggaatatcccccatcaccagatgtttctgtcctaaacccaatagtttcttagcttcactatccacatccagactctccactttatctgcagatgtagaaggagcaggaacatcttcaattttgtcggcagaaaccagctccgcggcgacggcggcagtggctgtggactccatggccatcgttcccctgaggtggcgaaccagcgaacggaatagagcctgcgagaaaaacaggcaatttgggacgccagagactcactcagggacagaaaatggcagattccc

SEQ ID NO: 171605 - DNA, 1056 bp, Homo Sapiens
  misc_feature (40)..(40): n is a, c, g, or t
ctgttcttgagtacccctagtagtgatataacccccacantcgctctttaggaagtcacttaatgtgggcttcattattcccacatccctttccttactacttgcctgcacttcttgagaaaaagactgcagaaaggagaggtggggctttcagtagaaacaagcaaaccgcaggttcctgtggggggactctccaggaagaaggttccgcaagaaccgtgggcgacagttatggagaagcgtctgcaggaggcttagctgtacaaggaggaagggaaccagcgctaccgggaagggaagtaccgagatgctgtgagtaggtaccatcgagctctgtttcagttgcggggtctggatccgagtctgccctctcggttacctaatctcggacctcagggcccggccctcacgcctgaacaagaaaacatatggcataccacccagacagactgctataacaatctagctgcttgtctccttcagatggagcccgtgaactacgaacgagtgagagaatatagtcagaaagtcctggaacgacagcctgataatgccaaggccttgtatcggcccggagtggccttttgccatctgcaggactatgaccaggcccgccactacctcctggctgccgtgaataggcagcctaaagatgccaacatccggcggtacctccagctgacacagtcagaactcagcagctaccatagaaaagagaagcagctctacctgggcatgtttggttaacaaagaagaaagatgctcctccagttgaacttaggtggaccattaaacatgcatgaaggagaaatctgagcctcagcaagagaaattaaccctatacctctgacccaggtggatttttgtttctagttctgcacaaacttcactacttagacagtctgagtctttttctgtctatccatctgtttatttctatacctttcaatacatgttacttgttgcagatatttggcttgagaaatataatcagaaaacatacatcacttgtgggtgatatcactcctcgggatcctctagaatcaccgcagcaac

SEQ ID NO: 171606 - DNA, 405 bp, Homo Sapiens
  misc_feature (23)..(23): n is a, c, g, or t
ccaatccccacccctgcccccanccccggggtgaagtcccattctccccaggttacccactgcgcttgcttttctgtattttatttagacaagagatgggaatgaggtgggaggtggaagaagggagaagaaaggtgagtttgagctgccttccctagctttagaccctgggtgggctctgtgcagtcactggaggttgaagccaagtggggtgctgggaggagggagagggaggtcactggaaaggggagagcctgctggcacccaccgtggaggaggaaggcaagagggggtggaggggtgtggcagtggttttggcaaacgctaaagagcccttgcctccccatttcccatctgcaccccttctctcctccccaaatcaataaactagttgtttctaaaaaa

SEQ ID NO: 171607 - DNA, 450 bp, Homo Sapiens
  misc_feature (274)..(296): n is a, c, g, or t
  misc_feature (396)..(396): n is a, c, g, or t
gaaaaaagcatctatctcatctatctcaatcctaatttctcctcccttccttttccctgcttccaggaaactccacatctgccttaaaaccaaagagggcttcctctagaagccaagggaaaggggtgcttttatagaggctagcttctgcttttctgccctggctgctgcccccaccccggggaccctgtgacatggtgcctgagaggcaggcatagaggcttctccgccagcctcctctggacggcaggctcactgccagggccagcctccnnnnnnnnnnnnnnnnnnnnnnngacagcttgagccgggcccctgggtttggcctggctgttgattccactgacacctgggctgaaggttcctctgcctgccccgtccccagttccccacccntgcccccagtccccggggtgagttccatttttcccagggtaccagctgcgtttg

SEQ ID NO: 171608 - DNA, 417 bp, Homo Sapiens
  misc_feature (44)..(44): n is a, c, g, or t
  misc_feature (88)..(88): n is a, c, g, or t
  misc_feature (140)..(162): n is a, c, g, or t
ctggttaccctgggaaaaatggaattaaccccggggctgggggnaagggtggggactgggggcggggcaggcagaggaacctcagccnggtgtaatggaatcacagcaggccaaacccaggggcccggctcaagctgtcnnnnnnnnnnnnnnnnnnnnnnnggaggctggccctggcagtgagcctgccgtccagaggaggctggcggagaagcctctatgcctgcctctcaggcaccatgtcacagggtccccggggtgggggcagcagccagggcagaaaagcagaagctagcctctataaaagcacccctttcccttggcttctagaggaagccctctttggttttaaggcagatgtggagtttcctggaagcagggaaaaggaagggaggagaaattaggattgagatagac

SEQ ID NO: 171609 - DNA, 1187 bp, Homo Sapiens
  misc_feature (61)..(61): n is a, c, g, or t
  misc_feature (909)..(909): n is a, c, g, or t
gaaacggaggagcacgacaaggcacaagggggccgcataaggtcctaagtagcgagcctgngtggcgaattcccacgaggagccgccagcgccggcacatcccgctctgggctttaaacgtgacccctcgcctcgactcgccctgccctgtgaaaatgttggtgcttcttgctttcatcatcgccttccacatcacctctgcagccttgctgtgcagtgccaccgtcgacaatgcctggtgggtaggagatgagttttttgcagatgtctggagaatatgtaccaacaacacgaattccacagtcatcaatgacagctgtcaagagtactccaccctgcaggcagtccaggccaccatgatcctctccaccattctctgctgcatcgccttcttcatcttcgtgctccagctcgtccgcctgaagcagggagagaggtttgtcctaaccgccatcatccagctaatgtcatgtctgtgtctcatgattgcggcctccatttatacagacagcagtgaagacagtcacgacaaaaacgcgaaattctatcccgtgaccagagaaggcagctacgggctactcctacattcctgggcgtgggtgggccttccgccctgccacctttcatcaagcgggcaatgaatggtaaccctggaatactggaaaggaaaagcggccaaaaataaaaaggtttccccggggaaagccttggggggtttgggccttttcccttggccatgggccaaagtttaaccaagagaaaaatttccccccaaccagatttttcccaggcaaatataaaaaacccccagttctctttttgcgggaatgaaattaaaaattccccaaatttaaatattatttccctatggagaaggggggctattttttttccctcaaagggcctaanaaacccggtttaaattttggctcttcttcccccctagtcttataaaaaaaggcggcccccgtatgaggaacaatgcgcataagatactcacaattagggaaaaaagtaaggggaaacaacattaaagggggaacaaacacccacccagtatgaattcccccccttacctaactgcagcacaaagcacaacgcgagaggttgcttcttttttggcccattttttactcctgggggaacgaaaaactccccggaaagagaaaaaatttctcgcactccct

SEQ ID NO: 171610 - DNA, 775 bp, Homo Sapiens
  misc_feature (584)..(584): n is a, c, g, or t
gggagagcttcaaaacagcccggcggcctcgcctcgcacccccagccagtccgtcgatccagctgccagcgcagccgccagcgccggcacatcccgctctgggctttaaacgtgacccctcgcctcgactcgccctgccctgtgaaaatgttggtgcttcttgctttcatcatcgccttccacatcacctctgcagccttgctgttcattgccaccgtcgacaatgcctggtgggtaggagatgagttttttgcagatgtctggagaatatgtaccaacaacacgaattgcacagtcatcaatgacagctttcaagagtactccacgctgcaggcggtccaggccaccatgatcctctccaccattctctgctgcatcgccttcttcatcttcgtgctccagctcttccgcctgaagcagggagagaggtttgtcctaacctccatcatccagctaatgtcatgtctgtgtgtcatgattgcggcctccatttatacagacaggcgtgaagacattcacgacaaaaacgcgaaattctatcccgtgaccagagaaggcagctacggctactcctacatcctggncgtgggtggccttcgcctgcaccttcatcagcggcatgatgtacctgatactgaggaagcgcaaatagaagtccggagctgggttgcttctgctgcagtacagaaaccacattcagataacccatgttggatataaacataattttttgagggttttctagcaaacgggatgggtttctttaaaagccaaa

SEQ ID NO: 171611 - DNA, 499 bp, Homo Sapiens
acgaagcccctactgccaatgctctgcgctcggcctcctgtcatggtcttcacaatcgccagccctggagtaagccccagcggagggggcggggactccgaaaagggtgaggggctctggtctgcgatggggccacagaggagacgagggcgggctgcaccagccactgcaggtccggactggtcgagatggcagtgaccgtgggaatgaagttggcactggagacggccaggtccgtgcagaagtcctgcgcgttgacaggcgagcccatgctggagaaggagtctgcgggtgagtggtagtaagagaggctatccccggccggggacgcgctgctgcagcgggaggatgacgcctcgtagtctgcgttgaagcccgagaacatcatcgtggcggttaggcaaagccgggcgaggggccgaggggcggagacaggtgggcgctgtgaagcagagctgggtaggagcacggtcactgctcgattcgtggccgcggccgc

SEQ ID NO: 171612 - DNA, 689 bp, Homo Sapiens
  misc_feature (447)..(447): n is a, c, g, or t
cctccgagggccagagcaagcgctttaaaccctgacggtgggcctggcacacgcctgtattcccacaccaggtcttccgatcagtgatgtctgtgaagggtgccgcgagccaggctgaccaggcgcccgggatccagctcatccccttggctgggaacatcctccactgacttcctcccactgtctgccctgaacccactgctgcccccagaaaaaagccgggtgaaaaccgggggctcccaacccgtgcaacccctggaagggcaggtctggcggctcccacccgtggctgcaggggtctcatgtggtcctcctcgctatgttggaaatgtgcaaccactgcttctcgggaggagtggtgggtgcagtccccccgctgtctttgagttgtggtggacgctggcctgggatgagagggcccagaagaccttcgtatcccctctcagntcgcccggggctgtcccgtgcatgggttggctgtggggacccccaggtgggcctggcaggactccagatgaggacaagagggacaaggtatggggtgggagccacaattgaggataccccgagactacccaggagagccctgggctggaggctgagctgcatccctgctccccacatggaggacccaacaggaggccgtggctctgatgctgagcgaagctataggctcttgttggataaaa

SEQ ID NO: 171613 - DNA, 194 bp, Homo Sapiens
atcaccgaagccccgactgcctccagtagcagcagcacaacccctacccgaaagatcacagaaagtcctcgtgcctccatgggagttctctcaggcaaaagaaaacttatcacttctgaagaggaacggtcccctgccaagcgaggtcgcaagtctgccacagtaaaacctggtgcagtagagcctggtgtgat

SEQ ID NO: 171614 - DNA, 681 bp, Homo Sapiens
ttcgaattggggcggcgaagtgatcgctgcgcctggacgacggctggtgcgcggcgctggatcgggacacgatgatgtgcacgatttatgagacgtcggccgctgatttgtctgggaattcgagataggcgcaccggagtgcctgaccgaacgcgaaggaatcgccacggcgtaccgctgatctaaggccagtgacgacctcaatgtggaagggggcttgtaccccgatagtggtggatcagttggaagattccgcgactgacactccgccatcggagcaagccccctcccacaaggttttgaattacagcggcatcgtgtagtgcagtgagtagctttctacaccgtcgttattgctgctgatcccggcattagagtagtgcgtggcgcgaatgcccacttcatgcccaccggtgaagcgcaggccgaaacccaagcggtcttcgaactggaaagcctggccgatgttgttgtcctccagtttggtacgggagaacaccgccacgccgatcccggcttcgatgtagggcttgaccgactgaccggcaaatccatacacaaagacaggcgagaacgacaggctgctggcgcctgcacggtcatcaccttcccaataggtataggcgccgctccaatagccggtcaggcgaccgacatcactttgcattcaagtcttgtccc

SEQ ID NO: 171615 - DNA, 415 bp, Homo Sapiens
ttagattgggcggcgctctggatcagcggcgccaggtgcggttccaactgtttcatttgcgcaggcgtcagggtcttgatgagttgggtgagcaactcatcatgcaggtgttgcatgtcgataaagccgcccatggaggaacccccgcattctggctggttggaaaaccggttattcgaagctgggcaggtagctgtcggcattgtcgtagaccatggtcaacaccaccgtttcgggcggcagttcgggggcaagcctggcgacggccaccatgttggcggcggaggagaggcccaggctgatggcgtcggtgcgcatgatgcgtttcatcatgtcgatgcagtcttggcgcgaaaccttgagcatgccttcaatcacatcgaggttgaggatgctcgggatcagcccaatctaa

SEQ ID NO: 171616 - DNA, 344 bp, Homo Sapiens
  misc_feature (172)..(187): n is a, c, g, or t
cgtgacttgtgtggtgttatggatgaatattattgagagagcagagagagggagtcatttctttatttttataaagtcgaaaaaggtgggaataggattaggatcttccaagcatatgcttctcaaagaccattatcataaactttacctttacctttcttccatcttctannnnnnnnnnnnnnnnctctccaatattccacgttttctctgcactattttacaatcctttacatatctaaatagcatactttaacttcttcaattcttcctaaagagctaagcttttgaacgtcttggaaagaagaagtcacataacaacacacattccaggagtcctgtgt

SEQ ID NO: 171617 - DNA, 411 bp, Homo Sapiens
tatggactggatgtcccgcattgaagtgcggaatcaggtggagtggggttcggatcccccatgtcctctgcagaagtcctcaccagcctaccggtgtgagtgtcccggtagtaaactgccgtaatgaaaccgagctagaatctggaatctgttatttgtaatctgtgtgtacagaaaaaagaaaacaacgaagtcctacatgagaacgtgtgggaaaaacgcaaccaatatgtataaatacggatgcagaatgcataaatgcatgtatatgcaacctaatcggagaagtaagccttccatttttgttcattaatcaacttagtagttataatcacaaaaacggtgttattattgaaaacgacgacctggttacaatgcgagagtagtgaaaagattagggtaccgagctcg

SEQ ID NO: 171618 - DNA, 324 bp, Homo Sapiens
aattgtgtggtgttatgtaagatatttcaagaataaagtaagttttcattgatattcaaaaatttatgtaagatatttcaagaatgcaataatgatgaatatatttgtattcttaggttggcctattaacggatgaaagtgaaagaaataaataactaaaaatcttagaaagtggcccaactacatacgccaaaacgtttatgtcgtgtagaattaacgggtataagttcaacacagaaaggcacgatgcgggtttgaaaacgcaaaatagcggtgttgtcgttctaggagccaatgaccataacaccacacatacccggggat

SEQ ID NO: 171619 - DNA, 384 bp, Homo Sapiens
tgtggtgttatggacgcgcagatgtttatgaaagcacaaaaggatcactcaatctagacgcgaacatctggtgtgcaaattaaagaaaacattgtacgtattaaaacagtctctgagacagtggtacaagcggtttgattcatcatgattaacatttgctacaagcgatgtgagcatgattgttgtgtttatgttaaaagccttgatgatgggtcatttatattttgttactgtatgtggatgatatgttggttgctgcacaacatatgcataagattgttagtttgaaagctttgttaagttaggagtttaatatgaaagacttctccactttcggatctcgcaaagagagaacatgttttttcctcataacaccacacaatt

SEQ ID NO: 171620 - DNA, 227 bp, Homo Sapiens
aaggtatccagcagagaagggagttgaacttttggagtcgggaaccttggattcttgttctggctctgccacttactgtgtggccttgggaagtcctttgtcttctctgagctttcttttctctttgcgtaaaagcggtgctccttgtcccattctccctccctgtcttccagcaggctctccccggaggctcagccccctctgctggggatcccatagaacgacca

SEQ ID NO: 171621 - DNA, 395 bp, Homo Sapiens
cctgcagtcgatctagaggatccccgagtgggtcagtgtcttctggaagggggatgcactgtggatctgccatccattctgcagtctccagcagacaggcagtcaggccccagcgtgcctccatcccagtgccccgatgaccatctggtcagccctcccaacctcccttccagggggcttaccagcaaggccatattcggctaggaatttggaattcacaacctttattaacccctggcaaaacttcccgtttgcatgtcaaatcacattgaagcctgaaaattagcttttcttactggtttttccaataagtaatagcaaagcccacttatcatacttaaactacagtaaagaaaagaggtgcttctctgctgatacctgaatcctcggacgca

SEQ ID NO: 171622 - DNA, 455 bp, Homo Sapiens
  misc_feature (13)..(13): n is a, c, g, or t
  misc_feature (43)..(43): n is a, c, g, or t
  misc_feature (444)..(444): n is a, c, g, or t
aagaaaaccgganagactttgaagcacgttcacgtccacgttnttcccgggaaggctggaaaactttcacaggaatgacagcacctatgaggagctcccagaaacatgacaaggaggactttcctgcctcttggagatcagaggaggaaatggcagcagaaagccgcagctctgcgggtctactttcagtgacacagatcctgaattccagcaaaagagctattgccaaccagtttgaagaccgcccccccgcctctccccaagaggaactgaatcagcatgaaaatgcagtttcttcatctcaccatcctgtattcttcaaccagtgatcccccacctcggtcactccaactcccttaaaatacctagacctaaacggctcagacaggcagatttgaggtttccccctgtctccttattcggcagccttatgattaaacttcnaaaactgctgc

SEQ ID NO: 171623 - DNA, 659 bp, Homo Sapiens
tcagacaagagatagagaacactttagcttctcatcttcaatgtgaataaacctcaatcattttctttgcattatttcaaagaattcatctaattagcttagtttgggtctcatccttattaaaaagttaagggaagtagctgacaatctcaccaaagctctatacaattgcagatgagttaattctctaaaagttaactgaggtgctaccactagaaaaaaagaaatggaggcaagacagataaaatcaagagatggtcatattgatgaaacagtatgtcttaaattttcctatgctccaaaatagggaaattaacagctaccttaaattagaaataactaagtgaacagtttcctcaggtacatttagtgagcatttgtagagtcctttctcaatttcttcccaattattgttctattcaaatttctcacctctaaaagaatcaactttaaagatagctataattgatcacatccatatcaaatactaataattactttggtccatgtcccctcactcccagattttaacctatataccaggtgcacctatgtgtctcctcattttgagttcaggctcattgaattttaaagaccacttcagacctcagataggcagtaagtttatgaaagccacccttgtctgcgtctatatatag

SEQ ID NO: 171624 - DNA, 641 bp, Homo Sapiens
aaggtatccagcagagaagaaacgataccagattgaggatgatgaggatgactgaagagctaagaagcctaggggtagagatagacacgtttttagatggtgcattcaagtcagagttggaagggtcatacaggacccagaagctcctcttactggacagagcagtagaatcccaggctctttcacggatttaggctgagaaacttcagcagcagtattgacttctctgctgtcagtctttgtttctcccagtttttatcggtatgccccagcagctctctggagatttagttctcttcttctaggaaccatttcttttggttattggagctccttagcaaataagaggagtgagtgaaatagagaaagcaccccggaccccttttattggtctgttcctttggctttctcttggaggtgggtcgcagcaccagatggggagctttatgacatgacaggcgggagttttgtaccacttttagaagataccagatgcctctgtcctcattttgtttcctatgatcatcctctagataccagatagaggcccattcctgcatttgagatagggttggaatatagtactctagatgatgaatgtgtttgctttgtgtttgggattaaacatgtccggtttcccc

SEQ ID NO: 171625 - DNA, 902 bp, Homo Sapiens
  misc_feature (12)..(12): n is a, c, g, or t
gggtcatatcantgaagaatatcacagccaaacgctcacgggcccgaatagtggataaactcttggctctggggctggtggctgagcggcgggagctgtacaagaaacggcagaaaaagttggcatcctccatcttgccaaatggagcggagtccctgaaagatttttgccaggaagatctggaagaagaggaaaacctgcctgaggaagacagcgaagaggaagaagaagggggctcagaagcagaacaagtccagggtagcttagtcctttcaaatgaaaaccttggtcaaagcctgcatcaggaaggcttttctatcctgctcctatggctccagaactgcctgatccgagcagctgatgatcgggaagaggatggtgagtggacaggctgctcccaggccgttccattggtgccactcacagaggaaaatgaggaagccatggaaaacgaacagtttcagcagctgttgcgcaagctaggggttcggccccctgcctctgggcaggaaaccttctggcgaattccagccaagctgagtcctacccagctccggagggcagcagcttctttgagtcaaccagaggaggaacagaagctgcagccagagctgcagcctaaagtccctggagagcaaagctctgatgaggagcactgtaaagagcaccgagcacaagccctgagggccctcttgctaacccacaagaagaaagcgggcctggcatccccaagaggaggaagaccctgttgggtaaagaggcggctggaaggcagccccccaaggaaaaggacaattggcctgggacaggcgacgaagggaaccgggaaagaaaaatggaggggcaggggaaccagaaccacccccgaaagttgggggaagccctcccagggaaaatccccc

SEQ ID NO: 171626 - DNA, 674 bp, Homo Sapiens
gtgctcagttaaccgaggctccagaatagaagtcagtacaggttatccctgaacaggtacaaggacgcacttgtaaagatgattaaaacgtatctttcctttatgtaacgcgtctctagtgccttactgaagaagcagtgacactcccgtcgctcggtgaggacgttcccggacagtgcctcactcacctgggactggtatcccctcccaggatccaccaagggctcctgcttttcagacaccccatcatcctcgcgcgtcctcaccctgtctctaccagggaggtgcctagcttggtgaggttactcctgctcctccaacctttttttgccaaggtttgtacacgactcccatctaggctgaaaacctagaagtggaccttgtgtgtgtgcatggtgtcagcccaaagccaggctgagacagtcctcatatcctcttgagccaaactgtttgggtctcgttgcttcatggtatggtctggatttgtgggaatggctttgcgtgagaaaggggaggagagtggttgctgccctcagccggcttgaggacagagcctgtccctctcatgacaactcagtgtagaagcccagtgtcctcagcttcatggtccagtgcatggcagaagttcaatggggtagtggctctcaaggctgggcatccaagaagcagaggtg

SEQ ID NO: 171627 - DNA, 162 bp, Homo Sapiens
ctcagcagagaagccgaagcttactctggtcgtttccagagacaaactgctggctgtcttgggatgcgcccagcctttgagaggccactaccaccatgaacttctgccattcactggacatgaagctgaggacactgggcttcaacactgaggggtaccgag

SEQ ID NO: 171628 - DNA, 248 bp, Homo Sapiens
tcagtgtatcccgggtatcgagcagagaaggatgacagcatcaccccctccctgccctgagcccatctcacatccaggcaaaaccgggactagatgatcaaatctctcttccctgtgcctgcccccttgaacctgggaataaaagggaaggcagaaggggacaatctgatacctgaaacccccacctctataggatcccttccctaagggttacccagggaagtcagggcagagggaaagcatttcac

SEQ ID NO: 171629 - DNA, 917 bp, Homo Sapiens
  misc_feature (854)..(854): n is a, c, g, or t
tcttccattaatcccaagtatccagccagaagtaggaaaagaaagtccacgtcctggtgcatcaaggggaggagcttcacgtcggcgtctcacgtcccgcgtgtgctgagtgccgggactcggacttcctgtgataagcgacgggctcctggccacgaggcctcaggcgctgcttgagcatcctcacagcatggcggccacttcctaattgtcctccttactgaactgtaagctccacaaagaaacagtaggtgttcctatacagtctgtggttggctgaatacacagctgtgcatgaggggaaggcatcaccaagtgcaagcagttacgatgcttttcctccaccagaggctggacatactgctatgtatcatgaagctgcagtggttgcacatccacctgggcttgacaacagggactcttgtctgaagggtcagagccaggatcttgatcaagacaaaggatttcatctcataccatctgcacgctgtaggtgccatgggtgggtggcccttagagaagggtattttctttcaaagcactaatgaaatgggcctgtgcatgatcaacttctgaatgcttattcagtggcagagccatctgggagaatttggccctgagggcaagaggggggatcagccttggggagacaggtacccccagcaccttggcagcaatgccactttcacagacgcatagtgtagcctgagggagcttcacaagtagcaagctggatgaggccaccccttctagggatctcctaaaaggttgcccagggcctctctccagcctcgtgcccacacccgctcctccttccaggctcagacctaccctagggcctttgcacatgttgntcccatgccctgggagctcttgtcttcgtctgctggatacattgggatgctctgaacagcatg

SEQ ID NO: 171630 - DNA, 257 bp, Homo Sapiens
ccagcagagaagaagggatccaggctgtgggagaattaagaagtagagccaaggacagggttagggaaactctggaccttagtggagaacgtatagaaaatacaagcgggttttctgaaagccacgctttcagggaggaccccccagagaccagagcgtcaatttcaaaccatctgggctcaactgtgccctttttggaaggcacctctggtcctgaaagtctttatcggtgacttctctgctggagaccttcgtga

SEQ ID NO: 171631 - DNA, 185 bp, Homo Sapiens
atcctgtggaaattccggtgaattctagtgattgtgggcaaaggaaatgtgtgatacctaggctatgtgaaataaaaaaatggtgaatattgatcacattgggtaagtttgggaagagagaagctaaatttggcagattagaaaagaagatagtacagtgactcgaccacgggatcctctgatcg

SEQ ID NO: 171632 - DNA, 524 bp, Homo Sapiens
tgaagcggcttgtgtatgagccctcactctcccactcactggctgtaccttggccaggcattcgccctgagcctcaggctcattcacatcagatgagacagcacccattccacaggtggtatgaggcttaaatgagaaagactgatgtgagtgggggcgcttggcaaagtgaggagggtcaggcaatgccactgccgttcctgttggaaggctggcagtgcagagggcgccaccatgggggatacatttctccaccttcaatgaggcagtggagtagtgaggataggatttacattggtttttaaaagtttagaaacagtaattatttaatacacacactccttaaaaaattttaaaatccaagcagtacaaaaacggagtgaagaataaatctcccatccatactagccttctagttcaccttccagaaggtatcctccctccagaaatattttagacacatgtaagagtgtgtgcgcccctcccccaacacatacacaagccgcttcacgggtaccgagctc

SEQ ID NO: 171633 - DNA, 716 bp, Homo Sapiens
ctgtggcaggcacctgtaaaacttatcttatctccccatcaatctcaccagcagcacctagactcctaccaaggaccactccccaccaacaggcgggtggcagaggcaacaggtcagaacgcgctgggccgctccagtgacaagattgacattggccacccagctcttatgatcacttctctgcagaaagggatcattttgtgatttacgggctgagtaaagcaaggccgagttgaaatctcatctgagagatttctctcatcctgggcagcttgggccagatatagggagattgctgtggctcctctgtattttcctagcacccattacttacttttggaacagtggtgctttcatttcactttgtaccaccactaaaaatttcatcacccagagattactttagggcaataaagaatcacctaagaaggaggttaagggattgctgctggtccctcaaacaactgtatgaaacagacttcttccccttaactcctaaggaataaaggcatcagccataccaagggaatcaagagatttcatttaaagggataaagaaagaaatgtgggaagccagagccccttgaagggaaaaactgtctgaggaaggccacctcagggcaacataaaagccctggcaggtatgagaagagaggaagggagtaggacaagcttttccagcagaccccagagattcccctgtgatacacacccgc

SEQ ID NO: 171634 - DNA, 215 bp, Homo Sapiens
  misc_feature (147)..(155): n is a, c, g, or t
atgctgattcagaggatcccgttggtcgatcactgtactgtactcagtctcacaccatggatatacaaaagaagttgtaagctgtcgctctgaatggtggcatgtttttgtttttaacttcaattctctgtagtttctcaaagttgnnnnnnnnnccctacaatgactgtatcatttaaataagaaaaaatatatatataaaatactaaaatctt

SEQ ID NO: 171635 - DNA, 892 bp, Homo Sapiens
  misc_feature (764)..(764): n is a, c, g, or t
  misc_feature (777)..(777): n is a, c, g, or t
  misc_feature (793)..(793): n is a, c, g, or t
  misc_feature (827)..(827): n is a, c, g, or t
ctgtatgcagattcgattcgagctcgtacccatggtcgatcactgtactccaagccaagtgccccagggcccagcacaggccaggactgggcacagctgaccccgtagagattagggaggaacagtgcctctctgtatcctgctgtgagcaccactggcctttccttcagatagcttgttcacctcccaacccatccctcacccacaggggagatcgtggtgaattggtttgaggctgtccagactggcctgcccatgtgcatcctgggtgcattctttggaccgatccgacttggcgctcagagcctgcaagtgctggtctcggagttgatcccatgggccgttcagaacgggcgcagagccccatgtgtcctcaacctgtactatgagcggcgctgggagcagtccctgagggctctgcgggaggagctgggcattacagcaccacccatgcacgtccagggcttggcctgagctcctgagccagcggggcctggcctacctcccccatcccctgcttcccttggaggcagagggctcccttgactacctttgttcctcttctttgaacactgacccttggacaacatttatcataatttgtcataaccactggctgagtggccttgaggacgaaccccgcagggagcaagcagtacagtggcattcccagggggaccagcagctacccaaggagaaaccatgcatgaacagtatcagtcgtctgggctcatgctgggatgtcgcagtgctcctgttgcaantcctcccagccanccaggtttgctggggnccaggctgggtgtcctcacaggagtgagggctanacccaattccaaaagcctgagaagagagaagtggagggggaggcgagtgtgtgaataaaggctcc

SEQ ID NO: 171636 - DNA, 730 bp, Homo Sapiens
gcgtggttgcgtgtcctttgcagacactttctggggcgaggtgaccatggcgagagtcttggatcggtggacgtagacggtagacagttcgcgtgcgtttccttcgcctacttggcctacatgccttctgcccgtgaagcgatgtttcccctcgaaaggccgtaggctacgccgtcagaatcggtttttcagtgagttttgacccctccgacgctccgtcgcctgacagaatcgcggcgttcttcgtacccgcccatcctccgcggacgcccgctgccatggcgactctgctgcgccctgtcctccgtcggctctgcgggctcccgggcctacagcggcctgcggcagaaatgcccctccgggctaggagcgacggcgccggcccgctatactcgcaccacctccccacctccccgctgcagaaagcgctgttggccgccggctccgcggcgatggcgctctataacccctaccgccacgattcctggatcccacctaaacgcactgaatctgaatctgaatctgcagtggagggagaaatgggcgtgaaaccgaaagtctgtctttaaactacttgggagaatctgtcatgcagccatattgagaacatctagactaaatagatgattcataagtaccgatcagtttataatatcctactagaaagtcaactccgaggtcgaggaccatgtctgcctcgttccactgcatctgcagccttctggatagt

SEQ ID NO: 171637 - DNA, 292 bp, Homo Sapiens
atgattggactgactgaagtatgggcctgtgaatatagattgaaaaattaaaaagaaatgctacaaaattataacttagctacataatgtttaatatcaaaactcaccagacaatccaattttaaagaaactgatggaaaaatgcttcccctaacgtgaactatggttagatagcattgtctgtcaggaaattcaccaattcagtagctgatctttatgtggaaacaaaaatagggcttgtccttattcataagtacagtgatcgaccaacgggatactctagatcacttca

SEQ ID NO: 171638 - DNA, 216 bp, Homo Sapiens
atgagacctctgtgtgagatgtgagtatctctcacagttcacaattgccggttaagaaccccagaaagtctgttccttttggtagtaaatgaatctttcaaaggtttcccaaaccactccttatgagccagtgaatattcaagagagctacatttgagagcctgtacaaaagcttatccctgtaacacatgtgctattgaaacttctaaaactagg

SEQ ID NO: 171639 - DNA, 877 bp, Homo Sapiens
  misc_feature (578)..(670): n is a, c, g, or t
  misc_feature (707)..(719): n is a, c, g, or t
gggagagacaaagttcggagccccgcccccgccgcgcgccgctgagttgtctggccccgccgacccacggcccacgacccaccgacccacgaatcggcccggccgtcgcgtgcaccatgtctggctcctccagcgtcgccgctatgaagaaagtggttcaacagctccggctggaggccggactcaaccgcgtaaaagtttcccaggcagctgcagacttgaaacagttctgtctgcagaatgctcaacatgaccctctgctgactggagtatcttcaagtacaaatcccttcagaccccagaaagtctgttcctttttgtagtaaaatgaatctttcaaaggtttcccaaaccactccttatgatccagtgaatattcaagagagctacatttgaagcctgtacaaaagcttatccctgtaacacatgtgccataatatacaaacttctactttcgtcagtccttaacatctacctctctgaattttcatgaatttctatttcacaagggtaattgttttatatacactggcagcagcatacaataaaacttagtatgaaacttttaccgaaagcgnnnnnnnnnnnnnnnnnnnnnnnnnnnnnnnnnnnnnnnnnnnnnnnnnnnnnnnnnnnnnnnnnnnnnnnnnnnnnnnnnnnnnnnnnnnnnggggcgcgccctcacgcgaccacacgcaggaaggagnnnnnnnnnnnnnccctctgcggccccgaaaaaacctgttataaaccaatttgggtgggggcggggcgccccccaagaggacaaaagaacaacgggcccatccggccttccccaacaagaaaaccccgccgctatacccacaccgcggctttggatatccccgccccaagt

SEQ ID NO: 171640 - DNA, 500 bp, Homo Sapiens
  misc_feature (12)..(12): n is a, c, g, or t
  misc_feature (388)..(388): n is a, c, g, or t
  misc_feature (395)..(395): n is a, c, g, or t
  misc_feature (404)..(404): n is a, c, g, or t
  misc_feature (422)..(422): n is a, c, g, or t
  misc_feature (430)..(430): n is a, c, g, or t
  misc_feature (449)..(449): n is a, c, g, or t
  misc_feature (459)..(459): n is a, c, g, or t
ggccccgccgancccacggcccacgacccaccgacccacgaatcggcccgccccccgcgtgcaccatgtctggctcctccagcgtcgccgctatgaagaaagtggttcaacagctccggctggaggccacctgcaaccgcgtaaaagtttcccaggcagctgcagacttgaaacagttctgtctgcagaatgctcaacatgaccctctgctgactggagtatcttcaagtacaaatcccttcagaccccagaaagtctgttcctttttgtagtaaaatgaatctttcaaaggtttcccaaaccactccttatgatccagtgaatattcaagagagctaacatttgaagcctgttacaaaagcttattccctgttaacacatgtggccntaatatnacaaatttnttatttttcgttcagttnctttaacntttaccttttggatttttnatggattttntattttcacagggtatttgttttatatacatggggcggcgg

SEQ ID NO: 171641 - DNA, 331 bp, Homo Sapiens
  misc_feature (279)..(279): n is a, c, g, or t
cgtcacaggatctcgttggtcgatcactgtactgagtgagaatgaagaaagcagactaggaactatgctcaacaaatcaactactttaggaaacacaacttgtggatgagggagaaaggattaagtagtaaaaccaacctgaccacggtgtttttttgcttcaaacagtttagtaaggcaggatctgcacaccacctgtatgtggagccaagagaaaagacaaatggattatcacagcttcaatgcatgatttgtcaacaagccattctcttttttttnggagatggattctcactctttcgcccaggctgaagtacagtgatcgaccaag

SEQ ID NO: 171642 - DNA, 1028 bp, Homo Sapiens
  misc_feature (51)..(66): n is a, c, g, or t
  misc_feature (149)..(433): n is a, c, g, or t
  misc_feature (436)..(452): n is a, c, g, or t
  misc_feature (892)..(892): n is a, c, g, or t
  misc_feature (910)..(910): n is a, c, g, or t
  misc_feature (916)..(916): n is a, c, g, or t
  misc_feature (940)..(940): n is a, c, g, or t
cttggtcgatcactgtactccagcctgggcaacaggtaagactctgtctcnnnnnnnnnnnnnnnngaagaagaaaagtacttctacagccatgtcctattccttgatcatccaaagcacctgcagagtccagtgaaatgatatattcnnnnnnnnnnnnnnnnnnnnnnnnnnnnnnnnnnnnnnnnnnnnnnnnnnnnnnnnnnnnnnnnnnnnnnnnnnnnnnnnnnnnnnnnnnnnnnnnnnnnnnnnnnnnnnnnnnnnnnnnnnnnnnnnnnnnnnnnnnnnnnnnnnnnnnnnnnnnnnnnnnnnnnnnnnnnnnnnnnnnnnnnnnnnnnnnnnnnnnnnnnnnnnnnnnnnnnnnnnnnnnnnnnnnnnnnnnnnnnnnnnnnnnnnnnnnnnnnnnnnnnnnnnnnnnnnnnnnnnnnnnnnnggnnnnnnnnnnnnnnnnngtatattctaacagacagatcagaggtctaagagatcctcccttgctattattacctgaagtctgtagaactgtttacagatatctccttgacaggtgtcctttatcttactttatctgtacagtaatcctgtgagaaagacaggacagaaaccactgtgcctattttacagatacgaaaactgagacacaggtaaaggggcttgtctgtagtcccatagctagcagatggctggagccaagactgaggctcgttcttcaatgctgagccagggctccttccgctgcaccacaagaacgctagaccactcgccacccagccttctcattcccctcttctcccattctaatcatttctagctggctgggcctcccacagagcataggaaaaacagcccagggccggggcacggtgggctcatgccctggtaatctcaacanctctggggaggcccgagnccgggntgggataaccctggagggccaggnaatttccaagaacaggccctgggcccacaatgggtaaaaacccccttcctcctacttaaaatttattaaaattttgccccagggctgg

SEQ ID NO: 171643 - DNA, 1292 bp, Homo Sapiens
  misc_feature (50)..(330): n is a, c, g, or t
  misc_feature (413)..(697): n is a, c, g, or t
  misc_feature (700)..(716): n is a, c, g, or t
  misc_feature (1156)..(1156): n is a, c, g, or t
  misc_feature (1174)..(1174): n is a, c, g, or t
  misc_feature (1180)..(1180): n is a, c, g, or t
  misc_feature (1204)..(1204): n is a, c, g, or t
agtcgacggtaccggacatatgcccgggaattcggccattacggccgggnnnnnnnnnnnnnnnnnnnnnnnnnnnnnnnnnnnnnnnnnnnnnnnnnnnnnnnnnnnnnnnnnnnnnnnnnnnnnnnnnnnnnnnnnnnnnnnnnnnnnnnnnnnnnnnnnnnnnnnnnnnnnnnnnnnnnnnnnnnnnnnnnnnnnnnnnnnnnnnnnnnnnnnnnnnnnnnnnnnnnnnnnnnnnnnnnnnnnnnnnnnnnnnnnnnnnnnnnnnnnnnnnnnnnnnnnnnnnnnnnnnnnnnnnnnnnnnnnnnnnnnnnnnnnnnnnnnnnnnnngaagaagaaaagtacttctacagccatgtcctattccttgatcatccaaagcacctgcaaagtccagtgaaatgatatattcnnnnnnnnnnnnnnnnnnnnnnnnnnnnnnnnnnnnnnnnnnnnnnnnnnnnnnnnnnnnnnnnnnnnnnnnnnnnnnnnnnnnnnnnnnnnnnnnnnnnnnnnnnnnnnnnnnnnnnnnnnnnnnnnnnnnnnnnnnnnnnnnnnnnnnnnnnnnnnnnnnnnnnnnnnnnnnnnnnnnnnnnnnnnnnnnnnnnnnnnnnnnnnnnnnnnnnnnnnnnnnnnnnnnnnnnnnnnnnnnnnnnnnnnnnnnnnnnnnnnnnnnnnnnnnnnnnnnnnnnnnnnnggnnnnnnnnnnnnnnnnngtatattctaacagacagatcagaggtctaagagatcctcccttgctattattacctgaagtctgtagaactgtttacagatatctccttgacaggtgtcctttatcttactttatctgtacagtaatcctgtgagaaagacaggacagaaaccactgtgcctattttacagatacgaaaactgagacacaggtaaaggggcttgtctgtagtcccatagctagcagatggctggagccaagactgaggctcgttcttcaatgctgagccagggctccttccgctgcaccacaagaacgctagaccactcgccacccagccttctcattcccctcttctcccattctaatcatttctagctggctgggcctcccacagagcataggaaaaacagcccagggccggggcacggtgggctcatgccctggtaatctcaacanctctggggaggcccgagnccgggntgggataaccctggagggccaggnaatttccaagaacaggccctgggcccacaatgggtaaaaacccccttcctcctacttaaaatttattaaaattttgccccagggctgg

SEQ ID NO: 171644 - DNA, 531 bp, Homo Sapiens
tatacttcaggaccaggtgatagttgagttcacttgtctcttcagctgagtctaataaaatattcaacatgtctgagggcttttttcttatttcaataagtatttctcatttttaggagctctatttggttctttttcagatctgcctgtggttccaacttcattccttacgttggtgatgaaaccttgaagaactgagtccaatgtatatttttactatagcttatcttgtcatgttagttagttacaacttgtgcctgtgatctctagtcataaaatactactacttgataataatctgtaggaatcttggaactaaattaggaatgtttccctcttgcttctgacaggagctagagcactgcaaaactgaggaccactgaaccttcctttaactgtcctctctagggcagcatctcagattccgatgtctttcttgtatctagatttggaggcaaactgcatatgacaatgttgctattggtatctgccatccagacaaccataatcaacttgtatggtcactacagt

SEQ ID NO: 171645 - DNA, 527 bp, Homo Sapiens
cgtcagcaggatccgttggtcgatcactgtactgtgtcagagaggaaaattcagtaacaatataaaatatctgacttttcagaagcatatattcttgtagaagaaaacagtagacactaggcagcttattaagcaacataatgtgtgacctgaaaatataggtgctattgaaagtaatgaaacaatgagatcaagatgggtggggacagttaagaagggggttttctctcatcacctctttcttcttactttacaatctaattccggtctttactcaattgcaattgtaccttgaagaatactactgacttaattgtcaaggccttactatccaaaggcctttttcagttatcaataagcctcacccccttaaaatacaggacacaccgaccattccctacttattaagaatctcttctcctggcttctcagacaccaccttgttatgtctttagtatacttctgttttctttttttatattattaagatgggtctcgatttgtcgcccaggatgtagtcacagtga

SEQ ID NO: 171646 - DNA, 393 bp, Homo Sapiens
  misc_feature (214)..(230): n is a, c, g, or t
tcccgttggtcgatcactgtacttcacagagagtaatttctaagtcttacaggatttcatggagatggcgagagtggtgtaggagaatcaatcacatacagagatacaggacagtgagagcaggtaacattccgaggagcatattcgtattcaagggcaacggggtctcgatcctgttgtccagcctgggaaacaatgcgagtccctatctctnnnnnnnnnnnnnnnnngaaatctgcatataatagacccacagagtccaaactattgttcagagatcaactgtacttcacagagagtaaattctaagtcttacaggatttcatggagatggcgagagtggtgtaggagaaatcaatcacatacagagatacagtacagtgatcgaccaag

SEQ ID NO: 171647 - DNA, 227 bp, Homo Sapiens
ttcccgttggtcgatcactgtactgctgaagaaaacactaaatactatagtgaggaagtaagaaaaaatgaggcttcatcaggagataaatataaaatatttacctagtaaaacaatggtatacatttattattgattgattgactgactgactgagacagggtcttgctttgtcacccaggctggatttggagtacagtgatcgccaaacgggtactctagacagc

SEQ ID NO: 171648 - DNA, 256 bp, Homo Sapiens
tcagaggatcccgttggtcgatcactgtactaagcttccccatggtcttccatgggatagtcatacgggactccatataaatatttggctacatctatccatcctttcatgctacataatttctgctttcttcttttttttaatccaaggctattattgagcttcactatcttacatccacatgcacattgtttattttttaattcagttataatatacatgggataaagtgcacaagtcttaacagttccataac

SEQ ID NO: 171649 - DNA, 245 bp, Homo Sapiens
gagctcggtaccctggtcgatcactgtacttatgtacctgtaggatgtaatctagttggaaaacatattcgaatctagttggatctatagttgaataacagctgctcctttgtctgatctgagagataactaacctttgagtaaggagagaagtttacaaaagtaaggaaggggaatgcaccctgaaatgactggcagagtatgaatcacatttgcaagtctgatactctatgacctttctttct

SEQ ID NO: 171650 - DNA, 228 bp, Homo Sapiens
  misc_feature (54)..(77): n is a, c, g, or t
cttggtcgatcactgtatctccagcctgatccacagagcgagactccctttccnnnnnnnnnnnnnnnnnnnnnnnncgtatgaccacggtgttactaccacaactaaaatactgattgtaatgccctatcatctattaggacttttagtactcctgccattttccattttaaataccatttccattttgttgacaagtgaagaaaaaccagtacagtgatcgaccaa

SEQ ID NO: 171651 - DNA, 182 bp, Homo Sapiens
aataaaaattgaggatccaatgcttatactgctgaattgttcaaaacatttaaagaggaacttatactaattatttacaaactgttccccaaaaaagtgaaaaggaggaaactcttccatactcattctatgaagacagaattaccttattccaaaatgcgacaagtacagtgatcgaccaa

SEQ ID NO: 171652 - DNA, 326 bp, Homo Sapiens
tcgatctagaggatcccgttggtcgatcactgtactacgcgcgacggccgcgcgtgggggggattgagggaatgcatcggacgcgcattgtagcggcgcgatgtcgcagccacatcggcgataatgcgccaccgctccggttcgcgtgccccgccgatggccaaactgtatttctactattcggcgatgaacgccggcaagaccacgaccttgctgcagtcggcgcacaactatcgcgagcgcggcatgcgggtggtcatcctgacgccgaagctggaccaccgcgccggcagtggagtacagtgatcgaccagggtacctgagct

SEQ ID NO: 171653 - DNA, 459 bp, Homo Sapiens
tgcacggtgctagaatccgaagcgattctatacaaagcaacgtttagtgcctttaggtgaatatattccactatccggtttactgaaatgggtgttgactgccatgcagaatgatccgtcgataagtggttattcacggtggtgaacaacagcaacaaccgctttctattcatcagcagcatttaggcgcgtccatttgctatgaagtagcttatccaaacttaacacgtcttaatgcccgccaaagtgatttcttggtgacagtttccaacgatgcatggtctccgggaactgcaggccctttagaagatttacagatggttcaaatgcgtgccaaagaaaatggacgctggtttatccgtgccaccaatacaggcgtaactgcgtttattgaccatcaagggcctatcgtagaacgtgccccacaagatgtggcaaccgtgcttcgctggagaactg

SEQ ID NO: 171654 - DNA, 333 bp, Homo Sapiens
tactatgtggcgatcactgtactgtcatgtgaggtggctagggattaatttttccagtaaatatgtcaaaattgagaaatgaaaataaacactgtgctccactgtcaccccttcaggctgctaccaggacacagccccgtgctgctcagagaatgcttgagtgtcctctttggagaccaccctagagctagagttccagccacgccatattgttttattagccatcatccattttagacaggattagttaaaagagacttattcaccagaatttgtttttcttaagatagaattttgctctgtcacacaggctagagtacagtgatcgaccaa

SEQ ID NO: 171655 - DNA, 286 bp, Homo Sapiens
agttggatcccgttggtcgatcactgtactggggtcactggacaaatagagttggattcagaggattaaagtgcaaggcacctgaacaggcgtaggtgttaccaggtgcccatgtgaatgctctgcacagggcatgcggctgagcaggtgctcaggaggtcagcccattctcaccctgatggtggcatggacgccaaggccattctccatgtcaatcatggtcattgattgtactgattatgatacaggattattgtttgccccttcgagtacagtgatcgaccaa

SEQ ID NO: 171656 - DNA, 221 bp, Homo Sapiens
ttggtcgatcactgtactccatacgttccaaaagttctttacagatacggaagatataaaaaaactcaaactggatatcaacagatagaaattacaatgtctgaaataaataatgtactggctggaacagcagacttttgttttctgggggagagtcttgctctgtgcccaggtcctgtagtacagtgatcgaccaaacgggatcgctctagatcaacctc

SEQ ID NO: 171657 - DNA, 140 bp, Homo Sapiens
ccaaacttggaatcatactataagttattttataatttgcttgtgtcaccctaacagcctgatccttgtcctttgtcattaagtattctcctacaacctggtttataatggctacatagtacagtgatcgaccaacggga

SEQ ID NO: 171658 - DNA, 339 bp, Homo Sapiens
  misc_feature (312)..(312): n is a, c, g, or t
ccagccagacaggatttctgaggttaatctgcttctgttaatcctcaatttaagcctttatcatttttctctgactagagacatccatgaaaagccacctgttattcacaggggctgcgcttcaggaaaccaaccaaatgcagaagcagagaacttaaatattgtaaataagttaactgggcatgaaaatacaatgccttggtgttcaggtggtgacaactgctctttaagaggggacaagaaattggggggtaggggacacatgggaaaaaaccacacattatttggtcatgagaaattgggctttaaatncgcgccctgcacacggcgattgcattt

SEQ ID NO: 171659 - DNA, 897 bp, Homo Sapiens
  misc_feature (873)..(873): n is a, c, g, or t
acagccggtaccggtgtggcaggggaaatgtctcggattttgataatgaagaagaggaacagtcagtccctcccaaagtggatgagaatgacacccgtccagatgtggagccaccactgccattgcagatccaaatagccatggacgtgatggaacgctgcatccacttgttgtcagataaaaatctgcaaatccgcctgaaggtcttggatgtgctggatctgtgtgtggttgttcttcagtcccacaaaaaccagctgcttcccttggctcatcaggcctggccctcgctcgttcaccgactcacacgggacgcccccctggcagtgcttagagccttcaaggttttacgtaccctgggaagcaagtgtggtgactttcttcgcagccggttctgcaaagatgtcctgccaaagctgcctggctccctaaccaccccagccccccatcagggccagggctggaccagtttactcgcacacgctggccttcaagttgcagctggctgtcttacagggcctgggccccctctgtgagagactggacctaggtgagggtgacctgaataaagtggctgatgcctgcttgatttacctcagtgtcaaacagcccgtgaaattacaagaggctgccaggagcgtcttcctccacttgatgaaggtggacccagactccacctggttcctcctgaacgagctttactgccccgtgcagttcacacctccccaccccagcctccaccctgtgcagctgcacggggccagcgggcagcagaacccctacacaaccaacgtgctccagctgctcaaggagctgcagtgaaccctgctcccccaccacagaggccaccgatcccctcccctactgcccagncaagaaacttgggctgaccccccc

SEQ ID NO: 171660 - DNA, 292 bp, Homo Sapiens
atggcggtcagaggtgtggcaggccatggagatggtgggcttcctccccgccaccaagaagcagatttttgccgtcctctcggccatcctgtacctgggcaacgtcacttataagaagagagctacaggccgagaggaagggttggaggtcgggccacccgaggtgctggacaccctgtcgcagcttctgaaggtgaatgcgagaaatcttggtggaggttctgaccaataagaaaaacggtgaccgccacaacctctagaagcctgccacacctctatctgatcctctaga

SEQ ID NO: 171661 - DNA, 474 bp, Homo Sapiens
ggtgtggaggagatgaggtgcgtgtccagtagagctgacgtggtcagcagctcgtccagggagaacttcctttccaggcctccatcctccaggtatcggaattccgtattggtccaggtggaaaacttctctagaatataggcagccagacccacaggagagtcattcagagcagagcctacggggtcaggcttggtgcactggatgtgcatgtagccgctctccctcatcaggctgtagaataccttctccttgacggggtacagcagctccacatccctctcagtgaggccaagaaacctcccgaaacgctgtcccaggaggagggtcagggtagagaagttgcttaaaaccaaggccatgttcaagtgcaggcctttcacgtggctgggcaccagctgggccatattagtgctagatcagggacctccagtcccctccttgaatgtagaattcctggaagccctgccacaa

SEQ ID NO: 171662 - DNA, 455 bp, Homo Sapiens
  misc_feature (393)..(393): n is a, c, g, or t
  misc_feature (412)..(412): n is a, c, g, or t
tggctctgcgtgctcgtcccgaagtgacctgcctggttccgacaaggacactgaggatggcagtgcctggaagcaagatcccttccaggagagcggcctccacctgagccccacggcggccgaggcaaaggagaaggctcgagccatgcaagtcaacaagcgcgcgccacagatggactggaacaggaagcgtgaaatcttcagcaacttctgagccccttcctgcctgtctcgggaccctgggacccctcccgcacggaccttgggcctcagcctgccccgagctcccccagcctcagtggactggagggtggtcctgccattgcccagaaatcagccccagccccggtgagcccccatcctgcccctgcccaccaggtactggggggcctntggaagtcaagataggggngagagagacccagagatgtgagagagagttcagattacagagt

SEQ ID NO: 171663 - DNA, 942 bp, Homo Sapiens
  misc_feature (901)..(901): n is a, c, g, or t
  misc_feature (915)..(915): n is a, c, g, or t
gccaggggaacccaaccccttcccaagtttcccaattgaaggggcttgggggggaaggtttcgggggccagggcttgagggccccaaaggtcccgttgccgggagggggtccccaggggtccccgaggacagggcaggaaagggcttcagaagtttgctgaagatttcacgctttcctgtcccagtccatctgtggcgcgcgcttgttgactcgcatggctcgagccttctccttggcctcggccgccgtggggctcaggtggaggccgctctcctggaagggatcttgcttccaggcactgccatcctggggtgagcacggtgggtggggtgtctggagtgagccctagtcccacaccccagacggtggcccctcctcagtgtccttgtcggaaccaggcaggtcacttcgggacgagcacgcagagccaccattgagctgggcagggctggttccattggtgacgggtgacggcagaggaccttccacgtgctcctcggtgggtgtgacccgaagccgcttgaagtgttcatctgtctcggggtccacgaccagcagccgggcctcgtcctcccgtgccttgatgctggccaccacctcagcatggcgcagtccctccacattctgcccgttcacctcaatgagccggtcctgggcgcggaggcagagcgggcggcaggtgagcccgggtccacagagcggatgtactggccgggccgggacttgtcactatgcaggttgaacccatagccctgaggtccctttcgcaggtggcagagcgagggcgcagctccctcaggggcccactgacatccttcttgccagcttcggagctgtggctgccggtgtgtgcccagtcttggctttcggctcccaggggttcgttggggcgggttggancccttcgcttgggncattcttctcggtaaaaagttaagccc

SEQ ID NO: 171664 - DNA, 354 bp, Homo Sapiens
  misc_feature (18)..(18): n is a, c, g, or t
  misc_feature (36)..(36): n is a, c, g, or t
  misc_feature (104)..(104): n is a, c, g, or t
  misc_feature (112)..(112): n is a, c, g, or t
  misc_feature (130)..(213): n is a, c, g, or t
  misc_feature (223)..(223): n is a, c, g, or t
  misc_feature (228)..(228): n is a, c, g, or t
  misc_feature (231)..(231): n is a, c, g, or t
  misc_feature (236)..(236): n is a, c, g, or t
  misc_feature (277)..(277): n is a, c, g, or t
  misc_feature (298)..(298): n is a, c, g, or t
cccccagtcctcagtggnactggagggtggttcctnccattgcccagaaatcagtccccagccccggtgagcccccatcctgtcccctgtcccaccaggtactnggggcctntggcagcaagataggggnnnnnnnnnnnnnnnnnnnnnnnnnnnnnnnnnnnnnnnnnnnnnnnnnnnnnnnnnnnnnnnnnnnnnnnnnnnnnnnnnnnncgagcgagcncgcgncancccgngtgcgagggcctttgctgctctgccggggcctgctgactgnaaaggaatttgtgtttttgcnttttttccaaaaagatctccagctccacacatgtttccacttaataccagagaccc

SEQ ID NO: 171665 - DNA, 561 bp, Homo Sapiens
gtccgaggatctccgtgatcggtaacttggtagcttaaacaaactccttagacagttcaatagagcaaagtgaagaattactctattaggataacctgtgaacaaagttcagattatgtgaatttgtattccattcgaagtttggcaccagactgaacactggtttaagccaaattttttagtgttctagaagccctgaacatgttttccctcagattaaaagtagaacctttataatagaacctcattagcttgacactgagtatgctgagtgcaacttagcttaggtcaccagtatctcctacagaattccagttaatgaaagcagatcagccttgcggcaaagaatttgaaacctaggcaacatacaagtttgaagaaaaaaaaatcctctttggtgtgacaaagcacattccctccaggtatatggctcctgctccacttgcacccgaatcttgatcaaaggcagctggagaccaattcttgtctctccaataagattgctaggtttcaattccttaaaatatcaagccaaccaagttaccgatcacgggtaccgag

SEQ ID NO: 171666 - DNA, 616 bp, Homo Sapiens
  misc_feature (170)..(178): n is a, c, g, or t
agtgtacacgtgatcggtaactcggtaggcttgatatttaaggaacgaaacctagcaatcttatggagagacaagaattggtctccagctgcctttgatcaagattcgggtgcaagtggagcaggagccatatacctggagggaatgtgctttgtcacaccaaagaggannnnnnnnncttcaaacttgtatgttgcctaggtttcaaattctttgccgcaaggctgatctgctttcattaactggaattctgtaggagatactggtgacctaagctaagttgcactcagcatactcagtgtcaagctaatgaggttctattataaaggttctacttttaatctgagggaaaacatgttcagggcttctagaacactaaaaaatttggcttaaaccagtgttcagtctggtgccaaacttcgaatggaatacaaattcacataatctgaactttgttcacaggttatcctaatagagtaattcttcactttgctctattgaactgtcttaaggatttgtttaaacagctaagttacttgattaaaataatgataaaattgtattttgtctttgctttaatattaaagttaacaagttttcattttataatgagatc

SEQ ID NO: 171667 - DNA, 504 bp, Homo Sapiens
ggagtgagatataccagagatgactgatcgaggtacatttcaataacatggatgaacctgggatccggtctgcctagagccggaagacctggatggctacacccttacttctattgaccatggagctgaagctttattttggaaacatgatcaagattgtgtattagaaaaacataaagatgaactttcttggcacagaaatgagataaaatatacagtgctacaactgcagaattagcacggacgccaatctaaaaacagcaaatatttacacagtcagctataatgaaattaatgcacaaaatattgaaaaatctttgaccttgctcataagcagatacctgccttgaagaaacactccaagtctgccgtgattccgagcgacatgcccaaggaagagtcaagaacatcatttacctttagggcttgaaacctgggcattaggcttgccctttctggattgctcctaaccagtctgatgtactggggaaggaggagtgaagg

SEQ ID NO: 171668 - DNA, 593 bp, Homo Sapiens
gtgatcggtaacttggttggctccctttgtctctgtacctttaccaacattaggatctcacctctttcttcctcccttaattcataagcaccactcctatcaaagtcccatctcttaaccctgggtatcaaacaaactgtgagttttccagaatctgtttcccagttttcccctcagctttcctggtctcccatccgaactgcttctttgtgcacctcttgttctttctcttggctcccagtcttgattcctgtgatcactcttgcatcactaattgcacaagtgatttcaggtgcaattctgattagcctgcgtccacacagtgatcgatgatcctatgtgcctagaaaggacactgtgtgctgctcaagacctgcaacaggaaaaaagccatttcttgttagcagtgtaagaaccttagagcaaaggagttgaccttctgattgaatataagcacaaccatattaaatgaatcaatacaagaaaattatttctgatactatgtatgtacatatttcttctctaaaatgtatcattcttttctaatgtatatgatctaacaaaaatgaaacatgaaatgcagtagcaaccac

SEQ ID NO: 171669 - DNA, 288 bp, Homo Sapiens
cgtgatcggtacttggttgaaaactgaaggtagatggtgttatagttaataataaatgctgtaaataagcatctcactttgtaaaaataaaatattgtggttttgttttaaacattcaacgtttcttttccttctacaataaacactttcaaaatgtgagtatcttctttttaaattcttaccatcaccacttacagcaggataaaaagttaaagttaaatcagagggtgagcagtgacagaggcccggggtttgttttggtgttcagggcaaccaagttaccgatca

SEQ ID NO: 171670 - DNA, 509 bp, Homo Sapiens
ttcattggatcccgtgatcggtaacttggttgtaaacaccactgcaattacatgtttctttttatcctcatcaaactagagtatgcaagtcaagcataatttcccatagaagaaacctttttacctttccttcagtatggaaaggtgaatggtcgagactttagtaacatcactaagttactattttaccatcttgccaagtaaaggtaagttagctgatgaacgtctgtccaatcaacacagcttcaagtgtatcacagggcagtatgaatgaagggatggtgttggagaagaattcaaaggaaagaaagggggaaatagctctcttatagggcagggggcaaaacctagctgggatgagggatttttgtgtttttttcacttgagtcaaaatacatgagttttaaaagccacagtgatggagggaagtgagaggcaacaggttgagttgtttatgtcaaagtttaaaacatatattcagctcaaccaagttaccgatcacgggtacc

SEQ ID NO: 171671 - DNA, 505 bp, Homo Sapiens
caggtactcgagacggtgactggtgagctgaatatatgtttaacttttacataaacaactcaacctgttgcctctcacttccctccatcactgtggcttttaaaactcatgtattttgactcaagtgaaaaaaacacaaaaatccctcatcccagctaggttttgccccctgccctataagagagctatttccccctttctttcctttgaattcttctccaacaccatcccttcattcatactgccctgtgatacacttgaagctgtgttgattggacagacgttcatcagctaacttacctttacttggcaagatggtaaaatagtaacttagtgatgttactaaagtctcgaccattcacctttccatactgaaggaaaggtaaaaaggtttcttctatgggaaattatgcttgacttgcatactctagtttgatgaggataaaaagaaacatgtaattgcagtggtgtttacaaccaagttaccgatcacgggtaccgagct

SEQ ID NO: 171672 - DNA, 598 bp, Homo Sapiens
  misc_feature (516)..(516): n is a, c, g, or t
ctgccttactttcatgtgcacccagaagtcactcgaagcaggctgtttcatattccatgtaattgcatggttttcagtgattttcttagtatagatttcgatctttatggcattgtagtctaaggacatggtttgtataatttcagttttgaatgtcttaggatggttttatgcctgattgtgtggttaatttgttacagtatgtgccacatgtagatgagaaaaatgtatattctgctgttttggagtggagagttctgtagatatccattaggcccatttagttaagtgttgagttcagatcctgaatatctgtgtcagtcctctgcctcaatgatccaatactaacagtgtggtgtcaaagtctccccactattattgtggggtattctaagtctctttgtaggtctctaagaacctgctccatgaatctgggtgcttctgtgttgactgcatatatatttagggcagttaagtcctcttcttgaattgagctctttaccattatgtaatgcncttattgtcttaagtgatctttgtagtcttaaaggttgtattgtctgcaattatagcaaccaagttaccgatcacgggtacc

SEQ ID NO: 171673 - DNA, 578 bp, Homo Sapiens
tcgtcagaggatcccgtgatcggtaacttggtagaaagaatttagctttgtctaaagacagtagaaagaaatgcttgagttaagaaaaggaaggttatggaagccaaggttcttgttatgtagatgaagcctctaggtagtattcttcagaagagaatagatggtcaatgtctcttttcagattttaaatagagtccaactcagttaaatctcctctagacctggcaaagacctagaaagggaaagagattctaaagatgcaaaattttaccccacaaaaggctttgcagggccatttcaacatatgtcagataaatatattttgaagtaaagtgtgttaatttctttcagggtctgctgtcatgtgatgctataccagagtcaagctggaatttggcatcttagtgccaaagggtctgtttcatccatgaagggatgtctattttaatgttaatgctgggcctagtatgaggtgagtgcctaggcattgccatgtagacgctgtctgagagatgaaggtcattctccaaggagcagagaaaatgagtatcgtcctcatcaaccaagttaccgatcat

SEQ ID NO: 171674 - DNA, 245 bp, Homo Sapiens
ctgggtcgcctctagtggatcccgtgatcggtaacttggtagtctcagttcaatgtcccttatactgggacattggagccatttgctgaaaaaatttccttggatttctccaatatcagtttcaaagtcatttttatttactaagaataaagagttccccagcggtctagtggttaggattcagcaccaccatggcttggggttggttcaagtcctggtctgggaaccaaccaagttaccgatca

SEQ ID NO: 171675 - DNA, 242 bp, Homo Sapiens
  misc_feature (177)..(201): n is a, c, g, or t
cgaggaccccaataaatgttggcattgataaattcacgaaacataaaacaggccaactcgaatatgcgccatctaaaggatctcctcttaagcgtggattttatgctataggaacatcaatgtataagtaagtcgattacaggtgtattagaaaaaatgaatttcataaatagtaannnnnnnnnnnnnnnnnnnnnnnnngagcactcatcaatgaccaacattattggggatcctcggaa

SEQ ID NO: 171676 - DNA, 444 bp, Homo Sapiens
agctcggtaccccaataaattgttggacattgatgttgtgtgagtgattttgacagatgggatagtaggtcactttgtgtctaattcggcaccatttttcagagcataaagataaaatatctgagtaagcatattatatttttagaaatcagccaggtgaacaagaacataaatgctcaagggaattgagggaaagatacagatgccaaaacattatttcagcaaagacactaaatggaaggggaaggaaatttttccatagcacagaagattctttaatgctataagtcaccttagaaacaagcaacttacatatcaatctaggaatttcactgctctctagaggtggtaatgagaaaaagagggaagagaagagagggagggaactaaggtggttataagaagggagatgaggatctacaatcaatgaccaacaatttattg

SEQ ID NO: 171677 - DNA, 185 bp, Homo Sapiens
caataaattgttggtcattgatcttgggacaagcggaaataaatccacattaatatcgccggacggtgaaatcatagctcatactacctatcaatattccaccatttttttgaagcagcattgggttgaacaaaatccgaatgattggtgggatcccgtggcaaatgcatcaaaactattattga

SEQ ID NO: 171678 - DNA, 250 bp, Homo Sapiens
gtctagaggatctccaataaattgttggtcattgatctagtgtattcagtatctaaaacacctattcgctttctaaactcgtctagctcaataattggtgttttgcctgtgctacgccaacaaatcagcagttcgtacatacgaacagcatatgcactcgataaaccgctaatttgctcaatatcgtactgggtgaactgttcctctagccgtgtatcaatgaccaacaatttattggaggtcctcgaga

SEQ ID NO: 171679 - DNA, 716 bp, Homo Sapiens
aaggaccctaataattgttggcattgatattgataaatgcataacttcctatgctgagtcaatcttggtttatcatcaagaactatggaaatatgaaataagatgagtttaaatgctaaatagctctaccaaacaatgcagaaaacatcattaaaagaatagagggcattagccctcttttttatttcttaatggcttttggcggcatgccgttttcaatccatgtggcaattcgagtaattaattttggggttagtttcacttgtgagaaaaccttttctccattctcggtttctcgcggaccacttacagttacttgaatcaacttttgatcaactgacttttgatagccttgtatcttcttgaattgatcacgatacacaaccttatgatccataagatactgcactaaagttttttgattaatctttaggaccttagcagattcacgtatgcctagattattttcacagtctgctattcaatctaacgcttcggcttttggcgctgcaatggctaattgttcttgtgcaatccgtttcgctttgtattcagacgcccaagcaatagcggctttatatggatcttcaaagttaggtattgttgcaggattataagaaccagtttttctaatctctggcaaaacttcattagtaatccattttttaaattttttagccatcaatgaccaacaatttattggagatcctcagacg

SEQ ID NO: 171680 - DNA, 262 bp, Homo Sapiens
caataaattgttggtcattgatgttaacaacaagcaaacacattaaatccttaaatttggttactaagttcacaaatgtcatggacacagtgaggtaatatttacagactgaatactgatttactatcctttgagtttatttctacatttcatagagtagatgctctttatagataaactcttttggaaaaagtccagataactggataattaactattaataatcaatgaccaacaatttattgagggatcctctagacga

SEQ ID NO: 171681 - DNA, 302 bp, Homo Sapiens
ctagcaggacccctaataatagttggcattgatcaggcttgttttttagagacggctttcatccgagatagaatgattgtaacagttgcgtttataaaataactgctttttttggtgctgcatcctgcgttttttcatgtgctttgcgcaagcgtttgattataaaaaactggtttttttacgtcttttgacaaatgaaagttgattcatcgacttgtccagaaaacgaactgttaaaactttttgatggctgtagattttattgcgaaaaacttggggaatcaatgaccaacaatttattg

SEQ ID NO: 171682 - DNA, 382 bp, Homo Sapiens
caataaattgttggtcattgatcgcaatccagcggttggcagggtttgggtcgcctatggaggagcgtgggaccgtcgcttggacgatctgcattttgaagtcacccaaggaattcaccccgaagagcgagatgtaggcgtaggtattcattgccacgccgccatctttcagttttgctgccttggcgatagtcttccaattgtaagtctttccggttccccatttcccgcggacacatagaacctcaggatcgggagacgcaagaaagcgctcgatttcttgcattactagcgccgttgacatccgccactcccaaatatttgaagaagtgtgacgttggcgacagctggacctatcgtatcaatgaccaacaatttattg

SEQ ID NO: 171683 - DNA, 249 bp, Homo Sapiens
caataaattgttggtcattgatcgggttcattcaataaattaataaactattcaactttgaacgaataaaacacaatcttattattactattactataatttaattaattctatttttaaaatatctgactagtcttcagaggctattgctgtattgtctttagcaacttctaaaacaatagcaacacctttatcataagcatggtcatatttaatgtatcaatgaccaacaatttattggggatcctc

SEQ ID NO: 171684 - DNA, 255 bp, Homo Sapiens
gtcaccgccctgtgccatatgtctcgatgcagaaacaaatgatgcaataaattgttggtcattgatccactacaactcggccaagagtaataacgccgaggagactattcaagacgccgttaaagtcgccgtctctttgcataatgagctgcattctatttctcaattggtaattctcgtaattaagaatttcgtacagtgatactactataatagacaatcatattctctatatcaatgaccaacaatttattg

SEQ ID NO: 171685 - DNA, 275 bp, Homo Sapiens
aataaattgttggtcattgatgaaacacgtccaaagatcggtgctttgcccttgaacatacgtgtgaaagcggttcttccatgatggaaagtcattcatatgattcaactttggtggacgattgttgctgcccgtttcactttcactaatcaaaaggttttgaatgctttgactttgattggataccaaagcccattgacttggactgattgatggcggaggaaacatactctttgcccaagctgcagcagaaatcaatgaccaacaatttattg

SEQ ID NO: 171686 - DNA, 262 bp, Homo Sapiens
caataaattgttggtcattgatcacccaattatttactgtttgcaaggcatctgctgtcaaataatcatccgagtctgcagtaaagaacaattcacctcttgctttttctaaagcaacattaaatgcagtatgtttaccgccattttctttaacatgataatgaattggaaagctattttcttcattcaaccatttctcaaaaagacatttgacatctgaggaaccatcatcaatgaccaacaatttattgaggatcctcta

SEQ ID NO: 171687 - DNA, 244 bp, Homo Sapiens
ttataaattgttggtcattgattaggaaagactcaggaattatcagcccctatggctgctcaacaggttttacttccctgctctttgtttgtaagaacaaagcccagaggagaggcctgcctgaatgctgaattcttctaggtgccaaggggcagagcccaggaggtaaagtccaggaacactttgttatcaaggagtggttttagtgctggtgtgatggctatcaatgaccaacaatttattg

SEQ ID NO: 171688 - DNA, 258 bp, Homo Sapiens
gtaaatagttggtcattgatggagggaaatcattgttgatgataaacatatggaagagggtgaatttgtaaatgatcacaatttttaatcaaatcatacgagtcttataaaagattttaagaaatgtgttttacatgaacgaggcttttaaagacaaggtacagtagaaattttaaacgaaatatgattatattagtcggcgaataggggatatagtccgaattgtcggctgagaaggatcaactgaccaagcaattt

SEQ ID NO: 171689 - DNA, 361 bp, Homo Sapiens
agctcggtaccccaataaattgttggtcattgatcgggactgtccaggacggggcgtgtgcgtaccacgggggacagggtagtcgacggcgtctcacacgataagatgcttccaccgcttgggagactacgcagcatcctgaccacgagaagaagctgtaacaagcgcaaactgtctggctggcgctgttttcctcgtccatctcgatggattgcatggcctcaacggacattctgtctcctggtgttcatcgtggtgaaacgagccacgcctgccaaggcgttttggctcagcatgttttcctcgatgtttggagtctttcagttgtgaactatcggcatcaatgacctacaatttattg

SEQ ID NO: 171690 - DNA, 369 bp, Homo Sapiens
aataaattgttggtcattgatctggttcctctttgaacacacatgttctctgggtttcgccttgcagcccaagaagagaggaggcttggaatcaccacacttcccacaccacaggtaaatccgtgcatcagataacactcagagcttgggaaatcgcccacagcagggacagattacctcttacagtcactatggagaacaattcaaatcctagctttaatgatcccagatagagctcttctcctccccaccaatgtgacatccaccaaacattttatatatcaaggaaatatttcattgaaacgcgcttgctgagaatgcctaccaacccgctgctaggcatcttccaaatcaatgatcaacactgac

SEQ ID NO: 171691 - DNA, 627 bp, Homo Sapiens
ggtgcccaagtattgtcaaactatggtattattttaatgttactttaaaaatccataatctgctagttttgcatgtacttatatgaaaacagtgcagtaagttgaaaactcagtatctatggaattgataaatgttgatctggtgtagtatattttatcgcattttcttatattaaaaaatgtctgcatgattacattttatttcctttgtaatttacatttcagaatagtgtattgctatatgggtgccaagattgaatatgaagaacccgagtgtttgtagtattatagttttaagcaaatctgtgtggtgatacagccataagaatggggcttatataaactctgtacatgtaagattttgtacagagaatttttaactttataaattgtatatgaacatgtaaatcttttaaaatgtacataaaatactgtatttttttaccttgtgtgtgatagtctagtcattgcatgtaaatataatttattatgtattctgtagtataaatcatacattgatgacttacatttttgactggtaagtcaacatccgttggatgtttgctgaagtggctcttgtggaagtgataatagattgtaattcaaaataaaattattaatgaattc

SEQ ID NO: 171692 - DNA, 626 bp, Homo Sapiens
  misc_feature (80)..(99): n is a, c, g, or t
  misc_feature (393)..(393): n is a, c, g, or t
  misc_feature (456)..(456): n is a, c, g, or t
  misc_feature (462)..(462): n is a, c, g, or t
  misc_feature (497)..(497): n is a, c, g, or t
  misc_feature (566)..(566): n is a, c, g, or t
  misc_feature (592)..(592): n is a, c, g, or t
ccttctagccctcttacccaagacaaaacttccagacaattctgatgccatccagttttgttcttacaaactgcatattnnnnnnnnnnnnnnnnnnnntcttcaacgtcctaaatgtgatgtgctcagtgcgaagcatatcagagctggacgtgacatttatgtccttgacaagcctcgattatccaggtcctttaccttgtatatcctgaccagccaatgttctgtggtatatgcttcctccaggacatcaagctcaaagtctttattcccaatctcagcatttcggacacggtcaaagcctggaggacgcttggcttctgtgtaaacctgtccaaagcgatagtaacacatcttgtacatgaggcagttgagcagcactggagaaccttnacggtccacacggaactccccagttggagtataatagtcattctccttgatatgtttgcctgnatctgngctcccttcaatccggaccattcaaagaaacttgntgatatcatcagaggaatcccagtgagggcttcaaaaatgaccagcacatagctgacatcgagctcctnatgatctcataggctttttcttctgnggacgccattgctggcctactcgagaaattgggg

SEQ ID NO: 171693 - DNA, 1534 bp, Homo Sapiens
tggagtgtcaggcgagaaatcagactggacgggaattaagtcctggccagcctcgatatccggtcccttacctggtatatcctgacagccaatgttccgtggaatatgcttcctccagggacatcaagctcaaagtctttaattcccaatctcagcatttcggacacggtcaaagcctggaggacgcttggctttctgtgtaaacctgtccaaagcgatagtaacacatcttgtacatgaggcagttgagcagcactggagaaccttcacggtccacacggaactccccagttggagtataatagtcattctccttgatatgtttgcctgtatctgtgctccctccaatccggaccatccaaagaaacttgtttgatatcatcagaggaatacccagtgaggcctccaaaaatgaccagcacatagctgacatcgagctccctcatgatctcataggctttttcctctgtggacgccattgcctgccctactcgagaaatatgggtattattccatgtgttattgtccactaaaattgttcggtttgccatagctgtaatctgatagccataatcccaccaggacatgaccttcgcatcctctggagtattatgacgaagccaataatatgcttctcggaagtcatcaaatatgatcctactgccatccccaccacgggcagatagtacaatggacggagaagagtaggcctcactggtcacccaggttgaatgaaaggtgtaggtgatgagaaagaaagccatgaccagtatcatcccacttgccacttcattcttaatagggtaggtggaatcctgttgcttcttgctcttcttgtctggacgacttatgtccagattcttcatgtatgtggacagcacctgggagactccaatgccagagagaatgcacataacaggtgccaacactagcattagacgcaccattacagctgaaaagtacatgctggtcacaccatacatgatgataaaaatccgggcatcagacaggttgctaaagcagtaatagaggccaactggaaacatgaagacgaggagctgcaggtcaaaatagtatgaggaccaggttgtgggctgatgctcagacacagaagcaatgatggggatgttgttcttagcataagagggatccagcagcgagtagaaacgccccgtccagggagatatttttcctgtcagcatgaggagagctcccacggtgagaaggacaaagcctaccagagagatgacgctccggaaaagaacttcaaattgttgtggattcaacttgctgcgcaggtaatccacaaaggcatggatctggcagagaccaaagaccccaaaggctgccatgtgctctgatgaaaggacaggctggaaacccacaaaggagatctgcatagaaagtatagtgcccaggcagtaaacagtacagtaggccacatagatccggtgagagaaacggcctgtgagcatcagcacgaggacgtggagaggaattaagttgatcaggaacacataacctccccatgacg

SEQ ID NO: 171694 - DNA, 729 bp, Homo Sapiens
  misc_feature (435)..(444): n is a, c, g, or t
tcttcctccttgctgacagcatggtagccctgaggactgcctctcaacattgtggctcagaaatggattatctatcctcattgccctattcggagtactattatccaatatatgaaatcaaagattgtctcctgaccagtgtcagtttaacaggtgtcctagtggtgatgctcatcttcactgtgctggagctcttattagctgcatacagttctgtcttttggtggaaacagctctactccaacaaccctgggagttcattttcctcgacccagtcacaagatcatatccaacaggtcaaaaagagttcttcacggtcttggatataagtaactcttggcctcagaggaaggaaaagcaactcaacactcatggtcaagtgtgattagactttcctgaaatctctgccattttagatactgtggaaccaacttnnnnnnnnnngcttttgttttgtatttgtttactatgagtcgttatttaatttctcttgaaaataatttcctcacagcccaagtcagtaaaatgttatcagccagtcttccaaaatggtcataaactttataaactgctttgggtaaactgagcagaaggtgatacacagaagggaaaatgtgcactcatgctagtgtgaatctggtaactcgcgtgactctgcaggctgtttctgtattattttcacactcatattgcttaaatattacataataggcaatgtcgatggtacca

SEQ ID NO: 171695 - DNA, 510 bp, Homo Sapiens
tttcacaaggaggacgctgaagccctcagacgaagcctgctctgagcccagaactcagctcccctctggtgcctgagagaagctctgtgccgcttccctcggcccctgcctcgcggcctcagccccgtgtgccatggcacgcacactgccttcttgaggctgttgcctgccagcctggctgaccctggggtgggaagctggcctccctctgcaggcttgagcagacaggcaccctacggccccacccagctgcctggagcaggctcagcaggagcgcagtaaacatctgattcacaaggaagcagagggcacttcttggaatcagctcagctacagggatgggggtatggataccacgagggcgctctgccaacccctcagggctcctctgatctccccaggcaactgctccaggtggccgagcccacattcttcccagaggccagctgacaaagatggaccagatgtgaccggaatccatgaagaaagggccagtcacctcagggcgtt

SEQ ID NO: 171696 - DNA, 557 bp, Homo Sapiens
  misc_feature (426)..(426): n is a, c, g, or t
  misc_feature (466)..(466): n is a, c, g, or t
  misc_feature (485)..(485): n is a, c, g, or t
  misc_feature (488)..(488): n is a, c, g, or t
  misc_feature (493)..(493): n is a, c, g, or t
  misc_feature (496)..(496): n is a, c, g, or t
  misc_feature (505)..(505): n is a, c, g, or t
  misc_feature (517)..(517): n is a, c, g, or t
atcaatccaacatccaattaacagaaattcaaggagaaaaaaacggggaattaaccatgaaataatacaagaaaataatcctaaaacaatcttcaaatggaaacaggtctgtgagaacccaatgaaatgaacaaattttaaaacgtattcatattcggtgcaatttcataataacaataaacgatcctagaaagctctctgacaggaaataaaaatttcatctacaaaagattgagaatcatcttggaacacttctcattggcaatactggattctagaaaaagaaaaattaaaagtcactgaagtattgaaggaaaattaattgcatactctgccagatcagcaggcaagcataggatataacattttcacacatgcaacaataaagaaaattaactctcacatatgaaattacctaatggtatncagccaaaattaaaatatgaccaaaaccaggaggagaccntgaaatccaggaaaatggngcnccaanctnagaataaantaagtcctaaantggagcttgcccaaattaaaattgacccaaccgggggggg

SEQ ID NO: 171697 - DNA, 284 bp, Homo Sapiens
atctctgtaaaccacagccatgtccagaataattctacactcccatttccacccctagggaaggaggggagcagtatgagaccctcctcctgggaactagcctgtttcctcctgagcaacccttccaggataacaaatggacccattcccaacattgtggtcagggtagactgcccagtcttcctggccattccatccactgtctctgcagctgccctcggtctccatctgcctcttcctctgctctctgccttcctcaactccttcttctctggggcctgggg

SEQ ID NO: 171698 - DNA, 176 bp, Homo Sapiens
cgactgccagaatgtaaattaagttgcccaaattagcacatcaaataacaaaatcagccagaaagcaggctgaaaagcattaaatgtttcatataggtgagtttttaaatcatttaatttctatagaaaaattttattcacaatataaggtgacagaaattgccacaggaatgata

SEQ ID NO: 171699 - DNA, 214 bp, Homo Sapiens
ctgaactggctgggaggctgctggaatggcccttggtccacagctctccacaggcaagaggtcaactgctgcttgaaagaggtagacaaaagttaggttgatggcgaaatgtctctgggttacccagtcttctggagcagcaagctgagctttaatgggctaagcattagggtgttacagaaaatttcaaatgcagccatctcccttggggcct

SEQ ID NO: 171700 - DNA, 280 bp, Homo Sapiens
gtgattctgaatttaggaatcgctgtgtaaacagacttcatgagggctaggactttgtcctattcaccactgtagtcgaagtgcccatcaccaactgaattttgataatgtattgttaattgggggatatctgtgtactcctacctgaatgaccaagtaaataatatgaaacaaacctgcacacaatataattcagcatgctcatgaagctgtgaatattcttgtttattccgatttgagtatgaaacaaagtcatcaactcccataaaggaagtagaaa

SEQ ID NO: 171701 - DNA, 585 bp, Homo Sapiens
  misc_feature (116)..(116): n is a, c, g, or t
  misc_feature (464)..(464): n is a, c, g, or t
ggaaggcagcaagctgagttcccctggcctcagttcactttccctcttgaaagtcgcccaaactcaagcaaaagctccgattcaggaataaatggggttgttttatcccagccaangcctggggaagcttggtattaagagcgtttgttccattcttttaaaaatggaaaagggtccgtcctatgggtgcccatggcaccctggaaagcaggcagagtgctggtcacaggcggagactttgagataccgagaccgaggctggagtttgggccctgaaactttctaaccaggatggccttgggcagagcagcctgtgtttaaagcttcccatctgtaatatagcagtgacaaccatgcctgctttgcagggttcctgttaggattaattctctatagagccccccagaagccacttttggatttgagatggttcaaggccagaccttgcatgacaagagtagggncagctttccacaggcttcaatacagtagtattcccaggcagttctgcaaccccagcctcatgccctttgcaccttcctaagaggcttgccttgcctcagctttgctcttaggagtcttgga

SEQ ID NO: 171702 - DNA, 527 bp, Homo Sapiens
  misc_feature (497)..(498): n is a, c, g, or t
caggtggcataagcagcagggtaccatgggaagccacagctggggaagagaagccgagcctgagtgtggtcctcaggaaggcaggtggtggcgggacactgtcctcaggcagtgagaacatagagcaacctcagtctgaaggcaggcccaatgatgccccaggcccccaggccacaggacaggagcctggcattccaccactcctagggatgtcagcaggggaacagctgggaacagcagaaaggcaggcccaaccacccccagaccctcaggtctccgatgggggttaacaaaggcaagacacccctggggaccccagggaaagaggtgggaagaagaaagcaagataaatgttcaacttttccaacccaactcatggagctttattcagacgggagtgacaacatcctgcttcgttcttgctgcccttgaaggggcaggccctactgagccatattccctagaaacccaatgccgaaggcccatgtttgacctcnnactttattcaagtcgcctaggactagggc

SEQ ID NO: 171703 - DNA, 604 bp, Homo Sapiens
  misc_feature (171)..(171): n is a, c, g, or t
gaaagtttcggttctgcccggcggtggacccacgagcgcgtgccaccatggagtctgaccactgctgagcagacagccacccgagggccgaaattctgagccttcctctggacccaggcaggagacatacagacaagaaaggcaaactcaccatggcctccaccaatgcanagagccagctccagagaatcatccgagacttgcaagatgctgtgacagaactaagcaaagaatttcagaaagcaggggaacccatcacggatgacagcaccagctggcataaattttcttataaacttgagtatctcctgcaatttgatcagaaagagaaggccaccctcctgggcaacaagaaggactactgggattacttctgtgcctgcctggccaaggtgaaaggagccaatgatgggatccgatttgtcaagtctatctcaagagctccgaacatccttgggaaaggaagagcatttattcggctactccttggtgcaccagaggttggcagacaccttacagcagtgcttcatgaacaccaaagtgaccagtgactggtactatgcaagaagcccctttctgcagccaaagctgagctcggacattg

SEQ ID NO: 171704 - DNA, 221 bp, Homo Sapiens
taggaattactgaaaattggccggaccaccaactggtctgtgatctgcctttggcctattcagactttttttagagggaagggaggcagatgcttccctcaccaccaaatcacatgttgggaagccccaagagtactgcatatagaggttatggtcatctacaaaatggtagagtgtcatctctgtccctggctggatgtttgccaaattgcaaaaattag

SEQ ID NO: 171705 - DNA, 1194 bp, Homo Sapiens
cggacgcgtgggtcgacccacgcgtccggacccacgcgtccgattaccattaacaaggaccaaaatgtctttgactccaagaagaaagtgaaattaaccaatgcggaaggagtagagtttaagctttccaagaaacaactacaagctatagaatttaacaaagctttacttgctatgtacacaaaccaggctgaacaatgccgcaaaatatctgccagtttacagtcccaaagtcccgagcatctcttacctgtgttaatccaagctgcccagctctgccgtgaaaagcagcacacaaaagcaatagagctgcttcaggaattttcagatcagcatccagaaaatgcagctgaaattaagctgaccatggcacagttgaaaatttctcaaggtaatatttctaaagcatgtctaatattgagaagcatagaggagttaaagcataaaccaggcatggtatctgcattagttaccatgtatagccatgaagaagatattgatagtgccattgaggtcttcacacaagctatccagtggtatcaaaaccatcagccaaaatctcctgctcatttgtccttgataagagaagctgcaaacttcaaactcaaatatgggcggaagaaggaggcaattagtgacctacaacagctgtggaaacaaaatccaaaagatattcacaccctggcacagcttatttctgcttactcacttgtagatccagagaaagccaaaagctcttagataaaacacttggccaatcgtcaagataaggtatgtctctaacaagtacgatgtcgagagctcttgcaaaattctgctggtgctacatacattcgtgaataacgggtggaacaagatcactggagcatagtcaaagcaaaggaacaacagacagggacgactctgcaacacagaagaaacaagacaacgaagggaaagatgcctaaagaataatgaacacaacaaagtaacacaagtatccagcaaaagcactgtgacttgacccaaattgcgaaagaaaccggtacccttaacataaccggtgggcacaaaacacctacggggaatcacaaacgaaaagaatcaaccaattgaaaaaagggccaccccagaggagaacgaactagagagcgacgcctgccagccagaaacatgactgccagaaaaagaaccggtggaacaagcacaagcaac

SEQ ID NO: 171706 - DNA, 881 bp, Homo Sapiens
aggtgggcgcaggtgaggggccgaggtgtgcgcaggactttagccggttgagaaggatcaagcaggcatttggagcacaggtgtctagaaacttttaaggggccggttcaagaaggaaaagttcccttctgctgtgaaactatttggcaagaggctggagggcccaatggctgcaaaatcgcaacccaacattcccaaagccaagagtctagatggcgtcaccaatgacagaaccgcatctcaagggcagtggggccgtgcctgggaggtggactggttttcactggcgagcgtcatcttcctactgctgctcgcccccttcatcgtctactacttcatcatggcttgtgaccaatacagctgcgccctgaccggccctgtggtggacatcgtcaccggacatgctcggctctcggacatctgggccaagactccacctataacgaggaaagccgcccagctctataccttgtgggtcaccttccaggtgcttctgtacacgtctctccctgacttctgccataagtttctacccggctacgtaggaggcatccaggagggggccgtgactcctgcaggggttgtgaacaagtatcagatcaacggcctgcaagcctggctcctcacgcacctgctctggtttgcaaacgctcatctcctgtcctggttctcgcccaccatcatcttcgacaactggatcccactgctgtggtgcgccaacatccttgggctatgccggtctccacctttcgccatggttcaggggctaccttcttcccccacccacggccaggaaaatgtccaattccacagggaatatttctttttacaacttaccatgtatgggccatccaaagctttacccctccggaatcggggaa

SEQ ID NO: 171707 - DNA, 385 bp, Homo Sapiens
  misc_feature (347)..(347): n is a, c, g, or t
acaataggtctttacaaagacatttacataacatatccagacagttcctttccccatcccatccctgccattcccttttccctatctcttggcatcagctctctctttggcacctatatcagatagatccaatagctccctttaatcttttttccttaccctattttatcaactgtataattaatatgcttgaagaatagctttgattatagctacaaaatagggaggaaagcactggatttggaataacaagacattttcaaattttagctttaatatttactagctgttaaatgccttagattgcttattttattaaaaaaatgaagtttctctttttgaaacanggacattattttttaactcaaaagtggggccaaagggg

SEQ ID NO: 171708 - DNA, 908 bp, Homo Sapiens
  misc_feature (850)..(850): n is a, c, g, or t
gaagaattcaatgactatgaggccaacgacccttgggtacaacagttcatccttaacctggagcagcaaatggcagagttcaaggccagcctgtccccggtcatctacgacagcctaaccggcctcatgactagccttgttgccgtcgagttggagaaagtggtgctgaaatccacctttaaccggctgggtggtctgcagtttgacaaggagctgaggtcgctcattgcctaccttaccacggtgaccacctggaccatccgagacaagtttgcccggctctcccagatggccaccatcctcaatctggagcgggtgaccgagatcctcgattactggggacccaattccggcccattgacgtggcgcctcacccctgctgaagtgcgccaggtgctggccctgcggatagacttccgcagtgaagatatcaagaggctgcgcctgtagctgcctggatgagcacacctggctcatcacacttgcaggcctgttccctaaggggccccagccaaggagctgagcgaggctgtctggcttgggggagatctgacagcccagacctttctacggctggcagcagagaaacaaagtctggacccactccatgctctgccctcagacctggccaggtgatgctctgggggcagcatctccccaccgagagaagcgggctcctaatgaggtgggaaagccacggcaggcagcgagcagcccaggccagctttctgcatggacggtcagtctcttgccctcaaacactacagcaaacaagctacccctgccagtcctagacaacttggggtacatctgggggacctaagcagtttaggcttggacttttgaaganaaggcctgtgaatgttttatggatcccttgaataaaagcctacctcctttggggaaaa

SEQ ID NO: 171709 - DNA, 1136 bp, Homo Sapiens
  misc_feature (1093)..(1093): n is a, c, g, or t
gctacaatatacgaaaacaatctgtgagacagtggtcggcttttttcctgcctgattagttcagtgcacatacaacttggaccagaggatctgggtttgaatcccatctctgatacttcccaaactgagctgttttccttatttgtaaagactaagatcgcgtatgtcaaagagctctgtaaactctcaacacatacaaagtactactgctgaaatgatttataaatgtatcttaagaatgtcccagatgagtgaatgttggttatgatgcatgaccacaccttagtgtgctcctggtcagctcctgactttgagaaaacaacagataggaaggcccatgtcccacgcacaagacaaccagctcgaagcagggacaggcaatgagaggtgaaagagacctagtactacagctgtctcatctgggggcaacttgcaatgggaaggaagggacagaagctctaaatagacccacatgcacaccccaggacataatgcagccaccagccaacaggacaagcagcacaattccccagcatcctcttggttaaatagataaaagaatggctgccataccatgtctgtgaaagccggggagcagcaaccacagagcagaagtcacttctgctgagcttccaaatcccatatgcctggccatagcaactctttccacacccagcaaatgaagcaatctggggcagctgacaccttgaaagtttactgcacagggcaatctacaatggggccaagtgctaaagcaaaaatttattaaaattcatttatatagtgttttatagacaaaagtagagtcttcgacattcaggcaatcacctatattttcagaagtgcctcatgagcagatggatttctttcccctccccacaataagatatatctgtctatactcctaaaaatgatgcatttatttatgccacttttataagaacaatccctttgcgatcccaaaacctgggcagagaatgaaaagagacaaacagaaccttctccaaaatggtagtcctcacaacagaggtgtagtgcaagagacacataaaatggcagctcttgagaggagtgtgtgcacacccagcgggtnaggcagcccctagctgcggagtgtggccagccgggactgcatg

SEQ ID NO: 171710 - DNA, 843 bp, Homo Sapiens
  misc_feature (766)..(774): n is a, c, g, or t
tcactgggtcattaagagcaagtgggggcgaggcgacagccctcccgcacgctgggttgcagctgcacaggtggggcaggagaccctgtaggaggaccccgggccgcaggcccctgaggagcgatgacggaatataagctggtggtggtgggcgccggcggtgtgggcaagagtgcgctgaccatccagctgatccagaaccactttgtggacgaatacgaccccactatagaggattcctaccggaagcaggtggtcattgatggggagacgtgcctgttggacatcctggataccgccggccaggaggagtacagcgccatgcgggaccagtacatgcgcaccggggagggcttcctggtgtgtgtttgccatcaacaacaccaagtcttttgaggacatccaccagtacagggagcagatcaaacgggtgaaggactcggatgacgtgcccatggtgctggtggggaacaagtgtgacctggctgcacgcactgtggaatctcggcaggctcaggacctcgcccgaaactacggcatcccctacatcgagacctcgggcaagaccccggcagggagtggaggatgccttctacacgttggtgccgtgagatccggcagctcaagcgtggcgaaactggaccctcctggatgaaaggggcccccggttggattgagctgaaatggggggctctccctgacccaccgggagcgggaacttccagggggggcccccaccgcccaccgggatggaaccccggttctnnnnnnnnntgcccgggttcgatgggcccgcggggcgacacgctcccctttgggcacctgcgccgagaccaagatata

SEQ ID NO: 171711 - DNA, 626 bp, Homo Sapiens
actgaaggcctattgaggccagtgtctgagttatgagcttggacgtataggatccactattattcacagtgatgttggggataaagagctcttgggtggattgctggaaaggtcccattgacaaaccaagagtactgtgcaggtgggttagaggctgcgtggcaagagaggttcagatttacccctgatctgtaagatgtgtttagaggggaaatggtgggggcatccgggccatagaggacattcaggatgactgaatcactgcgcctggcactcactgggttctgggtttcacatttgtagcttgctgtgtcatttcttgtgacattgaatagagtgagggtcctgttgccattggacagctgcagcctgggactgaccgggaggctctgattgtttacccaccacaggtaggttgcgtcctgagtcccaggttcacaggtgaaggccacagcatccttgtcctccacgggtttggagttgttgctggagatggagggcttgggcagctccgggtatacccggaactggccagttgcttcttcattcacaagatctgactttatgacgtgtagggtgtagaatcctgtgtcattctggatggtgttctggatcagcagggatgc

SEQ ID NO: 171712 - DNA, 266 bp, Homo Sapiens
acagctgagaggaccggagcacttccagagactgtgatcatcgtgactgtggtcctattgaggccagtggctgagttatgggcttggcacatataggatccgctattattcacagtgatgttggggataaagagctcttgtgtggattgctggaacgtcccattgataaaccaagagtactgtgcaggtgggttagaggctgcgtggcaggagaggttcagattttcccctggacggtaattggcctttgagggaagacctctggg

SEQ ID NO: 171713 - DNA, 797 bp, Homo Sapiens
ctcggtacccattggtggtgctcgctgggttctgtatttcacattcataggatcctgcatcgttccttttgacgctgagtagagtgagggtcatgttgccattggacagctgcagcctgggactgaccgggaggctctgaccatttacccaccacaggtaggttgtgttctgaacctcaggttcacaggtgaaggccacagcatccttgtcctccacggggttggagttgttgctggagatggagggcttgggcagctccgggtatacatggaactgtccggttgcttcttcattcacaagatctgactttatgacttgtagggtatagaatcctgtgtcattctgggtgacgttctggatcagcagggatgcattggggtatattgtctctcgaccactgtatgcgggccctggggtagcttgttgagttcctattacatatcctacaattagactgttgccatccactctttcgcctttgtaccagctgtaaccaatacgattctggggcaggttgtgggcgagtagaagaacctccttcccctctgcgacattgaatggcgtggattcaatagtgagcttggcagtggtgggtgggttccagaaggttagaagtgaggctgtgagcaggacctccttccaggggacatgcaatctgcagggaggggctgaggggggtcccatggtctctgctgtcttctctgtccacctctttgtagaggagcttgagctccaggaatgctctggtcagggctgctgtgactgttggccctgctgtccttcctccttctgtccc

SEQ ID NO: 171714 - DNA, 272 bp, Homo Sapiens
cgcacgtggtcaaacaggcaaataccgcagtgcgggcagtaatcaatggccgtattggtcagatcaaccgaccgctcgcaaccggggcagaccttcttggccagccgcgccagcgccgtgtcgtagctgagttccttgcgccgctcgatatcgggcagcgcttcggtctgcttctgtttttccaggtagcgattgagggcgacgatggcgtagcggcccaccagcacggtcaggatgatgccgaccacgttgcgggccaaacatgggggtac

SEQ ID NO: 171715 - DNA, 870 bp, Homo Sapiens
gcaacccggaaggtccggcgtcccagccgcctacctcgctgggaccctggtcttgctgtcccccgctggcctcctgcccaagcgactgcggccaggatgggccggaaggtgaccgtggccacctgcgcactcaaccagtgggccctggacttcgagggcaatttgcaaagaattttaaagagtattgaaattgccaaaaacagaggagcaagatacaggcttggaccagagctggaaatatgcggctacggatgttgggatcattattacgagtcggacaccctcttgcactcgtttcaagtcctagcggcccttgtggagtctcccgtcactcaggacatcatctgcgacgtggggatgcctgtaatgcaccgaaacgtccgctacaactgcagagtgatattcctcaacaggaagatcctgctcatcagacccaagatggccttggccaatgaaggcaactaccgcgagctgcgctggttcaccccgtggtcgaggagtcggcacacagaggagtactttctgcctcggatgatacaggacctgacaaagcaggaaaccgtacccttcggagatgcggtgctggtgacatgggacacctgcattggaagtgagatctgtgaggagctctggacaccccacagcccgcacatcgacatgggcctggatggcgtggagatcatcaccaacgcctcgggcagccaccacgtgctgcgcaaagccaacaccagggtggatctcgtgactatggtcaccagcaagaacggtgggatttacttgctggccaaccagaagggttgcgacggggaccgcctgtactacgacggctgtgccatgatcgccatgaacgaaaacggcatcttcatcggt

SEQ ID NO: 171716 - DNA, 609 bp, Homo Sapiens
  misc_feature (397)..(397): n is a, c, g, or t
  misc_feature (483)..(483): n is a, c, g, or t
  misc_feature (493)..(493): n is a, c, g, or t
  misc_feature (559)..(559): n is a, c, g, or t
agcgcggtctcgggtcccccacgatgtccctgtgcagcagcttaaaggtgtcaatgaacagctccatccagtcctgccgctctaccccggtggcgaactttgccccctcggcggtgtagaacaacacggccaccagctgggagtagccggcccggttcctgcgtgagctccgtggcgtttagcaactgttggatcaggggaatggtcctggggaagagtggcgtccggcccctcttccgtgcggaggaaggtgaccgggggctcgccaccaggccacggtgcatctgtttggcagggaaggtctgggcacacgatctgagggtccgggcagaggacgtcctccatgtcatcgatgaacttctcagcgaccaggtcggagaacagcgtcatgttgcgnacctgctgtggcttgtcgcaggcgatggagtagaggttttcactctcgtgcttctcgtggaacatgtccccgatccgatggccgtnactgtgaccngatgtgcacagcgcccgcaagttgaggtcatcgtcccgagggtcgtggcgcccgtccgtgatgacnaccgcaaacacacgtgtcttctggcgccggctctccttgatgaggcggtc

SEQ ID NO: 171717 - DNA, 987 bp, Homo Sapiens
ggtcgctgagaagttcatcgatgacatggaggacgtcctctgcccggaccctcagatcgtgtgcccagaccttccctgccaaacagagctgtccgtggcacagtgcacgcagcggcccgtggacatcgtcttcctgctggacggctccgagcggctgggtgagcagaacttccacaaggcccggcgcttcgtggagcaggtggcgcggcggctgacgctggcccggagggacgtacgaccctctcaacgcacgcgtggcgctgctgcagtttggtggccccggcgagcagcaggtggccttcccgctgagccacaacctcacggccatccacgaggcgctggagaccacacaatacctgaactccttctcgcacgtgggcgcaggcgtggtgcacgccatcaatgccatcgtgcgcagcccgcgtggcggggcccggaggcacgcagagctgtccttcgtgttcctcacggacggcgtcacgggcaacgacagtctgcacgagtcggcgcactccatgcgcaagcagaaacgtggtacccaccgtgctggccttgggcagcgacgtggacatggacgtgctcaccacgctcagcctgggtgaccgcgccgccgtgttccacgagaaggactatgacagcctggcgcaacccggcttcttcgaccgcttcatccgctggattctctagcgccgccgcccgggccccgcagtcgagggtcgtgagcccaccccgtccatggtgctaagcgggcccgggtcccacacggccagcaccgctgctcactcggacgacgccctgggcctgcacctctccagctcctcccacggggtccccgtagccccggtccccgcccagccccaggtctccccaggccctccgcaggctgcccggcctccctccccctgcagccatcccaaggctcctgacctacctggcccctgagctctggagcaagccctgacccaataaaggctttgaacccataaa

SEQ ID NO: 171718 - DNA, 467 bp, Homo Sapiens
tctcagttggtggccgtgatggttctaacaccccgagcggccaagttcgccaccggggtagagcggcaggactggatggagctgttcattgacacctttaagctggtgcacggggacatcgtgggggaccccgagaccgcgctggccctctgctaaagtctcggctatcaccgagtcggctgggccctccctgcccaaactagcttccccagggctgcccccgacaggctggctctcagtggaggccagagatctggaatcggggtcaacggggctacagtccttcccaggggctctggggcagctcccagcctcttcccacgctggtggccaccgtgtcccttgctgcggctgcatcttccagtctctcctccgtcttcctgtggccgctctctttataagaaccctggtcattgaatttaaggcccaccccaagtccagaatgacctaagatagacccttaactc

SEQ ID NO: 171719 - DNA, 208 bp, Homo Sapiens
atatcggccacacgtggtcgcaggctcacccggagagtctcgttgaaaaccggattcagattccgtttcttcaccgccgtcttgcgcttgctctgcttatccgggaggaggtagcttttgacgtagctggggaggtgagaaaccgaggtgaggaggggccctcccagagccttctccactgcctgtgggctcccccagccaccatccc

SEQ ID NO: 171720 - DNA, 161 bp, Homo Sapiens
catgctgcactttatgaaattaagagagatcatagagagagactcaccaaaattgctccaactgtgacaaatgttgcagaaccgagaatcgttcttcaaaaatcaccttgatcttgaagacccgctctgataccaattgatagctgcgctgctaacggccg

SEQ ID NO: 171721 - DNA, 362 bp, Homo Sapiens
tacatgatacaaccgagctggtacccgtagcagcgcagcatataatctcctctgctgtcaggaaggctgggggaggggcggtgggacccaggccatcaggagcgggatgccaccgagttctcaaagaccttgtccgccctggcccttcctgtccggcctccagggggcaccagatctccacccagtgcgtgaccaccccctccccaccaatccctcagcgagattctagcagaggggagagagccaggggccgtggggacccaggggtgagaaaggggctggcagagagcagggagtccacccagggtcaggttcagcctgcaagagatggtgcgctgctaacgggtacataactcgagtcg

SEQ ID NO: 171722 - DNA, 172 bp, Homo Sapiens
ggccgttagcagccagcatgtaattcccccttcctccagagtcacattgactccggaacgtggcgggtactgggctgaggagatccccaggcgatcccgaacctccgcctcaaatccagtaccaccagagtaaccaccctctgccccgatcccagctcgaccctatttaatg

SEQ ID NO: 171723 - DNA, 294 bp, Homo Sapiens
ggcgctagcagcgcgtgacttagtgtgtccccctcgactcccttcacacaaatcccgccacaccacggaaattcggggatactccccagagggtcccatccggccacgctccctccccccattcaccgatccccgaaccaacccacgtctaccactcccccaacctccatccctccgggccgatacaccctcagtctatactcgcacgcgactccacctcgtggaaatcccccgccccgaaagcaccctgccccgccctactccatccatgctcggcagtgtaattgatgtggc

SEQ ID NO: 171724 - DNA, 160 bp, Homo Sapiens
  misc_feature (104)..(116): n is a, c, g, or t
tcaacaccccgctctgcatacaccgtaccatgagggacaccctggaacaggccaccctcctactctcccgagacatcccaacagggggactggactgtaggctnnnnnnnnnnnnntaccctctccatgatatccagcgcctcctgacacccttttcacc

SEQ ID NO: 171725 - DNA, 187 bp, Homo Sapiens
  misc_feature (128)..(140): n is a, c, g, or t
tcggccgtagcagcgagctataatcaacaccctcgctctgcataccaccgacccatgagggacacccggaacagggccaccctcctactctcccgagacatcccaacagggggactggacgtaggctnnnnnnnnnnnnntaccctctccatgatatccagcgccttcggacacccttttcaccatg

SEQ ID NO: 171726 - DNA, 192 bp, Homo Sapiens
ttgtcgccgttagcgcgcgcctttcatggtgaaaagggtgtcagaaggcgctggatatcatggagagggtaggggggggagggagcctacgtccagtccccctgttgggatgtctcgggagagtaggagggtggccctgttccgggtgtccctcatgggtcggtggtatggcggagcggggtgttgatttga

SEQ ID NO: 171727 - DNA, 320 bp, Homo Sapiens
tacggccgtagcagcgagctatcaataatgatatccgtcccattgatgtatcgcccagcattactcacaagcgtaatgagtggccccgtgagttcccacggatgtcccatcctgcccatcggattccttgcattccagctgtcacgcgctttcttcagcccctcgccatcattcagtattgtgtccatgtatcccgggctcaagcagtttacacggatgccatagctgctccattctgccgccaggctctttgccagcgagaggagtgccgtcttagacgaattgtatgcgcattgaggttgcgggtaatgatatgctgg

SEQ ID NO: 171728 - DNA, 331 bp, Homo Sapiens
  misc_feature (163)..(279): n is a, c, g, or t
cgtagcagcgcacaacatcattggcaaccgctgggcctccagaatttgctccagggtgtttggaagtcctgacaccctcctgatcttctctgtaacatgcacactttggcctgtgtcagtttgctggaaccacatcaggccggccctcttcctgggacaaaannnnnnnnnnnnnnnnnnnnnnnnnnnnnnnnnnnnnnnnnnnnnnnnnnnnnnnnnnnnnnnnnnnnnnnnnnnnnnnnnnnnnnnnnnnnnnnnnnnnnnnnnnnnnnnnnnnnnttctatcttttgtttctactgtgacattgatgtgactgcgcgctaggtaccg

SEQ ID NO: 171729 - DNA, 1269 bp, Homo Sapiens
gatacacatcgatgatcggtacccgtaggcagcgccccagatctatcaactacaacctcctatagcaacccatgcagacctacgtgcttaattctgcaagccagcattctccagacagcttgaagaattctttaaagatgctttcagaaaaaacagagctttttgtacatgccttcaaggatcaacttgtcaggagtgctcttttagcactctacactgcaaggccaggaggcattcttaagaagccaccctctcctaagagcagcacagaggagagcagtccccaagaccaacccccagtgatgagagggcaggactccataccacatcattcagactatgatgaggaagagtgggacagggtgtgggccaatgtggggaagagcctgaactgcattatggctatggtggacaaactgattgaaagagatggtggcagtgaaggcagtggcggcaacaatgatggagaaaaggaaccttcattaacagatgccattccctctcacccaagagaggactggtatgaacagttgtatcccctcatccttaccctgaaggactgcatgggagaagtggtgaaccgagccaagcagtccctgacatttgtgctcctacaggaacttgcgtacagcttgccccagtgtctgatgctgacgctaagaagagacatcgtcttcagccaagcacttgctggattggtttgtggttttatcatcaaattacagacaagtctgtatgacccaggcttcctacagcagcttcacacagtggggttgatagtacaatatgaaggactgctaagtacatacagcgatgaaattggaatgctagaggacatggccgttggcatttccgatttaaagaaagttgcatttaaaataattgaagcccaatccaatgatgtgttgccagttataacaggaagacgagaacattacgtggtagaggtcaagcttccagccagaatgtttgagtcactacctctacagattaaagaaggacagttgcttcatgtgtatccagtactttttaatgttggaatcaatgtacagcaaactctggctgaaaggtttggagatgtctctttgcaagaaagtattaatcaggaaaacttcgaacttctacaagaatattacaagatatttatggaaaagatgcctcctgacttatatttcacattttcaggaacaaaatgatttaaaagcattgctagaaaatctcccttccaaatatccaatccaaaaaaagaaagaatgtagaattgagcat

SEQ ID NO: 171730 - DNA, 135 bp, Homo Sapiens
gagggtctgcggcgtgggcggagtcctctcaccaccctcaccgctcgacccctggcagaggcgatcgcctgtgcccaccccccagcacttctcctcgatactgcccggcccgcacagtatagcgcgcgcaacgga

SEQ ID NO: 171731 - DNA, 550 bp, Homo Sapiens
tacaactcctacactctcaccaccataatgctatgaattagtgagagctaatggctggaaggtagagtgtttccagactgtgggatctgtgcatttttagaataaaataaaaggtacaaacagcacgcttgcagtagaccatgattacctagtaattagtttacaccaagcttcctatttaatggccaaacgctgtaattaacgtgtgacagaaaatcagagggtactttgtaagcatattaaaaattaacactgcaggcccatagctttatgtactgattagaagcatattaaatcaataggacacacaaaccaacagcttgggtagctgattattataggtcctcagaaggggtaccctggctttcatttcacttggggaggcaattttccttctcctgtcatcttcctcaggcacagagaaacacctcaaactcaaccctggcagcttcatgaaaataaccactgaactggaagaaaacattctaagtcattctcagagatgaagacaatatgtaaatgagtaagactttccatgattgacatgctg

SEQ ID NO: 171732 - DNA, 207 bp, Homo Sapiens
tggccgtaagcagcgtgctgtcatcctccctactccatactaccaatttgacaattctcaccaatagcttccctttcctcccacccacccctcccattttacccagaggaagcccatcactgacaccacctccaccaaccaccgaaacctactcgcttagtatccgcagaaacgactgccacggagattccatatccccagataatg

SEQ ID NO: 171733 - DNA, 422 bp, Homo Sapiens
  misc_feature (118)..(157): n is a, c, g, or t
actccactcataccactcgaacatcgtcttaccccagtatccctcgattccggacggcgatcgatccgaagccccttcaagccccctcacctggacaccaccaatcccacctgtcacnnnnnnnnnnnnnnnnnnnnnnnnnnnnnnnnnnnnnnnngctccacggagagggggagaagcctcggccataaagaggccccatcccaggggaccacgccatccacatcccgaccgatatcggacctgcgaccctcctggtcccaacccacatccgctcctataggcgcttgttccccggctggagtccctctgggggggaactaccacccgcccataccgctctcctctcaatccccggtctccctcgaactaactccaggacgcacctagcccccggaaccaaacacgcctccagtgtcctc

SEQ ID NO: 171734 - DNA, 1009 bp, Homo Sapiens
tttgttgttgtttgaggtagagggatccccccctatttcctctaaaattgtttttacttaagataccttttccctataatcttagcatgctttctgctctttctctttggaagtagcattaataagatagatgtaataggattaagatgtgtggaagatgagaaaaagaaggtttttgtagagagagtgcttatgttttgtttactcatgtttcaacttgctgtgtatgatcataaatctatgatcttgagaaaaatcctaaaaccatttaaatttagcctatgcagccaactacataaagagaaattaaggattatattcagaggagaaattaaggattatatttagagcacagaggttataccaagaatataaccttgtttggtccaattcttaggtaaagaaaagtaatcaatgcttgcattgctgttggagattctaaaagatgtattgaatgaagaggatgtacacatctcattgttactgcgtatttttttgcttggtattcctgcttgcattaaagctggacaatgtactgtgtatgtatattacaaaatttttattccttctaacgattgaactcttcttatccctattgataaaactgtattacaattgatgagtgtggctgccagaaaataatacaaaactgggcatttagctgttccacattgtgtagtaaatgttttgattatggggatttacagtgtatattaaagtagaaatgcttttgcacttgttttcagtctcaaataataatttttgtttttaattaaggatactttaaaagcaatgacagaaaaatctaaaatatcagaattaattattgtgaactgtgtgtaaaatatcttgtgagttttatacatactttggttgtctgatgtttcctaagtataaatgtctttatagaaaatttcagttctctgtgaagagtaggaagtgtactgtatattgaactagttctttgtgttactttgaaatttaccatcaatataaagttctttggtcc

SEQ ID NO: 171735 - DNA, 573 bp, Homo Sapiens
tgatctagaggatccctgctagcactgacacatcactgcaatcactcagtagatggaggagctgatgtcagttactggaaaaaatatgaagatgcattccttcattggtcaatcaggagttataactgatttgtaccttttttcctgcattatttcattttcctcattcatttactatgcatctgttaatgtcacaagagagaggaaaaggatgaaggccttgatgacaatgatgggtcttcgggattcagcgttctggtgagtcaaacgcagcacaaataaataaacggaggaactccaggaaaactgggaatcttcaatgcaatctttttatttttgtgaaatggagtcctcgctctgttcgcccaggcttggagttgcgggtggcgttgaccttcagtttcacgtgcaaagcctccggccttcacagggttcaccgccatttcttccgtgcctcgggccttcccaagttagactgggacatacagcgtgccgggccaccaattgcctggaataattttgggaaatttgcgtgtagaggacgggggtttcaccggggttagcccaggaatt

SEQ ID NO: 171736 - DNA, 383 bp, Homo Sapiens
cctgcagctgtgggcgcttctatgaacagcccgaggctacagagacgtctcagggtctccctattctctacacccaggcgggaaatagtcccgagccctcacttgggggactcaggccgctcagtaacttactgtatagattcttcctggagtctgcactgacaagctcccctccctgacaagcctctgtcccccctcacctttctggcctcagttctgtctccctttgttgctcacgatgcattgagcagtgcccataggcagctatcctactcttaactgattcatttgtcaaattaaagcgagttaagatggatagattcttccccagcaggtcttggggatgcagatcaatgagctttaccctgagagaagctcacaga

SEQ ID NO: 171737 - DNA, 393 bp, Homo Sapiens
ggccaagcgatcctggccgcttagccagccctggcaatgcattgaggagttcactccaggtcaggacttggggcacggggacaggcgccctgggagtgggaccacccatggtcttgcaaactggtctctaacaagagccaggcttttctctgtactatccaaaatatggaactaatatgtggaggggaagccacgggtaaagttttcaggaccttgatatgagaacaatcaaaactatcagttctgagagaagcagtaagaccctcataactggtggttgtttcagcaaaagtggggtggccccttgatatagatgtggagaaggtacttaggaagcacagacaccacctcccatctcctcactgcctcctatggggaactttacaattagga

SEQ ID NO: 171738 - DNA, 306 bp, Homo Sapiens
ctacaacgccaagcgatccgagcaaaaagactggaagagagccgagcggcggcgctccgagagctccaggagaagcaggctctgatggagcagcagagacgagagaaaagggcactgcaggagtggagagagcgagcccagaggatgaggaagaggaaggaagagctcagcaaactcctgcctccgcggaggagcatggtggcatcaaagattccctctgccacagatctgacagataacaggaaagtaccactgaatccgcctggaaaaatgaaaccaagcaaagagagatcgctggcgttgtag

SEQ ID NO: 171739 - DNA, 260 bp, Homo Sapiens
ctctggtgccatgtctgggggacaacccgcacatatctggccacgatgggagggatgaaattgttttgcactgggtcccgaaagttagagttaccctgaaacaccttttcttcattattcacaattcctttataggtcttccacttagaattattgtttttgaagttcatcacaaaactcttaacataaaagttgaagttcgactgcgtagatcctgtggtcctaattcctgttattttctttttctcccccaatcgtct

SEQ ID NO: 171740 - DNA, 675 bp, Homo Sapiens
ttctagcggatcctcctcctcagcagacgcagctctggatggcattgggacagtggttagcactacaggtttgggctgcagtgtgcggcttccgggtgggcagggctttgcctgaggagccatcaagggatgggcccatgctgatctggacagctccaagtgagggggctgggacatcccacaggaggcatcctgaaggggacagggactctgtcttcacttccaggacctcctctcctataaaagcctggctggaggagtcggctgagagcagggaggcctcagagttgacggaagaacatggagagacaggttctatcttggtctggacatctgaggaatcatcagaggtggggataacgttgatctggacggtttcaaatgaggatgttgggtcatctcccaggagacacagtgggggtgccaaggactctgtcttcacatggagcacctcccctaccccaagagcctcgctggatggctctgtggagagacgcgatgactcggagctgagggaggaggaagagcagggggaagatggctcagacttcacctgaagatctgggaagatcggcaggagttcccatgggggctcagaggggctgacatccatccccacgtacagggagctgccgtcaaacgggaaatcctgctccgggcaacggaagagctgcg

SEQ ID NO: 171741 - DNA, 660 bp, Homo Sapiens
agatgcagctccctttaagcttcatgctctctgttccctgtgcaggaacaccctcccctcgcttcagtcagatctctcctccgagacccgctaagtagcctgacccctagtcatcactggtgccctccccaactacgcgcttttttgaagtccaaaccattcgtcattccttgtcatgatactgcgcgtggcttcgcttatctgctgatcatttgttttccctttgagaacatcaggtccgtgaaccagccgagagctatgcccagcacacagtaggagctcatgaaacgtttactgaatgaatgtgtcttccccgcacatccctgtgcctcgctcctgccctgtccccatccctctcttgagcggtgggtgacgcagccgcgtctctccacagttcacgcctgccatccggccattcctgcagaccatctccattgggctggtgtccttcggggagcactacaaacgcaacgagacaggcctcagtgagtcccagccaggttctactcgcagcctactctcttggccctactccccactccttgccacaagcagcctgacccactggggctgcctgacaccccttctgacccctaggtgtggccgccagctctctcttcaccagcggccgctttgccatgaaccccgaggaagatcctg

SEQ ID NO: 171742 - DNA, 661 bp, Homo Sapiens
tggtctagaggatctcctcctcagcagacgcagctcactcataccagcagatcccacatggcagcacacagtaaggccctgcataccaggtctaatcctttgcttgagggactaagaagttcggatttgttagagcacagaaaatgacttgagctctaggagcagcattcatgctgagtgtgctcacaagagcctggggaataaactagaatgtgagtttattaacatcagcaaaggccccaccacctgcctttccatatgggcatgtcctcttcatgtagaaaattcagatgccgaagggtaatataatgggaaggctgcttggtgagcacagagttagcctgtgaggagtgagctggataatacaagtgcttaaggatgtcagggtcatgtgtccttctccccaaggaggtataaactgtttcgtacttgatactgaagatactaagatggtggtatgactttcaattaaattattttacttaatgtggtagcatgcacttcttctttcttgaaaagccaccattgaacttgaggtatatcaaagagctgcgtctgctgaaggactcacagacgactcctccagccaggcttggataggagaggaggcctggaagtgagacagagtcctgtcccttaggatgctctgtgagatgccagc

SEQ ID NO: 171743 - DNA, 256 bp, Homo Sapiens
gacccctcctccgcagacgcagctctgccagtgcactcccccagctgcacagggaccctgctgggtgcgcaaagaggctccaacagggagcctccagcaagcagaacttaccaccttacggcctcagcttcctcactgggaaatgaacgagctaaaaggagagctcgaacatccagacacataggacagacatgctctacaactgctacaaaagagagggagctgcgtctgctgaggaggggatcctcgagatcac

SEQ ID NO: 171744 - DNA, 367 bp, Homo Sapiens
gctcggtacccctcctcagcagacagcagctcctggccacagactgcccatagaactgtctgcacccaaaccccatggccttttcatgcacggagacaggcctctggatgtgcagccttgccaccccctgccccaatcctccctgagagctcctgcctcagtgccctgggctggtgagggagaagcctgtctgcacctgcctaattccagctcctccaggaagcaagggcttgtttgtcagagctgcagggttggccactcggtggggaggagtcagccaggattagagagcctgcccctaatccggcctgctggttttacaagagcagagctgcgtctgctgaggaggggatccgctagatcacct

SEQ ID NO: 171745 - DNA, 337 bp, Homo Sapiens
atcctcacctcagcagacgcagtcctggcacagactgcatagaactgtctgcaccaaaacccatggcttttcatgcacggagacaggctctggatgtgcagccttgccaccccctgccccaatcctccctgagagctcctgcctcagtgcccggggctggtgagggagaagcctgtctgcacctgcctaattccagctcctccaggaagcaagggcttgtatgtcagagctgcagggttggccacgcggtggggaggagtcagccaggattagaggagcctgcccctaatccggcccgctgggttaaacaaggatcagagcggcgtctgctgaggag

SEQ ID NO: 171746 - DNA, 747 bp, Homo Sapiens
  misc_feature (107)..(107): n is a, c, g, or t
  misc_feature (644)..(644): n is a, c, g, or t
  misc_feature (663)..(663): n is a, c, g, or t
  misc_feature (685)..(685): n is a, c, g, or t
  misc_feature (690)..(690): n is a, c, g, or t
  misc_feature (713)..(713): n is a, c, g, or t
  misc_feature (733)..(733): n is a, c, g, or t
acagctccagttacactagctacggtgaagatcggtgactttggcttggccaccagtaaagaatcgatggagcggggcccagcccttggagcagccctcaggatctngtgctgtggatggcagctgaggtgatccgtatgcaggacccgaacccctacagcttccagtcagacgtctatgcctacggggttgtgctctacgagcttatgactggctcactgccttacagccacattggctgccgtgaccagattatctttatggtgggccgtggctatctgtccccggacctcagcaaaatctccagcaactgccccaaggccatgcggcgcctgctgtctgactgcctcaagttccagcgggaggagcggcccctcttcccccagatcctggccacaattgagctgctgcaacggtcactccccaagattgagcggagtgcctcggaaccctccttgcaccgcacccaggccgatgagttgcctgcctgcctactcagcgcagccgccttgtgccttaggccccgcccaagccaccagggagccaatctcagccctccacgccaaggagcttgcccaccagccaatcaatgtttcgtcttttgccctgatgctgcctcaggattcccccatttccccaacctngggaagatgaaggggggtncccatgttgtttttttcaagtntttcnttggaatttggggggaaccccgnccaaaagattgaaggccccntgtttttcttccat

SEQ ID NO: 171747 - DNA, 503 bp, Homo Sapiens
  misc_feature (187)..(187): n is a, c, g, or t
accgaaccaggccgataattccttgcctgcttattaagggaacccgccttgggctttagccccgcccaagccaccaggggccaatctcagcccttcaaggcaaggagccttgcccaccagccaatcaaagttcgtctctgccctgatgatgcctcaggatcccccattccccaccccgggagatganggggtcccccatgtgcttttccagttcttctggaattgggggacccccgccaaagactgagccccctgtctcctccatcatttggtttcctcttggctttggggatacttctaaattttgggagctcctccatctccaatggctgggatttgtggcagggattccactcagaacctctctggaatttgtgcctgatgtgccttccactggattttggggttcccagcaccccatgtggattttggggggtcccctttgtgtctcccccgccattcaaggactcctctctttcttcacctagaagcacagaattctg

SEQ ID NO: 171748 - DNA, 644 bp, Homo Sapiens
  misc_feature (422)..(479): n is a, c, g, or t
tcaacgccaaaggagccttgcccgacccagcgaatcaaatgttcgtctctgccctgatgctgcctcaggatccccccattccccacccctgggagatgagggggtccccatgtgcttttccagttcttctggaattgggggacccccgccaaagactgagccccctgtctcctccatcatttggtttcctcttggctttggggatacttctaaattttgggagctcctccatctccaatggctgggatttgtggcagggattccactcagaacctctctggaatttgtgcctgatgtgccttccactggattttggggttcccagcaccccatgtggattttggggggtcccttttgtgtctcccccgccattcaaggactcctctctttcttcaccaagaagcacagaattctgctgggcnnnnnnnnnnnnnnnnnnnnnnnnnnnnnnnnnnnnnnnnnnnnnnnnnnnnnnnnnnccttgtcgggccgcctcggcccttcaaaaagttttctagacctttccgtttgggcgcccggggcccaggaaggtaaagtggaccatgggccaatagcttgttttccctaaggagaacccctgggtcatggaactaagggggttttggaatttcctccccccaaat

SEQ ID NO: 171749 - DNA, 1019 bp, Homo Sapiens
  misc_feature (944)..(944): n is a, c, g, or t
  misc_feature (947)..(947): n is a, c, g, or t
gggacagccgctgcggcagcactcgagccagctcaagcccgcagctcgcagggagatccagctccgtcctgcctgcagcagcacaaccctgcacacccaccatggatgtcttcaagaagggcttctccatcgccaaggagggcgtggtgggtgcggtggaaaagaccaagcagggggtgacggaagcagctgagaagaccaaggagggggtcatgtatgtgggagccaagaccaaggagaatgttgtacagagcgtgacctcagtggccgagaagaccaaggagcaggccaacgcggtgagcgaggctgtggtgagcagcgtcaacactgtggccaccaagaccggggagggagcggagaacatccggggtcccctccgggggtggggcgcaagggaggacttggagggcatcctgccccccaacaggaggggggagggcatcccaaggaagaaagagggaatcggccagaaggagggcccagagcggggggggagaattagaaggggtaccagggcccagcggtgggatggaccttggaaaagacggcctccccccggccctttgggaaaaccacttcccccctccctagagcaaaaggggaaggggcctccgccccttggaagtgggacactgggggggctggtccccacgcgcttcccgggcgccctccggtctcccctggtgggccagcccctgggggccccgggccacacctgtggggcccgggtgggccaccaaatccttccagtggacccttccccctctgggggccgccaaccccaaccccttctggtggccgccctctgggaaaccccaattgtaaggcgggtggggggcggaaatattttgtttttctagaacagcggaattgcccagaatataaacgctcggggccgccacgctccctttgtgaccgccacaccaccgccgagtgaaactagnccntccctggtggggggggcgccctctgggcccctctgaaaaatcattttataaacgccttctcgagtgggggcg

SEQ ID NO: 171750 - DNA, 911 bp, Homo Sapiens
  misc_feature (138)..(166): n is a, c, g, or t
ggggttgttcgtggcaaaagtccgagaatactctgggtacctcccaggggcgggcaggattgttggggggacaacttcccatgttttccacggttgcgccccaatttgttggggcacccaaaccattcccccgttttnnnnnnnnnnnnnnnnnnnnnnnnnnnnnttgccctgcttgcccttcaatggctctgatgagcgctttttcctttccacagatgtaggccccagccccgcgcaccacaaacacgtcaaaatcatagccagagccacaagcattcttgccaatcagacttgcctcataggcctctcggatggccacctgcagattggaggcctcattgtagaattcccctcggatgtagatataggcagcgcgggcgcccatggcccggccccccaccaggcagccttccagcagcttgtgaggatcatggcgtaagatctcccggtccttgcaggtgcccggctccccctcgtctgcgttcaccaccagatacttgggcctgccatctgagggcttattcatgaagctccacttgaggccagtggggaagccagcgcctccacggcccctcaaacccgatgtcttgatctcgcccaggatccagtcgggccccttcagcaggatctcctttgtcttgtaccagtcacctcgactcagggaacctttcagcctccagtcatggcggccgtacaggttggtgaaaatccggtcttcatccttcagcgagccaaatgaggttttcttgggtgctgtcgtgtcgccgctgaaacgcacagatacccgcgcgggaagcgaccagccgagcagccgccgtgttgccagcatcgcggcgggccagatgggtcacctcacgctgtcaccttcatagcactgaggctgaggaactggcgcgatagagacgcta

SEQ ID NO: 171751 - DNA, 993 bp, Homo Sapiens
cacgcgtcgcaatgaggcctccaatctgcaggtggccatccgagaggcctatgaggcaggtctgattggcaagaatgcttgtggctctggctatgattttgacgtgtttgtggtgcgcggggctggggcctacatctgtggagaggagacagcgctcatcgagtccattgagggcaagcagggcaagccccgcctgaagccccccttccccgcagacgtgggagtgtttggctgccccacaactgtggccaaaatggagacagtggcagtgtcccccacaatctgccgccgtggaggtacctggtttgctggctttggcagagaacgcaactcaggcaccaaactattcaacatctctggccatgtcaaccacccttgcactgtggaggaggagatgtctgtgcccttgaaagaactgattgagaagcatgctgggggtgtcacgggcggctgggacaacctccttgctgtgatccctggcggctcgtctaccccactgatccccaagtctgtgtgtgagacggtgctgatggacttcgatgcgctggtgcaggcacagacaggcctgggcacagctgcggtgatcgtcatggaccgctcgacggacatcgtgaaagccatcgcccgcctcattgagttctataagcacgagagctgtggccagtgtaccccatgccgtgagggtgtggactggatgaacaaggtgatggcacgtttcgtgaggggggatgcccggccggccgagatcgactccctgtgggagatcagcaagcagatagaaggccatacgatttgtgctctgggtgacggggccgcctggcctgtgcagggtctgatccgccactttcggccggagctcgaggagcggatgcagcggtttgcccagcagcatcaggcccggcaggctgcctcttagcccaccaccctggcctgctgtcctgcgtctatccatgtggaatgctggacaataaagcgagtgctgcccaccctcca

SEQ ID NO: 171752 - DNA, 751 bp, Homo Sapiens
ggacgcgtgggtcgacccacgcgtcgcggacgcgtgggctttggcagagaacgcaactcaggcaccaaactattcaacatctctggccacgtcaaccacccttgcactgtggaggaggagatgtctgtgcccttgaaagaactgattgagaagcatgctgggggtgtcacgggcggctgggacaacctccttgctgtgatccctggcggctcgtctaccccactgatccccaagtctgtgtgtgagacggtgctgatggacttcgatgcgctggtgcaggcacagacaggcctgggcacagctgcggtgatcgtcatggaccgctcgacggacatcgtgaaagccatcgcccgcctcattgagttctataagcacgagagctgtggccagttgtaccccatgccgtgagggtgtggactggcatgaacaagggtgatggcacgtttcgtgaggggggatgcccggccggccgagatcgactccctgtgggaagaatcagcaagcagatagaaggccatacgatttgtagcactgggtgacggggccgccttggcctgttgcagggtctgatccggccactatacggccggagctcgaaggacgcggatgccagcgggttgcccagcagcatcaggcccgggcagggctggctactgagcccaacaaccccaggccaggctgacctgcgtctaaccatgtggaaagctggacaacaaagacgagtgcaggccaacctccacaaacaaaccaa

SEQ ID NO: 171753 - DNA, 1029 bp, Homo Sapiens
  misc_feature (14)..(14): n is a, c, g, or t
  misc_feature (324)..(420): n is a, c, g, or t
ggggtaagtccggncaaagaaaaccattatttcggtagccaaataagtctccacttcaatatttcaattacttattaaacttatgctctggtatgtctcaaattaacctagatagaaatgaactctgatctttccacttccatcaagtttttcactcactcagtggcatcattatccatccagttgcttaagcatacatttgaaagttatccttggtctgtttcttatccttcccttccacatctaatccttcaggaagtcctgacaatgttacctccaaaatatgtcttaaatccatcttctcagccaggcacggtggctcannnnnnnnnnnnnnnnnnnnnnnnnnnnnnnnnnnnnnnnnnnnnnnnnnnnnnnnnnnnnnnnnnnnnnnnnnnnnnnnnnnnnnnnnnnnnnnnntcagcatcctgtttatgttcttcttagcatcagactcgggctttttcctgtttattacctacttcgttttcctgaaagatccatgtgccggtaccatgtgttgttcctactgtttctccaatgtctagtagatttggcacatactgatgtgcaattaatacgtgaatgaagaaccattgacagacgattagtcaaaagctcttgcaaagccctttgataggttatcggtggagagtagggagcacaaacctggggtcccattctagcttgaccacttctcggctgtgcacaaactagtctagctctcctgagcctcagttacctattttgcaaattagggatgggaacatccatacctcacgacgccaaacggctaccttgtaaagacgaaaggaggaaatgcaggaaataactccacgtaaggttaatgctccgtaaacagagctgctactgctattatatattctatacaatcctgcgcccttaacggcaggaccctttcagtgcttcagtcctgtcttctctctcctgggttgacctccacagatcctctcagaagagcgttttccaggcgtaatctccgcctcgtccgaattcgccacccaggcc

SEQ ID NO: 171754 - DNA, 1029 bp, Homo Sapiens; identical to SEQ ID NO: 171753
  misc_feature (14)..(14): n is a, c, g, or t
  misc_feature (324)..(420): n is a, c, g, or t

SEQ ID NO: 171755 - DNA, 937 bp, Homo Sapiens
  misc_feature (222)..(318): n is a, c, g, or t
  misc_feature (420)..(420): n is a, c, g, or t
gggacgcctggaaaacgctcttctgagaggatctgtggaggtcaacccaggagagagaagacaggactgaagcactgaaagggtcctgccgttaagggcgcaggattgtatagaatatataatagcagtagcagctctgtttacggagcattaaccttacgtggagttatttcctgcatttcctcctttcgtctttacaaggtagccgtttggcgtcgtgannnnnnnnnnnnnnnnnnnnnnnnnnnnnnnnnnnnnnnnnnnnnnnnnnnnnnnnnnnnnnnnnnnnnnnnnnnnnnnnnnnnnnnnnnnnnnnnntgagccaccgtgcctggctgagaagatggatttaagacatattttggaggtaacattgtcaggacttcctgaaggattagatgtggaagggaaggataaganacagaccaaggataactttcaaatgtatgcttaagcaactggatggataatgatgccattgagtgagtgaaaaacttgatggaagtggaagattcagagttcatttctatctaggttaatttgagacataccagagcataagttaagtaagtaattgaatattggagtggagacttatttgtctaccgaattattgttttctttgtcggacatacacctacactgcattcctcaaagtaaaatttaagtgtggctctggtgcctatgctctccccagcggaaagtgaccagaagagggtgtgcagtttccaggccctggcccatacaaacctccaacaggtgctcccctgtgctgttactccttctgccaactggaagcagatggtgaccaggctctggagaaggcaaggcctgaagatgggagattcctaagtggaggagaactgtgccttactgacctaaatatccactcagtattgttatgtgagaataaataaacttgtgttgaccattcaaa

SEQ ID NO: 171756 - DNA, 250 bp, Homo Sapiens
tcttgtttcctgcacttccctgaaagcaggggtaaatgtagggggggtggggattgctggatggaaaccctggaataggctacttgatggctctcaagaccttagaaccccagaaccatctaagacatgggattcagtgatcatgtggttctccttttaacttacatgctgaataattttataataaggtaaaagcttatagttttctgatctgtgttagaagtgcaggaaacaagaccgggtaccgagc

SEQ ID NO: 171757 - DNA, 269 bp, Homo Sapiens
ctagattctgcccgggcttgtttccttttgagtccaatgtgcagcaggtttaaaaggtgctcagttagagatgctaaccaattaagtggtgaattataaaatttctttcctgctttcaaacacaaatgggtaaatctgttccacagcagtagcaacagcctttacattgggccctgttactgtgatacttcctgttgaaaaaatctgtaatgtagctcttagagattttatccgatagcacacagcaggatgaagtgcaggaaacaaga

SEQ ID NO: 171758 - DNA, 505 bp, Homo Sapiens
ccctagtgcatagcccaagagcaccccaaaaatgcaggttaatgatggagataactttatctgccaaattttgtaatttggagcttaagaaccactgtttttcctcttgagttctggcctgtaccaagtgcagaaatagcttcccaaaggaaaaaaatgggcaacagtaccaaatgctgctgagaggtcaagaaagaagaaggctgagaactgattactgaatttggccacctggaggtacttggggaccctgacaagaggggaggagccacctgaaccatgaaaaggagatgtttgcccaagaccatcctgaagtcaactccctggaggaggtggtgaggctggtgaagcccacagccatcataggtgttgctgccatcgcaggagccttcacggagcagattctgagggacatggcctccttccacgagcgccctatcatctttgccctgagcaaccccaccagcaaggccgagtgcacggctgagaagtgcaggaaacaaga

SEQ ID NO: 171759 - DNA, 425 bp, Homo Sapiens
  misc_feature (361)..(361): n is a, c, g, or t
gaaagatctggatggtggactctaaagggctcattgtcaaggggaggagccacctgaaccatgaaaaggagatgtttgcccaagaccatcctgaagtcaactccctggaggaggtggtgaggctggtgaagcccacagccatcataggtgttgctgccatcacaggagccttcacggagcagattctgagggacatggcctccttccacgagctccctatcatctttgccctgagcaaccccaccagcaaggccgagtgcacggctgagaagtgctaccgggtcaccgagggccgagggattttttgccagtgggaagtcctttttaagagtgttgatttgggagatgggcaagaccttcnttcctgggggcaggggaaacattgtttacgtgtttcccccggggttggcattggggattctttg

SEQ ID NO: 171760 - DNA, 1348 bp, Homo Sapiens
aaggcagggtgagagttccccatctgaggcgtttgttgcagctacctgcacttctagatgctccccaggttcatcctgtgtcgtctcccccacctaccagtcatcttcttgtgagccctgggcttaggagtcaccatggcaactgaagagttcatcatccgcatccccccataccactatatccatgtgctggaccagaacagcaacgtgtcccgtgtggaggtcgggccaaagacctacatccggcaggacaatgagagggtactgtttgcccccatgcgcatggtgaccgtccccccacgtcactactgcacagtggccaaccctgtgtctcgggatgcccagggcttggtgctgtttgatgtcacagggcaagttcggcttcgccacgctgacctcgagatccgcctggcccaggaccccttccccctgtacccaggggaggtgctggaaaaggacatcacacccctgcaggtggttctgcccaacacttgccctccatctaaaggcgctgcttgattttgaggataaagatggagacaaggtggtggcaggagatgagtggcttttcgagggacctggcacgtacatcccccggaaggaagtggaggtcgtggagatcattcaggccaccatcatcaggcagaaccaggctctgcggctcagggcccgcaaggagtgctgggaccgggacggcaaggagagggtgacaggggaagaatggctggtcaccacagtaggggcgtacctcccagcggtgtttgaggaggttctggatttggtggacgccgtcatcccttacggaaaagacagccctgcacctccgggctcggcggaacttccgggacttcaggggagtgtcccgccgcactggggaggagtggctggtaacagtgcaggacacagaggcccacgtgccagatgtccacgaggaggtgctgggggttgtgcccatcaccaccctgggcccccacaactactgcgtgattctcgaccctgtcggaccggatggcaagaatcagctggggcagaagcgcgtggtcaagggagagaagtcttttttcctccagccaggagagcagctggaacaaggcatccaggatgtgtatgtgctgtcggagcagcaggggctgctgctgagggccctgcagcccctggaggagggggaggatgaggagaaggactcacaccaggctggggaccactggctcatccgcggacccctggagtatgtgccatctgccaaagtggaggtggtccacgagcgccaggccatccctctagacgagaacgagggcatcgaagtgcaggaaacaagaccgcggatcctcaagagacagctatcggg

SEQ ID NO: 171761 - DNA, 138 bp, Homo Sapiens
tcttgtttcctgcacttcgggaggggaacgagcggatcacccgaggtcgggtgaccccgctgtattgctctatatagtgagatccctatatagggtctcactctattgtccaggctggtctggcctggccaatatggt

SEQ ID NO: 171762 - DNA, 509 bp, Homo Sapiens
tccaagtcatgaaattatctactatcgttgttatcacattctggaagtgcaggtcttgtttcctgcacttctatttctttgctgaaacttactttttctaatggttttaagagtatttgggattgcctgtggagtgttttcagttgccggctgaatatttcagtcttttgtcaaataattgcaacatctatgtcatctcagcactgctgtcttttcctataagagttgagattttcctacccctttatatgccaattttgaattatatccattttgaacaatgcaaaattacgttttgaaaccttcaatcttgtttaaatcttacaaatactgaaacttttgttttagcagatagatgacgtaattagattcaggctgcatgctgcaacctgtcttctgagctgtggttccaatatcagttcagctttcaaagccctgcaatgctattatttaatttttatttttgagacagggtcttgctctttgtcacctaggctgaagtgcaggaa

SEQ ID NO: 171763 - DNA, 455 bp, Homo Sapiens
  misc_feature (59)..(334): n is a, c, g, or t
attgattgattgatttttaaaaatcattcattcattcattcattcaagagacccctgannnnnnnnnnnnnnnnnnnnnnnnnnnnnnnnnnnnnnnnnnnnnnnnnnnnnnnnnnnnnnnnnnnnnnnnnnnnnnnnnnnnnnnnnnnnnnnnnnnnnnnnnnnnnnnnnnnnnnnnnnnnnnnnnnnnnnnnnnnnnnnnnnnnnnnnnnnnnnnnnnnnnnnnnnnnnnnnnnnnnnnnnnnnnnnnnnnnnnnnnnnnnnnnnnnnnnnnnnnnnnnnnnnnnnnnnnnnnnnnnnnnnnnnnnnnnnnnnnnnnnnnnnnnnnnnnnnntgctttcaggcccttctggtctccaaccgcaaccctcttcatcacaagtcactgccaaaacatcccccctcttttctcagaatatcctctaggggtgtgtgtggaagtgcaggaaacaaga

SEQ ID NO: 171764 - DNA, 582 bp, Homo Sapiens
cacaattactgtttagctcataactataactattctaaaaataacaaaagactgccaaactcacctcaataaagtccaatattcccatctgtttccctttcctaaataaactgaggaatatttctttattagttctaaattatctaccctcaacatacttatatccaaatgtcaacaaaaaactttaattcttaagtatcttaaaaaaacatactgattttactttgaaaattcacccttatctttcaaatttccacatctcttaaaaaatacatctttctacctttaagtgtttgaaacaaccagaaaaatataacctgtgaagaaatgtgtttgaatggaaaaaataacacatttggtcaaaggtaataaaaaaaacaagcataataaattattaaagagctatgttactcaaagaaagctaaaagattaaaaaatatttagaaaggtaacatggaaacatccatagcaagcattatacccctatcagtgatagcagagaaagttattaatatctttttttctccggcaacaactgttttaaggaataagtgcaggctgcaagtccttttacactctaga

SEQ ID NO: 171765 - DNA, 387 bp, Homo Sapiens
  misc_feature (62)..(81): n is a, c, g, or t
  misc_feature (103)..(163): n is a, c, g, or t
ccggggcccctctttttttctgcccctccaacctgggggaaaaaataaactttttttccccnnnnnnnnnnnnnnnnnnnngagagagagaaatatacacacnnnnnnnnnnnnnnnnnnnnnnnnnnnnnnnnnnnnnnnnnnnnnnnnnnnnnnnnnnnnnagacagacaaggctcaagaaagggtctgcagagggatgagagaagacaggcaagtgagacccagagagaggctgcactaacctgacattcttgggtgctcacagaccaccctccctccagctggggccagtgctgagcctggtgtatacaggtatcacttaacgagtgcagaataatgcccggatgactggagagccctagatgtagaaagaagagattatggg

SEQ ID NO: 171766 - DNA, 405 bp, Homo Sapiens
  misc_feature (108)..(240): n is a, c, g, or t
  misc_feature (257)..(361): n is a, c, g, or t
tgggcaactcttaatagggcactgattaccttgcattatttgtactcatctggacattctcttccttaatgtttattagcctgtacttttaaagttaagcaggggggnnnnnnnnnnnnnnnnnnnnnnnnnnnnnnnnnnnnnnnnnnnnnnnnnnnnnnnnnnnnnnnnnnnnnnnnnnnnnnnnnnnnnnnnnnnnnnnnnnnnnnnnnnnnnnnnnnnnnnnnnnnnnnnnnnnnnctgggtgtggtggtatnnnnnnnnnnnnnnnnnnnnnnnnnnnnnnnnnnnnnnnnnnnnnnnnnnnnnnnnnnnnnnnnnnnnnnnnnnnnnnnnnnnnnnnnnnnnnnnnnnnnnnnnntgacaaggcaagacgctatctcaaaaaaataaaatatagttaag

SEQ ID NO: 171767 - DNA, 841 bp, Homo Sapiens
ggccattgcttcttccgaagttcttgagactgattctaaatctgctaatcgagccccacacgattcaagcatcagaagagcagagttcaaccccagcaccggtgaaaaagtctggcaagctgaggcagcaaatagatgtgaaggcggaactggagaagcggcaaggagggaagcagctactcaacttagtggtcattggtcatgttgatgctgggaaaagtactctgatgggccatatgctttatcttctgggtaatataaacaaaagaactatgcataagtatgaacaggagtctaaaaaggctggcaaagcttcgtttgcatatgcatgggtcttggatgaaactggagaagaaagggaaaggggagtaaccatggatgttggtatgacaaagtttgaaaccacaaccaaagttattacattaatggatgctccaggccataaggacttcattccaaatatgattacaggagcagcccaggcggatgtagctgttttagttgtagatgccagcaggggagagtttgaagctggatttgagactggaggacaaacacgagagcatggactcttggtccgttctctgggagtgacgcagcttgcagttgcagttaataaaatggatcaggttaattggcaacaagaaaggtttcaagagattactggaaaacttgggcactttcttaagcaagcaggttttaaggagagtgatgtaggttttattcctacaagtggtctcagtggtgaaaatctaatcacaagatctcagtcaagtgaactcacaaaatggtataaggactatgtctattagaaccaattgattcctttaagcctccccag

SEQ ID NO: 171768 - DNA, 612 bp, Homo Sapiens
  misc_feature (144)..(187): n is a, c, g, or t
  misc_feature (406)..(424): n is a, c, g, or t
cgcactcaattaaggtaatggtcctctgggtataaaaggtcaatttcttcttgccgcttttaagaataatcatctttgggtttcagaagtttaactgtgacatgaataggtacggttttccctcccgttatcccgcttgggaannnnnnnnnnnnnnnnnnnnnnnnnnnnnnnnnnnnnnnnnnnnaggtaatccctgagggccctcccgcgatatcctccacacacggcaagctcataaagaaaaggttaaaaaagattaaaaggactctggccaatcttaccccgcccgtttacccaaaacatcacactctagcatcacccgtattagaggcaccgcctgccccgtgagcccagaatacacccctgcaaccccagcattggcgacaaaatgaggccatctccnnnnnnnnnnnnnnnnnnngctatggttactcttctcaaaaaatgcacggaaagtcacacaattttacatacagttttaaagggttcacagacccctggggagtagccattggtatagatagtttaacagtatcagaatatgaaaagggacttaagtaaatttcattttttctataataacttttactgagtatccgtgaggggcca

SEQ ID NO: 171769 - DNA, 528 bp, Homo Sapiens
ggatactcaatctagtgcaacaggtaacctaaaaagcaagtaagcctaagcaagcaattcatttagaaaaaaccatatgtgactctagacagctttaataaactcatttccatgaagcatatatgatcctccagtgaaagtcggaaatagttggaggcttaaggttatggaacaatctgtgatcctccaaagtataatcaaactttaaatttttaagaacttaagtcgttaaatgaaattattaaacactaaataaaaaactctcagttcaggtcaatgataatcaagctttgttttgaaaacgatactgccttaaattgacaagtacagcaagattaacaagtactcagaactctcattaccaatgactcatgaaagaaattgggagtgtgctatgatagggaaaatgcagcaagataatgatttggatccaagaacaacaacgagagtattttgttgtttctctcctctccttgaaccattaggcatttggatatcactgtataattttgaggtaatccgtgaggg

SEQ ID NO: 171770 - DNA, 972 bp, Homo Sapiens
ccctcacggattacctcaacaaagtggaccaaaaaagaggaaaacacagaatacaagaaagagttgacaaagcaaatctaataaaaagtatggttggtttgaacagtcactggtatgatttgaacagtccttatggtttgaacagtccttatgattctactttttgacaggctcctccttttgactactgagcaattaagatattttcagtcgtttcgattccttttccacattgtctctaatgttctgtagttttctggagttctgaaccagggatactaaactctccctaaaatcactagtcccatgatctctgccaacattatgaagctcatcaaagaaagtcaacgtctgtttgagtttggcctgaacaattttttgctcttctaattctgcaagaagggcctgcttagtacataattcagtcttgtacttctcctgtaactgttcaatttctttctggagatgctgaaaatcttcctcactataaggtgtctccttacatttatcttcaggaagcaagatgtttgagggaatacgtaaaatcagctgcaaaaacagttgctccattttgctaaaaaggttatcaaaatgtccttccatgaagcaaagaaacttctctgtgcatttgcgaatctgcactgggctaatgtcacagtctgggatgccatccagcttcttcagaataacctgttcaacggcctgcatcacttcaaataggtagtcttgaaatgcaatgtagatccgaagcatgcacgtttgtggcgtgaagccaaagaactgggcctcgtaggtcattggatccacagacatcttggcttattttgctatgttgttttcagtcgtgaaaaaccggagcgaccatgagggtgacgatttgaagcacacacaggcttcccgccacctcctttaaaccgccgctggcttgccagggacagacggcgcggttggctccccaaaattccgactccc

SEQ ID NO: 171771 - DNA, 163 bp, Homo Sapiens
ctacttggaaaaaacctgcggatggatgcgtttggctctggctgatgctggtgacactgtagaagatgccaacttcgtggaagccatggcagatgcaggtattctccgtctgtacacctgggtagagtgggtgaaagaaatggttgccaactgggacagccta

SEQ ID NO: 171772 - DNA, 300 bp, Homo Sapiens
  misc_feature (103)..(111): n is a, c, g, or t
cctcacgattacctcaagaagaagatcctccgctttcggtctggctctttgaaactgatgacgacggtttgagtgacatcattggtgtagaaagtttgtgtgnnnnnnnnncttctccctagttgccaaaattaaaaaggtggtgttttcatttttgtataatactttaatggaatgctttttaaaaaaatataaaaccaaggtaaattattgtttcatcttcacgtatggatgctagtgcctttaatggaaggtaaagaatgttttgctagttagaagtacatattgaggaatccgtga

SEQ ID NO: 171773 - DNA, 603 bp, Homo Sapiens
  misc_feature (392)..(392): n is a, c, g, or t
  misc_feature (450)..(450): n is a, c, g, or t
  misc_feature (453)..(453): n is a, c, g, or t
  misc_feature (460)..(460): n is a, c, g, or t
  misc_feature (517)..(517): n is a, c, g, or t
attcggcacagggtttacagagtagtcttaggtagtagcaaaagagccaaagaagagatttgtattgctgagctcaaagccaagcagaggccggcagtggaggctgagcagggactctccaggcttctctgcccataaacacccgggtcccaggccctccttcctttccctttggtgctccctcctccccacgtaccattgcgcgtgcagctggagcagaataccctcatttttaggaatctagtgatgcctcttgcctcagggaaacgtttctttgatggggagtttgagatttcttttccttgtttatgctttatttgtggtaatgaaagagcgaatgactgaacagccatggcaaggcagacctacaggcgaggccgcagcagagggtnggggcagagcagcctcggggtcttgggggctgcaggggttttcctggcgcagcgaaantcnctgagcncttaccgggcgtgaccgtttcttaggtgtgagaggggctgtggcttttgtgcagcgnctatgttggtgttaggggtggtgtggagattgttaatcttgtataaagcaattcaataaattgtttcaaggtttccaaaaaattac

SEQ ID NO: 171774 - DNA, 608 bp, Homo Sapiens
  misc_feature (38)..(38): n is a, c, g, or t
ggaaagcctttaaaactttgcggggcaaaatacagaangaaattcaagtgaagttccccatgtattaaaacaaggtggcgctggctggaagacatgctgtccctgtgccccacaggagtagcagtgctgtgctcatcttcctgacccgctcttcacagtcttcaccgcctttcttcaggagtctcccctttggcttttccacagctatgaaacccacgtagtcggacaccctaatgcttctcctttcctgtttgggcgagatttataggaagtgtttcttctgctgaagcctggttcatttattctgccaaatgtatgcctggtattgtgttttttggtcatgaaacacgtttcacaaaaatcaaagtcatcacagtttctgcatttgaatctggatccattgataggaaacatctgacatccatcacacctttcacaacccccacactctgatgagtcacagatccccatttgtattttggtgtggtgacagaggctttgacccgcactttatcaccaatcttgatgtgagaagaacttcttggtggaggatagcctataagttccacatgaatgtacctaaaccagtagatgcccctttctgctgg

SEQ ID NO: 171775 - DNA, 624 bp, Homo Sapiens
ccctcacggatactcaatgctgttattaccattcatcctctttcggatgaggtatttcttctaccttagtaggtaattctgccacatttttcacttcttctttttttaggagttggcatgtttcttgaatgtttcccaaaatacattgtaatacttcctgtgcatcatgctgtagatatccttcatacatagggttgagttccctcagtgtgttaagcagtcgccttggctgagtggcaagttcatcagtatatttctctggatttaagagaaaactagcctggagctgctcaaccgaaatgattaaggactgtaaactgcatatcaattcataacttgccaaagaaccttctttgcaatttcccttgtctttttgattggcttcatcctttagagcttctttcttccttgaaataatattaaataagtgctttactccagatttaaaaccgggacaaaaatataatacctgaagtatactattaagatagcaagtattgccgagattattcagtcccacaaatggtaacaagtttcctctcttctcacagtttataggtgaagactgtgctgcaggaacaacttgatcaatttcagatgctctatattcagaagcttcttcct

SEQ ID NO: 171776 - DNA, 757 bp, Homo Sapiens
ggtggctcgatacctcaagatttatctaacagtgcagtttcatttagataataaactatgtacataggacacattttttatctctaggcttagtcatgtaaaaactgcctattgctaaaattctggtaactttttgagagtattggataattttcagtacctgcgcaatccttgatttaatgaaattaaattttttatttcaaaagataggcttctgtttatcaaaggcgttgaacaatttgatttttaaattagttttagcaaaatggaagtataatgggaatatatttttgaggtggtcttagtagtaattaccatttgttgaacacattaatgctatactagacagatacagtggagatagctttcaaacccgtatctattcctaactactgcctctaatactaattactaacttgttactaacgctaacttttaaaaatgtttttgaaaattgcaatttctacaaataaatgtcatagtgcaaataaatgtcaggatttagagaaggaacctaaactgaatttgtgttatttcagtaaaagttatggagttatgggtctagacgtgttaataagttagacagaactttggcactttagaacaaatgcatgagtggtatttcagttcctaagttacataaaaagtgtgaaagaacactgtgaggtccacgcaacgccagactatattaaggtaagtaaaaagggtttttatagggcttcaatacccaggtgggtgaccgagcagaagaaccggg

SEQ ID NO: 171777 - DNA, 935 bp, Homo Sapiens
ttggggcacaacttgttctaccaaccagatgcctttagcttccagaaagctgtggaactcgttccctctccgtcttggtctggctggagtaccgctactgctcagtcacttcctgcagccataccgtcaggccagcttggcctaaaagctgttatctctggtcactggtttgtgttgttacagccactgcttactaacagttaaggttctgaaggtgggcatgtcaattgctcccaggtaccaactaggagacacaataatcctattagtttgttctcccaaacccactccagtttatcaggtaatatgctctgtaaggttctttccaaccccattagcacatacatagattacctataatttcacctaatgtaatctaccttcctactgaggattgaggttttaacgtttgttttttttccccccactttcttgatcagtgattctcaaccatgtaggaattaatgaaaccaattctgtatcaccactgcaaccaagacagcaataccaagtgatatgtatttttcaaactaatgtcattttgttctctatactgtaaaaaacgagaagatgcagtcctcaacttagaactcaatactaggaagggtcaagttgtcaaaaaatgtctttcaacagtagaaaagtttgctttcaaattaaaaaacaaagcacgtattgcaaacatcgtgtaatgataaaattacagaaaaaaatatattcagaatgacccatggcattcacgccataccagaattttgcctgtaacaaaacagagaattttatcccaaaaagtaggttaggtccatgctggctaaaaacttcagtcccagacccaataaatgaggatgaaatacatagtgcatgcttaacagacattgcatatacatcaacaattctttaatgcccctctctagggttttgaggtatcgtgaggg

SEQ ID NO: 171778 - DNA, 653 bp, Homo Sapiens
acggattacctcaataggatagatagaatgtatattgtttagcaactacttaggtttaatttcttattctaccacactagctctgagaccctgcgcagataatcattctcttttcagactgtaccaaaaggaaccccattgtgaaggttgctgtgtgaattaagtgatattctcatatcatgtattcacactacaatttgcttaccataatttgcatagtaattattcaataaatattagcttttactgggtgatcagggtactgtggaaatacatatttctttccctgagtaggttctagctaggtatgagtgccctagtttgaacatgtttgtgtgtgcatacacccagttaatgcagtcgtattttgagaaaaagaaaaggcagaaagagtcccattcactccctcaagcccagctcactggcaggaaagctggacattgttgctttggagcattgattttcctgcttctacgccactacagaccagaagctgtagatgccactgcctgctgattcttagcttggggcccctgccatttaaaatataggcaaggtcagagtataggatagcttcccatgccttcggttggaggatgttttaggataaagaaaagacttctaaaaagtcatcttgaggtatcgtgaggggt

SEQ ID NO: 171779 - DNA, 480 bp, Homo Sapiens
  misc_feature (91)..(91): n is a, c, g, or t
tagcagataccagtgccatacccttggacttcccagcctccaggactgtatgaaaccgagtactttataaattacgcaatctgtggtgttntgctatagtagtggaagacagacactgacataaagcctgttaattcaaaccactactgcacaggtaggagcctcatgactgaatgaagggagattctatacttctgagataagtctcttgttttttaaacctaaacataattcctggtgactcaggtggacataaccttccttgtctccagttcttcttccccgagattctgaatttccaacaacattgcttccagtttttgatactataaaatcagagttgacccacgtaagacatgaggagaggctaatgatggaatcaacacagctttgccagaggttataaaagaggattgagaaatccagattttatttggaatttttcttttctaacagctttattgaggtaatcgtgaggga

SEQ ID NO: 171780 - DNA, 381 bp, Homo Sapiens
acctcaataagatagtgcactccctgcttaaaaccctcaaagagcttactgtagacacctaaggtcttatgaagacctgcagtgcccctggtgacctgatcctgcccaccttctctccttcattcactcagctccaaccccaatggcctcctttcagctccttagacaagctccttcgcatgcggctggccccttcatctataatgttctgtgcccagtcctctccatagctgccacttcatcttttggctcactgccctagagaggccttctctgaccaccccagcctccagcctccagactccttattatataatcctgaagttatttttttcccttcattacagtcatatatagtgaattattttttatctttatttt

SEQ ID NO: 171781 - DNA, 362 bp, Homo Sapiens
  misc_feature (64)..(131): n is a, c, g, or t
  misc_feature (154)..(162): n is a, c, g, or t
ccctcacggattacctcaagcctggccaacagagcaagactctgtctctaaataaataaatatnnnnnnnnnnnnnnnnnnnnnnnnnnnnnnnnnnnnnnnnnnnnnnnnnnnnnnnnnnnnnnnnnnnnaatagttttaatttttttagttnnnnnnnnntacccataaaaatacttggtgtatatatagtaagcacttaataagtattcgacgaagcaatatttttctaacatactgaataaacatttcaaataaaaatgaatgaatgttttggggattatttctcctctgaactctaagctttgttaatttaattcatttttcccccgagagagactagcttgcaaattttcctcata

SEQ ID NO: 171782 - DNA, 471 bp, Homo Sapiens
acggattactcagtacaaacttattgccaactaaggtcagattctaagggactggggattagggatacaacttaccttttttagggaacacaattctacccataatagatgggtgcaaggatgtaggtcgaaggctggcaagtgagcctagataaagggagtgagagaaaatgaagatgctaatgagaacatggggatgactgaccatggggcccacactggaagagaagcagattctggagaccaagagtttgggtgatggggtaaaggctaaggattagcaggcaggaaattacagagcaagttggttcagcagcagtcatggtacgagacgagcctgggagagtggggacttcaggatctaagatctcggattcgtgatgaggctggaggtttggctgtgactatggcaggtcagctgcagaaggtaatttgatactgggagatgatccagttgaggtaatccgtgag

SEQ ID NO: 171783 - DNA, 420 bp, Homo Sapiens
aggatactcaggactctacctaggtccaatgtcagatggtggagagctttggggtacagacttctatgctggagaggtttccaagagatggctgtttacggtaggatgttgatggaattcatgaaaataggcttacgcagtcagaagcataaaatagattttatttagcagttcatcagcttgatgtataacttttctatatgtagacgtatggtatgtatacatccagttgtaccattgtcctgagccttgccaatgtcgggttctcagccacactggcataccaggtcatcttaatttggagaggcaaaccagcagccttctctcggcctgggagtgtgaagcacacgtgcttatctccaggccaaagccctgatgcccccagatgtgttgattcattgttgaggtaatccgtgaggg

SEQ ID NO: 171784 - DNA, 376 bp, Homo Sapiens
attcaagaaaccccctgagacattcatcttggcaacaatttcttgaggtaatccgtgagggccctcacggattacctcaaggagaaacatacacatttattattatagatagagatttcagcccctatttcagtaacttgatccaactgacatttatagaattatcgttccaatagcaaaatatacatcttctcaacctcacagggaatgctctccaagatagagaacattcttggccattggacatacatgtgtgaaattaaaataacagtaatcatacaaaataagttctcaaacatgaggactttaactaaaaattaatagcaaaatgatagaaaaatttcaacatacttggagattgagtaatccgtgaggg

SEQ ID NO: 171785 - DNA, 499 bp, Homo Sapiens
ccctcacggattacctcaagatgcttatggataaataggatcatgcccaactaaatttgagaaatattgcatctgcgtgctgctacccaaagattaacagtgcatagtaaagtccagaaataaagaaacctccttaactttaagtaacagcatttttcaaatgtatagccacaataaaaaacttatttgtccatgtaacacttaactaatgctatagaaaggctctattgagaagtgataaatgacaaagtgatatatcgggctaacaagtagatttcttaaaattcgaattatagaatctgttctgatacctcctaatttaatcgtatttcctaatgtcctagagaattccaaatgcttatttctcttctaactaaaggtaatggtagtactacttgagcacatagaaatgtaggagactgccattcaacaggtatttgtagaaaacttagtatggccttattaaaggccagatttcacagtgattctgtgactaaaa

SEQ ID NO: 171786 - DNA, 627 bp, Homo Sapiens
  misc_feature (296)..(335): n is a, c, g, or t
gcacccgataaagtaatgatgatgaaggcacataaggtataacaaagttttaatatgagaatcttcttgttcattaaaggttgtgcccatcatgtatatatataatataatctgttagatatatatttgttagatatctaatatatatacacagaacagaaagcttattagatatcatatatatattagacataatagtgaagaaaaacaaaatattctctaaatcacttgaggtaatccgtgagggccctcacggattacctcaaccaactaatgcagtctcaggtgtggaatgnnnnnnnnnnnnnnnnnnnnnnnnnnnnnnnnnnnnnnnnttctaggagtccaaaataggcagctcttgccattaatcaaagtacatagttgtaggatcttcattagcctcatatcaataatttagctgaaaatggctctaacaaaattaaaaactcatactattttcccaatctagtttcagggagcccagcttgaataatagctagtctcttttggtaccttctgagaacacaagaattagccaatcaaatcaattatcctgacattttgctaccacatccccccaaaccctagccttgtggcctaacagcttgaggtaatcgtgacggg

SEQ ID NO: 171787 - DNA, 602 bp, Homo Sapiens
  misc_feature (490)..(490): n is a, c, g, or t
  misc_feature (558)..(558): n is a, c, g, or t
  misc_feature (560)..(560): n is a, c, g, or t
  misc_feature (578)..(578): n is a, c, g, or t
ggcggacctgcatacaaataatcatgtgttgatcatttatttattcaacaaatatgtagtgagcacttactagaatactaaatgccattgtgctaaatgctagcaataaagcagtgaacaaaacggacaaaaacctgtcatgaactataccttctggtgggagagacagaactggccaacttaaatgaataacatacatcgtgtgttagatggtgctacagagaaaaatgaagcagagcaggaggtggtaagatgtggtggtcaaggtttgcaattttagacagtgtggaagaaaagacttgaaagaatcaagtgagtaaactcaggatatctgggagaagagcattctagacagacagaactggaggtacaaatgcccagagatgggaacatacctagaatattcaggcaatagcaaggaaaccagagtggttggatacaatgtggcaatgcattctatgtggttggagcagaagtgatggaaggccantagaatagaatagttacccaataagatcatttagataatgatgggccttgaggaggggaagaattgtntnttaataaagccatcttgnagggtaattggaagaatttttgat

SEQ ID NO: 171788 - DNA, 275 bp, Homo Sapiens
ggtacctatgagcacaatgcccatgtatgtatttcttgtgtgcttattgggcagctacctgagccacaggtagctcagaaagactctcaaattgtttgtttgttttttaaaacagaaacaaggttttactatattgtccaaactgacctcaagctcttggcctcaagtgatcacagaagtgggccactgcacccagactactgtctaatctatttctaacagatttggtgaagaggttatctcttgaccctctgagtatccgtgaggggtccgca

SEQ ID NO: 171789 - DNA, 326 bp, Homo Sapiens
cgtcggtcccctcacggataactcaacggtgggtatgtccagaggatgaggtgccacaaggggctgtgatcacctctatcttgcaaggcgacgaagtacttgaatgggcttttgagtggatgtgcaggagttgactgggtgggtgagagataaagggcgatccaagtagcaggaacagcacaggcagggcccaggaggcatgaaagtgtggcgagcatgggaaagtgtaagcagctgggcagactcttgggcagagcaacggggaggttcttgcaggttggggctggatgccgggtggttgggtcacttgaggtaatccgtgaggg

SEQ ID NO: 171790 - DNA, 416 bp, Homo Sapiens
tcggtacccctcacggattactcagtctgactacttctccccaacattctgcctccaccagagtccaggatgttgtcatctctcaactggttacacccccaatctccttgttagtttccctgcttctaccctgactgacaattaaatctccacctggccgtcaaagggtacttttcaaacatgaatttggccacgacattgccctgcttaaaacaaacagctacccgttaataacctggagtcaatgccaaacttcttagtggcccataaggtcccacaccatgtggctctgattggtctctccaacttctccttcccctaccctggctcactaagcttcaggcactctggtgtgcttcctgctctgcaattcctcattggttcccttgtgagtatgttgaggtaatccgtgaggg

SEQ ID NO: 171791 - DNA, 594 bp, Homo Sapiens
aaggattactcaagtgatccgtccagctcagcctcccaaagtctggggatcacaggcatgagcccccatgcctggccaacctagcagtatgcttttatggttcttactttttgtgtgtgtggctgcatagctgatttctttttattgctgaataatattcccttgaatgaatgtaccatggtttggttatccattcacttattgaagagcatcttggttgcttctattttttggcaattatgaataaagctgctataaacatttctgtgtaggcttttgtgtggacctaagttttcagctcatttgcgtaaatacgtaggagagtgattgctagattatgtggtacaagtatgtttagctttgtcagaaactgccaaactgtcttcagacgtggcaggaccattttgcattcccaccagcgtgaatgagtttctgttccacatccttaccagcatttggtgttgtcactgatttagattttagccattctaaggtatcttattgttttaatttgcaattccctaatgacatacaatgtcatcttttcatgtgcttatttgccatctgcatctttattgaggtaatccgtgaggg

SEQ ID NO: 171792 - DNA, 374 bp, Homo Sapiens
  misc_feature (167)..(223): n is a, c, g, or t
atcccctcaggattactcagaaattgttgccaagatgaattctcaggggtatctcgaatgttttctagtaatagtttcatagatttaggtattagattgaggtctctaatccgttttaatttgattgtagtatatggcaagagataggggtcaagtttcattattannnnnnnnnnnnnnnnnnnnnnnnnnnnnnnnnnnnnnnnnnnnnnnnnnnnnnnnnagtactatgctgaataagagtggtgaaactgggcgtccttgccatgttccagatcttagaggaaaggctttcagtttttctgcattcagtatgatactagctgtgagtctgttgtatatggctttcatcatgttgaggtaatccgtgaggg

SEQ ID NO: 171793 - DNA, 465 bp, Homo Sapiens
gcgcggaatcaggcccacagattctcaatgccactttctacaacacacattactggtattagcgccagatatacagctctcaatctgtttcctgtaggcgcggggaatacgggagaaatccgaggcctcactcacatccgtctggagatgtgcaggtgcctctgagtttgtcattgatcctccgcaacactgtcgtattgctctccataccgatatgcgatgtgtaactccctcacgctgcttttctctgtaccacgaatctgccacaaaggggcattaagttgatgaatcactacattcaactgatgatttcttgcaaaggctacaatcgcatcattgccagcaaaagtaccaggctttgccaaactggccacatgcttctcaaaaggaatgtcatcttctacaaagggttcaaaatcttcccgctgctttaccatgtagtccactgtctcctgtctgtgcttt

SEQ ID NO: 171794 - DNA, 579 bp, Homo Sapiens
  misc_feature (324)..(353): n is a, c, g, or t
  misc_feature (373)..(484): n is a, c, g, or t
acggattactcaacaccatcgagccagcacgcccacctacatcccctgtttcttgacagtacgtgtgtctggagtttggaggattgcacctgttgagtcttctttgctatgagaaagtaataatttgtaaatgtatacacaaatactatactatgtagtcatttattcagtgactatctcttgatcactgggattacaggcgtgagccactgtgcctggccaaaaacagattttaaatttcatcagaatgatgaaaactgtaaggaagaaagagaaatgatggatatatgaaacatagtagttgaaataagaaaaatgcctttnnnnnnnnnnnnnnnnnnnnnnnnnnnnnngctagttcaatagaaagaannnnnnnnnnnnnnnnnnnnnnnnnnnnnnnnnnnnnnnnnnnnnnnnnnnnnnnnnnnnnnnnnnnnnnnnnnnnnnnnnnnnnnnnnnnnnnnnnnnnnnnnnnnnnnnngcaaaacatggaagggaaatactgtaagttagtggctgagaatttttcaaaaaataatgaaagatgtgaaaccacagatcaaagaaattcatagc

SEQ ID NO: 171795 - DNA, 525 bp, Homo Sapiens
tccgtcacggatactcaagtgatgccccgccgtgggcctccaagtgctgggattataggctcgagccactgtgccagccaagagttttattttgtacttgaaaattgaactgtcttttagacaatcgtagagaggtcaagtagtcatttggttactcagctaattccaggcacagctggagatagacataaggtagattatagcatatagctgctgcctaaagccagggcatttgatttgagaatagaaaggggccttgcaactgtgatgtgggaccaggtgattcagcatttgtaagttgtacaaaagcggagccagggttgaccaagaaggactgcaaggagttagttatgttgatggctgctatgaggtcaagtagtcataaaatacaattttctattaattattttttcagtccctgttgttaaatatttgtgtttattctggtttcttttccactattacaaacacttattgaatgattgaggtaatctgagggggggatctttagagtcgactgcagtc

SEQ ID NO: 171796 - DNA, 228 bp, Homo Sapiens
ccaaagacatttattaaacaaataattattactgttgctgtaaatgctgtggagacagctaatggttagcccatcccaggttgattgagaggaagggcagtcagagaaggtctctgaggaattgacttttaagggtgaaacctaagaatgaagggaggacaaaagactgacccaggtagaggagatggcacaggtgaatgtcctgaggagggaaagaatgtctgtatt

SEQ ID NO: 171797 - DNA, 563 bp, Homo Sapiens
  misc_feature (85)..(115): n is a, c, g, or t
cctcaagccacaacatcatacaatttactcaagtaacaaatctacatgatgtataccatttaatatataataaaagttgaaattnnnnnnnnnnnnnnnnnnnnnnnnnnnnnnntcaggcaatagaatcattcttttatcttggacttagaagacaaataatacaatgaggatatttaaggatattcagacaactaaagaaaaccatgttctaagaatcaaaagatggaatgacagtattttattaaatagagactatcattgaagagatgaaagttatttgaaagaaaaagcaaatagaaattttgaagttgaaaattaattaaaattaaaattcactagaggagctcaacatcatgttttaaatggaagaataaagaggaaagaatcagcaggcttaatgatagatcagttggcataatttaatctaatgaacagagagaaaagcaaaagaataaaaataaacagtctcagggaccattgtgatacccatcaagcatactaatatatgcatatggagaattccagaacgggagatgagtaagaaaagatgaatcaaaaaa

SEQ ID NO: 171798 - DNA, 359 bp, Homo Sapiens
atgagccaccacacttggcctacctctctactctgccctaagatgcttttgtgggtaaagtgaaaatcacataacagtgcagcttcatcatcatatgccctcaatgctcatcactgttgataaacatgcactgtattatgtttctgtgtgcctttttcttgtgtgccaagtaagacccatggcaggcaccttcattttcaggaagcgaaaatacagatacagtaatatggaaaataggacaaagtgtggacttcaggatgaaaatattgtaacaatcttgctgttgacctcgtagcgctcagtgacataatttgaaaaaatattaatgttcagaaatgttctcttgaggttcgtgaggg

SEQ ID NO: 171799 - DNA, 293 bp, Homo Sapiens
tagccggaccagcaggctgggccccagataagatgtcaggagcggctttcacttcaatggtggcgtttgcattaggagcgctgacaaagtgatatacgcagtggtattcgcctgaatcctcagctctcggcttattgatcctgtactccatgttgctggcattcttacgagtggcactcagttccaccccattctttgtccagtagctgtatgtaagggtgtgagagctggaggtgaggttacactgcagggtgacagggagaacagggctgtctcgaactaatgacatctta

SEQ ID NO: 171800 - DNA, 1331 bp, Homo Sapiens
  misc_feature (1069)..(1069): n is a, c, g, or t
  misc_feature (1216)..(1240): n is a, c, g, or t
gggggtatccgctagcgcggcctgggatgcgcttgggctccctgttcgttcccacatgcagggcagcacaaggagaatgggcgtcatgactgatgtccaccggcgcttcctccagttgctgatgacccatggcgtgctagaggaatgggacgtgaagcgcttgcagacgcactgctacaaggtccatgaccgcaatgccaccgtagataagttggaggacttcatcaacaacattaacagtgtcttggagtccttgtatattgagataaagagaggagtcacggaagatgatgggagacccatttatgcgttggtgaatcttgctacaacttcaatttccaaaatggctacggattttgcagagaatgaactggatttgtttagaaaggctctggaactgattattgactcagaaaccggctttgcgtcttccacaaacatattgaacctggttgatcaacttaaaggcaagaagatgaggaagaaggaagcggagcaggtgctgcagaagtttgttcaaaacaagtggctgattgagaaggaaggggagttcaccctgcacggccgggccatcctggagatggagcaatacatccgggagacgtaccccgacgcggtgaagatctgcaatatctgtcacagcctcctcatccagggtcaaagctgcgaaacctgtgggatcaggatgcacttaccctgcgtggccaagtacttccagtcgaatgctgaaccgcgctgcccccactgcaacgactactggccccacgagatcccaaaagtcttcgaccctgagaaggagagggagtctggtgtcttgaaatcgaacaaaaagtccctgcggtccaggcagcattagccatcgtgccctgctgaggggctggctgccttgagtggcctgatcgccacagcccttcttggaagaaaggcgtctgtgtttcaggttccacgcgagtcacctctttcgtcttaatgttcaccgtccacagctttggaataaaccatcctgggaagttgctgcaaaccccttatttcccccgccccaccaccgggacatactggggccaaacanaaaaattgtcggcccccctcggcccttgaaaaacttttccaaaccatttcttttgggcgcgccgggccccacaagggaaaggggaacatgggccataacctggttctccaaggaaaatcccggggccaggactaaaggcttggaatnnnnnnnnnnnnnnnnnnnnnnnnngcgggggaaaccgaaaggggttcttggaccaatccccagagggaagttcctggagggccttttcctgggaactcattccccagggggaccc

SEQ ID NO: 171801 - DNA, 851 bp, Homo Sapiens
  misc_feature (29)..(29): n is a, c, g, or t
  misc_feature (47)..(47): n is a, c, g, or t
  misc_feature (78)..(78): n is a, c, g, or t
acatgtaattgaagaagccccccgttganggaaaataatgaactccnacatcaatgtcaaaacctccatgaacaaccnggaaggtcttgcccagtatcccagcttgaccctggactttcatttgtggtttgaaggttttctggaaataatgatagtgtatcgttccttgccctgtgaagccccagggcatctgcattctcacccagggagatattcaagtgggatcacacccatcccaaccaggttactgcggtgaatgcgctcgtagctctcggccaggacggctttgattcccagcaggaaagggcccttagctgcccagtctcgggagctgcctgcaccgtactctttgccagccagaacgatcaggggaaggcctgcctgctggtaccgctcagcagcatcaaacacatcaaggatttccccagaaggcagatggatagtctgtggtgcctgcttgttcaaaaatctgtttaacaagcgaatgttggcaaatgttccccgtgccatgacggcgtcattacctcggcgggagccataggagttgaattctcgtggagttaggcctctgttagttaagtagcgagcagcaggactgtttcttgcaatatttccagctggggagatgtggtcagttgttaccgaatctcccaaatttagcagcacataggcatccactatagatttagggggctgaagatccaaagtcaggttttcaaagaatggtggtgatttgatatacgtagatttggaattccagaaaaacagcttatctgatggggttgctaaggcattccagctttcattcacgtctctattttctgatagacttcctttaaacatccccggga

SEQ ID NO: 171802 - DNA, 661 bp, Homo Sapiens
  misc_feature (22)..(22): n is a, c, g, or t
  misc_feature (236)..(236): n is a, c, g, or t
  misc_feature (321)..(321): n is a, c, g, or t
cgtaagagaacaataagagggnagaagacacctcatgaaaaggtttgcttgtgttcagctgaagattaataggaaacagtgaaaaagcaacgtccggtgatcagtaactttaaagacaagcttggttctctctgtgcgggcacaactgacattcccaccattatagcttcacaaattctggaaaaagagaagatgattaacaaaaatagagaacgtagaaacttatggttttgtgnccgagcagagattggcaccagaccctcagtgctaacttgctccatctacaaggcagcacccctcccagaggcagcccagggaggncctctccaccagggcctgcgctggctggtggtgcggcttcctccctgggcgcagcaccaagtgcacgtctcctacttggccatcttgcggatcatgtagttgaggatgcccccgttgaggaaataagtgagctccacatcagtgtcaaacctcatgacagcctggaaggtcttgccagtatccagcttgacctggactttcatttgtggtttgaggttttctggaataatgatagtgtatcgttcttccctgtgagcccagggcatctgcattctcaccagggagatattcaagtgggatcacacccatcccaaccaggttacctgggcctgtgccgaat

SEQ ID NO: 171803 - DNA, 486 bp, Homo Sapiens
ttgccatggctgaccccacccattccaaggcggggtcacggtaccagcagcacttggggtgaggcctccaaagcttcctcagaattgtggctgtgccacgctggaccacagggtccccctcaagcatctcggggccctattctctctgagcacctggagggctggactcaggcttgtgccagggcctgacttgggcctgggggccctagaacactcctcctcctgagcctactgccaaacgtcctcagtgttgtctgcacctgctccgactccttcagccgccccattcagcgcccgctccgtccagtgcccgccctgtggggccaaggcggccgtgccttactactctgtgtcttcggcctcctctgaggaatctggccctgtcgtgacagtcccagaccccccgttctctcctcttaagtggcatgagtttttctttgttcatggaatgttttttcctgattaaatgttggggaaatgccaaaa

SEQ ID NO: 171804 - DNA, 280 bp, Homo Sapiens
  misc_feature (83)..(98): n is a, c, g, or t
agagcttacagtctagaaaaggagcatacagtctctggagaagatattttaagtgtaactaacctcccccatccacccccacnnnnnnnnnnnnnnnncctactagacttggtttcttccatttacttttagtttagcagcttaacgtaaaaagcataaatctgaaagtcttttaaaatgcatacttttactggtaaacaaaattcattttcattagaaaaaatgctgaatatttattgcaattaagaaaaatcttcagccgggcaacggtggctcacac

SEQ ID NO: 171805 - DNA, 793 bp, Homo Sapiens
catggagccgccgctgccgggctaggcaggtcgtgccccgccgggccggcggcgatgtcgggctaccagcgccgcccgggcgccaccccgctgtcccgagcccggagcctcgccattcccgacgatgacagatttgaagatctggaagaggcaaatccattctcttttagagagtttctgaagaccaagaacctcggcctctcgaaagaggatccggccagcagaatttatgctaaggaagcctctaggcattccctgggacttgaccacaactccccaccctcccaaaccggcggggatgggctgaattatctccacccatttttcgaggatccgacctggggtcgcgacctcctggatgatgaggaggatgacgaattagggtttctgagatccaaagtgacaggaaaatttagattttattgcctggatctgctttaaagacaattggtgtttacaccctcttgtcagcaaaacagctagttagggaaggacatatagttccaaggaggtaaagtcacttgattacaaatggtcttaaactatcgcctctgcaattcctttataccgggacaggaacaaaattggggggacatggtccggggaaccccccgcattgggggtggcatttgaattccacaaatttcgcctgaaaattatgggatggaccatttgcgaagggtcccttaccaatgacgaacccgactcgtaactgacgggccagaaacctcccccccctaacctggggccacagaagggggggaggccccagagaaccgcggaattgtgtcaa

SEQ ID NO: 171806 - DNA, 505 bp, Homo Sapiens
  misc_feature (302)..(352): n is a, c, g, or t
cctagagtataccaacccttctacgcttacctcaatggtaaccactatacctgacttctaaagtgcagattatattagttttgcttattttaagtgctttttatataagtggaatcatacagtatacttttgtgtctggattcttttgcttaacatctttgtgagatttactgatgttgcatgtacagtgcttcattctttttcattgttgtacaaagttccattgtatgaatatattacaatttattctactcttgctgaacatgtgggtaatttctggtttgaggctattctgaaaaatnnnnnnnnnnnnnnnnnnnnnnnnnnnnnnnnnnnnnnnnnnnnnnnnnnntatattatttaaaaatttgttttcttgtcagtgggccatctgggtggtttctggtattttgccattgcatgcaacgctactgtgaacatatttctacatgtcttatctttatatttctataagtgtaatgaaatccccccaaaatagctcatt

SEQ ID NO: 171807 - DNA, 779 bp, Homo Sapiens
cagaatatgcttctctgggatcactctatgattacattaacagtaacagaagtgaggagatggatatggatcacattatgacctgggccactgatgtagccaaaggaatgcattatttacatatggaggctcctgtcaaggtgattcacagagacctcaagtcaagaaacgttgtaatagctgctgatggagtattgaagatctgtgactatggtgcctctcggttccataaccatacaacacacatgtccgttggttggaactttcccatggatggctccagatagtaatccagagtctccctgtgtcaaaaaacttgtgacacatattcctatggtgtggttctctgggagatgctaacaagggaggtcccctttaaaggtttggaaggattacaagtagcttggcttgtagatggaaaaaaacgagagattaaccattccaagcagttgccccagaagttttgctgatactgattacatcagtgttgggaagctgatgccaagaaacggccatcattcaagcaaatcatttcaatcctggagtccatgtcaaatgacacgagccttcctgacaagtgtaactcattcctacacaacaaggcggagtggaggtgcgaaattgaggcaactcttgagaggctaaggaaactagagcgtgatctcagctttaaggagcaggagcttaaagaacgagaaagacgtttaaacgatgtgggagcaaaagctgaccagagcagtcaaccaccccggttctcttgcctcttgctgcacgaatgt

SEQ ID NO: 171808 - DNA, 549 bp, Homo Sapiens
  misc_feature (476)..(476): n is a, c, g, or t
gataacctttcgtctacttctaataatttgacactgttctatctcgtctgatctgaaacccttcgataatgagaaatcacaagctaatgttatacttattccttatatggtaagagactaccttttaaagcaccattttccatttggcatttcaccaaggtctaatgtccctggaattagtttttttgttttgccttttgaatatcgataggtgttcatctgaattaaactacgtatagtttgatggcttcctgcctccaaattggcaacagtgtacctcactttgtatgggagctatcaggatctccataggttgcaaagtagataaccattaccttggggttggggcaaatcagtgaacaagtcctcggacaaggtactggacatttgtatttttaaaaaaatctcctagcccattttgttccttggtgtaaaagtagaatggactgaagtatggccagctgagtaataactgntcttcttagcatgatgtagtgcttagcatgtctctatgggtccaactttgaacattattaagaactggtttgt

SEQ ID NO: 171809 - DNA, 1477 bp, Homo Sapiens
ggggtggcgtctgctggggcacctgaaggagacttgggggcacccgcgtcgtgcctcctgggttgtgaggagtcgccgctgccgccactgcctgtgcttcatgaggaagatgctcgccgccgtctcccgcgtgctgtctggcgcttctcagaagccggcaagcagagtgctggtagcatcccgtaattttgcaaatgatgctacatttgaaattaagaaatgtgaccttcaccggctggaagaaggccctcctgtcacaacagtgctcaccagggaggatgggctcaaatactacaggatgatgcagactgtacgccgaatggagttgaaagcagatcagctgtataaacagaaaattattcgtggtttctgtcacttgtgtgatggtcaggaagcttgctgtgtgggcctggaggccggcatcaaccccacagaccatctcatcacagcctaccgggctcacggctttactttcacccggggcctttccgtccgagaaattctcgcagagcttacaggacgaaaaggaggttgtgctaaagggaaaggaggatcgatgcacatgtatgccaagaacttctacgggggcaatggcatcgtgggagcgcaggtgcccctgggcgctgggattgctctagcctgtaagtataatggaaaaagatgaggtctgcctgactttatatggcgatggtgctgctaaccagggccagatattcgaagcttacaacatggcagctttgtggaaattaccttgtattttcatctgtgagaataatcgctatggaatgggaacgtctgttgagagagcggcagccagcactgattactacaagagaggcgatttcattcctgggctgagagtggatggaatggatatcctgtgcgtccgagaggcaacaaggtttgctgctgcctattgtagatctgggaaggggcccatcctgatggagctgcagacttaccgttaccacggacacagtatgagtgaccctggagtcagttaccgtacacgagaagaaattcaggaagtaagaagtaagagtgaccctattatgcttctcaaggacaggatggtgaacagcaatcttgccagtgtggaagaactaaaggaaattgatgtggaagtgaggaaggagattgaggatgctgcccagtttgccacggccgatcctgagccacctttggaagagctgggctaccacatctactccagcgacccaccttttgaagttcgtggtgccaatcagtggatcaagtttaagtcagtcagttaaggggaggagaaggagaggttataccttcagggggctaccagacagtgttctcaacttggttaaggaggaagaaaacccagtcaatgaaattcaatgaaattcttggaaacttccattaagtgtgtagattgagcaggtagtaattgcatgcagtttgtacattagtgcattaaaagatgaattattgaggtaatccgtgaggg

SEQ ID NO: 171810 - DNA, 1017 bp, Homo Sapiens
caggaatgaaatcgcctctcttgtagtaatcagtgctggctgccgctctctcaacagacgttcccattccatagcgattattctcacagatgaaaatacaaggtaatttccacaaagctgccatgttgtaagcttcgaatatctggccctggaagtagttacgaaaaggggtttcatttggcttctttctccaggcttcatcatctctaacagctgctgctctgcctggcacagaaagctttcataaagcacagaaagcctcctcttctaaaaccgagctttgggtggtgagggaaagcggggtgggtggtggaggagaagtagcaggcatcatactcttgcaactaaggaaggtgacaaaccaactactacttgtttctttggggccatgctagcagtaaggaacacactggaaaaaagatcaatatgaaatctatcaggcccactggatagccagagtgaaccagcacctaagaatcagcctctagaacagggcttcacagagtgctggccacagactggggattactcggtaacaagagaagcatagaaactgagttaggactcagacgctattatccgaatttgacactgccagcccggacatccaagagaatgggtctgtattgttttgcaataggttgtggggaggtcctttaccacagggcctttgccaagcactgatgtagagcaaaggtgagctccttcacaggaatgtgccccgtaagtctcttgtgaaacaacgctaagaggtcaatctctaatctggccataagtcaaccaaatttgagctagccataggacttgctatttcacctaataagcaatatgctacttctttagaaattcaactgtaaatattaaagactttgaaaataagactgtttttgggaagttaagagacataattacctggttagcagcaccatcgccatataaagtcaggcagacctcatcttttccattatacttacgtctagagctatcccagcgcccgggcacctcctcatcgttgac

SEQ ID NO: 171811 - DNA, 433 bp, Homo Sapiens
ctggaggtccccgggagagacacacgagaaaagaagcaaaagcaagacttacttggtagtaattgatggatggttttatccccaattttagaagcacactgttgaggtccagctccctgtagagttccaggcttctgccaaagtacttcttctgggagttgagcgcatccacctgggcggcgcaggtcccatgcttttcccactcatgcttccagaagcggctgcgattgggaaacgagtgaattacgtcaggccagtatgccctcatttctggcaaaagatcctatgcattaaaaaataaaataagtctacgcaggttcttaataataaactcaaaacctagaaggtaaatttgataaactgacaccaaagaattgagctctgctaattaacaatactttggtgaataaaataatcctatgcttattttgta

SEQ ID NO: 171812 - DNA, 683 bp, Homo Sapiens
gcgtggccctttcaatttagaagagattaaggatcttttgccagaaatgagggcatactggcctgacgtaattcactcgtttcccaatcgcagccgcttctggaagcatgagtgggaaaagcatgggacctgcgccgcccaggtggatgcgctcaactcccagaagaagtactttggcagaagcctggaactctacagggagctggacctcaacagtgtgcttctaaaattggggataaaaccatccatcaattactaccaagttgcagattttaaagatgcccttgccagagtatatggagtgatacccaaaatccagtgccttccaccaagccaggatgaggaagtacagacaattggtcagatagaactgtgcctcactaagcaagaccagcagctgcaaaactgcaccgagccgggggagcagccgtcccccaagcaggaagtctggctggcaaatggggccgccgagagccggggtctgagagtctgtgaagatggcccagtcttctatcccccacctaaaaagaccaagcattgatgcccaagttttggaaatattctgttttaaaaagcaagagaaattcacaaactgcagctttctaaaaaacaactccaaagtgaagtctgtttattttgctgtttcccctccatgcctgtgaattggatgttgtggtccctgt

SEQ ID NO: 171813 - DNA, 175 bp, Homo Sapiens
aagaacaagatgctgccactgctggaggtggcagagaaggagcgggaggcactcagaactgaggccgacaccatctccgggagagtggatcgtctggagcgggaggtagactatctggagacccagaacccagctctgccctgtgtagagtttgatgagaaggtgactggaggcc

SEQ ID NO: 171814 - DNA, 225 bp, Homo Sapiens
aggctgggaagcgagacgccaggttccgatcctgttgtgtagttaatttctggtgtggtcttgagtaaggtaccccacctttatctgtaaccatctagtcaggtgatctctttagccattccagtgcccgggctctattagagttagttctaaggcattcatacttcttgcttagggcgtttctgtctttgatccctcatccccaggtgctagtgtatgagttgt

SEQ ID NO: 171815 - DNA, 502 bp, Homo Sapiens
  misc_feature (39)..(39): n is a, c, g, or t
  misc_feature (46)..(46): n is a, c, g, or t
  misc_feature (58)..(58): n is a, c, g, or t
  misc_feature (102)..(103): n is a, c, g, or t
  misc_feature (108)..(109): n is a, c, g, or t
  misc_feature (112)..(112): n is a, c, g, or t
attgtcacaccatgcgggtcagcattctgtttcttggtntcagctnctggggccaagntccagggtcctttgccccaggcaagccggttgtaaacatctganncaatnntanaattctggtttggctgaagtgcgtgggtgtagtaatggtcccaggacaggacagaccaggttactgtcatatgggctggagctgatggttgcatccccagggaatggcatacgggagagcacatgctcctggaggcccatagatgggaatgcaccagacagtagggagggctgagagacaaagtaaaggaaatctattaccacttacaagtgtttgcggcaggatctggactccagatgagagctgtggtctggagctaggaaagctgatctggaccaagctcgttcatggagtcctggtcaaagctgccagtgttagtgtcaccagcttgtctgcactgggcatgggacatggggtgcatgcagattgggaaagttaattggcacagag

SEQ ID NO: 171816 - DNA, 439 bp, Homo Sapiens
acgtatacgaggctacggggctcggtttggctgactggggagtcggcaggcggcaggtctttatgtaggggatgagccagggtgcaaggagagtacaatactccagttaccgaattgaaaccatccctgcagtggagcagcctcctccagtttctgttgggttttgagctacctgttaaataagtcagtgggattgtcaaggacaaagccctccctggctgcctcagggcaaaatcaggaaccatgcgaggccagcggagcctgctgctgggcccggcccgcctctgcctccgcctccttctgctgctgggttacaggcgccgctgtccacctctactccggggtctagtacagcgctggcgctacggcaaggtctgcctgcgctccctgctctacaactcctttgggggcagtgacaccgctgttgatgctgcctttg

SEQ ID NO: 171817 - DNA, 213 bp, Homo Sapiens
acccaaggctgtgtgtccaaaggcaactgtactgaataccggaaagcatgtatttgtttgctaaattgctctctttccaccagtgatatcaattctgaaatacttttgagatcttgacaataatcaaaaggtagccaggtgcatcggggaaagcactgacattggagtcagacagactgaagttcatatctgattctgctatatgacaacgtg

SEQ ID NO: 171818 - DNA, 470 bp, Homo Sapiens
  misc_feature (95)..(95): n is a, c, g, or t
catagcagtgacgaggatgatgaggactttgagatgtgtgaccatgactatgatgggctgctttcccaagtctggaaagcgtcacttggggaaancaaggtggacccgggaagaggatgaaaaactgaaagaagctggtggaacagaatggaacagatgactggaaagttattgccaattatatcccgaatcgaacagatgtgcggtgccagcaccgatggcagaaagtactaaaccctgagctcatcaagggtccttggaccaaagaagaagatcagagagtgatagagcttgtacagaaatacggtccgaaacgttggtctgttattgccaagcacttaaaggggagaattggaaaacaatgtagggagaggtggcataaccacttgaatccagaagttaagaaaacctcctggacagaagaggaagacagaattatttaccaggcacacaagagactggggaacaga

SEQ ID NO: 171819 - DNA, 303 bp, Homo Sapiens
taggaggaggatgatgatgaagagactgctcctcccgttattgccccgcgaccggatcatacgaaatcaatttacacacggtctgtaattgaccctgttcctgcaccagttggtgattcacatgttgatggtgctgccaagtctttagacaaacagaaaaagaagactaagatgacagatgaagagattatggagaaattaagaactatcgtgagcataggtgaccctaagaaaaaatatacaagatatgaaaaaattggacaaggggcttctggtacagttttcactgctactgacgttgca

SEQ ID NO: 171820 - DNA, 636 bp, Homo Sapiens
  misc_feature (498)..(543): n is a, c, g, or t
atgtgggacaatatatttgtaaagatccaaaaataaatgacgctacgcaagaaccagttaactgtacaaactacacagctcatgtttcctgttttccagcacccaacataacttgtaaggattccagtggcaatgaaacacattttactgggaacgaagttggttttttcaagcccatatcttgccgaaatgtaaatggctattcctacaaagtggcagtcgcattgtctctttttcttggatggttgggagcagatcgattttaccttggataccctgctttgggtttgttaaagttttgcactgtagggttttgtggaattgggagcctaattgatttcattcttatttcaatgcagattgttggaccttcagatggaagtagttacattatagattactatggaaccagacttacaagactgagtattactaatgaaacatttagaaaaacgcaattatatccataaatattttttaaacagaaacagtaagtgnnnnnnnnnnnnnnnnnnnnnnnnnnnnnnnnnnnnnnnnnnnnnnaaattatgagaattttaggaccatagaaaattttaagaaagcgtataaacctctcaggtacccctaatgtctgtaacatctccaatcctttga

SEQ ID NO: 171821 - DNA, 486 bp, Homo Sapiens
agaattgtcatctgaaccatttctataacaatggcatcttaaatgggggtcatcagaatgtatttcctaatcatattagtgtgggaacaaatcgaaagagatgcttggaagactcagaagactttggagtaaagaaagctagaactgaaggtgagaccgctttgcgggtgggaagagcacacttatttttcctttctgtaatatgttttctttttatggctgagcgcaccttcgagatgagaccttcacttcaggtggtaatgcgcctggtggattgtgcggtgacggtggagatttctcctgtactgccactgcgaagatgggacacttaacaaaagggaatgtgagggaaatactgatggcccaagtgtaaatgtctatgtggaactttttgagcacccatgtttacctgccgtgaattagattttttaatttgttgtatctgtttgaaatatatctattaaagaaaatctgccctgaaaagta

SEQ ID NO: 171822 - DNA, 295 bp, Homo Sapiens
agcaggcttgggccccagattaagatgtcagaagaagtgagattacatgtgatggtagcaaatttacatgtattgcagtccagaattgtgcctcgtttgagatggtcagttgatgtagtcattttctttccagagttgatactgaaaggatcctcaaagatatggggtctgcagtttgcattctcagaagatgacaatccagttgggtacagcacagggtaaccatttgatgtcatattggggaatgaaattgacatctaatctgggcccagcctgctggtaccggctcatcact

SEQ ID NO: 171823 - DNA, 988 bp, Homo Sapiens
gggcaggagaacagccgtgtcatcgtcatgaccacccgagaggtggagaaaggccggaacaaatgcgtcccatactggcccgaggtgggcatgcagcgtgcttatgggccctactctgtgaccaactgcggggagcatgacacaaccgaatacaaactccgtaccttacaggtctccccgctggacaatggagacctgattcgggagatctggcattaccagtacctgagctggcccgaccatggggtccccagtgagcctgggggtgtcctcagcttcctggaccagatcaaccagcggcaggaaagtctgcctcacgcagggcccatcatcgtgcactgcagcgccggcatcggccgcacaggcaccatcattgtcatcgacatgctcatggagaacatctccaccaagggcctggactgtgacattgacatccagaagaccatccagatggtgcgggcgcagcgctcgggcatggtgcagacggaggcgcagtacaagttcatctacgtggccatcgcccagttcattgaaaccactaagaagaagctggaggtcctgcagtcgcagaagggccaggagtcggagtacgggaacatcacctatcccccagccatgaagaatgcccatgccaaggcctcccgcacctcgtccaaacacaaggaggatgtgtatgagaacctgcacactaagaacaagagggaggagaaagtgaagaagcagcggtcagcagacaaggagaagagcaagggttccctcaagaggaagtgagcggtgctgtcctcaggtggccatgcctcagccctgaccctgtggaagcatttcgcgatggacagactcacaacctgaacctaggagtgccccattcttttgtaatttaaatggctgcatcccccccacctctccctgaccctgtatatagcccagccaggccccaggcagggccaacccttctcctcttggaaataaagccctgggatcactgtga

SEQ ID NO: 171824 - DNA, 1460 bp, Homo Sapiens
  misc_feature (34)..(34): n is a, c, g, or t
  misc_feature (58)..(60): n is a, c, g, or t
  misc_feature (62)..(63): n is a, c, g, or t
  misc_feature (65)..(73): n is a, c, g, or t
  misc_feature (76)..(77): n is a, c, g, or t
  misc_feature (82)..(82): n is a, c, g, or t
  misc_feature (84)..(86): n is a, c, g, or t
  misc_feature (88)..(88): n is a, c, g, or t
  misc_feature (93)..(93): n is a, c, g, or t
  misc_feature (96)..(103): n is a, c, g, or t
  misc_feature (127)..(127): n is a, c, g, or t
  misc_feature (220)..(220): n is a, c, g, or t
  misc_feature (259)..(259): n is a, c, g, or t
ttgttgtgtgcggtgttgggcgttgtggtggtgngttgtgtgttgttgggatgatgtnnncnncnnnnnnnnntgnntgatntnnncnggctnggnnnnnnnncggcacgtgcagcgtagggcgtgnttctgcgtcatcacaatagtccggcgagcgggactcataaggtggggcgcggcgtgatatattcttgcgcggcggcgaggattgcggctcccncttatttatttaatggcgcatctcggcggacgccccccngttccgtccgcgctcggtggttgtgctccgccccgctccccgcttggagttgtgccgcctttcatcaccctctccggagtgtgacccgcgggaaagtcccttgggtcaaactcttcgggggccccactctctattacgacgtgggtctacccacttctaccgatttactttggtttcaggggctttttgtcggcatgaatggaagcccacaagtaactccaagtcagcaattgcgaactgaaagtacttgcttcgtataggcctgtagaggaaaagcgagatcatccttctggccaggactaggggagaccccaaggcctgttctttcctaggggctgagtttgacagacctggattgcagctgatggcccccaaagtcctctagatgggccctgcaggactcgctgggaggcctggttgcccctcccggcgtgctgggacactctgggttcctgcagttagatgcagtccatggagttctcagggaggaggccagggatgcagccagggagccccaagcccttgataggagtgcagttgagtgggaggccgcagcccagggaggggtcctgggtctctatggcctccagcctgtccatgttgttgtcccagttgatatggaagcgggtcacccgggggttcgaggccaagatgttccgctggagctgggagaaatctggcttcatgggcgggttctcacgcagctcagggttgaggtactcgttgttgacgtagtagcccactcggatgaactcctgtccatggtaggtgcaggtgatgaggaccacagtcacacccacggcatcagtctctgggatgagggatgggttgggggcgtcggcctgaaagacaaacatgtgtctccctgctggcacagggcccaccagcaccgagtctaggatctgatcaaattcctcactctcagccgagccaacataaatgatcttccactccaggtcgtccgccagggcttcactgcactcgaagctgatctcgaaccggaaggggctgtggaaagggctcgggttctccaggaccgccacgttcagcaccgacaccttggccatcgcctcgcctcgccgcgccgcagcaggggcaggggctgtggctgtggcggaggccgcgcctgggtccggtggggtcagtggggtagggctgaccaggtccactcccgcctcttctctccgagaactgaagtccc

SEQ ID NO: 171825 - DNA, 317 bp, Homo Sapiens
  misc_feature (46)..(46): n is a, c, g, or t
ctgcggccggtgggctcatcttcttgactcgtgatccgactcgccntggcctcccaagtgttgagattataggtgtgagccaccacacccagccctggaggaatattctttacctgttatgaggttaacactttatttgtatcagttatcattattagatctagcctgaaaacccatgacccctaaattggaacaggcatgcctgtttttgcacccaaaagttgccttttggcccgccaagcccccctcttcctataccaatataaacctgaaaccgcaggccccacaagctacacgaggagacgcgtcaaaatcgg

SEQ ID NO: 171826 - DNA, 367 bp, Homo Sapiens
ccgcggttatgtcttacggtaaattctctctaggttgtaactttagagatcttggaattttaggggtaacttccactggagttatcctgactacggcatgcatttctatatttagtctcttcctcaggtcatctggaatccagactttcccaagatggagaacttctacatttttggtatatttgatggcattgttcaattcttcaagtccattccagactacttgtagcacacaggccttctcatcttcttcattatgatctgacctaattttttttgatctagtggctctgacatctgcttctctttttcaggtgataacacattttgttttgttttactttgctgtcgtaagacataaccgcgg

SEQ ID NO: 171827 - DNA, 398 bp, Homo Sapiens
tgggcctcatcttcttgaagaaggaccatgtgaatttcctgacagagaacggggatgggtttctgaaagcaccacccagctgagcctgccgaaactgcacagctgtttccaggccaggctggctgcatggaggacgtgagaggaacagccagcatgtgtgcgctgggcccactgatcagggtgctcaggaccaggagccttctgaggatgtgcagaggggactctggggagaggaacatggtggccacagctggagtgaccgcagtgtacagagatgggatgggagcaggaaacccaaaagagccggcctggaaccaggtggaggggaggcagcccggccatgacccagagcaggacacctgctccacttcaccttttgccatgagtaagcttcgctg

SEQ ID NO: 171828 - DNA, 299 bp, Homo Sapiens
  misc_feature (48)..(48): n is a, c, g, or t
gctggacagcaggctgggcccagataagatgtcagctcctcccgaggnaaccagtgtgacagctgaggccatgtgagtaggatcctgaatgaggctttatctctggctgttcgtcccatcgtccaccgtggcaccagctccctcagccagccgggatgggaccagcgactgagagagccagaggcagagaggtgagggtgaccatatcctggactgtgagaggaatgggactctgggcctgtagctgccaagcaggtggcaggtgctccaggctgtgatctgaaccctctgaccccccg

SEQ ID NO: 171829 - DNA, 433 bp, Homo Sapiens
aaaaaaataggtttaatgcaggtgggtcatggcatgacgaatttcacaggcaccggggacagcaggcggccaggtgctcagagggcaccaaggtgccacaactccctgcagcgttgacaccgcacgagcgccaccaccagccccctcccgcctcccgtcccaccttcaccctcagccaagaggcttgggtgactctgagtaatacgttaacaaaaaacaaagcttctttgaggaaacagcatgaattagtgcaaaagattctctgcagcaagaaatgaggcccacgcagggaagctcccgcctacctgcccagggcgtggacgcagcccgtgctcatcagaggtcatccacagaagctgccgataaattagagagcacggtttacggccagagattttttgtcttctctacctgatttagggtttttcaaaaa

SEQ ID NO: 171830 - DNA, 857 bp, Homo Sapiens
ttttttcctccttgtttctaggaagtgttagcaatgctaccatgtggaacactcaactttatttgctttatttatatatttaacaattctaaagtatttacttcttgctttgacaaaaatgaaaaatataggagcactgactgactcctctttaggagaaaagggttatatgtacagctatggagagttacggttcctcctttaacaaaggaaaatattaataaaaaagtgcttcatcgatcaaaaaaagagctaagagctgcaagcatttattcacactgtacatcagacccaagaaacccgtatcataacctcttggcacctgtcactaggaaatgcacaatcttcaattagaccaactttttccctacctgcacgactagatgacacagaatgtggaaaagaactacaccctgtttcaccacgttcaaactgtgttgccactggaagtcagagacgtgctcagatgctctgggctttgcctggactgagagcaccagggaagccttctgggccacgccttaaccacacccaggcatgcacagaaccaccttcctgagacacaccttgcccttggtcagggaactgctaccaaggggaagaggaatacagggcagggccagagcttaagcattccctgaccttacccctagtcctcaccatgatccaccctgtcaccagttagcagctttcagcagagtcaagcatggcctccccaagagggagggcaggcacaaaacatggatgccaagattacaaagcacaaacctaactcttctccaaccttccccacacctacctccacaaatattcttggaatggtcgggactagtcgggtacccgagctccgaatcgta

SEQ ID NO: 171831 - DNA, 1526 bp, Homo Sapiens
  misc_feature (452)..(460): n is a, c, g, or t
  misc_feature (637)..(697): n is a, c, g, or t
aaaagggggaaggaaagagaagacagcaccacgccccaaccgaacggaggtctggggtggtgaattccccacgagggtcagtcagtgctcctatatttttcattttttgtcaaagcaagaagtaaatactttagaattgttaaatatataaataaagcaaataaagttgagtgttccacatgggtagcatttgctaacacttcctaattctttgccctgtgggttatcccctctcgtccctttccctctcacacaaaatgtttgagggcctgctgggaactgaccttttgcaaagaaagctaccaatagccttccgactctaacacctgggaaagaagcctccccatgatgttcaagcactgaacccatttcctcagcgattctgctcctaaaatctcccaggcctaaaatcaggcaccgccccccagcgccccgcatttggaatcgacttnnnnnnnnntatgaagcgctgcccatcacaacccgattaataattgctcactccccgccgatgatccacccttacatcagtccccccctcgatatccggttgcccttccccgtatccgtcccctcaccacacttcgacaccccccgcccgccgaacatcgaccgtactcccctacgaatccgccannnnnnnnnnnnnnnnnnnnnnnnnnnnnnnnnnnnnnnnnnnnnnnnnnnnnnnnnnnnnagccccgcccctatgttacgacgattccccacgccccctttgtctccctcccccccattgttttcattgtgttttcaccgcggagccgctctgccgcctgctggttgttgcgcccgccccggtcgtcctccaccatagtcttcccttctacctcctatcgtagaatgtccaacgcctctctgcgccactatttgttgcacacctatcgtttcactctcagatctatagttagcgcccccccgcctcatttacccacgcacacacgacatgtgtccgtatgcccctatatccacgtcgatctctccccccacgccaatataattttaacttatagcgccacgcccctcaccacgtcatctttgcacccctcccactgctttctccattataccccccccgccgatagccctcagtccaaagagtaccccctcctcactctaattcatagtacgtgacgctcccagaccctctcccccttaaaccccgcctctgtttaataaatgtaccccccaccccctcctcgtcttttctctatggagccaccccgcatcgtatttactcctccccccacccccacctgtcttaatacacgaccaataagagcgtggcgccgtgttctattatccttatttttatgtacgcgtctaatcgacccccgcaccgccactctcggtgcgcccctttttttacttcctacccctccaaattcaccccgccgaaatttaattctgttctttcagaacgccgataatgacgacgcctccctatttatactcctccccgcccccatataatctcttaacttcccgccctttgtgtttaatgcgcc

SEQ ID NO: 171832 - DNA, 166 bp, Homo Sapiens
catagcggaccaagaggctgggccagattaagatgtcacaactctatggaaaatgacatttccatttgcctcattgctacttcaagctctttaaatcaccatcttccctatttctgcgagtggtattgccatccttgacatttgacatcttaatctggggcccaag

SEQ ID NO: 171833 - DNA, 568 bp, Homo Sapiens
  misc_feature (361)..(371): n is a, c, g, or t
ggcacaccccccggggtcctaaaacataaaacagttgtgtttagggaacccttaagtcatgcagacatgactgttctctttgtacaagtgtgaatcaaaatatgtatctctttttcagagtctggttaagctatgtcattgtctactgcatagtttcctgagtctgtttgtaaagtgcttatggctaacagttcagttctgtatttgttgacaggtaaataagtggagttgagtgccatctttgaaaaaattaccctctagctctaacactgaaaataataataaattgtagatctctgcaactaagtttaaagcagtgtgactgtgttgcttaaatatcaagtattgtttataaccaccnnnnnnnnnnngccctggtagttttttggcaccttatgtttaaatcagattcttagatttggagtagacctgaccttgttatttattagataacattttgaatgtatccattggatttctaaaatgtattgtgaatttctcagacaaacaggatttatgctggagctctgttttgcttagaaataaaatatttagtagtttatctgct

SEQ ID NO: 171834 - DNA, 580 bp, Homo Sapiens
actggggacaccctgcgggactgtggtgagcagtgaaaatagcgaggaacccaaactgtggggaatgcatgaaaggcgtgatcaccggtatctctcctaaatgtgtgatcaaggaattaccaccaatacagaacagtaacacaggagaaaaattccagagcagtgatgttggaaggacatgaaagctatgacactgaaaatttttacttcagggtaaatcccggaaaaatcttacatggaagttgactttcaatggcaaagatggtgaacataaattataaagcaagggccgatgacccataaaaacaatcttactggtcaaagagttcgacatagtcaaggggacgtagaaaacaagcatatggaaaatcagcttatattaaggttgcagtccggtctgggtgaattgcagaaatttcatactgcagagaatatttatggatgtaatcaaatcgagaggacagttaataattgttttagagcttcaccacttcacagaatttttcctggtgtccaatacaacatttctaggagatatgggactgatttgatgcaagtttcgtgatctacacaagacgag

SEQ ID NO: 171835 - DNA, 500 bp, Homo Sapiens
  misc_feature (126)..(134): n is a, c, g, or t
  misc_feature (227)..(352): n is a, c, g, or t
ggggatgcttcctaccttcaaatccattttatctgctattagtacaactataccacttcgattttggttagtatttacatgagaagtaatagatcatgcctcctgaaattcatattaaccaaaggnnnnnnnnnccactaagcacagttagacacaagaaatagactacagcaaaacagatttttaaaattcaaagaaaatacatgttgagctcatggccagagacnnnnnnnnnnnnnnnnnnnnnnnnnnnnnnnnnnnnnnnnnnnnnnnnnnnnnnnnnnnnnnnnnnnnnnnnnnnnnnnnnnnnnnnnnnnnnnnnnnnnnnnnnnnnnnnnnnnnnnnnnnnnnncaagtctatctctctactgattgtttttttctgcttgttctaccagttactaacagaggtgtatttaaatatctcactatgaattggatttgaccatttttcttattagttctgttcagttttactttaatatatctttggagactat

SEQ ID NO: 171836 - DNA, 371 bp, Homo Sapiens
tgtgtatgcataggtttatccgcttcacctgttgctggggaacactgctctccgggggactttgggggacgacactgtaaacatgactacctggcctgatgatggtcaggcctgtgtgtgcgagtcactgtccagggacagcactgaggtaggttggggcagggcccccaagccaccgtccacggagcttgtgggacttgcggtgctgacggaggagtaccctgaggtcgtgacgtccttccctggctcccggctggtgcggaccaggggtttgggtccaggggttgcagggatctgggtgtccagcgccagtgcctgtgtcctggggtcccttgtcctctggacaagcctcctcatcactggatggtaca

SEQ ID NO: 171837 - DNA, 153 bp, Homo Sapiens
ccgcggatatgtcttacgtgccaaagagtacataatcttctcgacccgtagaacccatagtttgagtactttcattaaactcaagcttacctttattggtcaccaaaataggttgcgagtgcatgactgcgtaagacatacccgcgggtccgc

SEQ ID NO: 171838 - DNA, 196 bp, Homo Sapiens
ccacccttccaacctctctccacctgcggcttgcttggtgctgtcaggatctggatttggggggagtctctctgtagtggaaccagtgacagaagctgttctttagaattttcaggatggctgtattgctgcggatcagaatgagagagtcagctgggcagaatctctcgcgcagagttccaggtaggagaagtgg

SEQ ID NO: 171839 - DNA, 480 bp, Homo Sapiens
tcaagctccaacaagatgctaaattgtcagttaattttcagaagccagttagaaggtcatcaagttattaagtaaaaataggctccataaagaaactgtatcataccctacctcccaaatttgtcctttttattacagtctgcaccagtattcagcagaaggtttaggcactccaaattcctattgagagaaaatacagttagaaaacttaattgacagtgattttataatgaaattggtaggtttaaagaagcatgaaagcatgtttttatatgaagatatatgtgacaaaaatgatgatttacatcctatgaagaataaaacattgaaattcatcttatctagaatttagaaagttatatacttacatattggcacactgaggaaataacacacgattcatgtggtcattgtttaaaaggaagatcacatttgcaaaagagattctgaggaggccttaggacacaacttgcttatagg

SEQ ID NO: 171840 - DNA, 308 bp, Homo Sapiens
aactcaagaaagtctggtcacttcagtgagtgttggtgtgtgaggagaatcaagtgagaagtgcttttagaaacatccatgcaggtatgaaggagctctaacatgccaggtgagtggacaaggcttggggaaggttgacgatacctagagacatgtcagcctttgggtcagagcctgcctaatctcatggggaactgatgggtggaataggcactctaggctcccctggcatgggcagggttgcagagaattcaagaaatttgtgtgtgttcacgaaggaggccaagcttctgactgttgaagttagc

SEQ ID NO: 171841 - DNA, 171 bp, Homo Sapiens
gcccgcggttatgtcttacgcaagactcatggctgctagtcgggctggttaccgctgagccacgatgagactccttgtaactaaagtttcttagtggatatacaacataagtagatgtaaactgagagccactgtttcccttcagtgctccgtaagacataaccgcgggac

SEQ ID NO: 171842 - DNA, 636 bp, Homo Sapiens
  misc_feature (81)..(147): n is a, c, g, or t
gcggcgaagacaggtaaaggaacacgcccccaccccatcctgactcacacacaaaaaagcccattcaagtcctcttccccnnnnnnnnnnnnnnnnnnnnnnnnnnnnnnnnnnnnnnnnnnnnnnnnnnnnnnnnnnnnnnnnnnnagagagacaactgccctcaccatatatgagtgttacattggaaacaccttatgaatgtaaaagggtagagaagagtgtaccacttctgtattgatttctctgaatcagtatgtagtagttttctgttgttgcgaaatgaattaccacaaatttagcagcttaaaacaacatccatttaatatcccacgattctataggtcagaagtccaggcagtctcacctggactctgctcagagtctcacaaggccaacatcaaagtgtcagccaactgggttcttatctgggggattcgggaaatattctgcttccaatttttttacagttgttgacagaatcctgttccttgtggcttcaggtctgacatccacattttgtcactgtcagctgggggttggggttggtctcggcctctccaggctgctcatattccttctcatggggttccctccaccttcaaagccacagaagggacatcagatcctcaactt

SEQ ID NO: 171843 - DNA, 198 bp, Homo Sapiens
agcaggcttgggccccagattaagatgtcaggtcattaagttgaaagataaagtgaggcctatattcaagttcagcaagataacaatccttacaaccaaggacaggagcttaagggaaaaatgacattccaaaataagagaccctcattatacctgaggcatgacatcttaatctgggcccagcctgctggtccagca

SEQ ID NO: 171844 - DNA, 456 bp, Homo Sapiens
tacctgaacttgaactacaattaggacctgtgtatatccctttgcagcctgtcttacagctagaggtaactaaggtcatagaacacaactgtatgtgttggtgtcaggtgtactagtggtgagttttgtgtggaaatcagtgttgcaaatggtaactagaggaaatgtaagtgatgtggcagggtcctgtgtatctgtctctgtttcttttaagatttgggaagaggaatgtgggagtatgtttttgtcgataaaagaaacatgaagagacataggaaaaataataaaaaagaagagtaatacatcgaaatgaaaattttccagaccacattagtgtgcatacatgagctgcacagagctgcttaagattagaatactgcccttcacatcaccttgaccttcctgccgcaggctgtccatgcacagtgactactcttggtaggagattcttaatga

SEQ ID NO: 171845 - DNA, 527 bp, Homo Sapiens
tggaacatcacacttgactgtatgtgccaggatttataatagatacaaatacttcattaaagtctcataacaacctgtaagataggtattagtatatttatttccacataaggaaacagattgagaggctaaataccctgcccaatacatacaactgtaagtggagaagctgtattccaacccatattctccccaaatatccctgtagggacaagcaactctgaagagaaaaaagctgataaaagtctatgtaacagaaagaatgacacataaggctatgaagcattagaacaaaggaaaacgataaagtcacttacctagtatgtctttgtgagtgtaaaagcgtgtcttaagtggcttgtattcatggatccgtttgaaggtttttccaaaaggggctggtggaattattttattacaaacagcacagcaaacaaagtttttgtaatctgaatttctgatcatagttaaatttcagatgtcttctcctacttacagttaaaataatcttagaatcagaaaaagtc

SEQ ID NO: 171846 - DNA, 150 bp, Homo Sapiens
tatagtggtcccgcggtatgtttacgaatagatcattgcccctgacggcgatctcagcagtccgcaggtgcgcaactgagcgaggtgtcgggacacttttggttggtgatcgtcgagcgcccagatcaattcgcagacacatagctcgcc

SEQ ID NO: 171847 - DNA, 183 bp, Homo Sapiens
gtacggcatgcacgcttgatgcctgaagtctgactctagagttatccccccgggttatgtcttacgcaaatattctgtaacatcactgccttctaataaactgtcttcatcttgtattctctccaactgctacctcgtttttcttcccccttgtagggcaaaacctgttcaaagaccttccat

SEQ ID NO: 171848 - DNA, 448 bp, Homo Sapiens
tgtactatttgtgagtgagcaatgaacgctgtggctccctggaggggctgtggtgggaagtttcactgcgatcaagtagaggtggtgcctttggacctcttctcctgaacctgcagggagaggcgcagaatattcacaaggtgaagatgcaacaattcaaatgagtgtccaggttttcagggtggttgctaaaccccaaaagaccgatagcttcgggcaaaagactgcagaaagaacagctttacatttttacggaagcaatgagaaatataccctgtaagccttgaaaaattcccgaagggattcctgttcattcctgtggatcctaatgggccagcatagacctgttagtcaaaagaggatttatctacaagaacatcattgagaagctgcaggacatcatcacagccctggaggagcggcacatgcgctgggagcggcacatgcg

SEQ ID NO: 171849 - DNA, 751 bp, Homo Sapiens
  misc_feature (497)..(498): n is a, c, g, or t
  misc_feature (500)..(626): n is a, c, g, or t
  misc_feature (639)..(679): n is a, c, g, or t
gggggcagagccgcaggtcagtcgtgaagagggagctctattgccaccatgagtttctccggcaagtaccaactgcagagccaggaaaactttgaagccttcatgaaggcaatcggtctgccggaagagctcatccagaaggggaaggatatcaagggggtgtcggaaatcgtgcagaatgggaagcacttcaagttcaccatcaccgctgggtccaaagtgatccaaaacgaattcacggtgggggaggaatgtgagctggagacaatgacaggggagaaagtcaagacagtggttcagttggaaggtgacaataaactggtgacaactttcaaaaacatcaagtctgtgaccgaactcaacggcgacataatcaccaataccatgacattgggtgacattgtcttcaagagaatcagcaagagaatttaaacaagtctgcatttcatattattttagtgtgtaaaattaatgtaataaagtgaactttgttttannannnnnnnnnnnnnnnnnnnnnnnnnnnnnnnnnnnnnnnnnnnnnnnnnnnnnnnnnnnnnnnnnnnnnnnnnnnnnnnnnnnnnnnnnnnnnnnnnnnnnnnnnnnnnnnnnnnnnnnnnnnnnnnaaattttgtccgnnnnnnnnnnnnnnnnnnnnnnnnnnnnnnnnnnnnnnnnnggggcccgggcccccccagggggaaagggaaaatgggcccaatgttttttttcccaagaaaaaacgcgggcc

SEQ ID NO: 171850 - DNA, 470 bp, Homo Sapiens
  misc_feature (45)..(82): n is a, c, g, or t
actaatctctagcctgaactccactgttacctctcagctacttcnnnnnnnnnnnnnnnnnnnnnnnnnnnnnnnnnnnnnncccctccctttccaagttcaggacaccagcctcaacactgaagatacagcagtgaacaagcaaagccccttctctcatttactctgcatccttttcagaagaggtagacaataaagagatacagagataatatgtcatgtggtggcaaatgctaggaagaaataacaaaacaagaaaagggaaagagaatggttggctaaggaggcagcatctctggtaaagtaacatttaagcaaagaatcaaatgaaacaaaggggccagtcgggggaaattggtgttagactggtaaactcagagatggaaacaggtgttgtcctgcagcatcactgaggcagtgtggcaggagtggaacaggattggaaactcgagagacagaagaaatttgac

SEQ ID NO: 171851 - DNA, 803 bp, Homo Sapiens
atgttctctactgaacaagaaggaaaggctgcagcagaaagtcgatgagttaataaagaaattcagaaggagatggaccaaagagatgccataacaaaaatgaaagatgtctacctaaagaatcctcagatgggagacccagccagtttggactcacaagattagcagaagtcagccaaaatatagagaaactgcgagtagagacccagtaaatttgaggcctggactggctgaggttgaaggccggctcccagctacgcaagcgagcaggcgcgccggcagagcggacgtgtacgacagccagaacccacccacagtcaacaactgcgcccaggaccgtgagagcccagatggcagttacacagaggagcagagtcaggagagtgagatgaaggtgctggccacggattttgacgacgagtttgatgatgaggagcccctccctgccactagggacgtgcaacgtctctctatcacatttgaagggtcagacatgaaggacacgactttccgtacgttgacacggcgaacacacttgtgatgtcactacgacggaacgactgaacggcgactggctggacccgacagttcggagaaatgaagatgaagagggttatgtccccacttcatatgtcgaagtctgtcttggacacacatatgccaaagattcctagaggggagtgcctgcgagcctcgggtgagccttcctggaggagcctccgtctgcgttgttcccacgagggctccagcgccctgccctgtggcacagcccgactcctccgcagcccatcgctgcggggcgg

SEQ ID NO: 171852 - DNA, 1697 bp, Homo Sapiens
  misc_feature (662)..(662): n is a, c, g, or t
  misc_feature (1332)..(1355): n is a, c, g, or t
tcccgagttctcgactgaacttcagaagaccagggccctgccagggtgtgggaatacttgcgggcagcatacatggcagaccacctgaagaagcacagcgaggggcccagcaacttctgcagtatctgtaaccgaggtctccaggcaccaggagcccatcctgaatgggggagcagcgttccactgcgccaggacctatggcaacaaagaaggccagaaatgctcacatcaggatccgattgagagctctgactcctatggtgacctctcagatgccagcgacctgaagacgccagagaagcagagtgccaatggctctttctcctgcgacatggcagtccccaaaaacaaaatggagtctgatggggagaagaagtacccatgccctgaatgtgggagcttcttccgctctaagtcctacttgaacaaacacatccagaaggtgcatgtccgggctctcgggggccacctgggggacctgggccctgcccttggctcacctttctctcctcagcagaacatgtctctcctcgagtcctttgggtttcagattgttcagtcggcatttgcgtcatctttagtagatcctgaggttgaccagcagcccatggggcctgaagggaaatgaggcagctgctgtgtccccacggaaacaaccatcntggggactgctgggaaatgctgtgaatgcggagggaagtgatgtttgggttctgtagctgagagatttttattcatttttaactgccccccaaccccactccaactccttctccaccacccattctcccaatggtctttagaaatagattttcatctgatattctgcagaaatatcaatgagacttggtatgggacaggggcagaaaacactacataggcctccaaggcaaaaccagtcccagtttctttaatgggaagaagctggaattcctggtgctcaattcttagtgaccccaatcctatacccaaatctatgatattctgggacctcagtgattttggtcccctcccactttctctagttcgtcatcctccctttccatatccttcaaaagaacacactaaggtctccacctacttatacaatgcggatgcccaactgtttttaaggaagccagaaccatcccatggaccatggggtgagtgtcctccaagagccccctgagctcagccctctgcctggagggctccagacctttctgagccctgcttggaggcgagcattttcactgctaggacaagctcagctgttgaggacacccccaccccaaatttcagttcttacgtgattttaaccattcaacatgctgttgggttttaattctctannnnnnnnnnnnnnnnnnnnnnnnttttaggaccagttgtagtgaattgcctacctgaaagctatccccaggtgatacagagctctttgtaaaccgcagtcacacattagggttagtattaaactttgtttagatgtaccataattaacttggctagttgattgtttgaagtctatggaagaaatagttttatgcaaaattttaaaaaatgccagtctggtcagggaagtagggggtttcaatgctgttgggaaccaggaaggtgggacagccggcaggtagggacattgtgtacctcagttgtgtcacatgtgagcaagcccaggttgaccttgtgatgtgaattgatctgatcagactgtatta

SEQ ID NO: 171853 - DNA, 494 bp, Homo Sapiens
  misc_feature (14)..(14): n is a, c, g, or t
  misc_feature (21)..(21): n is a, c, g, or t
  misc_feature (130)..(130): n is a, c, g, or t
  misc_feature (266)..(289): n is a, c, g, or t
  misc_feature (431)..(431): n is a, c, g, or t
aacctccccgggtnccccaancagccattggaaaccccccctacttcccctgacccagaacgggccattttttaaaaattttgccataaaaactatttccttcccataagacttcaaaacaatccaactnagcccaagttaaattatggtacatcctaaaacaaagttttaatactaacccctaatgtgtgactgcggtttacaaagagctctgtatcaccctgggatagctttcagtagcaattcactacaactggtcctaaaannnnnnnnnnnnnnnnnnnnnnnntagagaattaaaacccaacagcatgttgaatggttaaaatcacgtaagaactgaaatttggggtgggggtgtcctcaacagctgagcttgtcctagcagtgaaaatgctcgcctccaagcagggctcagaaaggtctggaancctccaggcagagggctgagctcagggggctcttggaggacactcaccccatggtccatgggc

SEQ ID NO: 171854 - DNA, 593 bp, Homo Sapiens
gaaggtgattaattgtctttattggaggaaaacaagaagtcatcaatctcattatcattatgatagaaatcttgatatgtatacgtgattgtcaaggcagagaatcatttgctacatagacccatgaacaattttgcagtgccgcaaacctatgtgggttaaacttcttgcagagtttattacatgcatggaataaattcacagtttcccttcttttggacaaacatgtttttatgggaaaattgaaccaattgcaagcctggtaatagtagatgtggggacattcctggttttgatgttgtaattttttgggaagcatgctcactgttgggggagctgaaagaagggagattacattatgtgtagtgacaaaagccaattgagagattgttccaatgtttattctggacagagggtacctttgaggtcttctcacctgaacgtgggactaagataaatgttctctgaaacatggcgccccatctttcgaagcaaagactctgctgcatgcaatgtcgctgcatttctgccaccatttggacagcatttcaggtccctctgatagggccaagtgccccgggaaagagaatggc

SEQ ID NO: 171855 - DNA, 941 bp, Homo Sapiens
  misc_feature (523)..(559): n is a, c, g, or t
catcgagatcaagtacgggaagggggcagctgccatgatcccaggcccacagacggtggccacggaaatccgttctctttctccgatcatcgggaaagatgtcctcaccagcacctacggcgccactgcggaaaccctctcaacctccaccaccacccatgtcaccaaaactgtgaaaggagggttttctgagacaaggatcgagaagcgaatcatcattactggggatgaagatgtcgatcaagaccaggccctggctttggccatcaaggaggccaaactgcagcatcctgatatgctggtaaccaaagctgtcgtatacagagaaacagacccatccccagaggagagggacaagaagccacaggaatcctgacctctgtgaagagatcctgggcatttctggtccaacccaagccagagaaccattaagaaggggccttcattctggattctccgacgcaacactgacgtcccagctgcgacgtactgtcactgatgagagactgggaagggaaaagcnnnnnnnnnnnnnnnnnnnnnnnnnnnnnnnnnnnnncaggaaacaccgcatccttgcactgctgctggggctggcagagcagttggctgacagcaacaaccgacatctgaacacctacatttcctttgcagacaaattgaagaactggtgggatttttttcaagaaaaaaaattatataataactataatcccttgctcacccctttcccccgccaaataagaaacgcaagccagaccacgatgattgtagaagtcccctcccgccctggttctgcacgttacagttagcagacgagcaattccatttgttcttctccagcatctctaaggcccacttgaatgccaaggaaaacactttgcacagcaaagcaagaaaagtcacagcagccagacccgcacagtcaaccattttccgag

SEQ ID NO: 171856 - DNA, 401 bp, Homo Sapiens
gggctccaggcaactgagccctactcgcaggtcctcggccttggcccaaacaggaatgaggggcacagagtgcccgggtaaccgctcctgggagcagtggggaactgtcggatacttgaactctcaagagctgggctctgagcgtcctcgtccagctgccaacttggccaaaggctaagccagcagattgttctgttgccgggcaacacgacttctaaacctgagggagtgggcatgtgagcacataatggcaccagtgacagagcgaccataatggatgaataagcacagccaggtaccggcgcaaggcacctgctggcaatggcaggaggcggacgtgggaggccgtgcaataggtactggagggagagacgtgggcaaaaaggcgccgggaagttcca

SEQ ID NO: 171857 - DNA, 710 bp, Homo Sapiens
gcccgtcccccgtggggggctgggcatcaatctggcactgctgacactgtcatcatctttgattctgactggaacccccataatgacatccaggcctttagccgggctcatcggattggccaggccaacaaagtgatgatttaccggtttgtgactcgcgcgtcagtggaagagcgaatcacacaagtggccaagagaaagatgatgctgacacacctggttgtgcggcctgggctgggctccaaggcaggctccatgtccaagcaggagcttgacgacattctcaaatttggcactgaagagctattcaaggatgaaaacgagggggagaacaaggaggaggacagcagtgtgattcattatgacaatgaggccatcgctcggctgttggaccggaaccaggatgcaactgaggacactgacgtgcagaacatgaatgagtatctcagctccttcaaggtggcacagtacgtcgtgcgggaagaagacaagattgaggaaattgagcgagagatcatcaagcaggaggagaatgtggaccctgactactgggagaagctgctgaggcatcactatgagcaacagcaggaagacctagcccggaatctaggcaagggcaagcgggttcgcaagcaagttaactacaatgatgctgctcaggaagaccaagacccagtccgagacgcggtggcatcaacggggagaacgga

SEQ ID NO: 171858 - DNA, 406 bp, Homo Sapiens
tcagaaatagaaaataccaagctagtcagagtccagactttaaaaaatttagatgggaacaaagaaagcgtgattactcatttcaaagaagagatgggcaggctgcagttatgtttggctgaaaaggaaaatctgcaaagaactttcctgcttacaacctcaagtaaagaagatacttgttttttaaaggagcaacttcgtaaagcagaggaacaggttcaggcaactcggcaagaagttgtctttctggctaaagaactcagtgatgctgtcaacgtacgagacagaacgatggcagacctgcatactgcacgcttggaaaacgagaaagtgaaaaagcagttagctgatgcagtggcagaacttaaactaaatgctatgaaaaaagatcaggacaagactgata

SEQ ID NO: 171859 - DNA, 1256 bp, Homo Sapiens
agactgggacaacctggacgccacttcttcctgagccgcacagtctccaatgtcatcagctccattgtctttggggaccgctttgactatgaggacaaagagttcctgtcactgctgagcatgatgctaggaatcttccagttcacgtcaacctccacggggcagctctatgagatgttctcttcggtgatgaaacacctgccaggaccacagcaacaggcctttaagttgctgcaagggctggaggacttcatagccaagaaggtggagcacaaccagcgcacgctggatcccaattccccacaggacttcatcgactcctttctcatccgcatgcaggaggaggagaagaaccccaacacggagttctacttgaagaacctgatgatgagcacgttgaacctcttcattgcaggcaccgagacggtcagcaccaccctgtgctatggcttcttgctgctcatgaagcacccagaggtggaggccaaggtccatgaggagattgacagagtgatcggcaagaaccggcagcccaagtttgaggaccggacgaagatgccctacatggaggcagtgatccacgagatccaaagatttggagacgtgatccccatgagtttggcccgcagggttaaaaaggacaccaagttttgggattttttcctccctaagggcaccgaagtgtaccctatgctgggctccgtgctgagagaccccagcttcttctccaacccccaggacttcaatccccagcatttcctgaatgagaaggggcagtttaagaagagtgatgcttttgtgcccttttccatcggaaagcggaactgtttcggagaaggcctggccagaatggagctctttctcttcttcaccaccgccatgcagaacttccgcctcaagtcctcccagtcacctaaggacattgacgtgtcccccaaacacgtggctttgccacgatcccacgaaactacaccatgagcttcctgccccgctgagcgagggctgtgccggtgcaggtctggtgggcggggccagggaaaggcggggtcagggcggggttcgcggaagaggcgggtataagaatggggggaagatgcgggaaaggaaggggcgtggtggctagagggaagagaagaaacagaaggggctcagttcaccttgataaggtgcttccgtggtgggatgagaggaaggaaacccttacattatgctatgaagagtagtaataatagcagctcttatttcctgaaaaaaaa

SEQ ID NO: 171860 - DNA, 359 bp, Homo Sapiens
ctgaggcacagactcggagagtacttgcgtggattcacatgggggccagtcgacagccccatccatcagctgtccatcagctcatagctgtgtctccgccacaggttcccattaaggatgtcgaggcggggaatggtgaggaagagtcgggcatgggtgctggagaagaaggagcggcacaggcgccagggcagggaagtcacacctgacacccagtacaccggccgcaagcgcaagccccgcttctaagtcaccacgcggttctggaaaggcacttgcctctgcacttttctatattgttcagctgacaaagtagtattttagaaaagttctaaagttataaaaatgttttctgcagt

SEQ ID NO: 171861 - DNA, 797 bp, Homo Sapiens
  misc_feature (710)..(710): n is a, c, g, or t
  misc_feature (725)..(725): n is a, c, g, or t
  misc_feature (748)..(748): n is a, c, g, or t
ggggcaggtgtgctgctgaggcgtgagaatggcgtcccgcggccggcgtccggagcatggcggacccccagagctgttttatgacgagacagaagcccggaaatacgttcgcaactcacggatgattgatatccagaccaggatggctgggcgagcattggagcttctttatctgccagagaataagccctgttacctgctggatattggctgtggcactgggctgagtggaagttatctgtcagatgaagggcactattgggtgggcctggatatcagccctgccatgctggatgaggctgtggaccgagagatagagggagacctgctgctgggggatatgggccagggcatcccattcaagccaggcacatttgatggttgcatcagcatttctgctgtgcagtggctctgtaatgctaacaagaagtctgaaaaccctgccaagcgcctgtactgcttttttgcttctcttttttctgttctcgtccggggatcccgagctgtcctgcagctgtaccctgagaactcagagcagttggagctgatcacaacccaggccacaaaggcaggcttctccggtggcatggtggtagactaccctaacagtgccaaagcaaagaaattctaccctctgccttgtttttctggggcccttccaaccttttatacccagaagggggcttgagtgaaaaatcaggggatgaagnttgaaaccccagggnggagtcttgttggttcacccaantggagaagggttccccaatttaaaaggaatggtcccaaggcccgggggg

SEQ ID NO: 171862 - DNA, 1004 bp, Homo Sapiens
gggagtcgcaggtgtgctgctgaggcgtgagaatggcgtcccgcggccggcgtccggagcatggcggacccccagagctgttttatgacgagacagaagcccggaaatacgttcgcaactcacggatgattgatatccagaccaggatggctgggcgagcattggagcttctttatctgccagagaataagccctgttacctgctggatattggctgtggcactgggctgagtggaagttatctgtcagatgaagggcactattgggtgggcctggatatcagccctgccatgctggatgaggctgtggaccgagagatagagggagacctgctgctgggggatatgggccagggcatcccattcaagccaggcacatttgatggttgcatcagcatttctgctgtgcagtggctctgtaatgctaacaagaagtctgaaaaccctgccaagcgcctgtactgcttttttgcttctcttttttctgttctcgtccggggatcccgagctgtcctgcagctgtaccctgagaactcagagcagttggagctgatcacaacccaggccacaaaggcaggcttctccggtggcatggtggtagactaccctaacagtgccaaagcaaagaaattctacctctgcttgttttctgggccttcgacctttataccagaggggctgagtgaaaatcaggatgaagttgaacccagggagtctgtgttcaccaatgagaggttcccattaaggatgtcgaggcggggaatggtgaggaagagtcgggcatgggtgctggagaagaaggagcggcacaggcgccagggcagggaagtcagacctgacacccagtacaccggccgcaagcgcaagccccgcttctaagtcaccacgcggttctggaaaagcacttgcctctgcacttttctatattgttcagctgacaaagtagtattttagaaaagttctaaagttataaaaatgttttctgcagtaaaaaaaagttctctg

SEQ ID NO: 171863 - DNA, 412 bp, Homo Sapiens
  misc_feature (17)..(17): n is a, c, g, or t
  misc_feature (35)..(35): n is a, c, g, or t
  misc_feature (116)..(116): n is a, c, g, or t
tccgcaatcaagggggnattggccaaaatcaaaanatgtgcccgcttcaaggaaacttgggcaccaattggtggcaatagttgaatcaagcctgtcttggccccaggacagccccnagtcacaagcatagcctgacaccatcaagcctggagcccaggagagacaagtagtggtaagaagctggcccaggaccctcccaggcatgtccaccctatcaccttaggccccaacacctccctggagccatgggtgatccctaagatcttgggctccaaagccagacatggcggggttcccagcccttgcgcgtgaccttgggcgggttactcaagctccttaagcctcttttgtcaactgagaataataacgctaatcaagggagagtgagcatttagccgctgccggaaagaca

SEQ ID NO: 171864 - DNA, 1001 bp, Homo Sapiens
  misc_feature (774)..(786): n is a, c, g, or t
tgccctccgccggggtccaggcccgggtcctcggccgctgtggggcccaggcccggcctggagtccagggttccccgccaggcccgggagggggcggccgtacatggccagcaggcctccgggggacctcgccgaggctggaggccgagctctgcagagcttacaattgagactgctaacccctacctttgaagggatcaacggattgttgttgaaacaacatttagttcagaatccagtcagactctggcaacttttaggtggtactttctattttaacacctcaaggttgaagcagaagaataaggagaaggataagtcgaaggggaaggcgcctgaagaggacgaacaggagaggagacgccgtgagcgggacgaccagatgtaccgagagcggctgcgcaccttgctggtcatcgcggttgtcatgagcctcctgaaatgctctcagcaccagcggaggcagcatttcctggaacgactttgtcccccagatgctggccaagggcgaggtgcagcgcgtccaggtggtgccctgagaccgacccggtggggaactcctaccctggccaccctggggagccggggtgttttggggcgggcctcccgctagcccctggatgccccgaaatgcggggtcgcacatttttgaccaaggtttgaaagagaagccttccgagccacctggaagatgagccggaatacccagggcccccggacagggattcccaggttcccttaaaagccggacaaggaatttttttggaaaagggnnnnnnnnnnnnntgggggcgccactcccggtcaacgggggaccctgggcccctcgccggtggggtcctggttcttccccgcccctgggacccggggacaggaacctgggaagagggcaagggggcgccctttcatatggccctttttacaagccccgctttaagcagggggtttcgcgcccccacacaccttgggaggaaagcgccacaaaaaggggcgtccccccc

SEQ ID NO: 171865 - DNA, 420 bp, Homo Sapiens
atgtttcacttcttcagaaagcctccggaatctaaaaagccctcagtaccagagacagaagcagatggattcgtccttttaggagatacaacagatgagcaaagaatgacagcaagaggcaaaacttcggacatagaggccaaccaacctttggagaccaacaaagaaaattcatccagtgtgactgtatcagaccctgagatggaaaataaggcaggccagactctggagaacagctcattaatggccgagctcctgagcgatgtgccgttcaacctggccccgcatgtgctggcagtacagggcaccatcactgaccttcccgaccacttactctcctatgatggcagcgaaaacttatcacgattttggtatgatttcactcgtgaaaattcagtgctctgtgattcataaccgtta

SEQ ID NO: 171866 - DNA, 963 bp, Homo Sapiens
  misc_feature (923)..(923): n is a, c, g, or t
ggcctgggtggcgaattcggcacgaggcaccagaggaccttcgtgctggaagtgatgggccggcactgcgggtacctggcgctggtatcttgcactggcctcaggggccgactggctgttcatccccgaggctccacccgaggacggctgggagaacttcatgtgtgagaggctgggtgagactcggagccgtgggtcccgactgaacatcatcatcatcgctgagggtgccattgaccgcaacgggaagcccatctcgtccagctacgtgaaggacctggtggttcagaggctgggcttcgacacccgtgtaactgtgctgggccacgtgcagcggggagggacgccctctgccttcgaccggatcctgagcagcaagatgggcatggaggcggtgatggcgctgctggaagccacgcctgacacgccggcctgcgtggtcaccctctcggggaaccagtcagtgcggctgcccctcatggagtgcgtgcagatgaccaaggaagtgcagaaagccatggatgacaagaggtttgacgaggccacccagctccgtggtgggagcttcgagaacaactggaacatttacaagctcctcgcccaccagaagccccccaaggagaagtctaacttctccctggccatcctgaatgtgggggccccggcggctggcatgaatgcggccgtgcgctcggcggtgcggaccggcatctcccatggacacacagtatacgtggtgcacgatggcttcgaaggcctagccaagggtcaggtgcaagaagtaggctggcacgacgtggccggctggttggggcgtggtggctccatgctggggaccaagaggaccctgcccaagggccagctgggagtccatttgtgggagaccatcccgcatctatggttatttcacgcccctgcctggntggttccggtggggttttgaaggcccctaatgaaaggggt

SEQ ID NO: 171867 - DNA, 916 bp, Homo Sapiens
  misc_feature (846)..(846): n is a, c, g, or t
  misc_feature (885)..(885): n is a, c, g, or t
tcatcgctgagggtgccattgaccgcaacgggaagcccatctcgtccagctacgtgaaggacctggtggttcagaggctgggcttcgacacccgtgtaactgtgctgggccacgtgcagcggggagggacgccctctgccttcgaccggatcctgagcagcaagatgggcatggaggcggtgatggcgctgctggaagccacgcctgacacgccggcctgcgtggtcaccctctcggggaaccagtcagtgcggctgcccctcatggagtgcgtgcagatgaccaaggaagtgcagaaagccatggatgacaagaggtttgacgaggccacccagctccgtggtgggagcttcgagaacaactggaacatttacaagctcctcgcccaccagaagccccccaaggagaagtctaacttctccctggccatcctgaatgtgggggccccggcggctggcatgaatgcggccgtgcgctcggcggtgcggaccggcatctcccatggacacacagtatacgtggtgcacgatggcttcgaaggcctagccaagggtcaggtgcaagaagtaggctggcacgacgtggccggctggttggggcgtggtggctccatgctggggaccaagaggaccctgcccaagggccagctggagtccattgtggagaacatccgcatctatggtattcacgccctgctggtggtcggtgggtttgaggcctatgaaggggtgctgcagctggctggaggctcgcgggcgctacgaggagctctgcatcgtcatggtgtgtcatcccagcccaccatcagcaacaacgtcccctgggcaccggactttcaggcctggngctccccggacactggctgttaaatgccccgcccatggnaaaagccttgtgaacccgccatccaaaaacc

SEQ ID NO: 171868 - DNA, 931 bp, Homo Sapiens
gggaaaattctctagaaactctgaggtttagcatttcaaatctgagcatgcagacacatgcagctcgaatgagaacatttatgtactggccatctagtgttccagttcagcctgagcagcttgcaagtgctggtttttattatgtgggtcgcaatgatgatgtcaaatgcttttgttgtgatggtggcttgaggtgttgggaatctggagatgatccatgggtagaacatgccaagtggtttccaaggtgtgagttcttgatacgaatgaaaggccaagagtttgttgatgagattcaaggtagatatcctcatcttcttgaacagctgttgtcaacttcagataccactggagaagaaaatgctgacccaccaattattcattttggacctggagaaagttcttcagaagatgctgtcatgatgaatacacctgtggttaaatctgccttggaaatgggctttaatagagacctggtgaaacaaacagttcaaagtaaaatcctgacaactggagagaactataaaacagttaatgatattgtgtcagcacttcttaatgctgaagatgaaaaaagagaagaggagaaggaaaaacaagctgaagaaatggcatcagatgatttgtcattaattcggaagaacagaatggctctctttcaacaattgacatgtgtgcttcctatcctggataatcttttaaaggccaatgtaattaataaacaggaacatgatattattaaacaaaaaacacagatacctttacaagcgagagaactgattgataccattttggttaaaggaaatgctgcggccaacatcttcaaaaactgtctaaaagaaattgactctacattgcataagaacttatttgtggataagaatatgaagtatattccaacagaagatgtttcaggtctgtcactggaaga

SEQ ID NO: 171869 - DNA, 811 bp, Homo Sapiens
ctatcacattatcccctaagaataccaacgcatcctacagtgcttcttagatagaaaagattgttgctactctatccatcaaatggccacaaatgggtgtaggagaagggaaatcaattggagaatggtttggaccaaatacagttgcacaggtgttaaaaaaacttgctttatttgacgaatggaattccttggctgtttatgtttcaatggataacacagtggtcattgaagatatcaaaaaaatgtgccgtgtccttcccttgagtgctgacacagctggtgacaggcctcccgattctttaactgcttcaaaccagagtaagggcacctctgcctactgctcagcctggaaacccctgctgctcattgtgccccttcgcctgggcataaaccaaatcaatcctgtctatgttgatgcattcaaagagtgttttaagatgccacagtctttaggggcattaggaggaaaaccaaataacgcgtattatttcataggattcttaggtgacgagctcatcttcttggaccctcatacaacccagacctttgttgacactgaagagaatggaacggttaatgaccagactttccattgcctgcagtccccacagcgaatgaacatcctaaacctggatccttcagttgcattgggatttttctgcaaagaacgaaaaagactttgataactggtgtagccttgttcagaaggaaaatctaaaggagaatttaaggatgttcgaattagttcagaaacatccatcacaatgagactccctttgtacctcctagccaagccaagaagtgacaa

SEQ ID NO: 171870 - DNA, 415 bp, Homo Sapiens
tgggcctcatcttcttgaaacacaattatggcttcctggaattgtttttcactttcccctgtggcgctcaaaagctttgtgttttcatagagagtttcattcacaatgcgatcagacttagatttgaaaacagctcctaggatacctgtcgccacctgcaggagcaggatcagaagcaagcctatgaaaaacaacagaagcatgcagcgactttcttttatagcaccgcagcatgccaggaagcccagaatcatgatgatggcacctacagcaatcaatatgtccacagcaacgtaggagctagagcctacatcttcagaaccaaaaattgcttgagagtcattgcttactcgtacccatattgctaatgctaggatcaagataccacatagccagaacaagaagatgaggccca

SEQ ID NO: 171871 - DNA, 630 bp, Homo Sapiens
cctcatcttcttggatcacataccaagagagtgttaaagccacattaggattcaattccaggccatcagattccaagtccactggagaaaagatgtatatctctaatctgttaacaaattgctcaactactcagactaatcccaggtgatggatgtctaatgctcaggaaaggcgagtcagtctctgaggcaacagatcccatgggcctgggtagaaaatgcccagtgcttcccagtcccaagtgctggctttccctgtatctgcctctgccaggcaacacttatcaggctcccaatcagcaggagcctccatgctccactttgaacagcctctatgctccagcaatggggcatttgtgaagagtgacttgattaacttttctgaccatgggtataatacagttgcttcagagggcagtggttctgggtgtgatttttacactgtaacattgtatacagtgtcatggataattactatttttttctggtcattaacactcacctactctagtactaggatttcagaccaaggtcctcatgacgcctggatattttagtatctatatccaataatcttttctctcctactgaatatccagggcaagatgaaatcgtttctttaaaactgtc

SEQ ID NO: 171872 - DNA, 593 bp, Homo Sapiens
ggtcttttcccctcaaagtgggaagaggtgctgcctttgacatgaaaagggacaactggggaataagtagttccatatgggaaggaagcagtgtgttaaagtagaaggagcatgagctttgcagttagagcttgttgcaaatctcagatctcagccactcattactggtgtaacctgtgcaggttctgagccctggtctttcagggttgtagaagaattagagattgtatatgaaggacctacctagcacagagcaagtgctcagtaaatagtaactaatgtgagtatcaggcatatccatgcctaagtaccattgtaatggttatcagtgagcacttaacttgtaaacagccatattttttaatatctggagggaaaatctcagatacagactcttccccttcagtttgctgaagtaaattctgacttgccacaggtatgtgtaggaaacagggagggcagaaatagaaacatttaatcaaagcatgaatcgaagttaagtgtataacaaatacaaaacaatgggtgtctgctctctcaagctagcaggaatttagcaacagagagagaattatttgaggggaaaagacctg

SEQ ID NO: 171873 - DNA, 416 bp, Homo Sapiens
ggtccaggacttcccctcaaaaagacttaggagacatctctttttttgcaccccttctgtttctttgaataatcatttcattctgattttgtcttatatgtttgcagaattccttacttctcctagaaataacccttttatgagctgaataaaatcatgcagtgtactgtggctttacattgacacttaaatattttcccttttctctcttgccaaatctggcttctgtgcactgccccctagcactgccaaggtgtgctggtttgagaagtactgtggtttgggaaatgcagaggtctggtgggttgctggaagacacagtgtgaatgtattctgtatgctgagacctggctttcctggacccagagccaggtaattgcacttgtgagacaagcctttgaggggaaaagaccctg

SEQ ID NO: 171874 - DNA, 702 bp, Homo Sapiens
acaagtctaaattacgttgtgggcactgaatcaatcgccaattgaagctgataattttctttcagatcaagttttcccacacctaaagaaaattccattatataatacagttataccatctgtaagctatgattttccaaaaagaatcacaaaaaaagttaaaaactaccaacaaaggcactgaactgctatgacttgctttttttgttgaccaccaaccttttttttgtaaactagtgaaaagtcacatcaaaagatgaaatagaatccaatccaaaaagattggaccccaaaaggcactgcccaaactactgatttgaaatgctcaaaatgcattctcttcatttgtcttcccccaatagagcattcaatatttaacgacatttgctgtacattatacaaaagggtctgtaggttgaagtgaacgtaactttccacacaagcaaaatgtaaatctgcaaaatgaatcatgatcacatatcactcatatgcagatataacataaaacctaaggttcaacaatactattacaccaaaagactagactttcaggaaacccttctacctaaacccattctcagacaaaggctaaagcacattctgcaaaggcaaaaggaaacagaagacagtatttccagaaaagactagttacaaccaggagcaaactgggctctttactcacattttattactgcgccacta

SEQ ID NO: 171875 - DNA, 675 bp, Homo Sapiens
  misc_feature (46)..(82): n is a, c, g, or t
ccacaatctaaattactctaaaatgtagatactgttattctccccnnnnnnnnnnnnnnnnnnnnnnnnnnnnnnnnnnnnngagacggagtctcgctctgccatccaggctggagtgcagtctatcaaatgctttcttttcctactgaccattgaaatgggcaaggctcaggctcatggatctgtttgacttgcaggaacaaagcaatcaatcaccgtgactatggacagcatctatgctactatgctttggggcacaaaaatgtttttcaatgtgaatgaggtacattgtagttcaaattcagcagcatattaagtgcctaaatgctgacaggttttattacttgactctggaggcaggagtaaaaggaaagcaaaattatttaagtccttcaggaaataaaagcatgcttgctggctttattatgagtatttgatgataagtaagggttaagtagccttcgagtctcagggtcagtattctttcagcaaacatttattgaatacatactcattttcctttatttcatgagtatacgtttgccctcctggcaagcatttaaggtggctgaaccctattatattccaagctttgtgctaggtgtaggaaacacaaaaaattatatatagtccttgccttcatggatccatatatcagaaaataagttctaggga

SEQ ID NO: 171876 - DNA, 857 bp, Homo Sapiens
  misc_feature (75)..(75): n is a, c, g, or t
  misc_feature (500)..(500): n is a, c, g, or t
  misc_feature (847)..(847): n is a, c, g, or t
gtacattcatttttattgtcctgagtgggatgaataagtttctaatatacaaatttccccctcctcatacatggnaaaagaaactgacagaggtcccaaatcgtttcctggcagcccagaattcccaggtaactgaccaaagtctcctgccttctgtcctcatgctgatctgtttgtatgagcaactggggcaacccctcgcatggttgctgggacagccgcccacagcctcagctccaggaagcactagggggtcactgaggctggacagcaacttaggaagtggcccctaagtgactctacccatggggttcaggccatcggtgtggcctgaacatattggtcctggggtggaggaacactgcagagccacagaaatgccacgaaacagccagctactgccccccacaatccccgcgactagttaaaatgcagattcctgaccccaccctgagtgaggattcaggctaagtgtgggatctgcaaacttaaatttcccnagtgattctgatgtgggatagtcctagaagaatagttccagaggcaatcatttagatcctaaaacggtggggagtggggacagggtgaacgaaggtgcccccccaggttccacccacccctcactctagagcctaaggccctcccaggagggagtgcctgaggaggcaatgacccaggccctgaagcccagggttcggtcccctgtcctttcccaccagcgttgagttgatgggagtcaagactgttctctcccagggtgcaagcagggaaaggggttcttggggatagaagggttccccattgaatggaaggcagttctgggcccagggaggtgcccaagttgggntgcctggggt

SEQ ID NO: 171877 - DNA, 861 bp, Homo Sapiens
catccatgctcaccacaggtagagctgtgctagatgtgcagctgcatcttcctcttccccaatctcatccaatgtcacaaaagatagttctccctcaacaccacgaggagtggaagttttcccctttttcttctttaagttaagttcagagaaaggaacatgagtgagagtttctttcctttttccctttagtggattctgcttggcctgagaaggattcacttcttctataacctcatccacagtaacaaattcatccaaattaaatggaaataatggctcctctttagatttggaacttctaccagtagtgcttttaggattcttagggtttggctcagccaaagtcttatggttgctgtcatcccgtttcatgatggaaggtctagcctctgtttcctgagatggtttggttatatctctgtaatccagtttagaaagcttgcctggcagggctgagatccttccactgcctcctctggtaagactgctctgagtaggtatgaattgactgctgctttctgccaagcctgacctggcacttgtgggtttaagcagaccaaattccttggctgaaagtttcttttcagcatttatttgatctctgggcacagattttggaaaacttttctgattttcagtttttgaaactgtagcttttgccttaggagaagagactataacagccttgatgcttggtttactgctagatacatctgatacagccagaatactagttttactagtttcatcaggcttattagcctgacccactcctttatttgggtatgccttgaataaagtgttttctgcaggcttttctttcattgctgccatcttttccaccttttctgcatccat

SEQ ID NO: 171878 - DNA, 627 bp, Homo Sapiens
gactctagaggacccggttccactcatccattgctagcacgttcctttcaccctgtggtgtggaatttgtatgtgatgtatgttttcgtgtccccaaaatggggtggactttggaacagcaaatatttaatcggagcaaatcccccttgccagaatcctgctagcttgttcaccttggaggttctttgcccaaaaatactcaccacatactgaaaactaaatgtgctaagtcacccacagagtataaaggaggtcttgattaggatttggagcagggggtttgtttacctgtttttgatgaatatacagtgtcaatgtactcaccctgtgatgagccttaaagggccctgcccgcattccagattctggagtaagcaaacaagggaggggatttgttggggatggtggctcagcctgctgctgttagcattctccttgaaatggattttggaggaagaaaaaagaggtagggaggtagagaaggtctaaaggtgtaagatgggctggtatagatgaaagaggtgctaatgtgcatgtgttatggggaagatgtggttcaggaattagagttgctgatggagtagaagagagaaggtggggagaaaataatttagggaatgttttaga

SEQ ID NO: 171879 - DNA, 680 bp, Homo Sapiens
cctcatgcattgctacccaaggtggtatactacagatgtcccaaaaggattcacagcatcctagaaatggatccctcagccccctccctgagttcagtggtttgacctacttttagcagatgcctaaaaacatcgaatgtactaaatacatacttgtcagacttcctgctgtaaccaacctaggcgcttgaacttggaagtggtgtatgcagtgaatccccagagcctttaaaccttatacctcaaggctgagcaaacccacacatacattcattctctgccactgcccctatactctgcaatgaagtggtgcagggtttgtgccctccatcccaccttagccaacctaagcccttccaatggctatctacaggcatcatttgggaagctcccttgcacagattatcctgaagtggaccctggctccaagtcttccgccagtccatgactgattgctatgcatgttctggaagatgggattgctgtttgtcctaagagctgggtgctaagtatctacctcccaggttcagtctcctcttcatcccctatcccctcaaaagaactggaaggcttcagcaactgtcacaagagtgctccctctacttcttcctggcattctaattgattctacgggacagatgggaataggtcatctcttcccaagtgtcagggtccaagac

SEQ ID NO: 171880 - DNA, 645 bp, Homo Sapiens
  misc_feature (602)..(602): n is a, c, g, or t
tgggggtgctagtcaagcaggtgtctcggggagagggcattacgatatagagaggaagagcacgtcatagagcgcccctgtgggtaggagcgtgccctgagctatcttaggaatagtagggagactcagtgtgtacttcaagacatagagaagtcatcggtgcataagaatacgaggcgatgaggctggagaggaaaccagcggaccactctccttacaggttgtattagtccgtctctcacactgctatgaataaatacctgagactgggtaatttataaaggaaagaggtttaattgactcacagttccacattgctggggaggcctcaggaaacttacaatcatggcagacagtgaagaggaaccaaggcatcttcacaaggtggcaggaaggagaatgaacacaggaggaactatcaaacttataaaatcatcagatctcgtgagaactatcacaagaacagcatgggggaaccgcccccaaggatccaattacctccacctgatctctcccttgatgtgggggattataggggattacaatttcaaggatgatattttagggtggggggcacagcttaaaccatattcctacagggnttgacttgaaacttaaggtacttattttcctttcccttgggtt

SEQ ID NO: 171881 - DNA, 464 bp, Homo Sapiens
  misc_feature (309)..(309): n is a, c, g, or t
  misc_feature (340)..(340): n is a, c, g, or t
  misc_feature (355)..(355): n is a, c, g, or t
  misc_feature (370)..(370): n is a, c, g, or t
  misc_feature (376)..(376): n is a, c, g, or t
  misc_feature (386)..(386): n is a, c, g, or t
  misc_feature (398)..(398): n is a, c, g, or t
  misc_feature (432)..(432): n is a, c, g, or t
  misc_feature (445)..(445): n is a, c, g, or t
agattcaaaaactttttaaaatattttaaagcactggtagttgccaattatattagtccattttcacaatgctataaagaaatacccaagactgcgcaatttataaagaaaagaggtttaattgactcacagatccacatggctagggaagcctcaggaaacttacaatcatggtggaaagggaagcagtcttacttggcagcaggcaagagagagcgagtgtgtattaacacttaaaaaaccatcggatctcatgagaactcactccctatcacgagaatagcatggggggaaaccacccccatgatnccaatcacctcccactagttcccgttttcancactgggggtttttnggggtttccatttcnaggttnggttttgggnttaagccccggngcccaaccctttttccccctttccgggtttgggnttagggttttttnggcctttttggtggggccc

SEQ ID NO: 171882 - DNA, 665 bp, Homo Sapiens
catcatccattgctgattgttcccatagtagtattaagatgttcctatgtctctttcctgtaaactggaattcgatctagaggctggtcagataatttatgggttggtggtttattttgacaacatggggttctgttagtttttgttgcactgtatcgggagacacgtgtttggttgtctccattgtgagatgaccagcctgatccacctaatggttttagcagccttggataattttttttccagaggtagcaaaatgataattggttaatggtgtcattctttattcatttattatctggaacttttctataaagaagaatagctatccctcatcagtggtaaggttacaactgatgacagttcatgtaagagtcagaataatgcaagattctttcctttacttccagaataatattgatgccctagcgacttttaaaggtgactcgtgtttttatcctcatggttatctacaaatgggtagattttggggataatggatatgtttcagttcattgcagtgtaagacatcaattttatatctattttgggttctaaaattacaccttctttggacccttggagcccctttaatatgggttctcctgtggacaacaacttggagagagaatgatttaggattaatagttatacctgaatgcgag

SEQ ID NO: 171883 - DNA, 610 bp, Homo Sapiens
acatctagcttattattgtgtccctaaagtgcctggcatggtcctgtgtacatagcctggtttataataaagtgcgttgaattatattgaattgaaaatatcctgaggcccttggttcctcgttccttctcccaattgtttgcatttgagacatgtttccttgaggtgccagaggaaacacactgctctgctgaaatgcatgtagattgcatgtttaatctctgattggactgaagaggctaaccatcagcaggtgaagagatgcatcctatctctagcttcctgagaagagctaagtagaaaaggtctgtacaggcagggcctggcagtgtgcaccagccgtgacttggacacttttccacagcagactctacactcttggaaagcctggttgaaaggaggtagctgcagattggggaaaaccttcatcatagtgtgtgattttaaaatgctttattatttcatgatttgtaggatttttttctagaaattatcttaatgatgccatggactaatgatgcaaaatttctaatcagtcggtattttgttaatatgcatattggtttgattctggattgcctggggaacaaatattatatttcttacggac

SEQ ID NO: 171884 - DNA, 265 bp, Homo Sapiens
acacatcgttgactttcgccgccaggcctcactgtcccagagcatccgcaagtgagcccccctacacccaagcccagcaccccccacccagcaacctgtggattctcggggcctggacatgattgggcctggtccctgcgtcccctctctggaaggaggaggccggcattaatgagcatgtctccctgtggcctagtatcatggtatagatggggaaatggtaagtgctttgcgaaagtcaacgatgtgtcgggatcctctaggc

SEQ ID NO: 171885 - DNA, 430 bp, Homo Sapiens
  misc_feature (382)..(382): n is a, c, g, or t
gcctgaagactcatgtattcttgattgaaataatttgcttatgtctcagttctacagttgaccttctttcactgttttcaaggtcaatagctgtgtgttcacacttctgcattttataaatgttactgtgattttcttgtaaggaagaattaactgtcggcaatcaatgtcatcagaatcttgcaaaagaggtttctttaacataggtatgcgtaagatgcttctcagattcacaaggatgtgggtgataagaccaacccctcccattagcccttccaggcccccatgtaagacttcacacacaccttctcactcatctcagaccttgtcagtgtaacttggagaaaatgtgagcctccctgcaacttggcgatgaggggcncaccagaaaagctcagccgagtgactctgaccctgaaatgctggcaaa

SEQ ID NO: 171886 - DNA, 726 bp, Homo Sapiens
tatgccgtccgcgatctctgggagtcacacctgtgtagggaggggaaaaagcaagagcgggcaaaaggaaaagttgagctgcaatgcagattcaatggcagcctcagccaaccccacagagaggtcaggagctaaagtggtccttcagaattgtccctcattgggctgagatggctagacctttatacctccacaggtatcagtcattggatgggggtcatcctggcatatgcttttgcaaagttataatcaggatatattagtcatctattattgcataacaaaataatccaaaacttagtgactaaaaacatgcatttattatctcacagttgctgtgtgctacaaatccagaagcatgaggttgggtgcttctgactgaagatatttcaggttgcagttaagctgtcagctggggcagcagtcatctcaactctattgaggccaaaggattcagctcactcacgtggttgctggtaggccccttccttaccacaggatgcccctctcagcatggaagaatctcacctccaaaaatttaatgtgggttttacacattaagcaagcataggtgaggtgcagtgaaggggaagtgatggctgtcagtcgtttggccaggttcctttgcatacaggagagctagtgggtgttaccagctgagacagctgaaggaggagacgcgtcacatcggggatctctaagtcactgagcatcagctgcgcgaaa

SEQ ID NO: 171887 - DNA, 258 bp, Homo Sapiens
ttctcctgactccagcttgcccgtctgtccttgggggcagcgtcctttcttctctcggccccttggagcagctctgcgggaaccccacagcagcccagcggattgaacgcaaaagacagccaccctcctgctccggatcctgggaggaggctacacgctggcgctgagacagcaacctgcctggcctgggaagccccccgcagcccctacatcagaagcttgctcttggcgcaatggctcacgcctgtaatcccagca

SEQ ID NO: 171888 - DNA, 1587 bp, Homo Sapiens
  misc_feature (416)..(683): n is a, c, g, or t
  misc_feature (695)..(697): n is a, c, g, or t
  misc_feature (699)..(701): n is a, c, g, or t
  misc_feature (703)..(710): n is a, c, g, or t
  misc_feature (1077)..(1077): n is a, c, g, or t
  misc_feature (1310)..(1335): n is a, c, g, or t
caaagtcttctcctcggggagtttcgtgtgggttagtgaagcagggcatcttcttagcgccgagaaaaagaatttggagacaaagtaaacctactttctgttctggaagctgctaagatgatcaaaccacagactttggcctcagagaaaaaaagattgtgtgaaactgcccagctcagggataaccagggacattcacctgtgttcatgggatgtattgtttccactcgtgtccctaaggagtgagaaacccatttatactctactctcagtatggattattaatgtattttaatattctgtttaggcccactaaggcaaaatagccccaaaacaagactgacaaaaatctgaaaaactaatgaggattattaagctaaaacctgggaaataggaggcttaaaattgactgccannnnnnnnnnnnnnnnnnnnnnnnnnnnnnnnnnnnnnnnnnnnnnnnnnnnnnnnnnnnnnnnnnnnnnnnnnnnnnnnnnnnnnnnnnnnnnnnnnnnnnnnnnnnnnnnnnnnnnnnnnnnnnnnnnnnnnnnnnnnnnnnnnnnnnnnnnnnnnnnnnnnnnnnnnnnnnnnnnnnnnnnnnnnnnnnnnnnnnnnnnnnnnnnnnnnnnnnnnnnnnnnnnnnnnnnnnnnnnnnnnnnnnnnnnnnnnnnnnnnnnnnnnnnactcttaactannnannnannnnnnnnaattgattgctgggcctcattacaaatgcatatgatgcttgagtgctgctgtttgaaattatttttcttttcgggtcctcaaaaattcaagaaaagttgatgattgacttgaagattacaaaatttaaggttttttggcatgtgtgttttctattaataattggttatatgatgtcaaagtaatactttcataatagaattgacatgctctgggatagtttgacaaaggtaaattataaagtgaaatctcttgtttcattatcttccattctaacctcagagatctgtttctctaaaaaaaatgtccatctctggctttaataaaattatgcatcctccgccccgcgccccgacatccaccacaaangtttggttggccgccctcggcccttcaagaaagctttctaaaaccattcgttttgggcggcgcggggccccacgaaggttaaggtggacccgtgggccataggcctggtttccctaggggagaatccgtgggcccatgggacctacgggcctttgggatctctccgcccgatataaaaaaaccgccccgcgggggggaaacccgaaacgggttccctggaacagaaattcccnnnnnnnnnnnnnnnnnnnnnnnnnncccttctcctgggggttcttaacacatacgaggggagtccgcagtagcgcacggcctcgcgagttattcacacgctggccgccccccccgtctcctgggcaaacaccccctttccgcgcgatgtgcggggcgggcgggagattcaccgtcgcggaggccggtcctcgcgcccgctacaccttcggacacacgcccctcctcatacccataaacccggcgcgcggagtcggtaaaccccgccgcgacgcacgg

SEQ ID NO: 171889 - DNA, 886 bp, Homo Sapiens
cacagacgtgtttctgtccaagccccagaaagcggccctggagtacctggaggatatagacctgaaaacactggagaaggaaccaaggactttcaaagcaaaggagctatgggaaaaaaatggagctgtgattatggccgtgcggaggccaggctgtttcctctgtcgagaggaagctgcggatctgtcctccctgaaaagcatgttggaccagctgggcgtccccctctatgcagtggtaaaggagcacatcaggactgaagtgaaggatttccagccttatttcaaaggagaaatcttcctggatgaaaagaaaaagttctatggtccacaaaggcggaagatgatgtttatgggatttatccgtctgggagtgtggtacaacttcttccgagcctggaacggaggcttctctggaaacctggaaggagaaggcttcatccttgggggagttttcgtggtgggatcaggaaagcagggcattcttcttgagcaccgagaaaaagaatttggagacaaagtaaacctactttctgttctggaagctgctaagatgatcaaaccacagactttggcctcagagaaaaaatgattgtgtgaaactgcccagctcagggataaccagggacattcacctgtgttcatgggatgtattgtttccactcgtgtccctaaggagtgagaaacccatttatactctactctcagtatggattattaatgtattttaatattctgtttaggcccactaaggcaaaatagccccaaaacaagactgacaaaaatctgaaaaactaatgaggattattaagctaaaacctgggaaaataggagggcttaaaattgacttgccaggctggggtgcatgggcttccacctgttaatc

SEQ ID NO: 171890 - DNA, 692 bp, Homo Sapiens
  misc_feature (447)..(560): n is a, c, g, or t
ggcgtccctaccagcaactgtgcagtcttattccactgcgatacgcagtagtcagttgaccacagaggattttataaaggagaagagagaccagcataggacagagatacatcaaacccacctctcaccagagacaccagtcccttgcttgcctctgtcgctaagcccagaacatgccctgcagctgctcctctggaggccatctcccagccaggggctccactgctccactttaattaatctgggtggctgaaagtgttttaacccaagtaacttaagacatgaattaatagtgaatttatttcctctaggacagaaccagacttaactttattagtaaactgtaactgttttagaagtaaagaaaaaaaaggttactacatctagttaaattcacttccgattggttgaaacacaagggaggggctgggccgggtggctcacacnnnnnnnnnnnnnnnnnnnnnnnnnnnnnnnnnnnnnnnnnnnnnnnnnnnnnnnnnnnnnnnnnnnnnnnnnnnnnnnnnnnnnnnnnnnnnnnnnnnnnnnnnnnnnnnnnnctgggcatggtggcacatgcttgtaatcccagctacttgggagggaaagctcttttggttaacagcatatttacattagttaactgtattcttcaatacttttaacctgagtaacatttataaatatgttat

SEQ ID NO: 171891 - DNA, 696 bp, Homo Sapiens
  misc_feature (445)..(447): n is a, c, g, or t
  misc_feature (449)..(449): n is a, c, g, or t
  misc_feature (504)..(560): n is a, c, g, or t
  misc_feature (584)..(625): n is a, c, g, or t
gggcgaggcctgggtggcgaattcggcacgaggggcagagcatcatccgcaaggtggtggaccctgagacggggcgcaccaggcttattaagggagatggcgaggtcctagaggaaatcgtaaccaaagaacgacacagagagatcaacaagcaagccacccgaggggactgcctggccttccagatgcgagctgggttgcttccctgagggcccccgctggccaaggcctgtggacgacgctggcggcccagcctgggcaggtttcagggtgccagtgggaagcctgatgggtgctggtggcctttcccccgtggattggtctctggcccagcccagtctcttctcaggggcagggggtggaggttggggtcaccggcctgcttggcacccccatctgaaagagcagcacttctcagctattaaaggccccctggatagaccannnanagagaaaaaagaaggaggcaagcaaagcaccgccggcgcaaacattttgcggatnnnnnnnnnnnnnnnnnnnnnnnnnnnnnnnnnnnnnnnnnnnnnnnnnnnnnnnnngcttttttaaaaaccttttctttnnnnnnnnnnnnnnnnnnnnnnnnnnnnnnnnnnnnnnnnnnccaaaaccttggttcccccaaaggaaaaacccggggacagtgcaaaaaaggggcttgggaattccccccac

SEQ ID NO: 171892 - DNA, 1185 bp, Homo Sapiens
  misc_feature (385)..(456): n is a, c, g, or t
  misc_feature (486)..(538): n is a, c, g, or t
ggagcgagcctgggtgcgaatccgacgaggctggagtcggcggagaataccggggtcccctgcgctgggggtgggtgagggtcgctcattttcccgggacggtgacgggtactgggcgtcgccaggccccggccccgctagagccacccttggagcccgcccgcggccggccttgggggcttcggctcaagcgcgtcttcttcgtcgccagcccgcggcgccatggctcacgtcggctcccgcaagcgctcgaggagtcgcagccggtcccggggacgggggtcggaaaagagaaagaagaagagcaggaaagacacctcgaggaactgctcggcctccacatcccaagagagaagcaagcagaaggcccggaggagaacaagannnnnnnnnnnnnnnnnnnnnnnnnnnnnnnnnnnnnnnnnnnnnnnnnnnnnnnnnnnnnnnnnnnnnnnnagtgatggccggaagaagcgggggaagtannnnnnnnnnnnnnnnnnnnnnnnnnnnnnnnnnnnnnnnnnnnnnnnnnnnngcaaggagaaggcggaagcacagcaggtggaggctctgccgggcccctcgctggaccagtggcaccgatcagctggggaggaagaggatggcccagtcctgacggatgagcagaagtcccgaatccaggccatgaagcccatgaccaaggaggagtgggatgcccggcagagcatcatccgcaaggtggtggaccctgagacggggcgcaccaggcttattaagggagatggcgaggtcctagaggaaatcgtaaccaaagaacgacacagagagatcaacaagcaagccacccgaggggactgcctggccttccagatgcgagctgggttgcttccctgagggcccccgctggcccaaggcctgtggacgacgctggcggcccagcctgggcaggtttcaggggtgccagtgggaagcctgatgggtgctggtggcctttcccccgtggattggtctctggcccagcccagtctcttctcagagggcaggcggtggaggttggggtcaccgggctgcttggaacccccatctgaaaagagcagcacttcttcagctattaataggcccctggatagaaacacaacataacaaaaaggggcagcagccatagagtatacctagaaggggcccaagttatacggtacg

SEQ ID NO: 171893 - DNA, 889 bp, Homo Sapiens
gggctctcgagaaggcgcggggcgggctgtccggcccgcagggcggtcgagcccgcggcgccatggctcacgtcggctcccgcaagcgctcgaggagtcgcagccggtcccggggacgggggtcggaaaagagaaagaagaagagcagagcatcatccgcaaggtggtggaccctgagacggggcgcaccaggcttattaagggagatggcgaggtcctagaggaaatcgtaaccaaagaacgacacagagagatcaacaagcaagccacccgaggggactgcctggccttccagatgcgagctgggttgcttccctgagggcccccgctggccaaggcctgtggacgacgctggcggcccagcctgggcaggtttcagggtgccagtgggaagccctgatgggtgcctggtggcctttcccccgtggattggtctctggcccagccccagtctcttctcaggggcacggggtgggaggttgggggtcaccgggctgcttggcacccccatctgaaagagcagcacttctcacctattaaaggggcccccgggatcccccgatacccagcgaatggggggacccattccttggggggccgccctcgggcccttgaaaaacttttcctagacccctttcgtttgggggccccgggccccattaaggaaagtgcaacatgggccataggctgggttcccaagggagatccctgggtcctctaacctatggcctgggaattccctcccccaataaaaacaacgccccgcgcgggggtaaacccgagcggtttctcggaaccaaaatttcccgaccgggggagttcctggagggggccacttacccggggaatttacctcacccgtggggaggcctaaagcctgtgcttttcc

SEQ ID NO: 171894 - DNA, 721 bp, Homo Sapiens
ccggattttgacgcgtctcctctggctttcctcctggttttcagcttcctccttctcaagaggtgtccttatgccttctcctttctcacttggagctggagtagcaggtttagaggtgcagggactgttggtagcagaagcctcaggagtggtgggagacgttttggtaggagaggaggctctgggggagcgcttagaatcggcgctggggtcaggcatcagttccggcattgaccaacgcccattgatgtgctcaaactcctgcaccttctttttgacgagagacatgactccaatgcgggtcaacacctgctggcgactcagtccctcccgagggaccccatcggcaaaggtttcagagccgtctgccccaggctcacacagatggcgcatgaacaaagacacataggccttaaactccttctcagtcttgcccctcaggtcccgcaccagccactgtgtggtgaaggcatcctgtggtggcatcccccagcgcatcacagcattgaggaaagccttccgctgacgggtgttgaagcccagcacctcaatgttgcccccgactcgggtcagcagtggaggcagtggcttatctttctcactccggagctgcctctttgactgtctacgcccttcaggacgttcatcgaagtcttcatcctcctcctctgaaccaccgagtactctgactggttgtcttgtatcctgagacagcatggga

SEQ ID NO: 171895 - DNA, 825 bp, Homo Sapiens
gggaaaaggatgtacagaggatccccaaccgcctgcgaaacccaagccgccgcgtaggagcgtgcgttcgggccctcttctcccacctgttcgactccccatccccaggatgtcaacctcagtccctcaaggccatacctggacccaacgggtggaagaaagacgatgaggaggaggacccgctggaccagctgatctcccgctctggctgtgctgcctcccactttgcagtgcaggagtgcatggcccagcaccaggactggcggcaatgccagccacaggtgcaggcgttcaaggattgcatgagtgaacagcaggcgaggcggcaagaggagctgcagaggaggcaagaacaagccggtgcccaccactgagaccccaaaccacctatccccagtagatggccctgccaagaccagcacccagcaagattatagaggaagaaatcctaaatgctggtgtgggaggtctaaaacatggggagagtttttggatctggagttgagagccatgggtttggacatgactggcacaaacagctgtcatatgttcatggtcagatgtcatacattctcagctgtcttgttccaccagtatttaccaggaaaacaaagaatgtgttaagggatgctcccccaccccacatcttaagtcagtgtgccaagtactgagatgattttagggacattttattttaaattaaatttacaatctaatggtaaattgattacctaattagtgcctttctctttcatcacttgttctggatgtttcaatcagtttagtggaaggaaaaataaatggggaagtgttggggataacata

SEQ ID NO: 171896 - DNA, 872 bp, Homo Sapiens
gcgtctcttgaaagtctggtgacgtgtctgtctaagtgctggtagaggcacaggaccaactgagggcctcacgcagtacccctggccacaggatgcccgcctaagcccacacatgctgactgcaacaaggcccatggccaggacggaacacagagaagggtctgaggcctggagcgcgcccatgaaggccatggggcaagtgaggtctgctgagatagcgccaggtctgcggagctgaacgtgcagctgcagaggctggtctggtcgctgcgagaactggaagaagctgggagctgtgggtccctgtccacagagatgctggaaactgtggctgggagtggctctgaggccgctggagagagagcatctctgccccacggcatctgcgggtgagggcaaggtcctcaccagacaagtgcagccccaagtccccagatgttgggctttttcttggtactgagacagcagtggggcagggtggggcagtggcaggaaggcagggagcctctcttgctacctcttctccatgctctgcatctgcagactgagggaggtgaagctggccaggaggtcagtcacttcatccacctgctctttggtactggtcatctgcaggcgggtgcagaggtcatccaggcgttctcgctgctcatgttgccctaggcgctccagatactccctcagcatatggatgatctgcttcacctccagacgcacagcctctaggcactgggcatggccctcctgcaggatattcagctttgacttggccaggtgcaggggtgtgcgaccagctcggtccagggcatctacacgggcccctcctcgtagcagtgtggtgatgacaggaacgtggttggcccacgcgtccg

SEQ ID NO: 171897 - DNA, 1010 bp, Homo Sapiens
ttccggtccggaattcccgggatatcgtcgacccaccagtcgcaccctgagtctacttgcacgtaacgatggcagcaggatgcggagccgagaaagtcgacctgcgctgagcaagacaccccagtctgcccgcactgaggaacgtctgaaaggaaacatcccacgactcggaacgcccactggtgaataagaaaatgcacgctctgaagagactgagggactcggcaatgccaatgatgtggaaacagcagctgctggaagatggcgcggatccctgtgcagctgatgacaagggccgcacagctctacactttgcctcatgcaatggcaatgaccagattgctgctcctggaccatggtgctgatcctaaccagcgagatgggctggggaacacgccactgcacctggcggcctgcaccaaccacgttcctgtcatcaccacactgctacgaggaggggcccgtgtagatgccctggaccgagctggtcgcacacccctgcacctggcaagtcaaagctgaatatcctgcaggagggccatgcccagtgcctagaggctgtgcgtctggaggtgaagcagatcatccatatgctgagggagtatctggagcgcctaggggcaacatgagcagcgagaacgcctggatgaacctcttgcacccgcctgcagatgaccagtaccaaagagcaggtggatgaagtgactgactctggccgctttcacttccctcagtctgcagatgccgagctggggaacgagtagcagagaggtccttggcttctgcactgcccgccctggcccttggtggttcgttcccggaaagccacttgggatgggctggctgttcgggggcttgctccccgattcgggggagagctctcccggggcgaacccccccggtccttctcggcggccgcccttctcgtctcccacgtcgtggtgtcgacggtgtcttccgttggccccctttgtcgtgaaggggccgggggccccagcgggggggtgccg

SEQ ID NO: 171898 - DNA, 587 bp, Homo Sapiens
tatgcttgaaatgtaggagtacgcgtcttaatcgccttctggtatacagtgttcatggtgagcaatggccttctctgacttagccatgtccaaatccccaggaactaaaaatgcctacgacatagaaggcatgcaaaaattttgttgaatgtgtgaatatacttggagagtttgtttttggttccgtcttctccttggtaccaaagacaaattaaaatgactctccaaagtaaattatggctctatttagttttaagttcttggactaaatgatctatgcactttttttccactgctgataaatataccatgtccctgtggacccccttctctctctgtcactattttgtttcctacatctacaaactaagaaagctaggttatcaatgggtatagggcaatttgctccattcacagcggatgcacactccagattgatcattttgccagtaagaattccctggtatatgtttgcacctacagaatttggttgatacagaggtagccagaaggtattattatagtcaatgatgtagagtgttgatgtattaatttgccaataataaaattatcacaaaattgttatt

SEQ ID NO: 171899 - DNA, 382 bp, Homo Sapiens
tcaacacattcatcgagtttctgacattgttcttcgagcagccgtcatctgtctaatgcaaaatgtggctttgctttgtcttgttgcaaaaggaaagaaaagcttttgttcagagctttagaaaagtcggttcagtccacataatgcattttctccttcaattctgaaaagtagctaatgctcatttggtagtgaagtgctgcagaggaatgttctcttgctccttctttcacaaaattactttatggacaggtttcgaacatgtcactcaacctcaaaacatggtgcaggcttcttggtggatgagcttacattatctgaggggcggtaggaagcgtgctcatttttgttgaagtttgagtgtattctgcacggtaccgac

SEQ ID NO: 171900 - DNA, 662 bp, Homo Sapiens
aactcaaacacaggaaagctgtaagaaaaagaaaaactcctaatctgctctttcaccttacttattttacagaaggagaaagccaaaaaggggagagcatgtggctaaaccacagaaagactagatgcctaaaggaaaaattttaaagtgttcctaaataggtattagaaggggaagggggatgtaaagcttatgtgatttacatcattttgttaatctgctaatctacttccctggaaggtgagaaagagtgttgtctgccttctgcaattgaagagactagggcagaaacttaattatgttcttaccctgtgtatacctggctgtcatctggctggcaactagtccacaaactattggttcaggcatttgcctggcaataatgttagccatcatttaaattgttaaatatggatcagaagatctctaagaattactgatatgcagctattaatactggatgtaaataatattatttggggtgtgggtaaatcatttgactggaaccacatttaaaaaaaggacttggaaattttatttttgaaatgctgttggggagatggcattgatgaacaaaaaaatggaacatggaaaaaaacatcatctacacagagatgggtaaaatgactaagcaagaagcctgtcaccttcgactgatgctc

SEQ ID NO: 171901 - DNA, 438 bp, Homo Sapiens
  misc_feature (202)..(228): n is a, c, g, or t
ttaaaggatcaccctgagccaccacgcagtgcactcttctggtattttctccctcttgttgctgccccggttttggaaattagaaggggtggtctctttgttaacaatctgtttactttcttctgatacaatgaagcatcaggtcgagggtgacaaggcttctttgcttaatcatttttacccatctctttgtagatgatgnnnnnnnnnnnnnnnnnnnnnnnnnnncatcaatgccatctccccaacagcatttcaaaaataaaatttccaagtcctttttttaaatgtggttccagtcaaatgatttacccacaccccaaataatattatttacatccaatattaatagctgcatatcagtaattcttaaagatcttctgatccatatttaacaatttaaatgatggctaacattattgccaggcaaatgcctga

SEQ ID NO: 171902 - DNA, 483 bp, Homo Sapiens
  misc_feature (159)..(175): n is a, c, g, or t
  misc_feature (394)..(407): n is a, c, g, or t
acgaatcacactcaatgaaatatggccaaaaacttctcaaatctgagaaaagacacgaatatacatgttcaacagttaaactccaagcaggataaacaaagagatccacatcaagacacattacagtcaaattgttgaaagccaaagacaaagggatannnnnnnnnnnnnnnnnaaaaaacgggtctcaccatgatttggcccaggcgggtctaaaacggcgtggccctcaatgtgattctcccacctcggcctcccaaaggtgctgagactatggagtgtgagccactagacgggaatatcccactaagaaaaaaaccttaacatatagagaaggaaagaagaagggaatcaaaagtggtacaccaccaaaaaaacaactaacttttaaacnnnnnnnnnnnnnnggaaaggaagttgggccctggtaccccgggggggcgaaacaatggaggtccccggacttgggaaggctgctgacac

SEQ ID NO: 171903 - DNA, 118 bp, Homo Sapiens
acacgtcacatccagatcttctaagtcatcatctagttatcttgctacagcagcctcccaagtccaggaaacctcatttgtttgtccagcctgggtaacaagagcaaaactccatctc

SEQ ID NO: 171904 - DNA, 554 bp, Homo Sapiens
cgggcacacgcaataacaaagagcatcaggatggcattggtcttaccacaagcagaatgctggaagacaatggtggaataccttcagaactctaagaaacaaatgatttccaacactgatttccaaaactggtttaattatgtcaagtctagggtgcaatcaacacattttagatatgcagaagctaaaacaatacttccctcgcaccctttcttgagaagctattagaggatgtgctttcagtaaccaagaaagcaggatgtggtagacaggggccaccacaatagaggatgctagctatgctcccagcctagaacacaactagtccagactggagtaggagggtggaagactaagggtaggaggcctccaagaaaaagcaaaatgcaaatggtaggttatgtgtttgagtactcagaaaaatggatagatgtcagaaagatattgcagtgattaattttatgtgtcaacttcactgggtcatagggtgcccagatatttgtcaagcattattctggtaataatatcgtgtgtcttgacgttgattcttccgc

SEQ ID NO: 171905 - DNA, 831 bp, Homo Sapiens
cgtgaccaacaactcaatgagctctgattactctaaaagaactcatgtcactgactcatatgccttccagcactttaccctaaggagtccatagcattttctggctgctcgagaatagtgaggttgctgaatgtgttggtgtacgacgtatcggagaccgatacgtcatcctggtcataatctattgccaggaaccatagatgcttccagagtacggccctcttgtgtgctctagaactccccgttgcctgtgagggtgagattagagactctggcccacgagctctaggaaaagggacaaagaggcctaactgagtagagcataagttagtgcctttaaggtagtatactgaaacaaatttaaaaataggagattcaaacaaaattattactcaagtcttgggcaaagatactggggataattttttacaataagacagacatcatttacaaaaagtttctgaaacaaaaaagttctgtcctgactatatctaggctactgtatccttctcttctttatcataatgacatgtagaaattgaatgagtattttcttttactttgatattcccactaatttctgaaaattttaaactcttgccctaggaattcaactcctgcagaaaactcacatactcctggctgacactgaacaattcagggttattctttcttagtcccactgctgtattcttcatgctagtactttatgagatagcctgtgtccctggtcgcggcagtgcctgtcatgtggctcaagacggcttactgctaaatacatcagagcagctcacagacgttgccatatcacatgatgctcctagttacatg

SEQ ID NO: 171906 - DNA, 572 bp, Homo Sapiens
cgtcaatctgcagaattatttgtaattagtaatacaaaatctggccaaaaggagacttgtaaatagcgtaaagtggtgtcttatgctaaacggtggaatgtataggcagagaagctctttgaagttgtcagatgagctgggctcacaagcctgattcaaacaggctgtcggtctcctctcaccccttaatactgtgcagcccaaactcctaggactcttgaacatctgagcagttttgtgctttgagccactttttgacaaaaatggctccatttttccacagcgtggttttcttaaaatagtttaatgttttatagtctcatagtagtagtgttgctttctaagctataacagtcgactttattcttctactctgaaaaatcttgacttgtttgagtgtatataatatatataaagggagccttaatggattggttttcataatttaatatttttttgtatttgctcttgtataattgtttttaacggaaagtattaaagaattgagggtggaattcttagaaccaaagttattcttaataaaaatcaccacatgcttggaccatgaaaaa

SEQ ID NO: 171907 - DNA, 665 bp, Homo Sapiens
acacgcaaaagagtattaacaattccagtaatataatcgtgacattgcctgatagtctcaaaaatcttcgcttagtgactcttttataacagttttaactgcttcagatatcccttccctttgcttttttatgccactgatttattggagaaaccaggtcatttgtcctgtataatgttccacattctggatttgactgatggctctcttgtgctggtgtttaacttgatcctatatccccactattcccgtgcaaactggtagttagaaccgaaggcttgattcaattcaggtcgaatcttttctttcttcctcttttttttggtaagaatcctttatagttgatgttgtggtattgcatcatgtcatgagaaacatagtgtctggtcatcctcattgagtgatactgagatgaatatgtggattctgttggtacactgttactctgtgggtatagaagggcccattatagtcatttaaaacttttgaagatgcttaagaatctcagaaaagattctaacttagcaggtgtaagggaagaaacatctattattaataaaacatgcaacacatacaaaaacccccaaaactctctacaattactcagatgtggtaagactcactacatttaacatgtacttcgagtgacacaaattactcttcta

SEQ ID NO: 171908 - DNA, 409 bp, Homo Sapiens
aatttgcccaatctttgatgacattgaaaacgttttggggcatacacactcaaaaagcaggatccaatacccaaaagaaatggaacttaatgttgtgccaaagttaaactactgcagttggtggaagttctgcaatgtaaatagaacactaattaaaaaacaacttgtaaaaatgcaatttaaattttaatacagtacatttttcttctaatatgatggagacattctgaatcttagactttctgagggggtttaatgaccactagagcttgtcctcatattcagtccagtttaatactgtatgtctagtaagatgggctatatattgcctctattctttgagatgtgattaagcttagaactttgaccaaaaattttacagtaaaaattgttagaaatgggtaaaaaa

SEQ ID NO: 171909 - DNA, 511 bp, Homo Sapiens
ccggacagaatacactcaaacatcagcgtaagtaaacctgactggttcgggggatctcttggtcttgctgcatttcttgccctttttcaggctgctgtacactggctgtccacaaggccgcacctcacaaatccgggtttctttcacaaggcggcactcagggttgtcattggtaactcgtgtggagataccagttccacagctctttgagcactgggaccatgaagttgtttgaacaatacatttctggccttgtaaagggtcgtataggatgcgaggctccattccaaaaacagggagccgcttcagtgagctgccttttccaactgcaatcaattcattgtttctcgtcaactccacctcggaggcatcgaatcccagctccttgccaaggagtccgtcctggtcctccatggggtccgtgatactatcctcgtcacagacccactcctcgcagcactgaccgataactttgaccagacgagggttgggacagcccaagttggggaga

SEQ ID NO: 171910 - DNA, 622 bp, Homo Sapiens
atccacatacggctattgaagaaatacacattcttagtgtctataaactaagttctgcaactacaacatttgtttgtgtagatggtattagatcagtaaggttttaaacaatgagatttagggtgcatcgagtagaataatgcacctctccaaagataacgtgcattttaaaagtgaagcaaatgtcttggccagacaaacacaggcagtgttgtacaactcagtttgattacaaatcacaaatatagttaatccttagacctgcagacggttaaagagaatggctctagaagtcagtaaactctcatcagaattactttgcaggacaatgtagtgtttacagtgagcctcattatcttccactaaattgggcacaaattactgttccacagtgtagttcaagagctggaacattaagtttcttaaaaaggatttagataacaggttcaggcattttaatatccagtcctagaatttcagagggtctcttctgggactattggtttaaaggaagatgctgtggacagtggattataaagaccaaatgaaggtagaagtaattttattcaagaaaatacgaaaagtgatacataagaaagtatgtatcagtaatatttatcat

SEQ ID NO: 171911 - DNA, 1000 bp, Homo Sapiens
  misc_feature (782)..(782): n is a, c, g, or t
ggggctcctgtcttgtctcagcggctgccaacagatcatgagccatcagctcctctggggccagctataggacaacagaactctcaccaaaggaccagacacagtgagcaccatgggacagtgtcggtcagccaacgcagaggatgctcaggaattcagtgatgtggagagggccattgagaccctcatcaagaactttcaccagtactccgtggagggtgggaaggagacgctgaccccttctgagctacgggacctggtcacccagcagctgccccatctcatgccgagcaactgtggcctggaagagaaaattgccaacctgggcagctgcaatgactctaaactggagttcaggagtttctgggagctgattggagaagcggccaagagtgtgaagctggagaggcctgtccgggggcactgagaactccctctggaattcttggggggtgttggggagagactgtgggcctggaaataaaacttgtctcctctaccaccaccctgtaccctagcctgcacctgtcctcatctctgcaaagttcagcttccttccccaggtctctgtgcactctgtcttggatgctctggggagctcatgggtggaggagtctccaccagagggaggctcaggggactggttgggccagggatgaatatttgagggataaaaattgtgtaagagccaaagaattggtagtaagggggagaacagagaggagctgggctatgggaaatgatttgaataatggagctgggaatatggctggatatctggntactaaaaaagggtctttaagaacctacttcctaatctcttccccaatccaaaccatagctgtctgtccagtgctctcttcctgcctccagctctgccccaggctcctcctagactctgtccctgggctagggcaggggaggagggagagcagggttgggggagaggctgaggagagtgtgacatgtggggagaggaccagctggtgctagggcattg

SEQ ID NO: 171912 - DNA, 762 bp, Homo Sapiens
gcagaatcacactcaaaagcaagcattctcttcccagtgcctatggacagtgcggcggtcgaggtccgctccggtcccctcggaggagagcccactcccctgagagacggagggaagagaggagtgtgcccactgcctaccgcgtgagccgcagccctggggccagcaggaagcggacccgctccagaagtccccacgagaagaagaagaagaggcggtcccggtcgcggaccaagtccaaggccaggtctcagtcggtgtcaccccagcaaggcaggccagcgcccccgcccccggcccccgcggcccactcggcgcactcagccagcgtctcccctgtggagagtcggggctccagccaggagcgctccaggggagtctctcaggaaaaagaagcccagatctcttcagcaatcgtttcttccgtgcagagcaaaatcactcaggatctcatggccaaagtcagagcgatgcttgcagcttccaaaaacctgcaaaccagcgcttcctgagacggggccagcggaggcagagccgggaaggctgcgtgggcttctgggcagcgtcacgcagacgccggccacaccatccacctggccgcctccatggacccttggtggcttttgtaaattaatttttgatgacattttgagttttaagatttctgaccagcagtctcttacctgtatatttgtaaatatatcatgtttctgtgaaaatgtattatgaaataaaatgggaggaaacaccttttctagctag

SEQ ID NO: 171913 - DNA, 1219 bp, Homo Sapiens
  misc_feature (1127)..(1132): n is a, c, g, or t
  misc_feature (1134)..(1135): n is a, c, g, or t
  misc_feature (1137)..(1137): n is a, c, g, or t
  misc_feature (1140)..(1140): n is a, c, g, or t
  misc_feature (1145)..(1145): n is a, c, g, or t
  misc_feature (1153)..(1154): n is a, c, g, or t
gaaaggatggaaagaaagattgctgttttgaaatctctgctcctgataaacgtatgtatcagtttacagcagcttctcccaaagatgctgaagaatgggtacagcagctgaaatttgtattgcaagatatggaatctgatattattcctgaggattatgatgagagaggagaattatatgacgatgttgatcatcctctaccaataagcaatccactaacaagcagtcaaccaatagatgatgaaatttatgaagaacttccagaagaagaagaggacagtgctccagtgaaagtggaagaacaaaggaagatgagtcaggatagtgtccatcacacctcaggggataagagcactgattatgctaatttttaccagggattgtgggattgtactggagctttttctgatgagttgtcatttaagcgtggtgatgtgatttacattcttagcaatggaatacacatagatatgcctggtgggtaggagaaatgaagggagccattggcttagtacctaaagcctacataatggagatgtatgatatttgagagtcctggaaaaggaaaattcttctgcttgtctgcaaatgctttggatttagaagcgtcatgaaagcacgagtgacagctcctaacctctccttgttttattaaacattacttatctttgactgttattttatgcagtcgctcattaaaatattcctctgatgtgaaattaaatgaaggatattaatgtaaattagatgcaaccagttaagttatacctgttgctattttgcaaagaaataattatagtttttatttacccatttgatttgtgtgaagaattcatcactattttatacgtaacatatagtctactatagcatagtatgctactattgctacttctggtgtgatttgtaatgtttcttaatcattggacatcaattatttttagagagtaatgtataatttcatagcattttaaatttagtgtatcatgcgagttttttttggtagatgctgaagaatgtggttgctaaacaaagaatgctaaagaatgttcaaactttatagataacctttattggtattatttattttcccacaatttaaattcctattaagtacagccgccaannnnnngnnanaangacgnaaaaaaannaacatgtcggcccgccttcggcccctccaaaagtctttcctaaaacctttccttttggccccgcg

SEQ ID NO: 171914 - DNA, 747 bp, Homo Sapiens
ttagagtccccgcagattacactcaatgcttatttgggcagataaatagcttcactctctcgtgaagaaccccaggacatctattggttggctcagtgtctttacctgacagcacaatatcacagagccgcccatgcacttcggtcacgaaaactggacaaattgtatgaagcatgtcgttaccttgcagctaggtgccattatgctgcaaaagagcaccagcaggcccttgatgttcttgacatggaagagcccatcaataaaagattatttgaaaaatacttgaaggacgaaagtggcttcaaagatccttccagcgactgggaaatgtcacagtcttcaataaagagttctatctgtcttctacgcgggaaaatctatgatgctctagataaccgaaccctggctacctacagctacaaagaagctttgaagcttgatgtctactgttttgaagcgttcgatcttttaacatcacatcacatgctgacagcacaagaaggtttggaaactcaggcttttttgttttatgtttagcaaaattaatattgtttggatttcttgcctctgaaatcttctaagtcaacaacaggccacatacaggtataaatagacctacgtcacatttcttaatgtcttcaaatgtaaagcacggtgcagaatgcagtacttgtacagtgccttgtgctgtccgaatctagggactgtgataggaagagccatctatttgagtgtgattctgccgcg

SEQ ID NO: 171915 - DNA, 738 bp, Homo Sapiens
ggggtgctcgggttaggaggagctaggctgccatcgggccggtgcagatacggggttgctcttttgctcataagaggggcttcgctggcagtctgaacggcaagcttgagtcaggacccttaattaagatcctcaattggctggagggcagatctcgcgagtagggcaacgcggtaaaaatattgcttcggtgggtgacgcggtacagctgcccaagggcgttcgtaacgggaatgccgaagcgtgggaaaaagggagcggtggcggaagacggggatgagctcaggacagagccagaggccaagaagagtaagacggccgcaaagaaaaatgacaaagaggcagcaggagagggcccagccctgtatgaggaccccccagatcagaaaacctcacccagtggcaaacctgccacactcaagatctgctcttggaatgtggatgggcttcgagcctggattaagaagaaaggattagattgggtaaaggaagaagccccagatatactgtgccttcaagagaccaaatgttcagagaacaaactaccagctgaacttcaggagctgcctggactctctcatcaatactggtcagctccttcggacaaggaagggtacagtggcgtggggcctgcttttcccgccagtgccccactcaaagtttctttacgggcatagggcggatgagggagccatgatccaggaagggccgggggggattgttggcctggaaatttga

SEQ ID NO: 171916 - DNA, 1469 bp, Homo Sapiens
  misc_feature (72)..(94): n is a, c, g, or t
  misc_feature (140)..(150): n is a, c, g, or t
  misc_feature (166)..(247): n is a, c, g, or t
  misc_feature (371)..(385): n is a, c, g, or t
  misc_feature (394)..(400): n is a, c, g, or t
  misc_feature (403)..(536): n is a, c, g, or t
  misc_feature (607)..(607): n is a, c, g, or t
  misc_feature (610)..(637): n is a, c, g, or t
ccccacaggcgccccaaaagggggtttattcccccggggcgggtttcggggtttccacactccccggctgtnnnnnnnnnnnnnnnnnnnnnnnaaaaggttgtaaaagatttcaccccatttcttcaaaaagagcacannnnnnnnnnnaaatataaataggggnnnnnnnnnnnnnnnnnnnnnnnnnnnnnnnnnnnnnnnnnnnnnnnnnnnnnnnnnnnnnnnnnnnnnnnnnnnnnnnnnngggggtttttttgtgggggaatcccacccctttttcttcccccgttttctttgggaaaacctttaccccagtttcttttcctttgggggccccggccccaaagaaaaggtttaaaaattttttnnnnnnnnnnnnnnncgcaaaaannnnnnnttnnnnnnnnnnnnnnnnnnnnnnnnnnnnnnnnnnnnnnnnnnnnnnnnnnnnnnnnnnnnnnnnnnnnnnnnnnnnnnnnnnnnnnnnnnnnnnnnnnnnnnnnnnnnnnnnnnnnnnnnnnnnnnnnnnnnnngaaactatggctctttattttcatgtggataattcaaacaaagtcattagtagtctttgttcaattttttnttnnnnnnnnnnnnnnnnnnnnnnnnnnnntcttgggcttaaaagaactctatcacaggagcctggttggaggattcctagttttatacatgagaaatagaatgcagatttctctgaagagtgtttaaagaaggaatggtagttgagggggcttatttcccaggctcaaagtgatttaggggtggtgtcacagtgctaggtatagggtgataggacagtgatcactgccgagggccttggaacggatcttgctgtcacacaatgcaggtaacagagagtgggacaacaaaaagtaatcaaggcgccaaccaacattcttggatcgagcattcatcatataagtccaaaaggtgtaggcatagggtgtgttggggtagaggtgcctaaagctgtcagccagtggcacagcctgcagtaattccccgaagccttggcgctcttgtggcgtgaagccagcattctttttgttccccttggggttgcgaaggtcaatttcttcatgtgccacattgaggtctccacacagcacaaggggctttcgggaagccaggcccttcaggaacttgcgaaaggcttcatcccagcgctgccggtactccagtcgtaccagacctcggcctgcattaggtacatatgctgttaccagcacaaacgagtcaaattcagccacaatcacccggccttcctgatcatgctcctcatcgcctatgccgtaagaaactttgagtgggcactggcgggaaagcaggcccacaccactgtacccttccttgtccgaaggagctgaccagtattgatgagagagtccaggcagctcctgaagttcagctggtagtttgttctctgaacatttggtctcttg

SEQ ID NO: 171917 - DNA, 976 bp, Homo Sapiens
  misc_feature (837)..(837): n is a, c, g, or t
tgacatatgaacagtgggtgaaaaagcaggctggtacggtccggaattcccgggatatcgccacgtgggggctcagcgtgcacccttctttgtgctcgggttaggaggagctaggctgccatcgggccggtgcagatacggggttgctcttttgctcataagaggggcttcgctggcagtctgaacggcaagcttgagcaacgcggtaaaaatattgcttcggtgggtgacgcggtacagctgcccaagggcgttcgtaacgggaatgccgaagcgtgggaaaaagggagcggtggcggaagacggggatgagctcaggacagagccagaggccaagaagagtaagacggccgcaaagaaaaatgacaaagaggcagcaggagagggcccagccctgtatgaggaccccccagatcagaaaacctcacccagtggcaaacctgccacactcaagatctgctcttggaatgtggatgggcttcgagcctggattaagaagaaaggattagattgggtaaagggaagaagccccagatatactgtgccttcaagagaccaaatgttcagagaacaaactaccagctgaacttcaggagctgcctggactctctcatcaatactggtcagctccttcggacaaggaagggtacagtggcgtgggcctgctttcccgccagtgcccactcaaagtttcttaccgcttagggcgaggaggagcatgatcaggaaagcccgggggattgggggtgaaatttgactcgtttggggctgggaaacagcatatggtaccttatagccaggcgccaaggcctgggaaccaactggaagtaacccggnacccgctgtgggattgaaacccctttccgcacaagttccctcgaaaagggggcctcgtggtttccccgcaaaaggcgcccccctttggtgccttgggggggagaaaaaaccctcccaattggtgggggccccccctttg

SEQ ID NO: 171918 - DNA, 1280 bp, Homo Sapiens
  misc_feature (1016)..(1016): n is a, c, g, or t
ggtagcggtccggaatcccgggatatcgtcgaccacgcgtccggcaacgcggtaaaaatattgcttcggtgggtgacgcggtacagctgcccaagggcgttcgtaacgggaatgccgaagcgtgggaaaaagggagcggtggcggaagacggggatgagctcaggacagagccagaggccaagaagagtaagacggccgcaaagaaaaatgacaaagaggcagcaggagagggcccagccctgtatgaggaccccccagatcagaaaacctcacccagtggcaaacctgccacactcaagatctgctcttggaatgtggatgggcttcgagcctggattaagaagaaaggattagattgggtaaaggaagaagccccagatatactgtgccttcaagagaccaaatgttcagagaacaaactaccagctgaacttcaggagctgcctggactctctcatcaatactggtcagctccttcggacaaggaagggtacagtggcgtgggcctgctttcccgccagtgcccactcaaagtttcttacggcataggcgatgaggagcatgatcaggaaggccgggtgattgtggctgaatttgactcgtttgtgctggtaacagcatatgtacctaatgcaggccgaggtctggtacgactggagtaccggcagcgctgggatgaagcctttcgcaagttcctgaagggcctggcttcccgaaagccccttgtgctgtgtggagacctcaatgtggcacatgaagaaattgaccttcgcaagcccaaggggaacaaaaagaatgctggcttcacgccacaagagcgccaaggcttcggggaattactgcaggctgtgccactggctgacagctttaggcacctctaccccaacacaccctatgcctacacctttggacttatatgatgaatgctcgatccaagaatgtaggttggcgccttgattacttttggtgtcccactctctgttacctgcattgtgtgacaagcaagatccgttcncaggcctcggcagtgatcactgtcctatcaccctatacctagcactgtgacaccaccctaaatcactttgagcctgggaaataagcccccctcaaataccattcctttctgttaagacttctttcagagaactctgcattctattactcatggtataaaacctagggaatccttccaaccaaggctcctgtggaaaagagttcatattaaagcccaagagatttattagagggtaacggtttaaagaaaatggacaagacctac

SEQ ID NO: 171919 - DNA, 456 bp, Homo Sapiens
gattaacggatataatctgaatgcatccatagcacctagtgaaggctcaccatatggtcagaatactcgatgcacacggatacaactctctacatccatctctgtgttagggacaaatgttactttactcttgcacagaacttggacagtcacttttaatatctgtcttttctttttctattttcattactgataccctctgccccttctttctgactaaaactctcattcaataaaattatagtcaaatcttgcaattggaaaagtattcagacttttaaagttatatttatatatctaaatgttgctccattagggttttaattctaaatttaacctttaaaaagttatcatattttctttatttccaggttcctaggagaatgttaacagtccagacctttttcactacatcaaccacggatgattggcatataaaatcctacttaacctttg

SEQ ID NO: 171920 - DNA, 437 bp, Homo Sapiens
atcctaggcttaaatgcaatattcctggtattatttacaatgcagaattttttgagtaattctagctttcaaaaattagtgaagttcttttactgtaattggtgacaatgtcacataatgaatgctattgaaaaggttaacagatacagctcggagttgtgagcactctactgcaagacttaaatagttcagtataaattgtcgtttttttcttgtgctgactaactataagcatgatcttgttaatgcatttttgatgggaagaaaaggtacatgtttacaaagaggttttatgaaaagaataaaaattgacttcttgcttgtacatataggagcaatactattatattatgtagtccgttaacactacttaaaagtttagggttttctcttggttgtagagtggcccagaattgcattctgaatgaataaaggtt

SEQ ID NO: 171921 - DNA, 378 bp, Homo Sapiens
  misc_feature (164)..(206): n is a, c, g, or t
tagaggagtccccccttgccacgcgtcgggtgtagtggggcagtagtatactcacttataaaaaggacaagagagcgttgaaaagagtactgcactgagcgtagtgtgtatgtctctacactacaacccgggcaagtgagtgagaccctgtctcgtatagtatnnnnnnnnnnnnnnnnnnnnnnnnnnnnnnnnnnnnnnnnnnntatatatgtatatatatgcatttagatgaaaagatcactttgacaataccacatgctggtgaggatttagaaaaactaggtcacttattgctggtgggaatataatatagtacgccatctctggatacagtttggcagtttgtcatacactgacatattatgcgtggactgt

SEQ ID NO: 171922 - DNA, 662 bp, Homo Sapiens
  misc_feature (137)..(246): n is a, c, g, or t
  misc_feature (336)..(562): n is a, c, g, or t
gcaaaatgttgccatcagtcagtatgagacagtacgaatcacaaagtgagaccctgtctctagatagtgactgtctatcaactgggaaccagtcgtgagatacgtagtttttgtggtattttgttatatttgtgggnnnnnnnnnnnnnnnnnnnnnnnnnnnnnnnnnnnnnnnnnnnnnnnnnnnnnnnnnnnnnnnnnnnnnnnnnnnnnnnnnnnnnnnnnnnnnnnnnnnnnnnnnnnnnntgacaaccttatcccctcactcactaggaaaataaaagccataagaagggagtttccacaaattcccagcacatcatctacccacctacnnnnnnnnnnnnnnnnnnnnnnnnnnnnnnnnnnnnnnnnnnnnnnnnnnnnnnnnnnnnnnnnnnnnnnnnnnnnnnnnnnnnnnnnnnnnnnnnnnnnnnnnnnnnnnnnnnnnnnnnnnnnnnnnnnnnnnnnnnnnnnnnnnnnnnnnnnnnnnnnnnnnnnnnnnnnnnnnnnnnnnnnnnnnnnnnnnnnnnnnnnnnnnnnnnnnnnnnnnnnnnnnnnnaaacacacaacacacgacaaaaacaggtgcacattccctataactaaacaatgtaatcaatacacacacccacagaaaacctgtcccaccaacataccac

SEQ ID NO: 171923 - DNA, 585 bp, Homo Sapiens
ctggtatgtgaagcagtacgccatgattggcctactaggaatccattcaggaatagtgcctgggataggcctgttatctacttgctgcatctctttaaatccatctcttctttcagctgagtaaaagaaatcagttaataaaagacaaggacctgtaacacacccatgcagtgactgtggggaatttgaggaaagactaggaattgggatcacttggcctagggaaaagaaccattgttcagacaggatcatctgccctctgaagggctactaaatggaggatggggccagcttgttctctatctccattgaagaccaaataagaagaattgcatttatgctgcagaatgaggggctgggctaagcaataattacctcaggaatttgaaaaggtcaacagagaggtgtgctatcttcttctgcacaggtctttatggacagattagacatccacctgcctgtatggaggcagaagaatagacaagggagctccttgtgggtatgaaaccctgaaaggctgtaatcccagcaatgggcaaaggggtaaggcatctgcaggttaacgggattcagctgaacccagct

SEQ ID NO: 171924 - DNA, 665 bp, Homo Sapiens
  misc_feature (441)..(489): n is a, c, g, or t
  misc_feature (491)..(598): n is a, c, g, or t
gtggccttgtcaaagactggaagaggaagagccatacttcttattgtgtctgttttgacagagtagaagatccttcaccaaagtccctaacaacccacttttggtgtcattggttcctacctggtgattcctttagatggggggatggaattgtcacaattggctaaaacaaatcaacattcactctgggccaaggtggggtcagcttccgtaggcacataatcacaccagggctctgccactgagacaggcaaggggagagtgagggaactgatggacaccaacaatgactggcacagctttatggctactttcaattctttatgcaacaaagacatttcatgagactcacaaattataccaaaggaattcatttttgtgtaaatgactgtaatttcaacgtcaagtaaaagtcttaagactatgataatactacattgnnnnnnnnnnnnnnnnnnnnnnnnnnnnnnnnnnnnnnnnnnnnnnnnngnnnnnnnnnnnnnnnnnnnnnnnnnnnnnnnnnnnnnnnnnnnnnnnnnnnnnnnnnnnnnnnnnnnnnnnnnnnnnnnnnnnnnnnnnnnnnnnnnnnnnnnnnnnnagcttaatcactctaagcctcagttccacatctttaaataggggaaaaagttctcctttagggatgt

SEQ ID NO: 171925 - DNA, 224 bp, Homo Sapiens
ggaggtggagagaaggaaggaggagaagagaaacaaggagagactgggcaaaggagacaggacggcagagggagaggggagagaagcgggaggcagccagcagtgcagagaccccagagcacgggagaccagtggcagacaaggacagaaggtagagggagagccagtgtcgggaccaaatggttagagctggagatgacataccgagcgtgcactgtccgctc

SEQ ID NO: 171926 - DNA, 651 bp, Homo Sapiens
actgcacgccggtatgtacaacacgagacagttctctccctatgctgcaactactaatctaacttactgtctctatggacttgcctattctggtcctttcttataaatggaacgacgcaacatgcagcccatgttttctggctgctttcactgagcataatattttcaagattcacccatgttgtaacacatatcagtgcttcattcctttttatggctgaataatactccattgcatggacagaccatatttgtcttatctgttcatcactgacagacatttgggtttgttccattttttggctgtcatgaataatgctgtcagcatgtatgtatgtacgcggtttccttagtttttatctaatgtcattttcctgttccaggatccccttcaagataccacattatgtttagctgtcatgtttctaggctcccttggctgtgacatttctcaggttttcattgtttttactgaccttgacagttttgagttctggtcaagtatttcatgaaaactccctcaattatggtttatctgatgttttcctcatgattaagctgggttatgtatttctgggaggaagaccagagaggtaaagtgccaccgtcatcacatcatgtcaggagtactaaccgagcgtgtaatgggga

SEQ ID NO: 171927 - DNA, 275 bp, Homo Sapiens
atgacagcacgggatgtgtggacacataagcacaatatgaacatattgtcctatagtagaaagcagagaacagagaactcctccaatttatctttgtatcaatgtggttctataaaaaataccagatggtttaaacttaattatttcatggagggattaataaagggactaattttaaagatatgaggagtatatatatagaaaacacaatatacactggagcttctcttggggacataaccgatgcgtggcgcgatcctcatagagttcgacct

SEQ ID NO: 171928 - DNA, 853 bp, Homo Sapiens
ggtattttccccctcaggctcctgggtctgctgctgcctcaaggtgtcctgaccttgaggctgatgaggggacccctgcctgtttcccccatactgagttctagggaggtgctcaccccagactcttaggaagggtctagagaaatgagaggagcccaagccaggggccagctccgagaaagggtaacctccacgcttctctctcccaaattggaaatgaagacaggttttcaaaggcacaggctccccctgccagcttctaggatcttccttggtgtgcaatgggccagttaggggtaggcagcttgcacccagttctcctttatctcaacttattttcctggggagaggtgcctagagggattgaggtaacttcaactgggaattccaaggaaggtgggcaagtagccttggctctctcccaccatgtccatcaggattgagagtgtgtctagctcccgaccactttgtcttgacctactgaaaagttgggaactgaggggtgccttcattcccctttgttcactttctccagctcaacttgggacttgggtggtgggactggagacctcacccctgctcccgtcccgccccctttctatcccaacctgtttccatgtagcagacccttcctagggagcagggaggggaagccacagattgcaaacccaggggctcctttttcattctttctaaaaccttgatatcctcagcccaaaggcgatgcccccctgccacctccaagcctggaattgtgcataacccggatcttgtatctttgtataacggatgttatttgtacgaagggcagttcgtaaacagcacttgttcttttaataaaagaatgttttgc

SEQ ID NO: 171929 - DNA, 599 bp, Homo Sapiens
acatacacgagggactgtgtacttcctgcagatcatggagatcatggaagcctcccagggaggcacatctcggtagtgacgtgagtgaggaacgcagctggtgctgcccatgccagggaggccaagctgagccaaggacacagaatatggtatgtactgaggacagggccacagccaaccagccaggcgggaaagacgcaggtggtacgggacgacgtggcagacaacggacagaagaggggtgcacagcacctggcacaatgggacacctttgtaaaagacagagcaagaaacttgacttttcctggagatgggatggacacgcctatggcgagcttcaaccaggacaatgatatcctctgatatccacttcaaaagctgactctgacactctgtgacaaatagatggcacaggggaaggagtggaggcagcgcaggccaagtggctggtgaagacttgcatatgagagtcaggtggacacgaggaacatggctgtgtataggatgatagcacctgtggagggactggagtagaagatgtcacctgaagaatcacaggattcaaaatttggaaagaactttatatctcatgaagggtc

SEQ ID NO: 171930 - DNA, 300 bp, Homo Sapiens
tagtaatcgtgttaccactaatgttcgtgtatagccgcttaaggtttactcttttccttacttgaaacatgtagatgggtgctgtgtgtgctcctgtttccttgttcttatatgggagccctgtactaggcttgagtttagtctgggaagcctaatctctcagacgttacttttacattcaaccttatatacacctcccttgtattttctgacatttgaaaatacaccaaagagttggagggaagaaactgaaactcattgacacggagcggggtaagttgtggaaaggagacatactca

SEQ ID NO: 171931 - DNA, 380 bp, Homo Sapiens
ggtgcaaaagcctggctccacgcaaggtagaaggtgaaacagctgcaaggaggaagggccgtgtagccttcgctcagcagagacgaagaaagggtggctgtcctcagctgcagctacttacaaaaagctggtcacttcaggcactccacagaccaaccagccaagaggctaagcccagcagaggtggaaagtgtgcaggggctcccgcctcctgggctgcgcctttgatctgtgcctggggatggaagaggatgcgtggggcgcgtaatgccctgctgtgcagagccaggctcgggtctgcctgacacccaggcttctggcccctgcccggcagggagaggcagccaagccagccaggggaaaagtttcagagctagtat

SEQ ID NO: 171932 - DNA, 295 bp, Homo Sapiens
gaagaaggtgttggaaagaaggtgttgggaaggatgttggggaaggaggtgttgggaaggaggtgtttgggaaggaggtgtatggaaagcctgatcagctatcacatctcccttgggaatcttgccttcttgcagtgagtatttgcaactgtatgtcccttaacaaagaaggaattgtgtggaccacatcctcacagaacacagcatgtattacatgaaggactggcccaatctgtgtctgtggtgtttgggacaatagctgagataataaggccttccaattcctccaggttct

SEQ ID NO: 171933 - DNA, 550 bp, Homo Sapiens
  misc_feature (257)..(267): n is a, c, g, or t
acagatggagaatcagaagggcttgaattccatttctcttccggattcctactcttgacatcatagttggtgtgtgcacatcacaatgtttgtgctattcatgcacatctgattctccatctgtcctatatgcgctggcagttttgatcatattacgcctggtcaaggccttcggtgatacctcatcactcttgtctcctcgacctggattttaaggttatttcaactataatggaacctaaccttttccagctttnnnnnnnnnnnaaaacaagctgtcacctgcatacgccagctgaacaacttcctgttcttccaattataatacaagtgaggttttgcagacagggcagggcagcaggagcaaaatcacaaggaaaggtcaagattatatatggcagatgaggataaagtttcaggtgagagtgaaaaaagatgaaggtcagcctggaatcttgggtattctagaagagaaggggactactgaagaattcttcagcaagagatgtatgtgatggatcagatttagatttacattttaggtagatca

SEQ ID NO: 171934 - DNA, 380 bp, Homo Sapiens
cggcatcatgattggtctaacagtggatcttggcctaatgtgatgcatcctgaactattgggtcatcactgagtgtgttgttccagagggaagagctggtgatttcttagaagtatttggaaaccgtaagtttttttccttgtaatttggtcttgatgaagttttaactaattagtcagggaacagtggaagcttgcaaggatctaatagaaacttgtcctattccagaagtgatagatgttgtcattatgttgatttgggttaataagtaagatttagaagtaactctacactatgatttatcttggaggcaaagttagcattctagccagttttaactggagttttgaaatcaatggtcaatttaagagctcttttcc

SEQ ID NO: 171935 - DNA, 470 bp, Homo Sapiens
ctctgtgggctccatgtagaagccactattactgggactgtgctcagagacccctctcccagctattcctactctctccccgactccgagagcatgcttaatcttgcttctgcttctcatttctgtagcctgatcagcgccgcaccagccgggaagagggtgattgctggggctcgtgccctgcatccctctcctcccagggcctgccccacagctcgggccctctgtgagatccgtctttggcctcctccagaatggagctggccctctcctggggatgtgtaatggtccccctgcttacccgcaaaagacaagtctttacagaatcaaatgcaattttaaatctgagagctcgctttgagtgactgggttttgtgattgcctctgaagcctatgtatgccatggaggcactaacaaactctgaggtttccgaaatcagaagcgaaaaaatcagtgaataaacccatca

SEQ ID NO: 171936 - DNA, 602 bp, Homo Sapiens
  misc_feature (40)..(40): n is a, c, g, or t
  misc_feature (47)..(47): n is a, c, g, or t
tgcttaaatcaaccagggttatgttatggcggctggcctnttggctnggcccattctggttgggaaaggtacccggcaggggcacagttcccattgccttacaaaaggtggggaaaaaatcttcctggggcaactggtctcacagagcagaccttagctgcacctgtatggtataatcacatttggctcctgcagaacctctctggatgtaagaatctgctgcacttgctggggtgtgagggcaaaggtaaagtgcgcttcctcaaaccgctggctagaagtggatgctgaggatacaaaggggcagttattccaagcccatgcacaggcagccacagaaatcgcccccatcccaggtcactgatcccataggactaaagcctaagaaatgtttggggaacaggtagggagtccagaagactaagggaccacaaagagccataccaagggtggtgggccggatgagctccccatagacttcatagaagggcaatggtttcatggtgacatcagggtgcacaggctggggcagaggggggtgcatgtccacctcacgcttggggcccagcagggtgccaggggccaacagcgttgggggaatg

SEQ ID NO: 171937 - DNA, 580 bp, Homo Sapiens
  misc_feature (527)..(527): n is a, c, g, or t
ctgggctacacaccatcctggagttgcgaggggacagcacagccttcttgtgataaccattccagcacacggtgggaagtaccccagtgactgtgaggatcgcccctcctgacagaagattttcgcgttctgcgataccagagcagataatcagctcaacactgtcctcaccatcaagtaacgccccagacccatgtgcaaaggagactgtactgagtgccctcaaagagaagaagaagaaaaggacagtggaggaagaagaccaaatattccttgatggccaggaaaataaaagaagctgtcttgtcgacggtctcactgatgcctcttctgcattcaaagttcctcgacccgggccagatacactccagttcacagtggatgtcttccactttgctaatgactccagaaacatgatatacatcacctgccacctggaaggtcaccctagcttgagcagggacccaggtggaactcaacaagggcctgtttccttcaggcaaggcctttccaacagctggtttccngtgggaagggcccggctggacatctgttcaattgttgttaacaaaggtggatt

SEQ ID NO: 171938 - DNA, 570 bp, Homo Sapiens
  misc_feature (199)..(244): n is a, c, g, or t
catgtgcgagtggattctgggtctcccctccttctcctcagttgagactgaagctcaacttgagctcagggaagcaggctgtcttcccaagagaggctgaggcttttcttgctactttgacaaggacagactagctttattcattcgttcactcaacaaacattgattatatgcctattttgtgccaggcacagtgggnnnnnnnnnnnnnnnnnnnnnnnnnnnnnnnnnnnnnnnnnnnnnnaaatgaacttgttcccagcaacttttccaaattcgtttattcattctaatagtagaatctcttggattttctactatgtaatcatgtcatctgcaaataaagatggttttatttctttttaatctttatctttctcccatattacacttgtttaaacctccactacgatgttgaatagaaatgttgatattgaatattcttgttttcttctcaaccctaggaggaagggtctattatttcactatgaagtataatgaccataagcaaaaatttatcaaaactgaagcagagagagaaaccgtcgaatcgagggtaccgagccgaat

SEQ ID NO: 171939 - DNA, 447 bp, Homo Sapiens
ctagaaatggtccgctatatattcaacgtctcgacaggactgtagcattcgcccaattacattggctgagttgagggagagataagttagtaattctggtgacaaaactgtccagcaaacgcaaacgctatacacaatcttactctcttcgttcagctatgtacaaaccttaataaagatagtaaatgttagatctaaaactcttgcaactagcaatagtcgtctacctaaggacaggcttttgtttggtcggtgacagttgaacgtctccgttcagaacagatcccacgaacctttcagcttcttccagagtcaaccttgtcgtcgtacaccgcgaacctcccccggcgaagcttgtaggcgatgagcaacctgtcaaatgacttatatggagacttatcaaatgatgacaggaatgcagattgtttggccttatccaacaaagcc

SEQ ID NO: 171940 - DNA, 676 bp, Homo Sapiens
  misc_feature (652)..(652): n is a, c, g, or t
caatcaagaaactgtctacaaatctctgacagtaataaattgcaatatacaatgcatacaggagtcatacagagcaacaaactctcgtacaaaacaaaaatattttaatacctttaaaatccaaatttttctttaaaatcattcatgaaaaagattctcaagtcagaattaacacctcaattagtcaagcatcaggaagctacattacagctattaatatacaaagatacatcttttcaccagtctttccttctgatgtctctgttccagaatcatacagactctcatttctctacacttcccaattccatcatttcttaaaatcatgaaaactgaattggctgaacaccaaaaatctgtggatataaggtggggtaacccttaccatttggtggttaaccgcctggggtaattaacccacctggtaactggttagtaaatgcctcctctgtaagctcttaacttagtccatctgtacctgtgactgctccaccaattcccttttctcctttcatagcctctctgaatttctgaaggtataatttaggaggttccacataactgtcaaagcctaaagtagacatagcaaagagaatatcttctccattgattgttctccgtttctcttgatggcacctttcacttgcttaanatgttataaaactgatgaactcac

SEQ ID NO: 171941 - DNA, 763 bp, Homo Sapiens
aaccatctggcgctgtaccgcctccccagtgccgagacagtgaaggagacatcgctggggcggctctcctgtgtcaccaagcggcggcctcccctcagccacatgatcagcctcttcattaaagacaccaccaccagcacagagcagatgctgtcccatggcaccgctgatgtggtcttagaggcctgcacagacttctgggacggagctgacatctaccctctctcgggatctgacagaaagaaagtgctggacttctaccagcgagcctgcctgtctgggtattgctctgcctttcgcctacaagcccatgaactgcgccctgtcctctcagctcaatggcaagtgcatcgagctggtacaggtgcccggccaaagcagcatcttcaccatgtgcgagctgcccagaaacatccccatcaagcagaacgcccgccgcagcagcttggagctctgacgaagggatcggggaggtgctggagaaggaagactgcatgcaggccctgaagcggccagatcttcatgggcatggtgtcctcccagtaccaggcccggctggacatcgtgcgcctcattgatgggcttgtcaacgcctgcatccgctttgtctacttctctttggaggatgagctcaaaagcaaggtgtttgcagaaaaaatgggcctggagacaggctggaactgccacatctccctcacacccaatggtgacatgcctggctccgagatcccccccttcaggcccaggcaagcagggtccctgc

SEQ ID NO: 171942 - DNA, 418 bp, Homo Sapiens
ccgggtatcgcgtacaggtgggggtggtggagcagcaggaggtgcagcattagttgggggagcagctggagctccagcaggggccaccagttcttgctgggacactggacgaggctgtagagcctggctgctgcgcgtagtgtgagtctgggcaatgccatggttaaaagtggcaacagtgcccacagtgggggccagagtctgctcagtcgctggtgcagtggagctcagggttatgaacttggcctgattgcggaactgagcattttggtccagtagtacctcattggtggccagcagggttgctgacctgatatctttaactcctctaaccgcttcctgagcatggcattctcctcctctagccgtctgcactccacccctcgcggtggagccaaactatattcatatgactcaa

SEQ ID NO: 171943 - DNA, 928 bp, Homo Sapiens
  misc_feature (495)..(498): n is a, c, g, or t
gaccgggacagctatgccaacggtaccgggagcagcggtggaggccctggaggtggtggcagcgaggaggccagtggggcaggggtaggcagtggcggggccagctcagatgccatctgtagagacttcttgaggaaatgtgtgcagcgaggcaagcgttgccgatatcgccacccagacatgagcgaggtgtcccacttgggggtgagcaaaaacgagttcatcttctgccatgacttccagaaacaggagtgtaggcgcccaaatttgccgtttcatccaatgcctcaaaggaggattgaggatggctataagaagaaaggaaacctccccccaccgctggaggcagaaagtaacaacctggccttggccctttcaccggctgtaacctacccaaatggccaagggaggaagggcccctaactggcccggggactttctcccaagggggacttgtgccaaaaaagggaacccaaagggcaaattccgtcaccnnnntgcaaaaggggattttgttaaagtttaaaggtccctccgggtgggaaaaggaacaccggtgggggctcaacaggctcagtcctcccaggacgacgtcatgatctctatgatatctatgaccttcctgacaggggctttgaggaccatgagccaggcccaaaacgccggcgaggtggatgctgcccccctgatggccctcattttgagtcatatgaatatagtttggctccaccgcgagggggtggagtgcagactgctagaggaggagaatgccatgctcaggaagcggggtagaggaagttaaagaagcaaggtcagcaaacctggctggccccccaatgaaggtacttactgggaaccaaaatggctcacgtttccgcaattcaagggcccaagggtcattaacccctgaagccttccactggcacct

SEQ ID NO: 171944 - DNA, 931 bp, Homo Sapiens
  misc_feature (598)..(598): n is a, c, g, or t
caagatggctgactccaaagagggtgttttgccgctgacggctgcttccactgccccaatttcattcggcttcactcgcacgtccgcacggaggcggctggccgactcgggagacggcgcggggccatctccggaggagaaggatttcttgaaaaccgtggaagggagggagctgcagagtgtgaagccccaggaggcccccaaggaactcgtcatccctttgatccagaatggccatcgcaggcagccaccagcccggccccctgggccatccacagatactggggccttggcggatggggtggtgtcccaggctgtgaaggagctcattgcggaatccaagaagtctctggaagagagagagaatgcgggtgtcgaccccacgctcgctatccccatgatccagaaaggatgcacccccagcggggaaggggcagacagcgaaccccgggcagagacagtgccagaggaggctaattatgaggcggtccccgtggaggcctatgggctggccatgctgcggggcatgggctggaaacctggcgagggcatcggccgcaccttcaatcaagtagtgaagccccgtgtcaactcactngaggcccaaggggttagggctgggtgccaacctgaccgaggcccaggccttgacccccactggcccccctccgcatgccaagaccagatgagggagcaagagaaagataaggaagatcagcctcaagggctggtgcctggaggaactgtggtgggtctttctggccctcaccgaagcctctatggggaaggggaaagcctttgatcctgacaatggtccggccatgggttcctctggctgtggggaaacccggggggggactggttatgaagaaatacctgggggcctgtttccccaaaagggatttggaaaaaaaccctttggattctcggg

SEQ ID NO: 171945 - DNA, 1175 bp, Homo Sapiens
  misc_feature (294)..(294): n is a, c, g, or t
  misc_feature (297)..(297): n is a, c, g, or t
  misc_feature (299)..(300): n is a, c, g, or t
  misc_feature (306)..(306): n is a, c, g, or t
  misc_feature (309)..(309): n is a, c, g, or t
  misc_feature (493)..(496): n is a, c, g, or t
  misc_feature (550)..(553): n is a, c, g, or t
aggcccccaaggaactcgtcatccctttgatccagaatggccatcgcaggcagccaccagcccggccccctgggccatccacagatactggggccttggcggatggggtggtgtcccaggctgtgaaggagctcattgcggaatccaagaagtctctggaagagagagagaatgcgggtgtcgaccccacgctcgctatccccatgatccagaaaggatgcacccccagcggggaaggggcagacagcgaaccccgggcagagacagtgccagaggaggctaattatgaagggncgngnnttcccncgntggggaagggccctatgggctgggcatgctgcggggcatgggctgggaaactggcgagggcatcggccgcacctttcatcaagtaatgaaaccccgtggtcaactcacctgaaggcccaaggggggtaggggctgggtggcccaaccttgaacccgaggccccacggggcccttgaaccccacnnnntgggggcccccttcccgcatggccaaaaccagaatgaggaggcaagagaaagannnntaaggggaaaatcacccctccaaaaggctggttttcgcctggaggaaccttgtgggggttctttctggccctcaccgaggcctctatgggaaggtggaaggccttgatcctgacaatgttcgggccatggttcgtctggctgtggggagccgggtggtgactgttagtgagtactacctgcggcctgtctcccagcaggagtttgacaagaacaccttggatctcaggcaacagaacggaactgcctcatcacggaagaccctctggaatcaagaactctacatccagcaggacaactcagagaggaagcggaaacaccttccagaccgacaggatgggcctgcagccaagagtgagaaagcagcccccagaagtcagcactggttgcacagggacctgcgtgtgcggtttgtggacaacattgtcaaaggaggccaatattacaacaccaagatgatacttgaagatgtcctaagccccagatacctgtgtattgtcggacagattgaaggccgagtcctggaaggcctgagggaagacattgctggagaccctggttcccaaggcagacggtgaccgtgtgatggtggggctgggcccacagactggaagggtgggacat

SEQ ID NO: 171946 - DNA, 487 bp, Homo Sapiens
tggccgtaatttcactcgccagcttcagaagatgaatcacggtgggttggcggacaaggaatggggcaagctggggcagcgcggaaggcagtgctgttttcaggaggcctgacctctgtggccagagtccccgtcagcaccgcttactgcaggccaagatgcctcccacactccagaatccgaccgcggagggagcttccagtccaggagcctgcgggaatcctggcgggggctgagggctgcagcccccctggcctgggcattgggtgcctcttagggatcttgcctgggtgccctaagggggtgatcgtggggttgtaattacaaccccacgatcacctgtctatcccaggcagcctggtgtgacctccaagtctgaaactcttgggggaggaagtttgcggaacaggcaggcctaggtgccagtcctggctttgcctctatactgctgtgacttaggcaagtgatttgacctaagatcttctca

SEQ ID NO: 171947 - DNA, 756 bp, Homo Sapiens
  misc_feature (292)..(317): n is a, c, g, or t
  misc_feature (455)..(464): n is a, c, g, or t
  misc_feature (572)..(581): n is a, c, g, or t
ggctggtgctccaggggaagaaacgacagcctcacttctgtatggactgctgatgtggcctgccatcctgttcagcgggcattgtctttggagcagcaggagactaggatgcctctcactcacatgccagttcctggctggccagctgctcagggctcaggctggggcctcccattgacatcctccccctacactccctctctgagcctccgtcgcccctcctgttgggtaagggtgttgagtgtgacttgtgctgaaaacctggttcatatataataaataatggtgatgnnnnnnnnnnnnnnnnnnnnnnnnnncaaacatgtgggcggcgtcgggcctctagaaactttctatacacttcttttggggcgcgggccccctaggtaaatgaacatgggcttagatgtgtccccagagataccgggaatgagtagagccctggttctcacccnnnnnnnnnnccccgcggggaaccccagagttctcaaaaaatctccatgggagacctgagggctttatctgggtttctctccaggggtctcccgcgagaccctatatataatttttannnnnnnnnntgggaccccttttcaaaaatagcgtgtgaatccttttagagattttttgcccacattggaaaacctcctccaaaacgggggagatgaaaccctaaatttccccccgggagtaaaaccccctgggccccccgtggggataatactttttccccctgggtgagaaaaaggggcgggg

SEQ ID NO: 171948 - DNA, 676 bp, Homo Sapiens
agaatgagccccagctgaacacagcatgtagcacttcatgtacctagagtatcaaagtagaaagggaatctctgacaggtgtaccattccatatcatccacagagctaactccgctgtctctaattgtaagtttgagttaattaagtgcaatgcaaattcttgtgcttccaatggtgttaaattcttggcttgacaggtataactcatagccaacattctgtgtccttctgctgcattacataaatacttctgagtacagtgtttcacatccagaagccactcggcaaaactataatgaaacagtatttaagtatttcctagtccatcaacaagaagtttggagaggatatctaacttgcgttgaaaatcttccaaagttaacgacatgtttttggtccatactgcgtgatataattccgttatggtcaaaggtcggcaggctgcaagaatcacattcaaaataggctgaacctttgcaaattgttttcttacaaaaagtctttggcacagccagagatataaaccatttagagttcctgggatgtcacgaatttctcttaacataataaaattttctacaactccatctaaaactcgttctaggtaaagaaagcatccctgcttttaatgtgcagttgatttaacatctctgcgtttcttttgtgaggtgttgtc

SEQ ID NO: 171949 - DNA, 896 bp, Homo Sapiens
tccacagaatactacctctcttacactgccggagtaggataagcagcagagtgcacttcactggatgccaaggggaaggagtcactgaggctggaactaggagtaatgctaggttccatcaagcacgtcaagaaagagctggcgacgcaccacagagtcagtcaggtgcattatatctgcatgagtggtggcaatgatgagaagcatcctccaggcggacaccagcatctggtactctaacaaggaggtgcaactgctcccttctgtttcggccacgtgaactgccaatgacttggacataccctgaccagtagggcaaagcgttactcgatggaaaattacttcagtgtatcctttaatgactggtctaatgaaccctttactacatagtatatctccaagcaaattatcttcatgattagggcacaggtttccaggatgctgggctctgatgtttcagagggaggagaaagggttccaaacagcggactggttaaattttcccaaaacttgggtttggttcggaggaccagcatggcactgtccctccgatcctgccacagagcatgcaaaaaggcaatggcggcacgatgcagcaggggtgggcaccagtatcgatcttgctgttgggaatcaatcagctccagcactgcatggagacagctccacatcccaaggctgaattcctttgagccatcactgccatccttaacttccaggttcagaaacagttcgatgaggcctggctgggtctctactgcaacagtgaggaactctagaatcatgactttgatgcgcatgtcctcaattttgctctgcaatcgggtcaggaaggcatcacgaatggcagccgcatcattgcccagacaagcatacactgacagtgatggccagga

SEQ ID NO: 171950 - DNA, 501 bp, Homo Sapiens
  misc_feature (455)..(455): n is a, c, g, or t
gtaacctgcggattggcttcggggcatttgtggacaagcctgtgtcaccatacatgtatatctccaccaacagaggaccacgaaaacccctgctatgataatgaagaccacctgcttgcccatgtcaggatacaaacacgagctgacgctaactgaccaggtgacccgcttcaatgaggaagtgaagaagcagagtgtgtcacggaaccgagatgccccagagggtggctttgatgccatcatgcaggctacagtctgtgatgaaaagattggctggaggaatgatgcatcccacttgctggtgtttaccactgatgccaagactcatatagcattggacggaaggctggcaggcattgtccagcctaatgacgggcagtgtcatgttggtagtgacaatcattactctgcctccactaccatggattatccctctttggggctgatgactgagnaagctatcccaggaaaaacattcaatttgatcttttgcagtgactt

SEQ ID NO: 171951 - DNA, 501 bp, Homo Sapiens
caccaccttccttcactctgactgtccatcagaggatttcccttaccagtaaaacagatggaagtccatttctctctttcggttcccaactcaagtgtagatcttttaatttaggaaagaactcaaacttatataaactaaagagtggaggttgttgttttcattctgtttactcacacactgctctgtaaagtcaaggttttcttgtcgattttgctcacatgctgatagctatgcatgcagccatcattagtgcaaatgcgcgggagactttttgaataatgtatagcacctaaaggaatgaacagcagacccccccaaaattcaaatcgctgttcttgcaaattctgaaagccaaggatcacttgtgccttacagaatccgggggctctatccccaggtgcaaagtacattttccaggtttctccagggcaaaggcagggtggacaccctcattaaacctgtgcctgatgatgaagagcaactgctcgctctctgcgt

SEQ ID NO: 171952 - DNA, 360 bp, Homo Sapiens
cgtcggttgatcaaaattgaaattctggggtggttgaggaatgctttgacccagaagcctgggatatgctggatgatgaggtctctgcgctccaggaagggtcttcgcatctggatgaacttgcgcttgagacgcaggaaggctttgcctgccttgatgttcactgcctccagatccagctgaatatcctccagtgcctgcaggatgctctccatcctctcggcatttctctctctgctttccctcttcaccttcctctgcttcctcactccgccagccgcacagccagcctcactgctgctcactcatactctcccgtctcatctctcatcactcatcactccactatgacgagatcgc

SEQ ID NO: 171953 - DNA, 577 bp, Homo Sapiens
actatgacgtgctggaaagcctaaaaggcattgggatgaacgagccgctggtggactgtgagggctacccccggtcagacgtggacctgtaccaagtccgcaccgccaggcacaacatcatatgcctgcagaatgatcacaaggcagtgatgaagcaggtggaggaggccctgcaccagctgcacgctcgcgacaaggagaagcaggcccgggacatggctgaggcccacaaagaggccatgagccgcaaactgggtcagagtgagagccagggccctccacgggccttcgccaaagtgaacagcatcagccccggctccccagccagcatcgcggtaatccaggggttggccactcaagtccatgcccaggggacacggtgggtcaggtagccttcggggatgtggaaagacagactagttctctccgtgctgcggtgctgagttcagttactcatttaacataacactgactgaggcctgtcgtgtatcctagccctgtgctgggggcagagttttatgagaggggtctagccccggctgcccactacattggtgggggagtgacctcttcccag

SEQ ID NO: 171954 - DNA, 895 bp, Homo Sapiens
gggagaaaaggacaaaggtggggaaaaatccccctaaggacccccaggtctcaggggcaaggggaaaagatgcctttcccctgttactgttcccccacggggacaaatcatcttttgcagaggaaataatgtttgcagcccaggcagtcccttttccctgcccagcgtgttggaacaagtctaagctggtgtttttccccccctgcggatcactgtcacatccaggggcttcccctcactgtgctgcaccacactgccaatgttatccagtgacctggaagttctgggtgctcacagagccgaactccacaatcccatcatccacttgcagacccgcgatgctgggctggggagccggggctgatgctgttcactttggcgaaggcccggggagggccctggctctcactctgacccagtttgcggctcatggcctctttgtgggcctcagccatgtcccgggcctgcttctccttgtcgcgagcgtgcagctggtgcagggcctcctccacctgcttcatcactgccttgtgatcattctgcaggcatatgatgttgtgcctggcggtgcggacttggtacaggtccacgtctgaccgggggtagccctcacagtccaccagcggctcgttcatcccaatgcctttttggctttccagcacgtcatagttggccttgatctgcgcttctatctcctccttgcgccgcatcagctcctggacgtcgctgacagtcacggcgccggcctgcgaggagcctccgctctgcctcgcttcctcgtcggacatcgtgaaccccgggccgcgactccagagacccggctcccgggctagggacgacgccccagtcgaccgtaactacggctccgcccatgcgccaaaacaccacagccgtc

SEQ ID NO: 171955 - DNA, 894 bp, Homo Sapiens
gggaaagccaaaaaggcattgggatgaacgagccgctggtggactgtgagggctacccccggtcagacgtggacctgtaccaagtccgcaccgccaggcacaacatcatatgcctgcagaatgatcacaaggcagtgatgaagcaggtggaggaggccctgcaccagctgcacgctcgcgacaaggagaagcaggcccgggacatggctgaggcccacaaagaggccatgagccgcaaactgggtcagagtgagagccagggccctccacgggccttcgccaaagtgaacagcatcagccccggctccccagccagcatcgcgggtctgcaagtggatgatgagattgtggagttcggctctgtgaacacccagaacttccagtcactgcataacattggcagtgtggtgcagcacagtgaggggaagcccctgaatgtgacagtgatccgcaggggggaaaaacaccagcttagacttgttccaacacgctgggcaggaaaaggactgctgggctgcaacattattcctctgcaaagatgattgtccctggggaacagtaacaggaaagcatcttcccttgccctggacttgggtctagggatttccaacttgtcttctctccctgaagcataaggatctggaagaggcttgtaacctgaacttctgtgtggtggcagtactgtggcccaccagtgtaatctccctggattaaggcattcttaaaaacttaggcttggcctctttcacaaatctaggccacggccctaaataggaattccctggattgtgggcaagtgggcggaagttattctggcaggtactggtgtgattattattcattatttgtaataaaggagttttacagtgctgatctgacaaacaaacaacaaca

SEQ ID NO: 171956 - DNA, 688 bp, Homo Sapiens
gaggccatgagccgcaaactgggtcagagtgagagccaggccctccacgggccttcgccaaagtgaacagcatcagccccggctccccagccagcatcgcgggtctgcaagtggatgatgagattgtggagttcggctctgtgaacacccagaacttccagtcactgcataacattggcagtgtggtgcagcacagtgaggggaagcccctgaatgtgacagtgatccgcaggggggaaaaacaccagcttagacttgttccaacacgctgggcaggaaaaggactgctgggctgcaacattattcctctgcaaagatgattgtccctggggaacagtaacaggaaagcatcttcccttgccctggacttgggtctagggatttccaacttgtcttctctccctgaagcataaagatctggaagaggcttgtaacctgaacttctgtgtggtggcagtactgtggcccaccagtgtaatctccctggattaaggcattctttaaaaacttaaggctttggcctcctttcacaaattaaggccacgcccctaaataggaattccctggattgtgggcaagtgggcggaagttattctgggcaggtaccggctcgtgacttatcactactcatcctcgctaacagagtttcacagcgcctgactatgcacccaccaccccccacccacac

SEQ ID NO: 171957 - DNA, 835 bp, Homo Sapiens
  misc_feature (302)..(417): n is a, c, g, or t
tcctcattgtctccatcacttccctctttctgagatgcagatctcccttttctctttactacagtaggtcgccaatcattgtcatcctcactgtcatagtcatccatgtcattcagctcttccatggacacaaaatccagaagtggtcggtttcgtcgaaggttccatttttttggctcgctgacttgttcctctgtagcggttgtcgtagtgggaacagaaggggatgtgttaacagcaggaggacttgtggctggtgtggtggcagcagcagaagcagccacattctcagatactgttgnnnnnnnnnnnnnnnnnnnnnnnnnnnnnnnnnnnnnnnnnnnnnnnnnnnnnnnnnnnnnnnnnnnnnnnnnnnnnnnnnnnnnnnnnnnnnnnnnnnnnnnnnnnnnnnnnnnnattttaattaattgtttttctgatgatagtacttcttcctctgcagaatttttaagttgttcttcttttactttaatatcttcattcagttcttcttctaaaatattttcttcagaatcactacaggaaccttctccactgtcctttgaagcatcttcacttccattaccactcccttcagaatctgaggcatctccaactttaaaatcactgtcatctgaactatcataatcaagagcttccagcagagaagctgccaaaggcttcacctgcctcctcttggagctgcgatccataaggaatccgtgaggtggtcgtttggagaagacttagggagaggctgcaggagcccaggcagcgccgaggtcggggactgggaacgcgaagacaggtccgaaagatgctatttaaaaccggc

SEQ ID NO: 171958 - DNA, 943 bp, Homo Sapiens
  misc_feature (684)..(778): n is a, c, g, or t
  misc_feature (824)..(887): n is a, c, g, or t
ggtgaagctcttcagagcccatctgaagctttcaggaacgtcacgtcagaagaaatactgaagatgattgaggagaacagccattgcacctttgtcatagaagcgttgaagtctttgccatcagatgtggagagccgagaccgccaggcccgatgcatatggtttctggataccctcatcaaatttcgagctcatagggtagttaagcggaaaagtgctctgggacctggagttccccacatcatcaacaccaaactgctgaagcactttacctgcttgacctacaacaatggcagattacggaacttaatttcggattctatgaaggcgaagattactgcatatgtgatcatacttgccttgcacatacatgacttccaaattgacctgacagtgttacagagggacttgaagctcagtgagaaaaggatgatggagatagccaaagccatgaggctgaagatctccaaaagaaaggtgtctgtggccgccggcagtgaagaagatcacaaactgggcaccctgtccctcccgctgcctccagcccagacctcagaccgcctggcaaagcggaggaagattacctagacgcatgctttccagacagggcgttttggctgcatcacagccactggctggtcctattcatttccatttttatgtatgttttgaaaagaaaaggtnnnnnnnnnnnnnnnnnnnnnnnnnnnnnnnnnnnnnnnnnnnnnnnnnnnnnnnnnnnnnnnnnnnnnnnnnnnnnnnnnnnnnnnnnnnnnnntagggagaccccatctctaccggaggacaacaaaagagtcaggccnnnnnnnnnnnnnnnnnnnnnnnnnnnnnnnnnnnnnnnnnnnnnnnnnnnnnnnnnnnnnnnngcttgggaaatcaaaggttgcgtgagctatgattgtgtggccacactccattccgg

SEQ ID NO: 171959 - DNA, 845 bp, Homo Sapiens
tcgagctcggttccctccactagtgtaggccacatgttctagtaaaaggatctttcaaaggtgtccaacaccttatgaatctggtctatcagattaatatctgaagatctacagtgtttttacatttaatttaaatgccattcttagaaggatcttgtcacaaagaagcctttacatagccccaccttgtctcagaagctagagttcattatcaaaacttaatttccatttcatatagctcaaaatcttaaaatctagggcatggccaactaaattactttgattctgtttaccttctctgatgacaattccatcaagccttaaataggaaaatgtcgaatctagggtaatttatcacttttgtgtgcatcttatctgagtccagccatctggtactgctgtgcattttgaacaccgtgggcataaacaatttgttgaattactaagtgaaaacaataataaagaagaaaatggtcaggagtgtggtttcagcactactaacagatgactgtttctacctcatttgaccataactgtacttgtgagcttctttccttccattcatgactgaagatctgctcaaatgcaccaacactgccaagtgactaaggtagaaaagaaaaatgacaggtatcgtcatctgaaggacagatgaatctttttctgccccttcttcacaatggaatataaggaacaataatgggatgtcatcagaatggatgccataggacctacagctccctttctctttattgtgattatactttaaatatgacattgtcttttatgtgtatgttcctatattttcaatgtatctttttccttcagtaaacctgatattcaaa

SEQ ID NO: 171960 - DNA, 1450 bp, Homo Sapiens
  misc_feature (756)..(819): n is a, c, g, or t
  misc_feature (831)..(839): n is a, c, g, or t
agggccatcttcatcaaggccattgtggacctgacagggctctaactgccccctactggtgtctgggggttgggggcagcaggcacagccggctcacggaggggccaccacgctgggccagggtctcactgtacaagtgggcaggggccgcgcttgggcgcttgggagggtgtcggcctgcagccaagttcactgtcacgggggaaggagccaccagccagtcctcagatttcagagactgcggaggggcttggcagacggtcttagccaagggctgtggtggcattggccgagggtcttcgggtgcttccctgcacaagctgcccttgctgtcctgtgcagtgaagggagaggccctgggtgggggacactcagagtgggagcacatcccagcagtgcccatgtagcaggagcacagtggatggccttgtgtccctcggggcatgacaggcagaaacgagggctgctccaggagaagggcctcctgctggccagagcaaggaaggctgagcagcttggttctcccctctggcccctggagagaagggagcattcctagacccctgggtgcttgtctgcacagagctctggtctgtgccaccttggccaggctggctgtgggagggtctggtcccacgccgcctctgctcagaccactgtgtgggaggtgcacagcacagcctgcgggtaaagtgtgagagcttgccatccagctcacgaaggacaggagttattaagaccatttcagaattctcnnnnnnnnnnnnnnnnnnnnnnnnnnnnnnnnnnnnnnnnnnnnnnnnnnnnnnnnnnnnnnnntagcaaaagaannnnnnnnnccgcccgcccttttttttgtcgcggccgggcgggtggggcggcccgcgcgatacaaagccggtgtggtgtggagagaaaaacacacccccatgaagaagccacacatcgatggggagaaacaggtggagaaaaagtctctatatatacacacactgatgtgtgcgccaggtgatagggacgcccatgaattatatgggggcgagataacgacgacgaagcatattgggggccagcccaacgatgcgggtctactaaagaaaaacggcgggggggagagcgacttacaccacaacaaagagacctaccctgcatgtgtagacaaacacctttgtgggcaacaaggcggggcggcttgtgtgatacgacacgtttagcgccgaagaaggaggggcacccctctaatagaaataatatgcgcgcaggcgatgctccagtggagaagactacgtgtggtgacaccgccaaagctgcacagcacagatggggggaaattcaccccccgagtgggtagtatttcccagctttggggggacgaaacatattgacggtaaacagcgcagacgaagtgttgatgcttgagtatgcatcgtgcatgatgtgtgtcgcgccc

SEQ ID NO: 171961 - DNA, 1179 bp, Homo Sapiens
  misc_feature (129)..(186): n is a, c, g, or t
gtccgctccccggccccttcccccgcgggcgtgtgggtcccgggctggggtctcggcgtccgcgatcccgagcccgctcgcttcggcccccctcaggaggctgcgaggaggggtggcggcggcatggannnnnnnnnnnnnnnnnnnnnnnnnnnnnnnnnnnnnnnnnnnnnnnnnnnnnnnnnnaccgaggtgagcctgagcgccttcgcactgctgttctccgagctggtacagcactgccagagccgcgtcttctccgtggccgagctgcagtcgcgcctggccgcgctgggccgccaggtgggcgcgcgcgtgctggatgcgctggtggcgcgcgaaaagggtgcccggcgtgagaccaaggtgctaggcgcgttgctcttcgtcaagggcgccgtgtggaaggcgctcttcggcaacgaggcggacaagctggagcaggccaacgatgacgcgcggaccttctacctcatcgagcgccagcccgctcatcaacacctacatctcccggcccaaggagaacagccacgctcacctgcgccaagcttcacggtagtggaatcggggaaggccgcggccttcaaacaacaggggggcttttcccctggcccgaaggtaaatgggagaccacttgggtgacataggggggcaacccacggccattctattggattcaacagtcctcggaagtgaaaggccacaggtccacctcgcgtccttccgccaagataccccggggggcgccccttgttgtaagagggcgcacgctccctcgaacatccccttgtggcccggggtaagaacctacaaaggggctcacacacctgagaagtagctcacccccgttccccaccaccgcctggaggcgaccgtttggccggtcccactctggtgatgcgcaacacgaccacttacaaagatttgtacttttatccagattaacacgttcgagagaccacgcagagggccccctgagatccccccacgtgtctttgggcgcgtagtgggagcagaggcctccttcgccacccgactactgtgcggatattatctcgcgccatacaagcatggatgagggcacagggactacatcgcagcccatatctagggtgctatgggtgttggagaatgaatatattgagcctactcactccattacgacctccgcgctagaaa

SEQ ID NO: 171962 - DNA, 792 bp, Homo Sapiens
ggggccgtaaagcagctcggccgagcagactgctgcggttcctgggtggcggcggcatggaggcgcgcttcacgcgcgggaagtcggcgctgctggagcgcgcgctggcgcggccgcgcaccgaggtgagcctgagcgccttcgcactgctgttctccgagctggtacagcactgccagagccgcgtcttctccgtggccgagctgcagtcgcgcctggccgcgctgggccgccaggtgggcgcgcgcgtgctggatgcgctggtggcgcgcgaaaagggtgcccggcgtgagaccaaggtgctaggcgcgttgctcttcgtcaagggcgccgtgtggaaggcgctcttcggcaaggaggcggacaagctggagcaggccaacgatgacgcgcgcaccttctacatcatcgagcgcgagccgctcatcaacacctacatctccgtgcccaaggagaacagcacgctcaactgcgccagcttcacggcgggcatcgtggaggcggtgctcacacacagcggcttccctgcccagggtcacggcgcactggcacaagggcaccacgcctcatgatcaagttcgaggaggcagtcatcgctcgagaccgggccctggagggccgctgaacctgccggagataaaggatacagagagccccccttccaaaaggaaataaacagaaataaaacccttgtcgggccgccctccggcccctccaaaagcttttctaaaaccatttcgctttggcggcccgggggccccgcaaggggaaaggggaaacctgcgtcctaag

SEQ ID NO: 171963 - DNA, 577 bp, Homo Sapiens
  misc_feature (199)..(209): n is a, c, g, or t
aaagatacgacttcgtcagctttccctgtagcagcagatggtacagtgagtgttcagagacgtgggtacaagccctgtgatgtatgtataaggctccctgaggatgcactgcattaacttacgctgacttctttgtaagatctttgcttatagattataatttagatctgtatttttttaggtttatcctaatagctgnnnnnnnnnnnaaccataactcatagaaaatcaaatgtatttatttgttaaaagtagactgaatttgacatatggtatgctggtatgtagctcatacatcaagagttattttacaaataaatttattctgtagatgcagaaatatttttcagtgtagattttcccttttgatatgctaagtcatttctccgttcagaggtaaaacaataaatttttagtgcctttagaataaacattgaaagaatacacctcaaaactcttctcctaacttaactactcataaactagtgaaagggaaggtctatgatactcaggaataagattattgcccctgagtgtgaaaactaacttaaatttcagcaaagggtttcaggggaca

SEQ ID NO: 171964 - DNA, 1136 bp, Homo Sapiens
cgatcttcgtcagaggatctgaagaggatagtcctaaaaaagagtctaaaaagaagacactcaaaaatgattgtgaagagaatggccttgcaaaggaatctgaagatgacctcaacaaggagtctgaagaggaggttggccccacaaaagagtccgaagaagatgactcagagaaagagtctgatgaagactgctctgaaaaacagtctgaagatggctccgaaaaagaatttgaagaaaatggtctcgagaaagatttggacgaggaaggttctgaaaaggagcttcatgaaaatgttcttgacaaagagttagaagaaaatgactctgaaaactccgaatttgaagatgacggctctgaaaaagtgttagatgaggaaggctctgagagagagtttgacgaagattcagatgaaaaggaagaagaggaggatacatatgaaaaagtatttgatgatgagtctgatgagaaagaggatgaagaatatgcagatgaaaaggggcttgaagctgctgataaaaaggcggaagaaggtgatgcagatgaaaagctgtttgaagagtcagatgacaaggaagatgaagatgcagatggaaaggaagttgaagatgctgacgaaaagttgttcgaagatgatgattccaatgagaagttgtttgatgaggaggaagattccagtgagaagttgtttgacgattctgatgagagggggactttgggtggttttgggagtgttgaagaagggcccctatccactggcagcagctttattctcagtagcgatgatgatgacgatgatatttaatcccttaaacttgctttttagggagagtcctccatctacatttgcctgtgcttcagggtaattactagtagtgttacatgaacatgtgcatagtggtaggatgccatcagattaaagcattgaagtgtttcattgttacctgtacctaatggttttaaatatatgttaattgattgtttagttaaaatgtcatagttacaatgcaagtaaactggatacttgttcttttgtcagatttgttaaatgcatgcagaataatatttttaagagtattgattgaagtttgtgatattcatcaataaaaatgagttgataatatgcagaaactta

SEQ ID NO: 171965 - DNA, 707 bp, Homo Sapiens
agaggatcccgtcaagtgaatgatgagatgtaatcgactttatatcttagtcacggagttgccatggcatgtagtagaaaaccacaggaagaatggtcatactcactttgtgggctgcccataatctttcttgggcattcacaactcttgagtttggtgttcaggcatcattattaaaaagtgggagtcctatgtaccagactgagtttttacaaatgattcgcaggctagacataacccactgatggaaatggtgaagaatgagcttcatgtaggtttaaaagtgtattctgagcctgtagatgattaatcaggtttttattcaatcatataaatgtattcctttgcaatcattttggtataactgaggatatctagtgtctgcttcatagggtgctttgaaatataaaatgaaaacttatttatactgtttttacaacagtcaaaaaggaaacacgaaaatcacttttctgcaactgatgaactatatagactggactcttaacctcttagtgcctcagtttttccttcggggtatactattttagatatacctacttcacaggagtactggagggatctgcaagacaacgggcacagagatgccataggtataaagctactactccgcctcactgttaactctggtcagctgttgcacatgatttaccagattcactgccgtcgtgatacactggaacagctat

SEQ ID NO: 171966 - DNA, 385 bp, Homo Sapiens
  misc_feature (131)..(131): n is a, c, g, or t
  misc_feature (209)..(209): n is a, c, g, or t
  misc_feature (254)..(254): n is a, c, g, or t
  misc_feature (272)..(272): n is a, c, g, or t
  misc_feature (293)..(293): n is a, c, g, or t
  misc_feature (316)..(316): n is a, c, g, or t
  misc_feature (326)..(326): n is a, c, g, or t
  misc_feature (358)..(358): n is a, c, g, or t
tgcatgtgaatgatgagagcatcaagtacccactgaaaactggtgcaggacaataaatgacgactgtgacttctgtgaccgtggggatcgttcattgccatcctcgcgatcatcacgggggaattctaccnggatctattacctgaagaagtcgcggtcgacgattcaggaacccctacggtgggcagcacttcttattaaggcaagtnggggcttgctttccctcttttgggcttgttgccattcaggcccangttcttttcacaggacanttgccaaaggtgttccattangggcggccttgcggttccttcantttctttgangtgtcttgcaaaccctggattttcaagcccanattcaacttgcttttgaagggcttaac

SEQ ID NO: 171967 - DNA, 366 bp, Homo Sapiens
gggaggcggagccgccgagctcgctgtggcccggatgttcggtgcagctgccagatccgctgatctagtgcttctcgaaaaaaaccttcaggcggcccatggctgtcgatattcaaccagcatgccttggactttattgtgggaagaccctattatttaaaaatggctcaactgaaatatatggagaatgtggggtatgcccaagaggacagagaacgaatgcacagaaatattgtcagccttgcacagaatctcctgaactttatgagtggctctatcttggatttatggcaatgcttcctctggttttacattggttcttcattgaatggtactcggggaaaaagagttccagcgcacttttcc

SEQ ID NO: 171968 - DNA, 346 bp, Homo Sapiens
  misc_feature (1)..(3): n is a, c, g, or t
  misc_feature (7)..(8): n is a, c, g, or t
  misc_feature (32)..(32): n is a, c, g, or t
  misc_feature (134)..(134): n is a, c, g, or t
  misc_feature (137)..(137): n is a, c, g, or t
  misc_feature (266)..(266): n is a, c, g, or t
  misc_feature (311)..(312): n is a, c, g, or t
nnncccnntttactgtcggcatcatgattggngcagaccggtgagggactaaggggatatgagaagtgagggggtgtcaaggacaagcggtgacggagatgatgctggccactggggtggggcccattacaggnttngaccggtgagggactaaggccaatcatgatgccgacagcagaaggaaacagatttgcatgcataaggaccactctgtcagccttatggaggaagcctctgttcgggaggtgggtacaggagggcacctngggccccatattactccactacatcacagtgaccgcagtggcttnngcagagtggtcgccaatcatgatgccgacagtgg

SEQ ID NO: 171969 - DNA, 238 bp, Homo Sapiens
  misc_feature (189)..(189): n is a, c, g, or t
tgggaaggtgggcactatctgcaatatacatgatgcaatttagaagagtgcttccatcccaagagaaatcaaagagcaggtttaataagatgtgagcatttttgtagccttcatttcttttggaggatggtcatacttgctggagcaggagctggggccggacccaagcaggaggaagagatctcaggnagaagaagctctctgtgctcagtagcaaaggtacagtctgctgctttta

SEQ ID NO: 171970 - DNA, 772 bp, Homo Sapiens
aaagcaggctggtaccggtccggaattttcgggatatcgtgaaaagagctgtgtgttgttcaattgtgcagccttagctagccaaattgcagcaaacagaacctggataatgatgaaggattgaaaatcgctgctaaacattaccagtttgctagtggtgcctttttacatattaaagagacggttttatctgccttaagtcgagagccgaccgtggacatatctccagatactgttgggaccctcagtcttattatgctggcacaggctcaagaagtattttttttaaaagccacaagagataaaatgaaagatgccatcatagctaaattggctaatcaggctgcagattattttggtgatgctttcaaacagtgtcaataacaaagatactcttccccaaggaggtgttcccctgtcttggctgcaaagcactgtatcatgcaggccaatgctgagtaccatcagtctatcctggcaaaacagcagaagaaatttggagaagaaattgcaaggttacagcatgcagcagaactgattaaaacagtggcatctcgctatgatgaatatgttcactggtgacggatcttccggacaaatatcaatcgtgcccttgctgcagcaaagaaggataatgacttcatttatcatgatcgagttccagaccttaaagatctagatcctattggcaaagccacacttgtgaaatctaccccggtcaatgtacccatcagtcagaaatttactgatctgtttgagaagatggttcccg

SEQ ID NO: 171971 - DNA, 134 bp, Homo Sapiens
  misc_feature (1)..(1): n is a, c, g, or t
ncccgggccactgtcggcatcatgattgggaagagaatcgcaacactaatttccaacccaggcttgacttttcacccagctaatgggtatgcggtacctcccggggacagaggcagctctgggcgctggggatt

SEQ ID NO: 171972 - DNA, 400 bp, Homo Sapiens
ccgctgacaggtgcttcggcgattctctgtgaccaccatgagggacttcgggatgggaaagcggagtgtggaggagcggattcaggacgaggctcagatgtctgatagaggaacttcggaaatccaagggagccctcgtggaccccaccttcctcttccattccattaccgccaacatcatctgctccatcatctttggaaaacgcttccactaccaagatcaagagttcctgaagacgctgaacttgttctgccagagtttcttactcatcagctctatatccagccaggtccaggacagggagaaggagagggagggtgggggtgaggtgaacatccaggacacacgagaaaaggatgacctgacttgggggctcagaaatgcagcttatccctggaa

SEQ ID NO: 171973 - DNA, 877 bp, Homo Sapiens
ctgaacaagcaatgccacggagcagttggtgcgagcacagaaccaccccaggctggatttgttatccagtctctcttgcttgctggccgtgtatctggagacttgtgtaaacattaatggatgaggaggagagatggctctcagagcccagccctcatctctgctggcttcccactgccctcaggcatctggtgaatgctggagtcctcaccgtccgagatgctgggagctggtggctagctgtgcctggagctgggagattcatcacgtactttgttaaagggcgccaggctgtccttagcatggtccggaagggcaaaagtaccgggaactgctcctatcagagctcctgggccggcgggcgcatgtcgtgtgcggcttggcctcacctaccatgtgcacgacctcattggggcccagctagtggactgcatctctaccacttcaggaaccctcctccgcctgccagagacatgaagattctgctcatcatagctcagctcctcaagagtgggccgggagggggactagcaagagctgcatgatggtggctgagacagggtcaccttgggaaggcttgggagccaggatgagtgtcgcgctctcgtgtgtgcaaaaggtcagatgtgactgctgctgtttgcctggtttctgacccagtggtggggtttgagcaatgcttctctgcccttccatggaaagtggaaccagaaatggtgccaaggctgtggctgttccctttcgtgtaaaatggtgctgttattactctgtcttgaaataggaaggtgggatttctggggaggctggtgaaggagggcagggttcttttctctacgtgtcatgttaaaattgccaaataaagtacctctgcctgttc

SEQ ID NO: 171974 - DNA, 1176 bp, Homo Sapiens
tttttggaggagttccccagagagaattgcccaattattatttgttttctgggggtttcctaaagaatgggaaagggcctttggcgttggggtttctataaatatcccagttcggttagtaattggaaacccagcctcaaaaagtttcttccccaggcaggtcttttttagcagcaagagcccagctttcttcatattcttggccactctcttccaaaaccatggccgcatcaatgtgctttcctctgctcaaccagctttcctgccagagttctgccgaggcccaccagctggtcttatggtaaagttaagctgggctgccacacagagggcttgcttccagttgccacatgtcagaaaggctgagagagctttctcgtgggcaccgcaacgggcaaacatgagccccgctggctcatacatgtgctcctgcatcaggtgctccccataagcaatgctgatatcctggtactgttgtgagcttggtgaatataacttcagagcttcgttatacaagtttttatcttttatcaagtttaagcattctgggaagtactcaggtccacatttgctgaggtggccaatggctttttcatatcgtttcaagtatttgtctatagtaaaccgctgataattagtttccattttcttaaggggtaataaaaaagggaagatattcttggggatccttctgtgacttctcagctaccatgaggaccaaatcaaagtcataggtgccaagagaaatgatcatataattcattaacattctaccagatgcagcaaatagtgcaaggcctcttcagcactcacagcatcaggatcagagggagcatttccttgaagctcgtgtactttttgcagtacaatttccagttctggggttgtcttctttacatgagatgtaagtatggataggcagtatttatgaggatttatgctctccatgactgctctcatagcatcgcagacaaggtctattctattcccgtcaggatccctggacaggtagacactgctggtaactggtgcagggtacatggtcttcgtgacatcttcttctttcaattccagagtcggctccgaattgcgcacgcgtctctgtccgcggctcccgctctctctccgacggcactaggcctccaaggatggaggcgccctccaggggaaaaaccc

SEQ ID NO: 171975 - DNA, 852 bp, Homo Sapiens
  misc_feature (480)..(480): n is a, c, g, or t
  misc_feature (724)..(724): n is a, c, g, or t
gatgatgtaaagggagttgccaaaatctatggtttctgtcaaccaaggactaataaggggcctctggaagctgaaatgggccagctccaagtgtatcacctgtaaaaagactgttgcttgcatctcttagattttctcgaagtttcttgtctagtttcactgctaccatttctgctgctgttcctcttgaacatctgattataggaacagcacccagagtaacaaaaaagcagaagaggctgtcaactatagtgtccataacagtttccatttccgtgtctgtgatatctggcctgttaatggcacgatatgaaacaagctccttattttgattacataatacaaacatatcatcttccaaagtaataaaattgggatattggtcaaaaaccttggctacttgtgttactgcactagctgctaacgctgcattggcaatatcttccagtttacctcttgaaatagcagaaataaaatttnaaataatatgattcatatagttgatttcgaagatcctggcacattctgtcaatattttcttcagttggcattacaaagtatactgcaggaacatctggaataggatctcgatcagagtgtaaaagcagatgcagagtgattcccatgtctcttagctccttcacagatagcagaggagagattatatcttggccaaatctgtcataaatgagtaccttccatactggttctcctgtgctgtttntaatatgaggcacattgaaattcaacatacgcttcaaagccactgtctgcctttcccgaatactggctgctgctgctgctgtcgctgccgccgccgccgccatcttggctcccacgagccactgcccc

SEQ ID NO: 171976 - DNA, 757 bp, Homo Sapiens
cagagtaactggggatgaacagttcgacaagtagacaccgtaggagagactgtctaaagtcagcaagaatgagagaaacctgtgcaatgcatgttaagcaatctactttaagaagacctatatagagaatatttacccaatcttgggtgcttccatatgttggcaaggaactgaatatgatcatcatgctcccggacgagaccactgacttgagaacggtggagaaagaactcacttacgagaagttcgtagaaatggacgaggctggacatgatggatgaagaggaggtggaagtgtccctcccgcggtttaaactagaggaaagctacgacatggagagtgtcctgcgcaacctgggcatgactgatgccttcgagctgggcaaggcagacttctctggaatgtcccagacagacctgtctctgtccaaggtcgtgcacaagtcttttgtggaggtcaatgaggaaggcacggaggctgcagccgccacagctgccatcatgatgatgcggtgtgccagattcgtcccccgcttctgcgccgaccaccccttccttttcttcatccagcacagcaagaccaacgggattctcttctgcggccgcttttcctctccgtgaggacagggcagtcttggtgtgcagcccctctcctctctgtcccctgacactccacagtgtgcctgcaacccaagtggccttatccgtgcagtggtggcagttcagaaataaagggcccatttgtgggatgccgcta

SEQ ID NO: 171977 - DNA, 532 bp, Homo Sapiens
atcagtggaaccggattcgctcctgtcaaggaggtttaaaggcgttccatccctccaaaatgaaatgtgaaaagaatgaagagccgcagtataggaattatctagtgaaaaaacaggaagccaattgaagctggacctgaaatttcttcttggtattaaagagacaagtttatcacagaattctttttcctgctggcctattgctataccaatgatgttgagtggcattttctttttagttttccattaaaatatattccatatctacaactataatatcaaataaagtgattattttttacaaccctcttaacattttttggagatgacatttctgattttcagaaattaacataaaatccagaagcaagattccgtaagctgagaactctggacagttgatcagctttacctatggtgctttgcctttaactagagtgtgtgatggtagattatttcagatatgtatgtaaaactgtttcctgaacaataagatgtatgaacggagcagaaataaatactttttctaatt

SEQ ID NO: 171978 - DNA, 1285 bp, Homo Sapiens
  misc_feature (1071)..(1072): n is a, c, g, or t
ggggcctgtttccgggaggcgcgtggggcttgaggccgagaacggcccttgctgccaccaacatggagactttgtaccgtgtcccgttcttagtgctcgaatgtcccaacctgaagctgaagaagccgccctggttgcacatgccgtcggccatgactgtgtatgctctggtggtggtgtcttacttcctcatcaccggaggaataatttatgatgttattgttgaacctccaagtgtcggttctatgactgatgaacatgggcatcagaggccagtagctttcttggcctacagagtaaatggacaatatattatggaaggacttgcatccagcttcctatttacaatgggaggtttaggtttcataatcctggaccgatcgaatgcaccaaatatcccaaaactcaatagattccttcttctgttcattggattcgtctgtgtcctattgagttttttcatggctagagtattcatgagaatgaaactgccgggctatctgatgggttagagtgcctttgagaagaaatcagtggatactggatttgctcctgtcaatgaagttttaaaggctgtaccaatcctctaatatgaaatgtggaaaagaatgaagagcagcagtaaaagaaatatctagtgaaaaaacaggaagcgtattgaagcttgggactagaatttcttcttggtattaaagagacaagtttatcacagaaattttttttcctgctggcctattgctataccaatgatgttgagtggcattttctttttagtttttcattaaaatatattccatatctacaactataatatcaaattaaagtgattattttttacaaccctcttaacattttttggagatgacatttctgattttcagaaattaacataaaatccagaagcaagattccgtaagctgagaactctggacagttgatcagctttacctatggtgctttgcctttaactagagtgtgtgatggtagattatttcagatatgtatgtaaaactgtttcctgaacaataagatgtatgaaccggagcagaaataaatactttttcctatccnnacccaccactccataccaatatcaacccatgtcgggcccgcccggcccctccaagaacttttctaaacccattccttttgggccccgggccccgtaagttaagtgaaactgggccatagcctgtttccccaggaaaaaccctgggacatgaaccaaggggtttgggattccccccccaattaaaaaaccgccccggcggggaaaccgaaatgt

SEQ ID NO: 171979 - DNA, 753 bp, Homo Sapiens
  misc_feature (685)..(685): n is a, c, g, or t
ggggtccgcggtgccatggcccccgcccgtctgttcgcgctgctgctgttcttcgtaggcggagtcgccgagtcgatccgagagactgaggtcatcgacccccaggacctcctagaaggccgatacttctccggagccctaccagacgatgaggatgtagtggggcccgggcaggaatctgatgactttgagctgtctggctctggagatctggatgacttggaagactccatgatcggccctgaagttgtccatcccttggtgcctctagataaccatatccctgagagggcagggtctgggagccaagtccccaccgaacccaagaaactagaggagaatgaggttatccccaagagaatctcacccgttgaagagagtgaggatgtgtccaacaaggtgtcaatgtccagcactgtgcagggcagcaacatctttgagagaacggaggtcctggcagctctgattgtgggtggcatcgtgggcatcctctttgccgtcttcctgatcctactgctcatgtaccgtatgaagaagaaggatgaaggcagctatgacctgggcaagaaacccatctacaagaaagcccccaccaatgagttctacgcgtgaagcttgcttgtgggcactggcttggactttagcgggggagggaagccaggggattttgaagggtggacattangggtaggggtgaggtcaacctaatactgaacttgtcagtatctcccgctctgattaccttttgaagtg

SEQ ID NO: 171980 - DNA, 483 bp, Homo Sapiens
  misc_feature (343)..(343): n is a, c, g, or t
  misc_feature (387)..(387): n is a, c, g, or t
  misc_feature (392)..(392): n is a, c, g, or t
  misc_feature (402)..(402): n is a, c, g, or t
  misc_feature (460)..(460): n is a, c, g, or t
ctagccttaaaagttgaccattacagtgactttatggctccaaagttcttgaagcatctccagccctagactttgacaagaaaaggtagctcagcatctctactttccgtgagtacctgcaggagtccagccaatgtattagagctgatcattaagctccttcagtgagggctaagatcctattctcgatgagcatagggggacagccttgttttatgccacttttctctccccataccttcccctcatgtgtacttaggccacctgtgttgctttgaatcagctgcccagttctgggctcaaatgtgggcacaaaatcagtacatcagacacaccatgaaantccctgtgggctattaattcttaggggatctttttggacacttnccagncccaaggaanttattttttattttcggtatttattttagggggttccccaaccttttatttccaggtnacccccaaaagggtagggtgttc

SEQ ID NO: 171981 - DNA, 426 bp, Homo Sapiens
actattcgttaggcttttatttttctctatgttctgcagtaactaaggaaaatcatggtaaatgtcaatcttcacacaacagcagacacaaagggtttcagaaacgtcagatatgaagaaatcctccatccttcttcaacattttactgggtatttcaacttcaaaagaacagcttatttctataagtgctgtacaagatcatagattatgatggaacgacttcattttagaacgttagcaaaactgttatactaaatgtcaatgacaggaaacaaagaaaaaaatttgttcaattatatttttaaacatattgttattctcaacaaacggaattttaaaacgaatacaattttccattatcaaaagcaaacactctatttcgcagttgaacaatgatcactgatcacaaatatcaaatacagtgt

SEQ ID NO: 171982 - DNA, 799 bp, Homo Sapiens
  misc_feature (763)..(763): n is a, c, g, or t
  misc_feature (769)..(770): n is a, c, g, or t
ggaggttattgcaagagttcccctttcaataccctttgtgccctcaagaattaaaagcctctatgatccagagttgctatgcaccaaattttgatgccttctaaataccttgatgcctgtagcactagaaatgctttcctatttaaaataaacattaaattttaaaatagagctttgtatactatgtaagcagttttatatcagctttgtaaaagctttggtgttaagagtcaatattttttggctttgtagataaagacttaaatttttgtgcaacatagtggtgttaaagcacacatccattggactatgcaaatcaatttctactagcagcactgagcaactgggcacgtgctagtacgcaccccctcctactctaactgtgctagctcttgggttgaggaatggaatgggtagccttctgcttactggagatgcacagagaaacatggctgaaaacagctttaaaaagaacatgtctttgggttcatgtgtggtgctgctgcccgggtgtaaactatccccacacagggccagccattatcaccagacctcttctgggcctggctgtgaagccctgtttttggtattcagaatggatctttaaggctcagatgggctcaaattgaaaccttgtgttttataaaatggatgtttagtaaaggaactggttctcagttatgtttacagcacttggaaattgtgtgttcttgtacattttgtattttaaaaccttttatgggagtgcagtgctccttacacnaatacnnaggggaagaaaaacccagcaggttgaagt

SEQ ID NO: 171983 - DNA, 264 bp, Homo Sapiens
attcacgtctcatactggaaggatgaaggaaggttcagaggctacccagatacatgtgttttgtatgtttacataaagagattcttaaataaaacaagcaaataaaaagactacctattaatactctttaagtgtgggggcaaattttcattattaggacactttaggaataatgataaacaaagggctgagttgtaatctatatacagtgatattctgagctttctaactgacaagtaaaaaatatatagacacatctatata

SEQ ID NO: 171984 - DNA, 408 bp, Homo Sapiens
acgtctatcactgcatgctggtcataatactgctataaatctttagaagctgttaatgtattttcattgttcaaatttcacctacttctctggatcccagattagctgatattttttttaaggccacatctgcgtgttaatctgcaggtctagctcatagcccctttgatgaatagaaggtatactaacacaaatgtcatacatgaataggtagtataagtaacctggtattttagaatactattgaatgatactaagctacttaaaaattaattcatagaatcctgacccttatatttccatggcaagtaacatgcattatctcaggggagagtgccattttcaatttacagatgagaaaatgattcaacaactaattgacttatacaaaaatccccttaccataac

SEQ ID NO: 171985 - DNA, 498 bp, Homo Sapiens
aaggaatacaggagaacttactcaatttgataaagaactactacaaaaaaccctacatctagcatcatccttgatgtttccaactaaatgctttcctactaagatcaggaacatggcaaggaacaccactgcttttcagcattgtactggaagtgctatctaatgcagtgatacccaaaaaaaaggaaataaaatgcacataaatttggaaggaggaaatacaactgtctttgttctcaaataacatgattgtctttgtagaaaattctaaataacaaaaacctgctgacattaataagcaattatagcagggttgtagaatgtagtcctcaggtatatgataaaaaagaattagacatcaagtcattaaaagacatatatggaaccctaaatgcttattgttaagtgcaaaccattctgaataaggctttctatgttgtatgattgcaattatatgacattctgggagaggcaaaactatcgcgcgagtcgaaggac

SEQ ID NO: 171986 - DNA, 1009 bp, Homo Sapiens
  misc_feature (701)..(701): n is a, c, g, or t
catcagtagagtgtctgaacctggcacttactactgaccattccaccgctccccaacttgagcctgtgaccttgggacaaagggggagtccctcgtctcttgtgactcagcagaggcagtggccacgttcaggcaggggccggctggcctggaggctcagcccaccctccagcttttcctcagggtgtcctgaggtccaagattctggagcaatctgacccttctccaaaggctctgttatcagctgggcagtgccagccaatccctggccatttggccccaggggacgtgggccctgcaggctgcaggagggcactggagctgggaggtctcgtccccagccctccccatctcggggctgctgtgtggactgcgctgccttcaggcactctcctgtctgaacctgcccttactgtgtttaacctgttgctccaggatgcattctgataggagggggcggcagggctgggccttgtgacaatctgcctttcaccacatggccttgcctcggtggccctgactgtcagggagggacagggaggcagagcgagagggagtctcaggaggaggctgccctgaagggctggggagggggtacctcatgaggaccagggtggagctgagaagaggaggaggtgggggctggaggtgctggtagctgaggggacgggcaagtgagaggggagggagggaagtcctgngaggatcctgagctgctgttgcagtctaacccactaatcagttcttagattcaggggaagggcaggcaccaacaactcagaatgggggctttcggggagggcgcctagtccccccagctctaagcagccaaggagggacctgcatctaagcatctgggttgccatggcaatggcatgcccccccaactactgtatgcccccgacccccgcacaggcacaatgaacccataggggacctgatcgaaatgtttatcatgttacttccccacccctacattttttgaaataaaataaggaattttattccc

SEQ ID NO: 171987 - DNA, 444 bp, Homo Sapiens
ggagatgctgtgagccccaaggttttgatggagtttgcttggaatcctcttgacttcatgccacattgacgtgaactttgatgtataataagcagcagcaacttcatgtgaaaatatggtcaggtagttatatgtaaggttacgtggtccagtaatgtcttagattgataaattaggtatggaatccatcagtgttacgtgatgagaataggtgaacacaccttgtcagtgatgatgtaaacttctctccttggcaggacatgggcaaacatgctgattggtgcaaatgtggtgccgagctgtccatagctgcagtgaaagatgaagagcaagaccttctctaggttttctagctttcattaaatgtatttttttccccagagctaatttgaaagttgattggaccactgtggatggggtgtcattaagaatgtgggaaatagg

SEQ ID NO: 171988 - DNA, 485 bp, Homo Sapiens
gtctcatcactgtatactgcacaactgatatgtgtcccatttatgtttcaccatctattacatgcagctcaagagtgtaaatccaatttgtttaaactcaaaccaatccagcctattttatcccctaagatttgtcatattgcagaatattttaggttatgaaaactgattttaataaagaaaggttactagtgaggataaatgcttaaactactataacagagaggtggatggttattagtgtaagtcctacccactggcaagtagaaaaaatattattaggctaagcaggaagaattactgcaagatatgctggtttgatgagagcaataaatctaaaagaatacatacctaagaacagtctgcacatcttgatttggatagccagaaaggttcagactcatcattagataattttttattatatttttggagatggagtcagactctgtgcccagtctgagtgcagtgcactgatgatgcga

SEQ ID NO: 171989 - DNA, 966 bp, Homo Sapiens
tagggtggggttgcaggtcactgtagcgggacttcttttggttttctttctctttggggcacctctggactcactccccagcatgaaggcgctgagcccggtgcgcggctgctacgaggcggtgtgctgcctgtcggaacgcagtctggccatcgcccggggccgagggaagggcccggcagctgaggagccgctgagcttgctggacgacatgaaccactgctactcccgcctgcgggaactggtacccggagtcccgagaggcactcagcttagccaggtggaaatcctacagcgcgtcatcgactacattctcgacctgcaggtagtcctggccgagccagcccctggaccccctgatggcccccaccttcccatccagacagccgagctcgctccggaacttgtcatctccaacgacaaaaggagcttttgccactgactcggccgtgtcctgacacctccagaacgcaggtgctggcgcccgttctgcctgggaccccgggaacctctcctgccggaagccggacggcagggatgggccccaacttcgccctgcccacttgacttcaccaaatcccttcctggagactaaacctggtgctcaggagcgaaggactgtgaacttgtggcctgaagagccagagctagctctggccaccagctgggcgacgtcaccctgctcccaccccacccccaagttctaaggtcttttcagagcgtggaggtgtggaaggagtggctgctctccaaactatgccaaggcggcggcagagctggtcttctggtctccttggagaaaggttctgttgccctgatttatgaactctataatagagtatataggttttgtaccttttttacaggaaggtgactttctgtaacaatgcgatgtatattaaactttttataaaagttaacattttgcataataaaccgatttttaaacacctggtgtatatgatg

SEQ ID NO: 171990 - DNA, 762 bp, Homo Sapiens
gcgctcctgccacgtgagtgcctgggctctcccggtcaggccacgagacccggtccccgtccctggggcctggccagagtcgctctcacccctcctgccccgcgagctggcggcggaagctgggggcgtctccacagtcttgtgggggcagacgcgcgctcgtgtgtggggtacagttcacgatcattttcatgactttttaaggcagtaatcgttctggtcactgggacacagctgccctcgcccattctaaaaagtcagcaccctcaggcccgcgggtaaccacctcctcctgagcacggtgaccaggtcaaaggctgtccctcgggcctcagtgttctcatctgtatgtcgagcactgcacagaatcagctcatgcgctgaggctttcactcctgtgatggaagagacagagaagggggtggcctctcctctccctggggacctgccattctcagcacaggcgcatggcaggcagcagcctcccttctgccagcagaggggcttaatgcaccctgctccatttgtaattcatgtgcggtgagctcactgggatgagtcagtttggatatatattcctccctgggtctgccccattttatggggtgttgcttaatcatttgcgttattccatcgacatgaaatatttagcactcagagatcatttctggtcaggagaaattgtgctttttaacccaaatagaacttcataaagctcatagtctcatcagtatgatataatgtcactgccccctaatgtaa

SEQ ID NO: 171991 - DNA, 911 bp, Homo Sapiens
  misc_feature (745)..(745): n is a, c, g, or t
  misc_feature (816)..(816): n is a, c, g, or t
  misc_feature (840)..(840): n is a, c, g, or t
tcctccaggtctcccggcaacggctgcggcctcgcccacgttatggcgcccgaggagaacgcggggaccgaactcttgctgcagggttttgagcgccgcttcctggcggtgcgcacactgcgctccttcccctggcaggcagtaatcgttctggtcactgggacacagctgcactcgcccattctaaaaagtcagcgccctcaggcccgcagagcttagaggcaaagttaagagactcatcatattctgagctgctgcgggatattttgcagaagactgtgaggcatcctgtgtgtgtgaagcacccgccgtcagtcaagtatgcctggttctttctctcagaactcatcaaaaagtcctcaggaggctcggtcacaatctccaagagcacagccatcatctcccacggtaccacaggcctggtcacatgggatgccaccctctaccttgcagaatgggccatcgagaacccagcagccttcactaacagacgtgctgtattgcccagaagccatcgtgtcgctggtcggggtcctgcaaaggctggctgccttgccaaggagcacaagcggggctcctgaggtcctacgtggcctttaccgtccgcaacccagagacgtgccagctgttcaccaccgagctaggccgggatgggatcagatgggaagcagaagctcatcatgaccagaaactgtttccctatggagagcacttggagatggcaatgctgaacctcacactgtangactcacacatgactccaaaggggattgtgagaatcaagtcactctcgtggggaagaatttttatatgggnaaagtggataaaactttcattggnactggaaatgtttgggagaatatttaaatttccaaaatcaggaatcaaaaactgcccctctattaagacaa

SEQ ID NO: 171992 - DNA, 472 bp, Homo Sapiens
  misc_feature (12)..(12): n is a, c, g, or t
  misc_feature (51)..(51): n is a, c, g, or t
cattatatttantgtttattttaggtcaaacccaagttagttcaatcctgnttcatatttaatttgaagatagaaggtttgcagatattctctagtcatttgttaatatttcttcgtgatgacatatcacatgtcagccactgtgatagaggctgaggaatccaagaaaatggccagtgagatcaatgtgacggcagggaaatgtatgtgtgtctattttgtaactgtaaagatgaatgtcagttgttatttattgaaatgatttcacagtgtgtggtcaacatttctcatgttgaagctttaagaactaaaatgttctaaatatcccttggacattttatgtctttcttgtaaggcatactgccttgtttaatgttaattatgcagtgtttccctctgtgttagagcagagaggtttcgatatttattgatgttttcacaaagaacaggaaaataaaatatttaaaaataa

SEQ ID NO: 171993 - DNA, 686 bp, Homo Sapiens
ggggacactttgctacggagtgcatcggacgtcgaagcctagagtctctgcgtctttccctcttccgctgcctcattcctttccttcctagccttggtcgtcgccgccaccatgaacaagaagaagaaaccgttcctagggatgcccgcgcccctcggctacgtgccggggctgggccggggcgccactggcttcaccacgcggtcagacattgggcccgcccgtgatgcaaatgaccctgtggatgatcgccatgcacccccaggcaagagaaccgttggggaccagatgaagaaaaatcaggctgctgacgatgacgacgaggatctaaatgacaccaattacgatgagtttaatggctatgctgggagcctcttctcaagtggaccctacgagaaagatgatgaggaagcagatgctatctatgcagccctggataaacaggactggatgaaacgaagaacaacgaaagacgggagcaaagggagaacagacagaaatagagaaatatcgtatggaacgccccaaaatccaacagcagttctcagacctcaagaggaagttggcagaagtcacagaagaagagtggctgagcatccccgaggttggcgatgccagaaataaacgtcagcggaacccacgctatgagaagctgacccctgttcctgacagtttctttgccaaac

SEQ ID NO: 171994 - DNA, 607 bp, Homo Sapiens
  misc_feature (460)..(494): n is a, c, g, or t
atatcaccatcccagtatcacaataactcatagaagatatcatgtaggacctgggctttgggggggtcccaaacatggtatgcagaaatgtgatggttacaggtcagtacaacctcagtccttagaacccctccacacttcagctctgcacccactttcctgtcatttatttatataggactgtagttttttgtagttcgagagcctttcgaagcttaatttatattctttctttgtaccttttttctaaaattaccaaagatattacacaaaggtaaattatgttctctgttttatgctttatctgatgaagccaaatatcctcttattgttgatcaaaggaggcaaaagaatttagaggcaaatgacaagcgataggctattgcaacctgagaaagagaactgctccttcatcgtaaatttagaagaccaagtagataatggaaccaaagttgttacnnnnnnnnnnnnnnnnnnnnnnnnnnnnnnnnnnntgtacctctacagagaccaaactcattctcttaaagagattttatggggctactgcagataaaaataggacacatattaaaggagctacgaaggaagggagtctcgactaact

SEQ ID NO: 171995 - DNA, 709 bp, Homo Sapiens
agcctagtaactcaatgaaacctcaggcacaaataaagcaggacgaggaccagtagcatttctaatggcagtcaaaatgtcaatagtgttaaggccaccacagtggatcaacagattctaaggttcgcccaaaagtctcatggaaaatataacaaattctagcaccaccgcatagctccgaagtttcaatatattttgcagttccttcaatagtgttacaatattctgtggcaaatttggtaataagttggagtaaagtagcacttttatcatccacgggttcaccgtagctatttagaagagactgatactgagcagctagaacatttattcttgttttcaactctggtaaacaatctctgatgtgatgcatcagtaacctgtttagagtcctagcaagatactttgttccatttctattggccagagatggatatttcttttgaagaaaagcatactcatcacggattgaatcagttacactcttcttgttgttaatatctagctggctcctgttaactactccaattattccaagtttgactggaataacccttcccatcaatacatccatggcatcagtacccgcatccatgagatcaagtttagtgattacagctagggttctgcgaccatctggatctacctctcttgaaattttaagtgcctctgatgttgccatatctgtattagcagcagtgacagcgag

SEQ ID NO: 171996 - DNA, 512 bp, Homo Sapiens
tgattgggctcaggaagcaaagctggatcacaggaaatccccgtgtccttgttcaggatgacctggaggagatgtggggggagaatagggggtgcccgaaagcgctcttcgggtttgcagacgtagggctcctgatggtagggtcctgggggagaactggacagctcagacacatcggagcacttttgggaatccaccattaaagcatcaaatacttcaaagtcagttttcttcacttgaatgatgttgttaacctgtgccaagctggctggttactatgggctcggaagggtcgtgcgtccactgaccatccacaaagaacttgtactgatgctctccttccggcagatccaggatggctacaaagttattgtggcttctggtgaggggaagtttactccagttgttgaaggcaccagataagtaaacttcctttccgcccccgtccatcgaaacaccgttggccgagcctgggcgggagtttatcattcaattcagatatgttgcaggca

SEQ ID NO: 171997 - DNA, 959 bp, Homo Sapiens
agcggaagtcgctgaggggtggtgaagcggttgggaaagtgtcggtttatcttcgcgccccttgcgttcttgccgcggcttgcctgggcaggtaaagcgcgattgcgagagctcggcaaccctgccgactcagccggaaccggctcccggcccgaggggcgtggtgtcctggtgctccgactccttccgcaggctccttgggacccgcggttccgggagtcccttgctcagggtccctttcctgcagtgaggcgccgtccgccttccctgtgtccccgcagacccccatcatgggcaataccagcagtgagcgcgccgcgctggagcggcatggtggccataagacgccccggagggacagctcggggggcaccaaggacggggacaggcccaagatcctgatggacagccccgaagacgccgacctcttccactccgaggaaatcaaggcaccagagaaggaggaattcctggcctggcagcatgatctggaagtgaatgataaagctcccgcccaggctcggccaacggtgtttcgatggacggggggcggaaaggaagtttacttatctgggtccttcaacaactggagtaaacttcccctcaccagaagccacaataactttgtagccatcctggatctgccggaaggagagcatcagtacaagttctttgtggatggtcagtggacgcacgacccttccgagcccatagtaaccagccagcttggcacaattaacaacatccaccaagtgaagaaacactgaactttcaagtatttgatggctttaatggggggatttccccaaaagtggctccgcatgttgtcttgaacctggtcccagtttctccccccacggaacccctacccatttagggagcccctttaccgttctgggcaaacccccggaaagaaggcgcttgttccgggggcaccccccccttaaattcttcccccc

SEQ ID NO: 171998 - DNA, 412 bp, Homo Sapiens
  misc_feature (20)..(20): n is a, c, g, or t
  misc_feature (29)..(29): n is a, c, g, or t
actcgctaaacgggggcttnccctggttnacccgcggcacccaagtggattgcccaaacaactggattaatgtggacccccagccgaagcgggcaagcgctgttccaacaggagatggcccgccttgcccgagaagggggcaccgactcacagcccgagtgggctctggaccgggcctaccgcgatgcgcgcgtggaactctgagggaagagttagccccggttcccagccgcgggtcgccaagttgcccaagatcaggggtccggctgtccttctgtcctgctgcagactaaaggtctggccaatgtcttgccccaccccgccagccgcgatacggcgcagttcctatatacatgttatttattgtgtactgactcaattctgccccgtcatcgaagacccgtcatcacag

SEQ ID NO: 171999 - DNA, 830 bp, Homo Sapiens
tatgctctcgatgacgagtgtgggcattttaagacatgaaaacagctgaatcagtagtgtttggagtgatacattttgcccatttttggccagtcctagaacagtactcaccacaagctgcatgccaaatatgaactaatgaggctaaaacactgaagaccaaatagaaccactctagagtcggtttcacaatgagatactcctccccggtctgaaaacagcgatctgctgtagttcctatcctcccgtgggcacctatccctgctacagtacctataaccagatgtcctccatcatccagcctccaggacaagtggtgctcagtgagtcacaactctgagaaacagctgctggttaaccgatttgtattcctgtatatactcgacttgggtagccaggattttctcgtttgtcttgaatatatttacttctaaaaagactgttagtcttgttgggaggtgagcagaggaatgtttacttgctggagaacatagtaacaaacatcacttctcacccctcataaacagaaagcccattgtctgtgccgtgaaaagaggactaccttgtcaggaagattatacttacctctacaagaaaaaggactcgtattaaaatcgacctgtggttaccacccttagaaatgctgttttcagatattcctattcctagtcttagaggcagccatggaatatatagtctcctctgaccttggggtcaggaagaaagggaaatctattcataaaaggaatttaaattctggcctaggcctctcaaacctgcttcaagtgaaagaagatagcttaactaacaggagcctcaagttgaatgtc

SEQ ID NO: 172000 - DNA, 286 bp, Homo Sapiens
cctcgatgacgatctatacaatagttattaactgattagtgtgagaaaattatttcccgtctacatacaaaaatacagatttgaacactatgaaaaagatcaagacaagtaccatgaaaaactggtccttcaaatgaaagggggaaaattgagggcaatgtgaggcttcgcctgctgtcggggacaaatcaatagcagcaaagctttggggccccaacccactccgtacatacagacttgaacccaaaagccaggccagccaggggacgcccacccaggtcttccg

SEQ ID NO: 172001 - DNA, 260 bp, Homo Sapiens
gcgctcgatccgggaggtggacgtgaaaggtgaccaccttcgagcatcagtacgtcagtgccatcaggaccctgtgggaggacccgggcatcaggaatgctacgaacgaaggcgcgagcaccagctctccgactctgccaagtactacctgaccgacgttgaccgcatcgccaccttgggctacctgcccacccagcaggacgtgctgcgggtccgcgtgcccaccaccggcatcatcgagtaccctttcgacctggaga

SEQ ID NO: 172002 - DNA, 1002 bp, Homo Sapiens
  misc_feature (12)..(12): n is a, c, g, or t
  misc_feature (856)..(860): n is a, c, g, or t
  misc_feature (863)..(863): n is a, c, g, or t
  misc_feature (865)..(867): n is a, c, g, or t
  misc_feature (904)..(912): n is a, c, g, or t
cccaaaaacggnggcaagcagggtgcacgttggctgactgatgaggacacgagaaacctcaaggagatcttcttcaatatcttggtgccgggagctggcccagaaggaacgccagcggcagaaagagctggagagcaattaccgccgggtgtggggctctccaggtggggagggcacaggggacctggacgaatttgacttctgagaccaacactacacttgacccttcacggaatccagactcttcctggactggcttgcctcctccccacctccccaccctggaacccctgagggccaaacagcagagtggagctgagctgtggacctctcgggcaactctgtgggtgtgggggccctgggtgaatgctgctgcccctgctggcagccaccttgagacctcaccgggcctgtgatatttgctctcctgaactctcactcaatcctcttcctctcctctgtggcttttcctgttattgtcccctaatgataggatattccctgctgcctacctggagattcagtaggatcttttgagtggaggtgggtagagagagcaaggagggcaggacacttagcaggcactgagcaagcaggcccccacctgcccttagtgatgtttggagtcgttttaccctcttctattgaattgccttgggatttccttctccctttccctgcccaccctgtcccctacaatttgtgcttctgagttgaggagccttcacctctgttgctgaggaaatggtagaatgctgcctatcacctccagcacaatcccagtgaaaaaggtgtgaagcacccaccatgttcttgaacaatcaggtttctaaataaacaactggaccatccaaannnnnaancnnnaccaacaatgtaaggacccggtacccccatagtgagnnnnnnnnnagtgagtccccctcacgaactccgcgcaccccccttgtgggaaccgccacagcccccgggagagagtttttaggcgcccccctcttgggc

SEQ ID NO: 172003 - DNA, 711 bp, Homo Sapiens
ccgctacttgtcgctggatatgctgctgtcccatgctggagaacaacttactggaggtgcccccccgccaagccacaggagcagagagctgtcacggtggggaatgctgctgggacccgtgcaggacgaaaggagacagaagaaaaaggccatcttcctcctctagccttgttagccccttcatagcccactgtgggtcaggctggcaaagggtaaaggagttttcagagccccctcttcagtgtgacaaggaagggcaaggtcagggaaatttggagttaagaggcaataaatgagtacctggcacacctagtcgaggtgtgtccactttctccatagcatggttactgtttttttcttttcaactaataagaaatctctggagacacactgtctccatgtacatatcctgttcctcatgagactcttccccattccccgaccaggttcagcaaatgttgctgattctggcctgattcaatctttatgatgactgccaagcgacgtttctgcagcccagcactccttcctcatttgccagtcatccctcccttctccttcatttattttcatatatccactatggattcccattttttcaaaagtcgacttcatcattgacctttggggatgggggaagagttcctcagaatagttcccgaattgggcagcgagagcccttcgagtgcctcctatatccagcgcaagtac

SEQ ID NO: 172004 - DNA, 1085 bp, Homo Sapiens
  misc_feature (99)..(157): n is a, c, g, or t
  misc_feature (168)..(168): n is a, c, g, or t
ttcctggggatgaggcttagaattcccgggtgccctttgggttccctaggccccccaatttccttttccctgggggctgtggccaagcccaggtgttgnnnnnnnnnnnnnnnnnnnnnnnnnnnnnnnnnnnnnnnnnnnnnnnnnnnnnnnnnnnagggaacactncagaggagcccgtcccatggccaggcagacggggatggcaggggcagcggtggcctcccatcctgggccacagggaaccctgctcagcctgttctatacctggtgcacctgagggggtagctcatcctcgagcccctcttcggggcacgggctcagggtgccttgatgccgactgcccatctttctgcccacccctccaagaggcagccgagagaaatgagagggaaccctgggcactgtgccaggatctgtgatgccaccgtagcgcctctggaagcccccatgcagggcggtggtctcaggagctccaggccggggtgctgcacagggatagctagcagagcgagggatagactggggggcccgggcgccctctcccccttcatcaggggcgctttctccactctcatcactctcccggcggtgccatacatgccgctcaggttcagcctgggcctgctgcttgtggagctggtgcatatagagggcatgcaggctcatctctgtggatgcatattctgacagcaccaggctctgcagctgtccttcccacacgctgctcccggagctggctgtcctggcatccaccccagagcctgtcatggtgctgtgagcccggcctgtgggcgcctgcccgggttgcagcggggagaaggagcgcagggcagaggcgacttcagccctgtgcctggagccctgcaggtctctgggcagtggagggccccggcaggatgagccagctaccacatttgcgataaggctcaggggctcagactcagattgtaaggactggatagacgtaaagagggcattttcagggagcagacccccttgggcgaggctagcagctgctccatcccgctgaacctgctccttgaggaagcccctcgtgccgattcgccacccaggcctcgctc

SEQ ID NO: 172005 - DNA, 644 bp, Homo Sapiens
  misc_feature (333)..(359): n is a, c, g, or t
  misc_feature (560)..(560): n is a, c, g, or t
gacattagcttgcagcctgaaaatatttcttgggtcatcagattcctcagacacattctctttttccattaccttttttccttattgttgacctttaggggatggtggagatatagggtgaggtgagggaggagaaagaaagggacacttctctaggctttacagaacactctaaatctggatctctagatctcagcttctgcttcatgaagattccacctgccaggtcagtccttgtgattgcagggtgtggggtccctaggatttggctagcagactgagattgaacacagagacaaacataggcagacacacacacgcgcacacacacannnnnnnnnnnnnnnnnnnnnnnnnnnatacaggcatgcacagaagaaatttcttggcaaagcacctaaaccccttttgctctggtgtgtgatagttgcccaggatggtcaggtctagctatccactggcacctttctgccccgctcctggcccagtgcttgagctcccttgctcatggacaaggagttctgtgtttctcaggcttcagtggggcagggagggaggtnccagagggaggtaacctacaccatgttaactcctgagtgttgggcagagctcccaggaagcttgagcatgctggcctcttgatc

SEQ ID NO: 172006 - DNA, 698 bp, Homo Sapiens
taaaaaatcgcttctgtctggtgttcatagtacgtggtggcatacagaaccccacattaccatgaaggcgttagaagcagatggtttatacatgcttggtataccaagtgtttagcacctgaagtgtggtgtcattgattttactaatcaccatgttaccagtgctggcttcagattgaataaataacccacaatccattctcatccacagcaaagtcaatatcttgccaagcaacattagcatatgaaaagcggttattataggcagcattagggagagtttgagtcacagcaatcgtgttggtggtcaggttaactctggcaatattcccggtgttgtacatgttgacgtacatgttgttgttgtaaactgctgtaccactaccttggccataggtgatccgcaactctcgagcatttatatacaatagcaaatcatccagtgtgttgtacagtcttataatactccaacagtctcccatctgtattcaatggcgccacccaatacagtcctttgtttggatgctggggagagtaatccctaccccaagcaccatatagataagaaaaccctctccagttgagctgaaccacagacggtttgctgatgttcaccacaccaccatgaccacagctccctggagtgggaggagggtggacgaaaggggtgttttgatctttagaggcctcacactctt

SEQ ID NO: 172007 - DNA, 555 bp, Homo Sapiens
tcaagatagaactgggacctgcaggtacgacttcgcctacttgctgcaggttgtggacctggcctattagcagatgccaagatgcgggtatttgaacgttcagtgtattttggtgattcctgccaagatgttcttagcatgcttggctctccacacaaagtcttctataaatcagaagacaagatgaaaattcattctccttcccctcataaacaagttccatcgaagtgtaatgactacttttttaactacttcactcttggagtggacatcctctttgatgcgaatacacacaaagtgaagaagtttgttctacacaccaattaccctgggcattataatttcaacatttatcatcgctgtgagttcaagatcccactagccataaagaaagaaaacgcagatggtcagacagaaacatgcacgacctacagcaagtgggacaacatccaggagctcctgggccaccctgtggagaagcctgttgtcctgcacaggtcttcctccccaaacaacaccaacccatttggttccacattctgctttggtcttcat

SEQ ID NO: 172008 - DNA, 622 bp, Homo Sapiens
atactgtcgctgggatatagtgagccattatgaagggctgtcaatctgccaacactcattcactaactctttctgttgcctaaaggagaaaattgtgctgagctttgaataggttactgcctattatagagaagagaatggtctgtagaaggggtgtttattctcaccattgactaggtgaccacctgctaaggttgcatggttatggtttcaatgtccctattgtgtacagagttcaagctcaaagaacagcaagtctccaagttagatttaagagaggatgtttttcttctcggtccaagggaaaatgtccgagtgtttccttctgatactggagagcatgcgggatggaagttggtttgctctcctgcgtcacatttcacaggatacaactttgaaagtgagagttcatagtttcttatggtaacttgaacttcaaaataactaagacctcagcataccgtgtcttgggcccactgaatgaattagtggtttttagaccatggcacttaatccaagctcctgttaaggctaatacctccgttaaaggtttccttgccaagcagggaaacaagggcttggccttgatacaccaatgagatgaaggctcaagctctcatat

SEQ ID NO: 172009 - DNA, 869 bp, Homo Sapiens
  misc_feature (135)..(153): n is a, c, g, or t
caggatggaaatcagcaatggctaccagcagagagggcaaagtcagtgagctaccggaaaccactgttgcttaataacagccgaccccatgttatgaagccctgtgttaaccggccagatacaaaagaactggcnnnnnnnnnnnnnnnnnnncatatgttgaggggacggagagagaaaggaaaaaggaaaagaacagaagaacagagttgtctagaatctaaggaatgatgacttttccaggcacatacagactatcactaaagtatgtaaggaactgaagcaattcagaatagcattacatacaaacagttctgagggaaaaatgttaacaccctgtgagcagggaggtgcttgctcagtctagcattcaagtcaataaccaataattagggagcacccactgtgacatgccagctccctgctaggcccagggggaatggaaaggaaagacatgaaatgcctgagggagcttgtgcaatgggttagaggcacctataaccaaggagctgcaaactgctggccccgggggccacatacggcccacaggtatttggtttggcctatgaatgttcctttaaaaacttaactgaaaacatttaaaaatcaggagagtctatattttaaaaagcttctcttttaaaagtggaagctttggcaacagtgggtcaatcttaaggcatgaggggagaaaagggaccaggggaggagggagctggaatctaacagcagcctctattaacatctagcaacctctctctaacagtatctctctgataacatctagaagagggacccgctggtttgccaatccggacacttcttactgtatttgatcagcccgccctggtgtggttgtacagtctacc

SEQ ID NO: 172010 - DNA, 803 bp, Homo Sapiens
  misc_feature (73)..(120): n is a, c, g, or t
  misc_feature (619)..(629): n is a, c, g, or t
gatggagctcggctccattagctgtgtattacagaagtagcagataaaaaacagatatccataattataggcnnnnnnnnnnnnnnnnnnnnnnnnnnnnnnnnnnnnnnnnnnnnnnnnctagcccaggaagaacaaaagacctgaatatccttacaattaaagaggttgaccacaagttcaaatttgtcccacataaaaaacactggacccagatgctattataggtgagaaaacaagagtgactagttcccagctcattctaaggagagagcaaaaccaggcaccaaaactggacagaaacattacaagaaagaaaatcacaggctcacttttacacaataatatatattcaaaaatcataacaaagtatcaacaaattgaatctagcatataaaaaaagataaatcatgatccagttgagtttatccaagatatacaaggatattttaacataaaatctataaatataattcacccatattaaaagagttcatacaaccatttcaactgatgtagaaaatgcattagataaaaacatatgaattcaagattttaaaaaatccttttaaatagaaatagaagaaaccttccttaacctgataaaagttactatttnnnnnnnnnnncaatacgcaattatcttcaacagagagaaacggaaagcattcctttgaaaatcagaaataaagtaatctactatcacttctattcagtattgtatgaaaagtctgccttcgcaacaagaaaagaaatttggccaggacagtggctcatgccactgtaatacacatatatggtgg

SEQ ID NO: 172011 - DNA, 379 bp, Homo Sapiens
cgataccagacagtatgaggactaagtttcagtataatccaactgggtaagtacagtgtctgtaagagaaggggaggatcatatggcaaaggcgctgcaggatctgcctgacttaagccagcaggaccccagagaaaatgcctggaagtggatcccaaagatgctggatcaagaatggggaataggaagtcaggaaagggacactttgttgttatagtaatactgtgcagtgacataggatttgacaccctggcaatgaccctggaatgactgttagaagcttggctttcccagtatttctgtgacattaatcacattttaatcacaacttccatatctgtaaaatggaggactgggacaatattgattatttttaaaa

SEQ ID NO: 172012 - DNA, 681 bp, Homo Sapiens
ccaagacaaggtgacatggtactgtaaggacagtaaagcaaaactgtagttagaaagtccgatttacagagacttatggcattagctagctggtcatagtatccatagaaataaaagagatggaaagcctactaaattcttatctgttctgtataaaaagaagaatcaagtgaataaaagtctaactcgaatcaaaaaaacggagtcacagctcctgaatcaattccaagacttgggccagtttgcagacccatatctccttaaataatgaggaggctgtgtccccactgcattaccaaaattgtatactgttcatttttctctcagccttccccaaagggacctatagcactttgccaagttgactgtgcattggggaaaagggaataatcagactttgggggaattactggacattggttctgaactcagactcagggtaccccaggaaaactaatgcatcactctggttcacaagtgagagtaggggcttagggaggttaggtgatcaatggagttttagtttaggtctgtcttgcagtgggtcgtcttgttatctctgtagctgcagaataattggaatagacatactcaacaattagcagaatccctacactggtttcctgacctgaagagtgagggcaattacgctataaagtgagccactgtacctgcctccat

SEQ ID NO: 172013 - DNA, 588 bp, Homo Sapiens
gctgaggattgacacgattatacgtgttgttgacaacggctagtaagattatgttcgtgactatgaaaaccctatcgagtccagttaataactaatagtgtggagatgcatgcctatactgtccagcgcctgtacaaagcaattcttggtgattatgctcaacaacctttggtacaagtggctgcatggtgtataggtaaatatagtgatcttcttgtatctggccagttgtgaagaggaagagcctattcaggtaacagaggatgaagtgttggatattttcagaaagtgtcctaatctctaatatagtccacctctgtgacacgaggttatgccctcacatgccattatgaagctaaccactcgattcacttgtactgtaaaccgaattaaagaaagtggtgtccatctacggaagcagcattgatgtggaactccagcagagggcagtataatataatgcacttttcaagaaatatgaccacatgtggtctggcctacttgagagaatgcctgtcatggaaaaaagtgaccacaattggcctactgagattgtgcagaccaatggagagacagaaccagctccac

SEQ ID NO: 172014 - DNA, 457 bp, Homo Sapiens
aagtgtcttgctactttggaagagggtcaccagaaactctaggacatggctggccctccctttaatcataggcccagaaaacccagcacagttttcctggattacagatgatagacttgtgacccaaagttttaactgtcttttcatggtcacatggctaagaagtgatggaaggcgaattagaacccaaatctcatttagttttctcagaaaatattttcttctgctaccacgtacacaagacaaaatattaagtgtcatgtgtggatcccatccttaagaaattgacttcctattaaggatagggtgtgtggtgtgtaaatgaccatattacatagcaattgcacatagtaggctgtccattcatacttttcaaatatttttcaagggagcatttctattatataagaaaagcgatatacactagataagaaaaatatacacatatatacatgtg

SEQ ID NO: 172015 - DNA, 487 bp, Homo Sapiens
tacgcaaaccccgcagtcacataaggaggccctggtcctgtcccacagcgctattggggcccgagcttctcctgtgaccagtggttgtggggcaatctattctctctgccattgttcagactaataatttctagctaacctatctctcaagatcatagattctcttctctcttacctccattccacttattgagccatccagtacttgatttttggctctaggagttccctttggtctttctgtatatcattctatatctttgctgtcatttacctcttcctcactgtgggtttcatgcggcaccacactcagtccattaagtacaaagaggagaacctggtgaggcggaccctgttcatcacaggactccccagagatgccaggaaggagactgtggagagccacttccgggacgcgtatcccacgtgtgaggtggttgatgtgcagctgtgctacaacgtggccaaactaatcccagcgcaggta

SEQ ID NO: 172016 - DNA, 547 bp, Homo Sapiens
tatggatgactgaatgaacactgtagcaaaactaaggttcaatctagatccactctttattataaaactgatcacaaaagccccagtggggtggcgtgtagaaaaatcacggtgcaaagtttgaaatgggctagtttctaccacacttctttagaacatgtcctgttggagatctggtcacagaaatgaaggacagactgatagaggcaaaccacagtgtacactaccataagacctgccagggagaggaaggaccctagacagagtagatcctctgacccctgtattccagatgcagagaggggcatgctggagggagtttctgaaaatcccatttacatcagtccttcctggagaaacaaaatgaaggaggtagacagataaagtgggccaaagaaggaagacgaacgggagaaatatatattctgcgatgagagtgggtgagtttatcacaaattggatcagtattgttttatagaaaagactacgacagaattaacagcaggctacttaaaagacttaaatgtggggccggcgcagtggctca

SEQ ID NO: 172017 - DNA, 566 bp, Homo Sapiens
ggtaaaatagatacaaaagttgaaaaaaatagatacattagaccttcctcattttagaaaaattagacatgtcaattgggaaaaatacaaaacagtacctaagtggggaaaaaaagacaatagaaacgaagcaggtgagaaaaatctagaaaactgaaaccatcacaagaaatccctgtatataacagactttcaactccatcaatgtgtctttccaattactgtaccaaggaatagcagctttaaatgaccgatctgaagaaaacacggcactgttaagcttatgaggtaaatatctaacatctatttctttaacagaatgaatgaaaagtatgctgactcacattaatggtgaaaattagaagcatacatctgaatatataagaattaataccttattaaaatggataaaatcacttttctatgatctccaaagagtattattctgtttaatgaaattttactaaaattaacgtagtacttcatcgtatctcattctcagtcttcatggccaacataaaaataaagttgaaaggaggtgcctttcagtaaaagggaaagaagct

SEQ ID NO: 172018 - DNA, 756 bp, Homo Sapiens
  misc_feature (356)..(356): n is a, c, g, or t
tcatcatgcggcattgcatgtctagtatatttttaattatatctactgcatatgtatatgttactatcagactggtctacataattactagacgattatcctatcagacttacagtaaattttgtcaattatagacataaaggaggcagaaggaaatagagctatacaaatgcaaaatttttatatacttattgaaattaagtttattttaatctgaacaagattgtcacaaattacacacaactgaaaaaacttgtgaactggcatgtcagcaagatagctgtctagactttgtcctggtattcatcttccccagcaaaaagggaccaaaacaatgaataaacaactgtattttncactatgcatgaatgcggaagtacactggagagcaccaggaaaattgcaaaatcctcgtggaacacagaaacccaggatagcaccatagacaagagagtgaagaaccctatttcagccatactgttttccctgttgagatcagctcaaagccaggatgaacttcttatggggagagggtaagctacaactgcccagcagtcctcgttactgctgcagatgcctgtgttctttgctacaggagaggtagatagtcctcacatgtcctaaaccagttaggagagttgcctagagttcatgtaactgcattgcctcaaaacaggagcccattttgtgcagacacgggaactcatcccagtcacgacactagagctgtaatgacagcgggggtcttaagcgtca

SEQ ID NO: 172019 - DNA, 327 bp, Homo Sapiens
gctgctacatgcactaaaaatttcctaatttttaaggactagataagaccacattctaaaagttcaagatttttttaaattttcatattgaacacacgctctccatagatttgcatcccactgaatctgataattggctctaatacgaacaactgaggttttgttcagatccatggcttccttacgcccacctctgcatggtcaccaccagatctggcaaaggcgttgattttctaggcccatttttcacctaaaaacgatgctggcttttgggaagctgctgctacacattcaacaataagtggggggccggccgcagtggctcat

SEQ ID NO: 172020 - DNA, 563 bp, Homo Sapiens
  misc_feature (182)..(190): n is a, c, g, or t
agatgctgtcttcaggatggtaagatcgcttgctttgaaataactcagtttatctccaaatccaccagtgattcatactccttttgtgctccacaggtaccaaaaacaaagctacgcacatgggtgggtacaaagagttacctactgatggaaattaatccaaagaattaaataagttacgnnnnnnnnntcaatgatgtcaagtaatagttaaaattcaagattttactttagtactggttattcataaatagattcttttatcccatattagaatattgtcaacacaagcttattggaaaggttgacttaactttgccccatttttcttctttcttgctgctaccctatgacagaattaccatctctttgatgaaaacaactcaataaagaattctctttcaccaaactcagcttttgttgaacttgttaacgcaaatctattccctatcttatccagtcacatgctgaaaaaaattccatcttttaaaaatctgttcatggataacttacggttctctgaaccaccctatcaggaaggcagatatagtattacgaactct

SEQ ID NO: 172021 - DNA, 455 bp, Homo Sapiens
gcaagaccaacccagatgaaagtaggaataaagaaagtcagtgatcaattgtaagtttcagaaaacttaggtgcaacacaagttccagaaagaacgaagtcagctggttctaaaataattgaggaaggcttcagggaagagatgagagagaaggataaggggaaaatgcaatgggagatgtcccatgagaatgtaaggttctagggaagcatataaatcctgaggagggcaatgaacactcaagaacgtgggaaagaatttaagccagttttctttaaatctcaaagaggaagacccaagatgatattggggttccataactgcatgcatttcaagcctatcactgcactgtgtgggtcattctcatgacagagcagagttaccgtctctataccagggtgcataaaagcacatgcagttgaaaatgtcttaacgacaaaaagcaaaacaaggat

SEQ ID NO: 172022 - DNA, 567 bp, Homo Sapiens
tgcctgtcttcaggatgggtcagctttggccatgctgagttgtgagttgtggttcccagggagcagctgagtaggctgttgggtgagtggttctcaagctcagagctgagctgggggcatccatttgaaggttatgggaagatggaaagcacgccctggaggtgggtgggtgagctcacccaggaccacggtgtggcctgagaagtcggcctgcgatagaacccggggaatcccagtgtttccagggtgggcagaggaagaggaggctgggaagggaatttgtttctctggccagagctgttgctcagcgactgttggctggtgaggatgaggctcatgaacagatgtggaaacatcgtgggatgatctcatggtgggtgggacttgtcgccgtcatgcactcagcactctctggcctttattggtcaagctgcctgctgtgtttctggtgcccaaatgttctgggcacactgttgtttggggaagaatcgcagggactctccttcactcttagatagtggcagcgcttgcctcgctgcatctcgtgttctcaaaatcagcacatgc

SEQ ID NO: 172023 - DNA, 537 bp, Homo Sapiens
tcaatccacatggtcgagtccatggatggagaacccatagaaaaggggggctgcctgtacacatgaggtgttagaaggtgataaatgctaaggacagagagcaggaaactgaaagtgtggggatatgctatgcaaaactgatatatcagggaaggcttcaccgagaaggtgtcctttaaacagacgtgaaacggagctatgcgagcattgggaagagcataccaggacagagggaaactgccactgacgagggcccctgggcgggaactgtgctcggtaagcctttggcaatccacgcccagactaggagcctgcacccataaccaatggaccaacctgtctgtttgcccctccccggggccttctcctggtgggtggggcccccgcaggtgtgattcgctcactgcacagcctagggccgcactggagcatgccttactgcacagagacccggccccacaaaccagggagactcggctgacggcatttgagctggtctatgagcagatccccgccacccccatctgaagacagatt

SEQ ID NO: 172024 - DNA, 625 bp, Homo Sapiens
  misc_feature (612)..(612): n is a, c, g, or t
ggcaccggagatacatcaccgagaataaccgcgcggagatcaagaatggcagcatcctgtgcctcagcacggccccagaccttgaggctgagcagctcttgggtgggctgcagagtaacagtcctgaagggcgccgggaagccctgaggcgccttgttccgctggcctcggacatgatctttgccagggaggtcatcagccgtaatgggctccagatactaggcaccatcattgaagatggggacgacctaggagaggtgctggccctcagcctgagggccttctcagagctcatggagcacggcgtggtgtcctgggagactctgagcatcccctttgtgaggaaggtggtgtgctacgtgaacatgaacctcatggatgcctccgtgcctcccctggcccttgggctgctggagagtgtgaccttgagcagcccagccctgggccagctggtcaagagcgaggtgcccctggataggctgctggtgcacctacaggtgatgaaccagcagctgcaaaccaaggccatggccctgctgacagccttgctgcagggggccagccctgtggaacgcaagcacatgcttgactatctttggagaggaaccttcngccagttcatcct

SEQ ID NO: 172025 - DNA, 160 bp, Homo Sapiens
cacccgcccccaatctgtctcaggatggaatgacaccacaaaattgtcttttctaagtcttagaactctttgtcgtattctcatacctacgtaaccaaaagaaactttctaaacatcaggatgtttttcaatttatgtttgtctttgctcacacgacaac

SEQ ID NO: 172026 - DNA, 678 bp, Homo Sapiens
  misc_feature (17)..(17): n is a, c, g, or t
  misc_feature (40)..(40): n is a, c, g, or t
  misc_feature (62)..(62): n is a, c, g, or t
  misc_feature (71)..(71): n is a, c, g, or t
  misc_feature (93)..(93): n is a, c, g, or t
  misc_feature (99)..(99): n is a, c, g, or t
  misc_feature (115)..(115): n is a, c, g, or t
ggaacccgagcagcggnacacttctcaactccacctctcnagtctctgatcagcacaacagncggtggggngctcacacttggaaaagcttcnaggagncagctcttcagtagtnaccaaggcacacgtggtccatggacaattttatcctgtgaagtggatacggcttctcacaaaggttgaccagcacgtacaaatgtctcaacgcatactcgtacgtgggggagtgccagttgaagcagtgggtccggaagtgcagcagggcctctgggtagcagctgtgccccgtgagcggggctctctcggacaggagctgctccacctcagcctcggacgctgccagcaaggagacgatcttacgcactgacttctcaatgaggtgcctggcatccagatgccgctggatctcctccgtgagctgcctggactcctccagatcattggtgttcatcagtttccctttcatgatggtgagaggcacatcagggggacgggagaactggctttgcgtttcataccctgaaactgcatcactttcatggtggagattgtttggtttccatactgcatgacgtggctggtgttggtgtgcgattttaccagagtggtactgcttgtgcagggtctctttagtcagatcttccacgtccgagtcttccactagaagaaacagtatgg

SEQ ID NO: 172027 - DNA, 750 bp, Homo Sapiens
  misc_feature (242)..(242): n is a, c, g, or t
gggtcacacaccttgacctcacccccagccctgatgtgcctctcaccatcatgaaaaggaaactgatgaacaccaatgatctggaggagtccaggcagctcacggaggagatccagcggcatctggattacgagtatgcgttgagacatttgtacgtgctggtcaacctttgtgagaagccgtatccacttcacaggataaaattgtccatggaccacgtgtgcctgggtcactactgaaanagctgcctcctgaaagcttttcccaaagtgtgagcggccccaccgactgtgtgctgatcagagactggagaggtggagtgagaagtctccgctgctcgggccctcctggggagcccccgctccagggctcgctccaggaccttcttcacaagatgacttgctcgctgttacctgcttccccagtcttttctgaaaaactacaaattagggtgggaaaagctctgtattgagaagggtcatatttgctttctaggaggtttgttgttttgcctgttagttttgaggagcaggaagctcatgggggcttctgtagcccctctcaaaaggagtctttattctgagaatttgaagctgaaacctctttaaatcttcagaatgattttattgaagagggccgcaagccccaaatggaaaactgtttttagaaaatatgatgatttttgattgcttttgtatttaattctgcaggtgttcaagtcttaaaaaataaagatttataacagaacac

SEQ ID NO: 172028 - DNA, 1380 bp, Homo Sapiens
  misc_feature (1191)..(1191): n is a, c, g, or t
  misc_feature (1341)..(1341): n is a, c, g, or t
  misc_feature (1357)..(1357): n is a, c, g, or t
cggcggtccggttccgcggcccaggcagagggactctgcaagcaatggctgcagcgcgcctggcaagagcggcgcctgctgctgcgggagccgcgctacacgctgctggtggccgcctgcctctgcctggcggaggtgggcatcaccttctgggtcattcacagggtggcatacacagagattgactggaaggcctacatggccgaggtagaaggcgtcatcaatggtacctatgactatacccaactgcagggtgacaccggaccacttgtgtacccagctggtttcgtgtacatctttatggggttgtactatgccaccagccgaggcactgacatccgcatggcccagaagcatctttgctgtgctctacctggctaccttgctgcttgtcttcttgatctatcaccagacctgcaaggtacctcccttcgtctttttcttcatgtgctgcgcctcttaccgtgtccactccatctttgtgctgcggctcttcaatgacccagttggccatggtgctgctcttcctcagtatcaacctcctgcttggcccagcgctggggctggggttgctgctttttcagcctggcagtctctgtgaagatgaatgtgctgctcttcgcccctgggttactgtttcttctcctcaacacagtttggcttccgtggggccctccccaagccgggaatctgtgctggccttcaggtggtgctggggctgcccttcctgcttggagaaccccagcggctacctgtcccgctcctttgaccttggccgccagtttctgttccactggacagtgaactggcgcttcctcccagaggcgctcttcctgcatcgagccttccacctggccctgttgactgcccacctcaccctgctcctgctgtttgccctctgcaggtggcacaggacaggggaaagtatcttgtcgctgctgagggatccctccaaaaggaaggttccaccccagccccttacacccaaccagatcgtttctaccctcttcacctccaacttcattggcatctgcttcagccgctccctccactaccagttctacgtctggtatttccaaaaactgccctacctcctgtgggccatgcctgcacgctggctcacacacctgctcaggttgttggtgctggggctcatcgagctctccctggaacacatacccttcccacatnccatggctctgctgccctgcacatatgccatgccgtcatcctgctgcagctctggctgggcccgcagcctttccccaagagcacccaacacagcaagaaagcccactgaagtccacccctttccctcagggcctgagtctaccctcaggncctggggttggttggnctctgcccttccaaataaacctt

SEQ ID NO: 172029 - DNA, 1120 bp, Homo Sapiens
  misc_feature (983)..(983): n is a, c, g, or t
  misc_feature (993)..(993): n is a, c, g, or t
  misc_feature (1061)..(1061): n is a, c, g, or t
  misc_feature (1067)..(1067): n is a, c, g, or t
  misc_feature (1072)..(1072): n is a, c, g, or t
  misc_feature (1082)..(1082): n is a, c, g, or t
  misc_feature (1094)..(1094): n is a, c, g, or t
cggctgggctgcggaaacgcggcggtccggttccgcggccaggcagagggactctgcaagcaatggctgcagcgcgcctggcaagagcggcgcctgctgctgcgggagccgcgctacacgctgctggtggccgcctgcctctgcctggcggagacacagagattgactggaaggcctacatggccgaggtagaaggcgtcatcaatggtacctatgactatacccaactgcagggtgacaccggaccacttgtgtacccagctggtttcgtgtacatctttatggggttgtactatgccaccagccgaggcactgacatccgcatggcccagaacatctttgctgtgctctacctggctaccttgctgcttgtcttcttgatctatcaccagacctgcaagggtacctcccttcgtctttttcttcatgtgctgcgcctcttaccgtgtccactccatctttgtgctgcggctcttcaatgacccagtggccatggtgctgctcttcctcagtatcaacctcctgctggcccagcgctggggctggggttgctgctttttcagcctggcagtctctgtgaagatgaatgtgctgctcttcgcccctgggttactgtttcttctcctcacacagtttggcttccgtggggccctccccaagctgggaatctgtgctggccttcaggtggtgctggggctgcccttcctgctggagaacccccagcggctacctgtcccgctcctttggccgccagtttctgttccactggacagtgaactggcgcttcctcccagaggcgctcttcctgcatcgagccttccacctgggccctgttgactgcccacctcaccctgctcctgctgtttgccctctgcaggtgggcacaggacaggggaaagtatcttgtcgctgctgaggggatccctccaaaagggaaggttccaccccagccccttaacacccaaccagatcgtttctaaccnttttcaactncaatttcattgggcatctggtttcaggcgtttccttccattaacagtttttaaggtttgggtattttncaaaanattgncttaactctntgggggcaatgnttgaaagttggggttaaaaaaattgt

SEQ ID NO: 172030 - DNA, 998 bp, Homo Sapiens
ccatgcctgtttctagcgatggtgccacgagctgctcatcaatgccaaaaagcttgcctgaggctgttaccatcaccatcatcttctggaggttgaattcatctctggccagggtgtcaatgtcgatctcatgcttaacctgacgccggggcttccgagcatcataaaacattttccagagggtgggatagtccatgcttgcaggcaggataagctgagacgagaggcgtttcaggaacatccccagcaagccatctgcctttttgccaaattctccttccagctcggcctgtgccccagtcagggggaggtccaccatctctaggcacaccacttctgccagggactcctcacggctccacagcaccaccttccctgccaactgctgcaggaaaagtagcagatgatcctctgtctgcaccaaagcccggtagcccactgagtcatccttcttcaagaacacctggatatacagccgctcaggccgagtgccgctctgttccaggctaaatgttatcgtggtgtccagcagccgccgacctgtctccacgaggtataggttaatggtgtaggtctgattgaagcaagccagagagtcctttgaactagacttctccgaaaagctccccattgacccatcttcagaactgctacttttctgcacttcattccgacaggccatgactgcagccaccgtcttctccccagtggtggcaaagctcactagggcagtctgtgggaagtttttaagcaaactcagcgttccataatggtactgcagcagagcatagtggcttggggacaagtgcaggaagaactgggcccgggaagcgtccactgggttgggctgggtaggcaggacccggggttggaatccacttccaaattctaagtcgagagactgcagtgggatctgtctcaactcccattccgtctccagagccaaagtttggagggaacgtgagctcgggtcaggacacaccaggacagcctcatcc

SEQ ID NO: 172031 - DNA, 828 bp, Homo Sapiens
  misc_feature (747)..(747): n is a, c, g, or t
ggggaaagttggagcaagcaggaagtgaactgagggccaccctgggaggaagccgactaggcgaattcacttactgaccggcctgggctgctctgagacatggaggaagccagtgaaggtggaggaaatgatcgtgtgcggaacctgcaaagtgaggtggagggagttaagaatattatgacccagaatgtggagcggatcctggcccggggggaaaacttggaacatctccgcaacaagacagaggatctggaagccacatctgagcacttcaagacgacatcgcagaaggtggctcggaaattctggtggaagaacgtgaagatgattgtccttatctgcgtgattgtttttatcatcatcctcttcattgtgctctttgccactggtgccttctcttaagtaacagggaacctctcccacctgcccttctcttcagggacaaccctccataaatgtgtgccaagagggtctcctttcctgtcttcctctacagagaatgctgctcggtcctcctacccctcttcccgaggccctgctgccatgttgtatgccccagaaggtaccttggtcccccggaaggagagaaaaaagagagatggactgtggctgcatttcttgggtccttagagtgggctggagagacctagagggcccagcatgtggctgggaaactgttggtggccagtgggtaataaagaccttttcagaatcccccggagcaacgaaccccgcccaataaatatnaccctgggtcgggccgccctcggcccctctgaaaaaacctttctcatgaaccattctcctttgggcggccgcggggccccc

SEQ ID NO: 172032 - DNA, 697 bp, Homo Sapiens
gccttgtgtcctaggccgggagagcttcgcttcagggaaacattactgggaggtggaggtggaaaacgtgattgagtggactgtgggggtctgtagagacagtgttgagaggaaaggggaggtcctgctgattcctcagaatggcttctggaccttggagatgcataaagggcaataccgggccgtgtcctcccctgataggattctccctttgaaggagtccctttgccgggtgggcgtcttcctggactatgaagctggagatgtctccttctacaacatgagggacagatcgcacatctacacatgtccccgttcagccttttccatgcctgtgaggcccttcttcaggttggggtgtgaggacagccccatcttcatctgccctgcactcacaggagccaatggggtcacggtgcctgaagagggcctgacacttcacagagtggggacccaccagagcctatagaatcaattccttggtctcacagccatgtagacaagccctggtcatctcagcagccaccgcacaacaccccctggtggaagacacgccctcctcccctctggtcacacaagagaacatcttccagctgcctctttcacacccactacagacctcagccccagttttctcctcctcactaagctgtgtttttagtaattcctttgcttgtaactatggggatgggatcca

SEQ ID NO: 172033 - DNA, 175 bp, Homo Sapiens
cacactagattgtacaacttactatagagctaaaaactcaacaggatgccattttagaagcatggacttcttcctgtatataatgccatattttcctggtattattctctatagtttgtagctgccttagctttttaaaatctttgtataatttctaactcctcatctgctctac

SEQ ID NO: 172034 - DNA, 391 bp, Homo Sapiens
gctcacattcccactacaggagcactcccatctcttccacaggtcctatcactgcaacatcctcccagaccaccactacccatccaaccccatcacaccctcacaccacacttaccactcacgttccacctttctccacctcatcagtcactccaagtactcacacagtcatcacccctacccacgcacaaatggccacttctgcctccatccactcaacgccaacaggcaccattcctccaccgacaacgagcaagcccacagggtccacacacacagccccaccaatgacggcaaccaccagtgggaccagccaatccccaagctcatttagcacggccaaaacttctacctccctaaccttgccaaggtgatcgtggggtcgtaaggc

SEQ ID NO: 172035 - DNA, 521 bp, Homo Sapiens
agtggtggtctggaaggatgttgcagtcataggacctgtggaagagaagggactgctccctgtaggtggggagtgtgtggtgaagggtgtgggtagcctgctgctgctggccgaggtggtgtgggccacaggggttctggtgcctgtactggtggggttgggggtgatgttggtggtagaagttggggtgacttcaggatggtgtgtggaggaagtgtgtgaatgtagggatgtagaggttttggctgtgtttaatgagctcagggcttggctggtcccgctggtggtcagcgtcattgttggcgctgtgtgggtggaccctgtggccttgagcgttgtcggtggaggaatggtgcctgttggcattgagtggatggaggcagaagtggccatctgtgcgtgggtaggggtgatgactgtgtgagtacttggagtcaccaaagaggtggagaaaggtggaacgtgagtgggaagtgtggtctgagggtgtgatggggttggataggtagtggtggtcgacg

SEQ ID NO: 172036 - DNA, 566 bp, Homo Sapiens
tagcatagaccgtacaaagaatgatggctcttcttctaacctggatgaagatgtgaattactgtatttgaaagaaacagtctgtctctgtcaccctctttaatcctagacatctccagaagtgaggtaagagtaaagtctccaccagaagctggtacccagttaccaaagatcatcttcagcagggatgagaaagtccttggtcagagccaggagcctaatgttaaccctgcttcagcaggcaaccagacccagaagacacaagatggtggaaagtctaaaagaagtacagtggattcaaaggccatgggagagaaatccttttctgttcataataatggtggggcagtgtcatttcagtttttctttaacatcagcactgatgaccaagaaggcctttacagtctcttattttcataaatgccttggaaaagaattgccaagtgacaagtttacattcagccttgatattgagatcacagagaagaatcctgacagctacctctcagcaggagaaaatcctctccccaaattatacatctcaatggcctttttcttctttctttc

SEQ ID NO: 172037 - DNA, 692 bp, Homo Sapiens
aggatggggaaagccaagagctcgtaaatctgaggattgtagagaaagtgagatagagacaaacactgaactaaaagaaagggtaaaggagctgtctgaggggatagttgatgagggagcaagtaccagcattggaccccacagcatagatgattctaatttgaaccatggaaacagatacatgtgggagggagaagtaaaacagcccaacttgctaatgattgacaaagaggctgaacagtccaataaattgatgacaggaagtgaaactccaagtaaagtagtgatcaaattgagtccacaggcttgctctttcacaaaggcaaaattagactcatttttatcagaagctaggtctttactcaacccacaagatacacctgtgaaaattcctgccccagagttgctgcttcattccccagccagatcagctatgtgtttaacaggtagtccacaagagcaaggagtttcagtcgttagtgaggaggggctagagaattcagctccagaatcagcttctagaacttctaggtacagaagtctcaaactcaagagagaaagatcaaaagactttcaagttaaaaagatctatgagttggctgtttgggatgaaaacaagaagaggccagagacctgggagagcccagagaaaccaaaaacagaagcactgagctaccaagatgtccatcctg

SEQ ID NO: 172038 - DNA, 1143 bp, Homo Sapiens
tcttcagatggaaggctcaagtattctcatcttccatttgccaaacttccttcctgatttgagtcacgtgttccacttggaaagaaagggaacagagagcctcctccatggacagtgtatgaatttcattgggaatcttgctctctcccgcctctatgcctttctctctttttaaccttactttacataatattatagatgggccaagaaaagaaaagatgacataacattttgatgaatttcacctattccattcttcacgtttcagaattggtcgactttgttagaagataattgaagtagccttgggtcaaaagcaaccttttcaattgtgatcatacctaaaacatataaaaaccctgccgtagattaaaagcaattataaaatcataaaattgaatgtttgcagaatcctggagcagtagatttctttgtctttggcctgcggactagaaagagggcagcagtagtatgctggagcttccctgggataccagccacatggtttcttttcattagatctgatttttgtttcccactgtagatctgattttgtagttgaaaacatttcaccaccatcaaacactatttctgaatattgtgcctttttatacctagcctagatgaaaaccgatgccattcttattcagaaaatccccccatcctacatgaatgttatctagacataaagcaaagtgcatttaattcaaaatttggttcacaatataagtattttgtaaaagccagctgaaccagcattttatcaggtggaaatctctgcaagccaaattgctgatactccttcatgcagatcaacttggtgtcccagtcagaatagaacagcataattacctggagttagggggagtatttctgcactattacttgtcagggagagaagaaacttagaattgtccctcaaaggagtgtcaagaagtatgaataaatgtcctttcaccagctcacaggccagaaatggaggacccaagtcaactaggtgaaactactagcagacccagctttcccataataacctaatctgcaaattgttctattaaagtctgcattgttttcagggatgcaatgaaagtgggattttcaaaaggctttgggaaaattaagtgggacatgactggttcttgg

SEQ ID NO: 172039 - DNA, 181 bp, Homo Sapiens
tgacggctgaatgtttgggtctgagtttatatatcacagtgagaaacaaaaatcagatctaatgaaaagaaaccatgtggctggtatcccagggaagctccagcatactactgctgccctctttctagtccgcaggccaaagacaaagaaatctactgctccaggattctcaacatcacat

SEQ ID NO: 172040 - DNA, 688 bp, Homo Sapiens
tgctgtcttcaggatggaggtataatgtacgcacgaaagacttccaaagaaccagtttctctctggctgttcctctgaacaactttcacgtctatctaaacattctatgcaggagtcctactaagaaattttggtgtaatgccactttgatcagttattcgttgtatgacttcattcaaaaacactttcatcaatagcatggggattgtatctatgaaagggaagttggtgtcctgcgttcctcacaaaattatccaaaggataaaatgaaaagtatgtgagaaacctgctttaattataatgtgctatgttgaagcattattgtttttctctatgacaagcaacagctctgtcctaggtccaaattagaaaaacacatattgatatttcattcagaatctcattaattggtagctgatctgattagctagagagaatgtgacagattttctccttatctcccagtctgcatatagtgaagctcactaataaattaatggatgatattaatagcagtgatctcagatgacaatgctaacactgactcctgggcatcccctcacatcctgctgtcatacattcactaatgagcaacgccagctgaagtgagtaagatcttcccagtaccatgtggtactgagtcttctcagatacattcacttgtttgggtcaagaatgaattgagtgt

SEQ ID NO: 172041 - DNA, 886 bp, Homo Sapiens
gacggtgctgtacggggggctgctggagcatctggccagcccagagcacaagaaagcaaccaacaaattctggtgggagaacaaagctgaggtccagatgaaagagaagtttctggtcactccccaggattatgcgcgattcaagaaatccatggtgaaaggtttggattcctatgaagaaaaggaggataaagtgatcaaggagatggcagctcagatccgtgaggtggagcagagccgacaggaggtggttcggtctgtcttagaggttggtttccctcggaggatccagaccacctcaggcagtgccagacccagaagagggctcttcagcacctagaagctggaaagggatgaacagccaagtagcttccagcttacagcagccctcaaatttggacctgccaccagctccagagcttgactggatggagacaggaccatctctgacattcattggccatcaggatataccaggagttggtaacatccactcaggtgccacacctccctggatgatccaagatgaagaatacattgctgggaaccaagaaataggaccatcctatgaagaatttcttaaagaaaacggaaacaacagaagttgaaaaaactccccccagaccgagttggggccaactttgatcacagctccaggaccagtgcaggctggctgccctcttttggccgcgtctggaataatggacacccgctggcagtccagacatcaattcaaaactgaagctgcagcaatgaagaagcagtcacatacagaaaaaagctaatcatgctctcttaccaactaccatgagggctaaaagcaaagtcaacaaaccccttattataccttccaccaaattcattatccatggtcttcctaggaaac

SEQ ID NO: 172042 - DNA, 1424 bp, Homo Sapiens
aggtgtatgtatgatctatgacccagttcactttaaaacatttgtcatgggattaattcttgtgattgcagtaatagcggccaccctcttccccctttggccagcagaaatgagagtaggtgtttattacctcagtgtgggtgcaggctgttttgtagccagtattcttctccttgctgttgctcgatgcattctatttctcatcatttggctcataactggaggaaggcaccacttttggttcttgccaaatctgactgctgatgtgggcttcattgactccttcaggcctctgtacacacatgaatacaaaggaccaaaagcagacttaaagaaagatgagaagtctgaaaccaaaaagcaacagaagtccgacagtgaggaaaagtcagacagtgagaaaaaggaagatgaggaggggaaagtaggaccaggaaatcatggaacagaaggctcggggggagaacggcattcagacacggacagtgacaggagggaagatgatcgatcccagcacagtagtggaaatggaaatgattttgaaatgataacaaaagaggaactggaacagcaaacagatggggattgtgaagaggatgaggaagaggaaaatgatggagaaacacctaaatcttcacatgaaaaatcataatctgactaattttgggactgaatgaataagtacaagaggttggattttctatgttggctgattaccatattgaacacatggcatttgtagcattctttaaatctatctactgaaatgtatttgacattcaagcagttatattcggtccttcattttatagaatattggcactattattggtacagttttaaagccattaatatgtttttatccatttgataattttacagtaagtaggtctcattcattttgacagttatcaaagatgtactttccacagttaaatttacattaatggcaatttttgatagttttatggctttttactgttagactaatcaaaaataactttaaaaggaacaaagaaactccaacatttcacattatgcatagttatgtagccatttcacagtttctttaagatgtgtaaactcattgtccttgatagtttctatttttcattataaaattataccaggagatttcttttaagattctgagttagcagagttcaaaactattttgtggaaacaagccaactagtaacaatgcagcaacacttctggtttagctaaattatttttccaatgtaggaaatccacactgatttgtacgtctgactgagagaaagatggtcgtctccagcagagaaagtgaacagcatttgttgggaaggtgatggctcttccctcctcccctccccatttcattggcgtaacgtaaagtgtattctgtacataatttacaaataaaacattttattttaattgtt

SEQ ID NO: 172043 - DNA, 844 bp, Homo Sapiens
ccccatgtctgtcttcaggatgaacggctggtttgtgtgctcttggtgtgctcctctgcagtggcacagttgcataaagatcctaccctggatcaccactggcatctctggaagaaaacctatggcaaacaatacaaggaaaagaatgaagaagcagtacgacgtctcatctgggaaaagaatctaaagtttgtgatgcttcacaacctggagcattcaatgggaatgcactcatacgatctgggcatgaaccacctgggagacatgaccagtgaagaagtgatgtctttgatgagttccctgagagttcccagccagtggcagagaaatatcacatataagtcaaaccctaatcggatattgcctgattctgtggactggagagagaaagggtgtgttactgaagtgaaatatcaaggttcttgtggtgcttgctgggctttcagtgctgtgggggccctggaagcacagctgaagctgaaagcaggaaagctggtgtctctcagtgcccagaacctggtggattgctcaactgaaaaatatggaaacaaaggctgcaatggtggcttcatgacaacggctttccagtacatcattgataacaagggcatcgactcagacgcttcctatccctacaaagccatggatcagaaatgtcaatatgactcaaaataccgtgctgccacatgttcaaagtacactgaacttccttatggcagagaagatgtcctgaaagaagctgtggccaataaaggcccagtgtctgttggtgtagatgcgcgtcatccttctttcttcctctacagaagtggtgtctactatgaaccatcctgaagacagcatt

SEQ ID NO: 172044 - DNA, 903 bp, Homo Sapiens
atattacagtcctctccctgtagaagtaagcatttctccagtcttccttttgttgtgacttctctttcttcagttaagagttaaataataattactgtcgctctaaagatgagttaaaaacccaaagtgcaggctagaatcctgccatgagggtgtcatgtctcaggaagctggttaatgtctgtcagtttagtatcattcagaattgcccggattctctccaaggagtcagcttgccggatccgctctaactgcacctgaagggcctgtgaaagctttacaaaatccctctggacttgctcactgacatctaattctgtctgtaatctctgagctttattcttctcttcaaacattagttgttcaacggtagccttagcagcagtctctttctttaactgctcttccaaactgatctttatttcctgaagactctcaagctgttgagacttctctcttaatgtggactccaactgtcctttttccacttttattctttctaattcagcttttaggctagaaatagaagctatttcctccttgcagttttctatttctagttgcagagtttcttcaagattttcttttaaacactgttctgcttggatctgctcttttaggaaaagtatctcagccttcagcttttcttctacgtggtctgctgctgtccgcacattaatgatgtcctcacggtattttaataccaactcccgcagtgcctctgtagtgtctgggaggatgaagtcttctgcttgctgtaatgacacatgcaggctgtgctttccctggagactgtcattatctttctgtaacctcaccagctcttctgaaacctgttcccgtgactgcatcagcaccgccatctgttcctgaacatccctctttgaggggaaaagacccctg

SEQ ID NO: 172045 - DNA, 306 bp, Homo Sapiens
cgcgtcgacctcctgggctgctggattgtctcttttaggaaaagtatctcagccttcagcttttcttctacgtggtctgctgctgtccgcacattaatgatgtcctcacggtattttaataccaactcccgcagtgcctctgtggtgtctgggaggatgaagtcttctgcttgctgtaatgacacatgcaggctgtgctttccctggagactgtcattatctttctgtaacctcaccagctcttctgaaacctgttcccgtgactgcatcgtcgacgcggccgcgaatttagtagtagtagcgacc

SEQ ID NO: 172046 - DNA, 618 bp, Homo Sapiens
tcttgcccgctcagggctggcctcttccccgtgtcttcacagcgtccctaaggaagatttttgcagcactctctggagctgaggggagtgaaatttggtccagagaaggcggaaggaaatagttttcctgtttccttttctcgaggtggatgtcctcaggcttccttcacacctccttctcatgggtgcggctggcagtacagtcaggctgtggaggagggctgagaagaaaggggcactggtccagccccaggtttggtctgagacaggtacacagcagataccatcccaccttcctctctaaagaacaggccagccacacatataaccctttccctactttactaatgtatcccttatgtggtaccagcaatggaggacaggcagacttaccccctgccatctagagagaatgttgttattacccgtaaaacttgaccacccccatatcccactcctttttgtaaaaacaaatgcttaaacctgtgagcctgccgttcctttctatgtgttaatcagtttccttccatttgagctgtgtgggagggaagggcattgaaattgtaggttgtaatcttgtgccaaccaataaaaaccagtatttcacacacaaaaaaa

SEQ ID NO: 172047 - DNA, 661 bp, Homo Sapiens
  misc_feature (469)..(491): n is a, c, g, or t
cgatgggtgtagtcgactccaacttcaacaggcaggttttggatttcactttctgcattctgggacgacttctcagtagacctcagcttccagaagctctgccactacgaggtgcaggatggcctcatcgtaggacctgccttcttggaagtaacagcggtaggtgccgttttcctgggctgtgatgttgtgtatgaccagggccacgctgcccctgctgatgtctttgctcacaaaggtggttcttcctcggtactcctccatctgctcctctgttctctctctgccacctttatacacaaacactgcgggggagaactgagaccggaaccaccgcacctccatgtcctcagcatttttctcgggtgacagatggcagcgtaacgtagtgttttctccaaccgtggccaagatgggatcagtgggccccacgacaataaactgggctgagaccagtgcacacaggctnnnnnnnnnnnnnnnnnnnnnnnctggcgggagaagtgcagggcagcagctgattccatgagcacccagagcaggcagggacaggaggccttctagaattaaacgttgctttttcttttctccgctggttctcgacgattctccagtcggtcctcttctctcccatctgcccggggcacagcatactagacgc

SEQ ID NO: 172048 - DNA, 457 bp, Homo Sapiens
tgtcttcaggatggttcatctcggatgtcaatggtgctctttcttcatccttcacctctctgctaacatgctgccctcactgcctagatggtttcatctcagatgtgcatgtggtgctctctcttcatccttcacctctctgctaacatgctgccctcactgcctagatggtttcatctcggatgcgcatgtggtgttctgtcttcatccttcacctctctgctaacatgctgccctcactgcctagatggttgttacatctcggatgtccatgtggtgctctctcttcatccttcacctctctgctaacatgctgccctcactgcctagatggtttcatctcggatgctcatgtggtgctctctcttcatctttcacccctctgctaacatgctgccctcactgcctagatggtttcatctcggatgcccatgtggtgctctgtcttcatccttca

SEQ ID NO: 172049 - DNA, 295 bp, Homo Sapiens
ctaaatttcaactttgaaaatttttaaaagacataaatgtataaagacatgctagatgaagtagctgccagtgcctcaggaattcctacactgatagcctctgaggcccagcatggagaaggtctcagggaccaccacatgggcccagtcttgtgccacaaggtcaagtgctacctgtatagcaagtgacatcaaatcatcgacattccatcgttaaagaatttgtgactgtcatatggaaaaattatttggtggggaattcagataaaaataacagaaattgtgaccaacaagg

SEQ ID NO: 172050 - DNA, 703 bp, Homo Sapiens
gcgaatgtgggggcgatgccgtgcactacctgtcctttcagcggcacatcgtcgggctgctggtggttgtgggcgtcctctccgtaggcatcgtgctgcctgtcaacttctcaggggacctgctggagaacaatgcctacagctttgggagaaccaccattgccaacttgaaatcagggaacaacctgctatggctgcacacctccttcgccttcctgtatctgctgctcaccgtccacagcatgcgtagacacacctccaagatgcgctacaaggaggatgatctggtgaagcggaccctcttcatcaatggaatctccaaatatgcagagtcagaaaagatcaagaagcattttgaggaagcctaccccaactgcacagttctcgaagcccgcccgtgttacaacgtggctcgcctaatgttcctcgatgcagagaggaagaaggccgagcggggaaagctgtacttcacaaacctccagagcaaggagaacgtgcctaccatgatcaaccccaagcacctgtggccacctctgctgctgtgtggtgcgaggtctgtgagcaggtggaggccattgagtactacacaaagctggagcagaagctgaaggaagactacaagcgggagaaggagaaggtgaatgagaagcctcttggcatggcctttgtcacctgccactgagactattcaccagccaccatt

SEQ ID NO: 172051 - DNA, 454 bp, Homo Sapiens
gatatgtgggggtgcgccatgttgcagaacctgtggggaaagggcaagaaggcccggggaatctccatgtttgggtgggcccagtttctaatggcctgcatttgcatatcaatggttgctggcctggctctgagagccagggctttgcaagaaacttttccagaggtgctttaacaaacaaaaacttcccaaggaccccttttcctacaacattcccccctgtggagatgccacactaactgctgttagggggtttggggcgatgactctttctggctacttcctgctgaaaaggggcatcgaatggggaacagcagctaaggctccttctggggtcgatctaaggatccttggaagaatggcgtgtggttcagtttacagcaccatttgaagtttgattgcttctaggcgagaagaaacaatttgagttataatattgagtatacagggtcca

SEQ ID NO: 172052 - DNA, 563 bp, Homo Sapiens
accctgtctcaggaacacatgacagctggaggcaattgccagaccttctcatcttccactgtcatctcctactccaatacgggtgatggtgcccccaaggtctaccaagagacatcagagatgcgctcggcaccaggcgggatccgggagacacggaggactgttcgggattcagacagtggactggagcagatgtccattgggcatcacatccgggacagggctcacatcctccagcgctcccgaaaccatcgcacgggggaccaggaggagcggcaggactatatcaacctggatgagagtgaggccgcagcgtttgatgacgagtggcggcgggagacctcccgattccggcagcagcgtcccctggagtttcggcggcttgagtcctcaggggctgggggacgaagggcggaggggcctccccgcctggccatccagggacctgaggactccccttcccgacagtcccgccgctatgactggtgagggccccgggccctcaggctctcttgtaagtatcaggagtaaggagggtggggtgcacctgctgacggtcctcg

SEQ ID NO: 172053 - DNA, 741 bp, Homo Sapiens
gagacctcccgattccggcagcagcgtcccctggagtttcggcggcttgagtcctcaggggctgggggacgaagggcggaggggcctccccgcctggccatccagggacctgaggactccccttcccgacagtcccgccgctatgactggtgagggccccgggccctcagcctctcttgtacaggctgagaggctgagaaatcatcccctgaataactttttcctctctgattcccatccccaatttaatattaaattaacaggcaagccggcccccacctctccctgggggtctcagggagaacctttcacggcaccctttccctaccttttccttctttaatctcctggtttaccattgatgacttcgcctctgcatctactgacttgatttttcattctgccactccatcttcaaaccccctcacctttcccatcctactcctgccatgcattgaagggtcaatgcattttggggtgagctctgggtttaggggccccctccatccctcagctaccctggatctttgcccacctcttcctcagagcccccactgaggggccgtagccctatctagggctgtggaaggagcagactggttcctaactctctccctcctcctgcccacacacatcaaaagaatcttccctacacccttctctgcctttattttttgatttgtgcaacttgtaactaggtgtttatggaataaaggagaatggaacccagaccaccaaacc

SEQ ID NO: 172054 - DNA, 910 bp, Homo Sapiens
  misc_feature (806)..(806): n is a, c, g, or t
  misc_feature (835)..(835): n is a, c, g, or t
  misc_feature (837)..(837): n is a, c, g, or t
  misc_feature (883)..(883): n is a, c, g, or t
ggattcagacagtggactggagcagatgtccattgggcatcacatccgggacagggctcacatcctccagcgctcccgaaaccatcgcacgggggaccaggaggagcggcaggactatatcaacctggatgagagtgaggccgcagcgttggatgacgagtggcggcgggagacctcccgattccggcagcagcgtcccctggagtatcggcggcttgagtcctcaggggctgggggacgaagggcggaggggcctccccgcctggccatccagggacctgaggactccccttcccgacagtcccgccgctatgactggtgagggccccgggccctcagcctctcttgtacaggctgagaggctgagaaatcatcccctgaataactttttcctctcgattcccatccccaatttaatattaaattaacaggcaagccggcccccacctctccctgggggtctcagggagaacctttcacggcaccctttccctaccttttccttctttaatctcctggtttaccattgatgacttcgcctctgcatctactgacttgatttttcattctgccactccatcttcaaaccccctcacctttcccatcctactcctgccatgcattgaaggggtcaatgcattttggggtgagctctgggtttaggggccccctccatccctcagctaccctggatctttgcccacctcttcctcagagcccccactgaggggccgtagccctatctagggctgtggaaggagcagactggttcctaactctctccctctcctgcccacacacatcanaagaatcttccctacacccttctctgccntntattttgttgatttgggcaacttggtacttagggtgtttatggaantaaagggagaatggaaaaaagaccaat

SEQ ID NO: 172055 - DNA, 1030 bp, Homo Sapiens
tttcggaaggaagagaggaggggtgcgaatgattcccagggggttagcttgaggggaactggggggggccccccctaatccccagaagctcaacccccaaaaatgccttggaccctttcaatgccagggcaaggagtagggatgggaaaggtgaggggggtttgaagatggagtggcagaatgaaaaatcaagtcaggtagatgcagagccggaagtcatcaaatggtaaaccaggagattaaagaaggaaaaggtaggaaaagggttgccgtggaaagcgttctccgctgagacccccagggagaggtgggggccggcttggcctgttaatgtaatattaaattggggatgggaatcagagaggaaaaagttattcagggggatgatttctcagcctctcaagcctgtacaagagaggctgagggcccgggggccctcaccagtcatagcggcgggactgtcgggaaggggagtcactcaggtccctggatggccagccggggaggcccctccgcccttcgtcccccagcccctgaggactcaagccggccgaaactccaggggtacgctggctgccggaatcgggaggtctaccgccgccaatcatcatccaaacgctagcggcatcactctcatccaggttgatatagtcctgccgctcctccatggtccctccgtgcgatggtttacgggagcgctggatggatgtgagccctgtcccggatgtgatgccacaatggacatctgctcccagtaccacctgtgcgtgaatcgccgaacagtcctcccgtgtctccccggatcccgcctggtgccgagcgcatctctgatgtctcttggtagaccttgggggcaccatcacccgtattggagtaggagatgacagtggaagatgagaaggtctggcaattgcctccagctgtcatgtgttccatgtttccaatcatgtcattcatcatcccaaacatgtccatgaaccacccgacacctcccagcatcccaaagggggagacagctccagcctgctgc

SEQ ID NO: 172056 - DNA, 599 bp, Homo Sapiens
cggacgcgtgggtcgacccacgcgtccgcccacgcgtccggagaaatcatcccctgaataactttttcctctcgattcccatccccaatttaatattaaattaacaggcaagccggcccccacctctccctgggggtctcagggagaacctttcacggcaccctttccctaccttttccttctttaatctcctggcttaccattgatgacttcgcctctgcatctactgacttgatttttcattctgccactccatcttcaaaccccctcacctttcccatcctactcctgccatgcattgaagggtcaatgcattttggggtgagctctgggtttaggggccccctccatccctcagctaccctggatctctgcccacctcttcctcagagcccccactgaggggcccgcaaccctatctagggctgtggaacgagcagactggttcctaactctcatccctcctcctgcccacacacatcaaaagaatcttccctacacccttctctgcctttattttttgatttgtgcaacttgtaactaggtgtttatggaactcaaggacgaatggacaaacaagaaaacaacaaaacaaaaag

SEQ ID NO: 172057 - DNA, 853 bp, Homo Sapiens
gggctccgttggccgagggggccgtacggaggtggcagctgtgggaggaggcggcgtggaaggccgaggagctcaagcccggaccaatccccacgttccgggccgcgaccctgaccctgcagcgtaccgggaagcgaaaccggccggatgggccgctgagcccgaatcgggcactgtgtggagccccctggagctgagatcaggatgttccgcttcatgagggacgtggagcctgaggatcccatgttcctgatggatccctttgctattcaccgtcagcatatgagccgtatgttgtcaggtggctttggatatagccccttcctcagcatcacagatggcaacatgccagggaccaggcctgccagccgccggatgcagcaggctggagctgtctccccctttgggatgctgggaatgtcgggtggtttcatggacatgtttgggatgatgaatgacatgattggaaacatggaacacatgacagctggaggcaattgccagaccttctcatcttccactgtcatctcctactccaatacgggtgatggtgcccccaaggtctaccaagagacatcagagatgcgctcggcaccaggcgggatccgggagacacggaggactgttcgggattcagacagttggacatggagacagatgtccattggggcatcacattccgggacagggactcacaatactcaagcgcgcccgaaagccatcgcacggggggaccaggaggagcggcaggactatatcaacctggatgagagtgaggcagagcgttggagacaagtggcggcgaagactcccgagtacggcggagagaaccctggagatacggggaatgagt

SEQ ID NO: 172058 - DNA, 830 bp, Homo Sapiens
gacttgactttaatcccaataagcagtactacttggccagctgcggagacgactgtaaggtgaagttctgggacacccgaaatgtcaccgaacccgtgaagaccctggaggagcactcccactgggtgtggaacgtccgctacaaccactctcatgaccagctggtcctcacgggcagcagtgacagcagagtcatcctttccaacatggtgtccatctcgtcggagcccttcggccacttggtagacgacgatgacatcagtgaccaggaggaccaccgttctgaagagaagagcaaggagcccctgcaggacaacgtgatcgccacctacgaggagcacgaggacagcgtctatgccgtggactggtcctcggctgacccgtggctgtttgcctccctgagctatgacgggaggctcgtgatcaacagggtgcccagggccctgaagtaccacatcctgctatgactcccgggcctgggttatccaggtcccattgagtggttttcctcttggcagattctcaaacagtcgcagctctttggaggtgactcgtgttccaggtggatccctctctgggagagccgctgttcccttcctgtagcagcagcatttatgaatggggtgaatggggctattgtcgacggcacagctaatgcccgaacccagcccctgtcggcagagacagagccccacattattatgtgaataacaatgttttctgttttaagggtgtcaggagtttcgctttttaaaaaaatgtctgttcctgcagtagtaactcttctttctcttgagagtaaaaaatgaaataaaataaatccacgctgc

SEQ ID NO: 172059 - DNA, 860 bp, Homo Sapiens
cgacgaggggcatattagcgctagccctgcagacagaggtgtgctgacgacctgctacaacagaacttcagacagcaaagtcctgacatgtgcagccgtgtggaggatgccgaaggaattggaatcaggcagccacgagtcccctgatgattcatccagcactgcacagaccctggagctgctctgtcaccttgacaacacagcccatggcaacatggcctgcgtcgtgtgggagccaatgggagatgggaagaaaatcatttccttggctgataaccatatcctgctgtgggatttacaggaaagctcgagccaggctgtgctggccagctcagcgtccctggaagggaagggacaactgaagttcacctcaggacggtggagcccacatcataactgcacccaggtggccacagcgaacgacaccaccctccgtggctgggacacccggagcatgagccagatctactgcatagagaatgcccacggacagctggtgcgggaccttgactttaatcccaataagcagtactacttggccagctgcggagacgactgtaaggtgaagttctgggacacccgaaatgtcaccgaacccgtgaagaccctggaggagcactcccactgggtgtggaacgtccgctacaaccactctcatgaccagctggtcctcacgggcagcagtgacagcagagtcatcctttccaacatggtgtccatctcgtcggaaccccttcggccacttggtagacgacgatgacctcagtggaccaggagggacacccgttcctgaagagaaagagcaaggaagccccctgccaggaacaccgggggatcgccacccttaccgaaggagcccc

SEQ ID NO: 172060 - DNA, 351 bp, Homo Sapiens
  misc_feature (120)..(143): n is a, c, g, or t
agcacctaaggtgggaaagaagagtaaaatgtatgagggaatgtagtgaataacaggttataaaagtttcagaggagagatctcttagaatccctgtaaggaactcccaagttgaattcnnnnnnnnnnnnnnnnnnnnnnnnctgccagttacggcttataaaaagatactgcggctaaagtggggaaccaaaggggcatcttttaaaaggagatttagtaaaattaacagacaaacccaaggctgcctcttaatcccttctgccatgtgtgcccggccagaactttagtttaaacggccttctaacggattatagtctatcttcatgccatcctgaaaaacagctgtgg

SEQ ID NO: 172061 - DNA, 643 bp, Homo Sapiens
  misc_feature (607)..(607): n is a, c, g, or t
tacttgcgctgggatatcgatggtgtctacatgtgagaaagcatgtcccaggtggatgtggattcaggaattgaaaacatggaggttgatgaaaatgatcgaagagaaaagcggagcctcagtgataaggagccttcctcgggccctgaagtgtctgaagagcaggccttacagctggtctgtaagatcttccgtgtctcttggaaggaccgggacagagatgtcatctttctttcttctctttctgcacagtttaagcagaacccaaaagaagtattctccgattttaaggacttgattggccagattttaatggaagtgctaatgatgtccactcagaccagagatgaaaacccatttgccagtctgacagccacatcacagccaattgctgcagcagcacggtcaccagacagaaatctcttgctaaacactggctccaatccaggaacaagccccatgttctgcagcgtggcttcctttggtgccagctctctgtctagtttgggagcctctggtggagcaagtaattgggattcctacagtgaccatttcaccattgaaacctgcaaagagacagatatgctgaactacctcatcgagtgtntcgaccgagttggaatagaggaaaaaagcccaaaga

SEQ ID NO: 172062 - DNA, 562 bp, Homo Sapiens
  misc_feature (531)..(531): n is a, c, g, or t
  misc_feature (545)..(545): n is a, c, g, or t
cttcaggaagaattttaatggtttaaaaatatgtatgtacaaaagcagcaccagcatttggtgcttccggtccacaggcgccacgtgtcttccaggactatctctgtggccagttgtacctgaagcctctgtctgactttccagttggaaaggacatgcttttgtttcccaccgactgtttaatttttttggctgcaatgcatttcttgccagacggggtctgtttatttggatcaaactgagaagaaactttggatttgctgttcccagcaaaagccttgaagtctgactggctgtagtcgtaaggcgtaaactctttttctggtggctctgggtcctttggcttcttggaaattttgagtcgtttcttctcttgtttctgttctgtggtccttgggtcgcttgttgctcgctctctcttctttgcagcattttctagcacgacctgctgtcggacggagatggcctgtctgctgcagctttgcacgcctcctttgcctgttcccggcaagttgttgcttaactgccttnttcttggacagttntttaaaagcttttggac

SEQ ID NO: 172063 - DNA, 239 bp, Homo Sapiens
  misc_feature (167)..(178): n is a, c, g, or t
tctggctccaagcccactaccagtctcaggtttctttactaaaagatcactacctttttttctcttatctgctgccatgtgagatgtggctttcaccttccgccatgattgtgaggccttcccagccacgtagaactgtaagtccaataaacctcttttgtaaattnnnnnnnnnnnntcactattaaagatactaggatggaagatgactgttgaggagtacttgacatagtccaaca

SEQ ID NO: 172064 - DNA, 907 bp, Homo Sapiens
  misc_feature (152)..(235): n is a, c, g, or t
aaagtggggggggtctcaattgttatcctggctgatctcgaactcccggacttaagcgatcctctggctccaagcccactaccagtctcaggtttctttactaaaagatcactacctttttttctcttatctgctgccatgtgagatgtggnnnnnnnnnnnnnnnnnnnnnnnnnnnnnnnnnnnnnnnnnnnnnnnnnnnnnnnnnnnnnnnnnnnnnnnnnnnnnnnnnnnntcactatttaagatactaggatggattgtgactgttgaggagtacttacatatcctacatttgactacattatttccaaaccaagtattccatccaaaggaacatactgctatcatagagaccaaggagggactgtttaaggttgccaaggtgaagcgagctgagaggctttgtcctcgtgccagtaactctgaaatctctcttaattcctgctgtccaggcagcagaatgccatggtttccccaagtaggtagctgctttagcagttaaagcccaaatgtctgttctgttgatcagaggtctctgaatttctgaagtggtgtttcgtttctggtgactgagttaatcctttacaatccctcttgtaaagtgtgctaatagaaagaatccacctttcaaagctgcagaaccagaccgtgccctaaattgaccaacgtagctgatgtgcctcaggaagtctcttgccagctgtccctgtgaagaccccctcctcccccccagctgctgccttgcacactgaagcatctcagactgtgcaaagccgtgtagtcatcaagacagtaaatcccagggcttggttaagtgctgtgtgataacttgtttggatgagacttaacttaaaaccacttacaataaacttgggaaactaccgtcaaaaagacgaacaaaaaa

SEQ ID NO: 172065 - DNA, 414 bp, Homo Sapiens
  misc_feature (23)..(23): n is a, c, g, or t
  misc_feature (45)..(45): n is a, c, g, or t
  misc_feature (66)..(66): n is a, c, g, or t
  misc_feature (83)..(83): n is a, c, g, or t
  misc_feature (328)..(344): n is a, c, g, or t
tccgtgccgggtaaccctgaaanctccccttaaaaccccggctgnccccgggcagcagaaagcccntggtttccccccaagtnggtagctgcctttagccagttaaaagcccccaaatgtctgttcctgttgatccagaggtctctgaatttcctgaagtggtgtttcgtttctggtgactgagttaatcctttacaatcccctcttgtaaagtgtgcctaatagaaagaatccacctttcaaagctgcagaaccagaccgtgccctaaattgaccaacgtaactgatgtgcctcaggaagtctcttgccagctgtccctgtgaagannnnnnnnnnnnnnnnnagctgctgccttgcacactgaagcatctcagactgtgcaaagccgtgtagtcatcaagacagtaaatccc

SEQ ID NO: 172066 - DNA, 473 bp, Homo Sapiens
ctttaccagtatccttaacgacatctacatctgccccactttctgtctcacaaacaaccttgccacagtcatcttctacccctgtcctgcccagggcaagggagactcctgtgacttcatttcagacatcaacaatgacatcattcatgacaatgctccatagtagtcaaactgcagaccttaagagccagagcaccccacaccaagagaaagtcattacagaatcaaagtcaccaagcctggtgtctctgcccacagagtccaccaaagctgtaacaacaaactctccttggcctccatcgcttaacagagtcctccacagagcaaacccttccagccacaagcaccaacgttagcacaaatgtctccaactttcacaactaccattctgaagacctctcagcctcttatgaccactcctggcaccctgtcaagcacagcatctctggtcactggccctacagccatttagg

SEQ ID NO: 172067 - DNA, 892 bp, Homo Sapiens
ggcaaagctacagatgacttccgtgaggacgggaggctggtagagaagacaacctatgaccacgtgaccagagagaagctggaccgcattctggccgttatccaaggctcccatcagaaggccctggtgatgtactccaacctcgacctgaagacccaggaggcctatgagatggccgtgagaggcctgatccggcccatgaacaagtccccgatgctgataactggcatccgatgcctctactttgcacctccggaattcctcttagaggtgcagtgcatgcatgagacgcagaaagagctgcggaagttggttcatgaaatcggcctggaactaaagaccactgctgtctgcacccaagtgcggcgcacgcgcgacggcttcttcacgctagacagtgccctcctgaggacccagtgggacctaaccaacatccaggatgctatccgggctgctacccctcaggtagctgcagagctggagaagagcttgagcccggggctggacaccaagcagctccccagtccgggatggtcctgggactcccagggcccgagctctaccttggggctggagaggggtgcggggcagtgaatgcccaggcagctcctggggcagtggatggataaatagaagaactgctatgagctggacctgatagctgtgcagaaagtgagagcaggggcaccttttctacgtaagacacaaaactcaagctgtaacagaaaggtcaatgggacttgaccccaactgagaaaggaaaaactttctggtatggaggggaaaagacagtaaaacatggacaggactgaataagaaaggtattgggcagaaccaaggcgtgggtgggcggggcactttgttaattccccaggctacttcccaagggcta

SEQ ID NO: 172068 - DNA, 873 bp, Homo Sapiens
gggtacagcccggatgcatcctggatttggtaagtcccactggtcctcagagggcccctgtctggcgtgagagcctcgcgcctgcgccgcacttgggtgcagacaccagtggtctttagttccaggccgatttcatgcacccacttccgcagctcttttctgcgtctcatgcatgcactgcacctctaagaggaattccggaggtgcaaagtagaggcatcggatgccagttatcagcatcggggacttgttcatgggccggatcaggcctctcacggccatctcataggcctcctgggtcttcaggtcgaggttggagtacatcaccagggccttctgatgggagccttggataacggccagaatgcggtccagcttctctctggtcacgtggtcataggttgtcttctctaccagcctcccgtcctcacggaagtcatctgtagctttgcccaggaggccacgcactgtgtaatccttggtaagatgagcattgtacatatcggtgaggagcctgcatccatgtcccacgccgagcacaagtactccagaagcctgggcatccaaccgatgtcccacgccaaccttgagatgggcgaatgctggtccacataccagtggatggttgatgaaagagggtacgctggtggctgtgagggtcagctccttctcttcgctgccttccatggggcccagcaagaagcgaacacgctgtttaggagcgggaggcttcctggcattgagacccttcagaagttgtagctccactgtatcccgcaggtgcttccattttagccccgggggcttatagaccgcgaaaagcccatgcagccgcgacaagccagcagaccccatacttgaagatcacagcac

SEQ ID NO: 172069 - DNA, 290 bp, Homo Sapiens
aatttatagagcatttcggggggggttggggaaacacacctaaacactttatctccaagttacaaaagtttgaggtgcagagggaaggccagattatttttttaatgaaattatatagattagatctcagtatttaaactgttcctcaattttgtgaggctgtgttggaaataacccgcctctagtgctgttggtatgcaaggcagcggtgcttaatcaatatttcctgtgctcaccagaggcaaaatgtaccaatatccacaccgaatggcacccagtatggcccgcag

SEQ ID NO: 172070 - DNA, 1023 bp, Homo Sapiens
  misc_feature (16)..(16): n is a, c, g, or t
  misc_feature (48)..(48): n is a, c, g, or t
  misc_feature (76)..(76): n is a, c, g, or t
  misc_feature (104)..(104): n is a, c, g, or t
  misc_feature (110)..(110): n is a, c, g, or t
  misc_feature (149)..(149): n is a, c, g, or t
attacaggtgtgtggncctcccaccccaccccacccttcacacctggnctgatttttcaaaaagtttttttgtagnaaacagggtctcaccatgttgttccagnccgggnctcaaactcctgatcctcaagtgatcctcccacctcagncctttcaaagtgctggtaattacaggtgtgagccactctgcctgggcctaccactaacttgaatacattcagaatcacctcctctccccaaaatttgtagaaatagtttttgaggaagccaaaagcaaagcagaaacctttacagtattgtttcttttctctttgttaactgtgtcattacagcaaaatactagcagtctgcctaaacatgttcattgtacatttctcaggctatcaatgaatggaggtttttaaaaagttgaatatttgtctgaacattttatttcaaagttcaaaaaaacagaggctgcaaaattcattttataatggctattttgtgacgataagatgtagttcatgtttttctgtagcactgggcccaaatattctttgtaaagaaaatcgctgcagcaaaaactgttactgtgtttattatatttgtagaagtattagaaaaatattctattttttattcagtgctgcgtaattacccatggtagccaaccctacaaaagacaggttttcacaaattgaggtggaggtgggcggttcagtatctgccactggacttgattataaactgtatttgaatatcagtggtattatcttttaagttgtcagcaagttaccaaggtattcattaaagaacttgtaatatcaaattactatttattcataacaattgatttgatgctaataataattttctttaaactctaccattcattatgtggtaactgtattgaacttactttatttggattttattttaatgtgactagatgtcaccacttcaaaaaatcaatttgttcttaaaacctggttgaaaatccaggaaactgtatgacccgctaatgggatctctgagtcactg

SEQ ID NO: 172071 - DNA, 275 bp, Homo Sapiens
  misc_feature (56)..(137): n is a, c, g, or t
tcttatgagacactcactcagaagatctagctaagccgtgtcagattcctaatccnnnnnnnnnnnnnnnnnnnnnnnnnnnnnnnnnnnnnnnnnnnnnnnnnnnnnnnnnnnnnnnnnnnnnnnnnnnnnnnnnnccttgctttccgactactgtagtttccgtaagcctgaagtccttaagacaagtgatcagtgaagagtgaagcaacctttaccctaatacatggttgccactcctggcagtcccaaataagctttaaaaaccctcttct

SEQ ID NO: 172072 - DNA, 177 bp, Homo Sapiens
tacctaaatggctgtaacgaattggtgtatgtttatgtgtaacataagctttcctcttctagtgggctggtgctttagtcaaagatggaaagagattatatgaagcagaaaaatccaaaagggaatcctttgggaaattatttagtaagtgttcggtaataattgtaatacttttga

SEQ ID NO: 172073 - DNA, 586 bp, Homo Sapiens
gatggctcttgtccaggctacagtggcgcgatggggctcttcagtaggaagctctcggcgtcgcgttccagaggcaagttcaccgcagtcttgatgtgcccgccttcatattcataggggtatctgcagtctacaatcacaaacttatccacgatgttgctgaacttgcccgtcaatagggccaccatcgtttctggtgagatgtacttgaggtcttggtgctttccgtctactgtctgtaggaggaaggccttagagtaatctccaatcagctctcggtggtcactgtccaggaggttctcgatctcatcgtgacacagtgattttgagcggaggacgcgggctttaggttcctcagcctcctgctgctcctcaggaggggtcacgctccgcctccgcttattctgcacgggcgtgtccctgtcctggggccgctccagcctcttgaggatgggccggatcacgctgcagggcatggacggagagcggaagagccgctggcacttgctgtacatgacgaggtccttttcctcttccttttccaaggtcttgaccagtggggcactaatgagacctccatcctgaa

SEQ ID NO: 172074 - DNA, 635 bp, Homo Sapiens
ccatgcgtgttcttcagatggtcaggccatgggtgtgtacctctacggggagctgatggtgagtgaggacgccagacagcagcagctcgcccgtaggtgcttcgagcggaccaaggagcagatggataggtcctcagcccaggtggtggccgaaatgttattttaacgaggaaagaccacagcaagattctttcattcgtctcctcctagcctgggggaccaggctcgaactgaccctggacatcaaaggagggattatgtggctgctaaagccatcggcccacagccctgttcacgtcttggtgcttctctttcccagaggctggtcccagccaggcacacacaaaaggcagattctcgtaaacgcagcctccctccctggaggctgcctcctgccctggatctggagtggagctgctctgagattttgagttcttctgcagagatgattaaatatatccaagagacattggaaaacctgctgaacattttacattggtctgctcagcacatggctggatgcggatatttctataattccagaaagtcacacagctcctctgtatgagaccagtgggcgccatttaaaagaacaggatgagaatctaagatatattattaataaatgtaatgga

SEQ ID NO: 172075 - DNA, 1535 bp, Homo Sapiens
actcgctgtagtggaggtgtcaactgaagagtctgaaaccatgaatacctctcctattccaacatcaccagatagccatgaaccaaatgaaaaagaaaaaaggaaacacaacctatttgtgggagtttcttttagatctacttcaagataaaaatactatgtcccaggtatattaaatggactcagagagaaaaaaggcatattcaagctggtggattcacaaggctgtctctaagctttggggaaagcataagaacaaaccagacatgaactatgaaaccatgggacgagctttgagatactactaccaaaggggaattcttgcaaaggttgaaggacagaggcttgtatatcagttcaaggatatgccgaaaaacatagtggtcatagatgatgacaaaaagtgaaacctgtaatgaagatttagcaggaactactgatgaaaaatcataagaacgagtgtcactgtctgcagaaagtctcctgaaagcagcatcctctgtacgcagtggaaaaaattcatcccctataaactgctccagagcagagaagggtgtagctagagttgtgaatatcacttcccctgggcaagatgcttcatccaggtctcctactaccactgcatctgtgtcagcaacagcagctccaaggacagttcgtgtggcaatgcaggtacctgttgtaatgacatcattgggtcagaaaatttcaactgtggcagttcagtcagttaatgcaggtgcaccattaataaccagcactagtccaacaacagcgacctctccaaaggtagtcattcagacaatccctactgtgatgccagcttctactgaaaatggagacaaaatcaccatgcagcctgccaaaattattaccatcccagctacacagcttgcacagtgtcaactgcagacaaagtcaaatctgactggttcaggaagcattaacattgttggaaccccattggctgtgagagcacttacccctgtttcaatagcccatggtacacctgtaatgagactatcaatgcctactcagcaggcatctggccagactcctcctcgagttatcagtgcagtcataaaggggccagaggttaaatcggaagcagtggcaaaaaagcaagaacatgatgtgaaaactttgcagctagtagaagaaaaaccagcagatggaaataagacagtgacccacgtagtggttgtcagtgcgccttcagctattgcccttcctgtaactatgaaaacagaaggactagtgacatgtgagaaataaaatagcagctccaccatggacttcaggctgttagtggcagtactgacataaacatttgcaagggaagtcatcaagaaaagtcaaagaagactttaaaacatttttaatgcatatacaaaaacaatcagacttactggaaataaattacctatcccatgtttcagtgggaaatgaactacatattgagatgctgacagaaaactgcctcttacagtaggaaacaactgaacccatcacgaaaggttttccaagtaagagcc

SEQ ID NO: 172076 - DNA, 631 bp, Homo Sapiens
ccatgctgtgcttcagcgatggcatttggacaacatattttccgccttctttacagtcacatctggagcggtcgtaaattggatccacctgccgaagcagccaggaggcaagttgagcttcactgtgtgtcagaaagactggtctccacaggtcagcaaacataaatgaaagcagggagcaggggatcagcatggcctttgggtaacagactttattttccatttacaaaagaggttgattgcatgcaagctgtaaggatgctgtattccctgtggagggcaagcatgatccagcacagtcctctcctgaaacacaggctggaaagtacttatttgctcagtctgggctcctggattgctcgagtccacctcttgcttaatactgttcacgttggggactgtagaaaccccagcaaggattctgcacactggcacatctcagtaacacctccaaacacagactcagaaatcaggaaagccacaaatgcatacaatctctttaaatgaaatcaccaatgtattctagaggggttgttagtaagtagagccaaatgcaaagaactgttctacttttctctctctgtgcacacatgtagatttcctgatagcaggtccttaaagcaggcacacc

SEQ ID NO: 172077 - DNA, 791 bp, Homo Sapiens
ccttcctgtacagtatcatctcagttggagttagaagaagccttgggactttatgagctaaacaaggattctgaactcttgattcatgtgttcccttgtgtaccagaacgtcctgggatgccttgtccaggagaagataaatccatctaccgtagaggtgcacgccgctggagaaagctttattgtgccaatggccacactttccaagccaagcgtttcaacaggcgtgctcactgtgccatctgcacagaccgaatatggggacttggacgccaaggatataagtgcatcaactgcaaactcctggttcataagaagtgccataaactcgtcacaattgaatgtgggcggcattctttgccacaggaaccagtgatgcccatggatcagtcatccatgcattctgaccatgcacagacagtaattccatataatccttcaagtcatgagagtttggatcaagttggtgaagaaaaagaggcaatgaacaccagggaaagtggcaaagcttcatccagtctaggtcttaaggattgttgattagactaccgggtaataggaagaggaaattaagacaaagaacagtaggttcgagttaagaaaaacagatcgtatataggcaatgaaagatagtgaaaaaagagattgataatgatgatgaggagattgattgggtactagacagagaagcatgtgtatgagcaggcatccaatcatcctttccttgtagggctgcattcttgctttcagacagaaagcagattgtactttgttcatagagtatgtaaatg

SEQ ID NO: 172078 - DNA, 784 bp, Homo Sapiens
tacccatgctgtcttcagagatggccgacgcgttgcattggccacaattgtgacaattgtgttgctccatatgctgctttctgtgggctgcttggcatacttttttgatgcaccagagatggaccatctcccaacaactacagctactccaaaccaaacagttgctgcagccaagtccagctaatgaggaaagactcacttgagataccctctccttgctgaagtttttcttgacttctccagttctcttttgttttttggagcatggttctttgggaagtggcatccactgcaggaaagcagaatgagcagagccagcagaactgatggagtggcacaaattcccagtgtctggatggtgccacactggcgcctaatcacccgtttaacaagcagaaattaaatgttgctcagcacatgtgtctttcagctcttccttttcacccatggatgatcattgcgagcatgcgctgattggactgaaatgccggggaataggttaggcatgctcagtgccgtccctttgccaccacagtcaaatgacatgcttcactgtggtaccttaatacctgaaatagaaccatggaaaattctgatgtcctctctctgaattatgtacagactacctgggggatcctcttctctccaaatgttagccatcctgaagtagccgaacagtagaaactttggtggggattaaccgggagcttgaaaatttgtctttggtaacctgatactggacagctgaactgaatggctgcaaaataaatacctcacatgaaac

SEQ ID NO: 172079 - DNA, 1360 bp, Homo Sapiens
  misc_feature (725)..(725): n is a, c, g, or t
gggattccgggtgggagcccacacggcccaagcgggccttagacatcttgacaaggacataaaggtcccaacctgaacttaaattggtctgagcagtcagtgttgtactggggctaactactccactttggaaccatcctatcttattagcaaggctacatttctaggttaacagttctaccaaatatgaatatgaaagtttatttttaatgagacaatgtgcaaaattatggtcaaccaacatcttttcaccaaatacttcaagcataaaaaatgagaatctttacaaaaatatacagagacaccacaaattggtagctgcccataacattaaacaaactggactcttaagagtggcttctcaacagcatatcattttaattataaccattgcctggtacagggaaaactaacaagtgtattttaagcatcattgcaacattgtattcctgataatttaagtaaaccaaactatgagtaaatgaatgatacatgcctaaaaatgaccatggtttatactatcagtggccactggacttaggactagtccaagaccttgatctagattttgacctagacctagactgtgatcttgactgagatttggatctaggtggttcttttttccttgattccttttcatatcttgagccagacttataatgtgttttggaatccgttttagaggtgccctctagttttggtggaagatgcagaccctaganacgtgatttagccctccatttctttcttgggccgggacttgggaccgtgatcttgaattggatttagatcttgaaaaagatcgatttcggtgtttgaatctatcattgtcggaatggcttctgctacgcccgtggtcttccagtcggtctactgtttctaggactatacgatcttctatagttgtaatcaaaagaccgacttcttgatctcctcctttcataactccggcttctagaacgtctgtatctgtcataatcatcatagcgtgaagaactgtacacattcctcccttccttggctttcatctgatttggtgtctttcgatccccctgggcaaactgtatttcaatctgccgtccacaaatccactttctgtccaaattatgtaaagcgtcttcagcatcacgaacatcctcaaattgaacataagcaaatcctcttggacggcgagtgtagaaatcaagtggaacatacacatcaactataggaccataacgaccaaattcacgccgcaagtcttcagacctggtgtcgtcggccacgttcctgacgaacagagacgtgttggggggacgcaggtagcgggacatggcggcggcgtgtctcggccgggcgcactaacgggctcagcccc

SEQ ID NO: 172080 - DNA, 1219 bp, Homo Sapiens
ggatggtcacgcagtcacaatgccagctctgcccctggaccaactccagatcacccacaaggacccgaagacaggaaagctgaggacttcaccagcgctgcaccccgagcagaaggcagaccggtattttgtgttatacaaaccgccccctaaagacaacattcccgccctagtggaggagtacctggaacgcgccaccttcgtagccaatgacctcgactggctcctggcctcgcctcacgataaattccggtgccaggtgatctttgacgagactctacagaagtgcctggactcctacctgcgctatgtcccccgcaaattcgacgagggggtgtcctcagcccctgaggttgttgacatgcagaagcgcctccatcgaagtgtttttctcaccttcctccgcatgtccactcacaaggaatccaaagatcacttcatttccccttctgcgtttggagaaatcctctacaataacttcctctttgacattccaaagatcctggacctctgcgtgctctttggaaaaggcaactcaccactgctccagaagatgataggaaacatctttacacagcagccaagttactacagtgacctggatgaaaccctgcctaccatccttcaggtcttcagcaatatcctccagcactgtggtttgcaaggggacggggccaataccacaccccagaagcttgaggagaggggccgattgacccccagtgacatgcctctcctggaattaaaggacattgttctctacctttgtgatacctgcaccacactttgggcctttctggatatcttccctttggcttgccagaccttccagaagcacgacttttgttacagactagcttccttctacgaagcagcaattcccgaacatggagtctgcaattaagaagaggaggcttgaagatagcaagcttcttggtgacctgtggcagaggctctcccattccaggaagaagctaatggagattttccacatcatcctgaaccagatctgcctccttcccatcctagaaagcagctgttgacaacattcagggcttcatcgaaagaagttccttcagatcttcagctccttgctgcaacgagaacgaggttcctccgggacttatgatgcactctttcccccgtggccgaaacatcagctttgctgcacaggcctcatcagtcttggccgaagaagcggaactggctacaatctcca

SEQ ID NO: 172081 - DNA, 481 bp, Homo Sapiens
agatgctgttcttcggatggatgaaggaacggggtcaaaaggggaggacgtctaaggaatgagagcaagagatgcagcagggagttagatcaggagagggcaggagatgggatggggctgcaggctgcctccaggttcaaagtaagaaacaggcagtagggaattgagagaaaataagaaccagggccagagaccaggtgaaggacgtgaggattggaggatccgagagaggcaatggcaacacgagggctgagacgggagggcagagtaggaccgagaattgaccaagtctatgtggttttcacaacaacggcgtgagctatcatacaggaatgctgtacccgttttgcaggtgaggaaactgaggctcgttactgacttgcccaagattccacagtggaagagcctggacgtgaactgcgtctccaggtgggtttcagccaagttggaaggagaaggatgggatttgggggaacagtcc

SEQ ID NO: 172082 - DNA, 1097 bp, Homo Sapiens
  misc_feature (902)..(902): n is a, c, g, or t
  misc_feature (1022)..(1022): n is a, c, g, or t
  misc_feature (1062)..(1062): n is a, c, g, or t
  misc_feature (1066)..(1066): n is a, c, g, or t
gaactttcttggagagtaatataatcatgcaatcaatgggaaactctatgccaaccttaggggtcttaccatgtaccaaggagaacgagtggcctggtacatgctggccatgggccaagatgtggatctacacaccatccactttcatgcagagagcttcctctatcggaatggcgagaactaccgggcagatgtggtggatctgttcccagggacttttgaggttgtggagatggtggccagcaaccctgggacatggctgatgcactgccatgtgactgaccatgtccatgctggcatggagaccctcttcactgttttttctcgaacagaacacttaagccctctcaccgtcatcaccaaagagactgaaaaagcagtgccccccagagacattgaagaaggcaatgtgaagatgctgggcatgcagatccccataaagaatgttgagatgctggcctctgttttggttgccattagtgtcacccttctgctcgttgttctggctcttggtggagtggtttggtaccaacatcgacagagaaagctacgacgcaataggaggtccatcctggatgacagcttcaagcttctgtctttcaaacagtaacatctggagcctggagatatcctcaggaagcacatctgtagtgcactcccagcaggccatggactagtcactaaccccacactcaaaggggcatgggtggtggagaagcagaaggagcaatcaagcttatctggatatttctttctttatttattttacatggaaataatatgatttcactttttctttagtttctttgctctacgtgggcacctggcactaagggagtaccttattatcctacatcgcaaatttcaacagctacattatatttccttctgacacttggaangtattgaaatttctagaaaatgtatccttctcacaaagtagagaccaagagaaaaactcattgatgggtttctacttctttcaaggctcaggaaatttcacttttgaactgagggccaantgagctgttaagatacccacactttaacttaaaggctaanaatntaggcttgatgggaaaattgaaaggtagctt

SEQ ID NO: 172083 - DNA, 807 bp, Homo Sapiens
  misc_feature (752)..(752): n is a, c, g, or t
cactgaacattgatcaatactctaaaatgtttgtcatcctttagaataatgggaattaaagttgagcagttttccatctctaccaaatccttcaccacaagcagcattctattacagtatgaagaattgtctcatatgttaaaactgtacttttctctaacctttctctcactcctacaaggcccttttctcaaatcatatttctgagagaaatgtatggttctttctcacaggcctgctgatttgtaactgtgccatcgaatagagcaattagatccatcagacctttttcccctcattaggttcagtggaaccattctggttaaaacagcatgaactgaactcagtttacattcatattctatgggcaataccatttggtttttggaactgtttatctgctgttccctatcaagtattaatgtagggatgtcactcaggctgcgttgcactgggctgagttcaactgcgacgctctcactgacgcgtgcttacatgtgcttctcacttccggagcacaggcaggtggctgcggggtcccagctctgaatggatgcccatgatgcaactggggcagcccttgctttttgcttgctctcccacagaaacctttgtccttgcaactttatcctttgtcccgattgggtcccagatacacaaaatgtacaaatgtaaacttgctcattttattaaaattctttagctctttggtctttctggaattttttaaataaaaaatgcccttgatgganggatggttttcactcgcaccatacttagtctaaataagaagtctaggatctacaa

SEQ ID NO: 172084 - DNA, 922 bp, Homo Sapiens
  misc_feature (872)..(872): n is a, c, g, or t
  misc_feature (905)..(905): n is a, c, g, or t
agcgtcggaacctgctgcgcctgtacttcatcctgctcctcatcatctttctgctggagatcatcgctggtatcctcgcctacgcctactaccagcagctgaacacggagctcaaggagaacctgaaggacaccatgaccaagcgctaccaccagccgggccatgaggctgtgaccagcgctgtggaccagctgcagcaggagttccactgctgtggcagcaacaactcacaggactggcgagacagtgagtggatccgctcacaggaggccggtggccgtgtggtcccagacagctgctgcaagacggtggtggctctttgtggacagcgagaccatgcctccaacatctacaaggtggagggcggctgcatcaccaagttggagaccttcatccaggagcacctgagggtcattggggctgtggggatcggcattgcctgtgtgcaggtctttggcatgatcttcacgtgctgcctgtacaggagtctcaagctggagcactactgaccctgccttgggccttgctgctgctgcacccaactactgagctgagaccactgagtaccaggggctgggctccctgatgacacccaccctgtgccatcaccataacctctggggaccccaacctcagaggcagcttcaagtgccttttgctgcgcaccaatgcccagcaggggaggtgaggggggctggcggggcgaagtttggggggtgttttgtggggctccccgggacatactctctgcctggtggtcagatgcaggttgggaaggggcctttgctgagttggcgcaaggccgagcgtttcccagcagggggaagaaaccctttcacaccccagggcctttcaggaactgggggctttgnccttttgcagccacaatgggccccaatcccaanttgggggggaagcccag

SEQ ID NO: 172085 - DNA, 1181 bp, Homo Sapiens
  misc_feature (140)..(149): n is a, c, g, or t
  misc_feature (189)..(189): n is a, c, g, or t
gtgtgggtccgcatcttgttcggggaatgtggttttcagccggtgcggggcgctgctacaagggagttcccccgttcgcaatccgggcgttttggcccgtcccggccggagagtaatgtcccgggggctccccacaaaannnnnnnnnnaaaattacgccccggccagccctccttcacctcaccctgntgggcattggtgcgcagcaaaaggcacttgaagctgcctctgaggttggggtccccagaggttatggtgatggcacagggtgggtgtcatcagggagcccagcccctggtactcagtggtctcagctcagtagttgggtgcagcagcagcaaggcccaaggcagggtcagtagtgctccagcttgagactcctgtacaggcagcacgtgaagatcatgccaaagacctgcacacaggcaatgccgatccccacagccccaatgaccctcaggtgctcctggatgaaggtctccaacttggtgatgcagccgccctccaccttgtagatgttggaggcatggtctcgctgtccacaaagagccaccaccgtcttgcagcagctgtctgggaccacacggccaccggcctcctgtgagcggatccactcactgtctcgccagtcctgtgagttgttgctgccacagcagtggaactcctgctgcagctggtccacagcgctggtcacagcctcatggcccggctggtggtagcgcttggtcatggtgtccttcaggttctccttgagctccgtgttcagctgctggtagtaggcgtaggcgaggataccagcgatgatctccagcagaaagatgatgaggagcaggatgaagtacaggcgcagcaggttccgacgctccttgaaggtggcgcagcagcccaagaccccagtcaccatgacgacagtgcccgccaccaccaggatgtaggctgtggccaggtaggtgcctgaggccagcaggctgatgtagtcactcttgagggccagcgtccagatgcccactgccatgacagccaggccagccagccagaagcagcaattgtaggtaaacagcaggtacttgaggcaaacggtgccacatgttgtcttcttctcgttgaactcacccatcctggggctaccacgcgtccgagtccgggcctggcggcggcggcagctgcgggggcggcggctc

SEQ ID NO: 172086 - DNA, 572 bp, Homo Sapiens
cgatggagactgggaccccagctctcatctgcccctcctgccaggcgccctgggtggtggaaggcagccgccctcccgaaggttggcccccacgtggggaggtggagttccggaattattctgtgggctaccggccgggcctagacctggtgctgagagacctgagtctgcatgtgcacggtggcgagaaggtggggatcgtgggccgcactggggctggcaagtcttccatgaccctttgcctgttccgcatcctggaggcggcaaagggtgaaatccgcattgatggcctcaatgtggcagacatcggcctccatgacctgcgctctcagctgaccatcatcccgcaggtaggagcctggcatgggctggccacactcacccctcactgtctgggagcttccagttcccctgcttcatgtctagcagcccagttcctgcatggatacccatgctcctgtctctgtatcctataaatgtctgccctcaaccccacggcccgttctctgacgcctccttgagagaccaatctgtgcctgctgctctgctttttcacctctggccgcgtggtt

SEQ ID NO: 172087 - DNA, 837 bp, Homo Sapiens
cacattggaggtcatgatgaagatggcgtcctgccaatcaatggtcttcccttttccatctgtcagccggccctcatcaaaacagctgcagcatgatggtgagcacatctggatgggccttgtctacttcatcaaagagcaccacagcattggggcactgcttcaacttcttggtcagctggccaccctcctcatggccaacgtagcctggtggagacccaataaacttggccacctcgtgtcgctcctggaactcggacatgtccagcctgatgaagccctttttagcatctttgtgcatatatttggctgtctgcttggccagctctgtttttcctattccagatgatcccaagaagaggaagaccagagggtgttcttcatcgtaccagccattctccttcctccggatcgcagcacccactgtggcgatggcgctctcctggccaatgatgtgctcctttagtcgctgctccagggggaagcggcgccgctcctcagcctcacgcttccgctgcttctcttggtacttggcttcagaagtcctcagaagcttcatcacttccccttctcgggcataatccaagggtgtgtgtcccatttcattcctctgcagggggttggctcctccatcaagcagctccttgacagtgcggtagtcatcagcaagaacagcatagtgcaaggccgtgcagcccttgaaactggcgcggttgttcagcctgttgttgaagtcatcctctcgggtgatcaggacttccaaagaatggattccctgttccttggcagtcttgtaaacactgctgaaatcatctccaaggtttggatcagcccccc

SEQ ID NO: 172088 - DNA, 894 bp, Homo Sapiens
ggtgacctcagtgccatcagcctggatggggagaaggtagatttcaatacgttccggggcagggccgtgctgattgagaatgtggcttcgctctgaggcacaaccacccgggacttcacccagctcaacgagctgcaatgccgctttcccaggcgcctggtggtcattggcttcccttgcaaccaatttggacatcaggagaactgtcagaatgaggagatcctgaacagtctcaagtatgtccgtcctgggggtggataccagcccaccttcacccttgtccaaaaatgtgaggtgaatgggcagaacgagcatcctgtcttcgcctacctgaaggacaagctcccctacccttacgatgacccattttccctcatgaccgatcccaagctcatcacttggagccgctgtgcaccgctcagatgtggcctggaactatgagaagatcctcataggcccggagggagagcccttcccaacgctacagccgcaccttcccaaccatcaacattgagccggacatcaagcgcctccgtaaagttgcaatattagatgggaaactggctcaacacacagaatctccctacttccattccggtccctggagggacccttaaggatggcagcatggcctttcagggaaaccctggctggaacctccagaattccccttgtgaaatcaggcccccccttcctgggcaaaggccttgtgccttaccccctcctggcctgggttccctttttccctcccccccaagcccctcgggttggggtgaagttcatctttgggcctcccaaaacatttggggtaaacttccgggggcccttccaataaaatgtaggggcccctttctctaaacccctccatggggggagggtgtctcaataaacggt

SEQ ID NO: 172089 - DNA, 993 bp, Homo Sapiens
  misc_feature (866)..(866): n is a, c, g, or t
agccaacggagaggtgaatccccagtacgatagcaccttcctgtttgacaacgacttcccagctctgcagcctgatgcccccagtccaggacccagtgatcatccccttttccaagcaaagtctgctcgaggagtctgtaaggtcatgtgcttccacccctggtcggatgtaacgctgccactcatgtcggtccctgagatccgggctgttgttgatgcatgggcctcagtcacagaggagctgggtgcccagtacccttgggtgcagatctttgaaaacaaaggtgccatgatgggctgttctaacccccacccccactgccaggtatgggccagcagtttcctgccagatattgcccagcgtgaggagcgatctcagcaggcctataagagtcagcatggagagcccctgctaatggagtacagccgccaggagctactcaggaaggaacgtctggtcctaaccagtgagcactggttagtactggtccccttctgggcaacatggccctaccagacactgctgctgccccgtcggcatgtgcggcggctacctgagctgacacctgctgagcgtgatgatctagcctccatcatgaagaagctcttgaccaagtatgacaacctctttgagacgtcctttccctactccatgggctggcatggggctcccacaggatcagaggctggggccaactggaaccattggcagctgcacgctcattactaccctccgctcctgcgctctgccactgtccggaaattcatggttggctacgaaatgcttgctcaggctcagagggacctcacccctgagcaggctgcagagagactaagggcacttcctgaggttcattaccacctgnggcagaaggacagggagacagcaaccatcgcctgaccacgccgaccacagggccttgaatccttttttgttttcaacagtcttgctgaattaagcagaaagggccttgaatcctggcctggaatttg

SEQ ID NO: 172090 - DNA, 606 bp, Homo Sapiens
agatggtatccaaatggcatttggccagagaaccctgggaagtctgaaggcttcagccgtgattatgaggctgccacacaagggtgatgagggaaataaatgtacaagcaaagtgaggctaggcaatatgacctctattatcagctgaggtgagagcatccaaatctttgtaagacagaataactgggttgagggcttctttacccagttaagttaatgacattaggacatcacacttgccttttcaacttccatgacccaactgcagcccctctaaattcaagctccttaacttaccactctattgaaaccagaaaacttcattctcctacagttacaggggaaagtagccagagagaaagacagagaactctccagaaacggctaaaactggtctggtctaggctgacctagccttctctgggggagaatacaaaaaggtgtgggagagaaatgatgatgatgaagaagaagaaggcggcaaattaatttggccagttttaggggagaaccttggtctgtgttacccctcagccaggtcctgagggtagcagagaacggacaacatggctgggctctggatctcttaaccaaacccagcagctc

SEQ ID NO: 172091 - DNA, 469 bp, Homo Sapiens
ctccgacgttcagtgccggggcaagcaagctgtcttctttgttggacaatcagccagaatgataagcaaacctgcagattcccaagatgttcacgagcttgtgctttctaaagaagattttgagaagaaggagaaaaataaagaggcaatatatagtggatatattagaaacagaaagccctctgattctgttcacattacaaatgatgatgaaagatttctacatcatcttatcatagaggagaaggaaaaagatagctttactgctgtggttatcacaggggtacaaccagaacacatacagtacttgaaaaattatttccacctttggacacgacagttagcgcatatttatcactactatattcatggcccaaaaggaaatgaaatacgaacatcaaaagaagttgaacctttcaacaatattgatattgaaatttctatgtttgaaaaagggaaggtccggtac

SEQ ID NO: 172092 - DNA, 448 bp, Homo Sapiens
  misc_feature (12)..(12): n is a, c, g, or t
tgggaccggacntccttggtgtgtggaacaagctgaaaggtaggttggtgataatcatgaaagttcttgaggccagcttaaataaggcagcatgtgagagaaagttcttggctcactagggcgagacctgaagaagccgaaggtaagaacatgaagtgcagtacagccacaagacaggtagtgactcattcatcccagcttctttggggccacctcttatctatgagacaaagtgtgacttgcactcaacagtggcattgtttctgtggcaaaagaaggaaatgtgcctctgcttctgttcgttttctacttaatgttgttttgcagaacacagagaacgcagaatcatggaccatcccattttttagctgaatgctagagaaagcacgtcagccatctgcaacttctcccaaggtgcccttcccatgattaggatacattccataat

SEQ ID NO: 172093 - DNA, 502 bp, Homo Sapiens
agccgttgccggtgacagtgcaggtgaagggttggctgcgtatgctgcgctcgctgctcgtgacgaacaattgcccgtccgcgctcaggtcctaatctatcctagcgttgataagccgggaatcggcacacgagcgatatgcatcacgaaaaacgaatgcagaagtgcctcctcttacggtgcaggcaatgcgcaacgttgccgcatatctagcgcatgagaaagcattataacgaagatattcgcctgtcgcctattcttggagtgcaaagccggacatcgatgcctgccttaatactgaccgcgggagctgacgtgtatgagggatgaaggattgcgctatggttgcgaattgctcgatgcgggtgcctcggctttaattagaaactatcctggagcaattcatggtttcctcgagatgccagctgccctgcaagtcgcacaagatgcgcacgaattgattgggctttttcttcggcagcaattaattcaaaagccatag

SEQ ID NO: 172094 - DNA, 914 bp, Homo Sapiens
tggtacggcccggaatttccgggatatcgtcgacccacgcgtccggctcaagaacgtccgggtgctgggccacttcgagaagccactcttcctgtgagctctgccgccacatggtcttccagcggctgggccaggtgactacgtcttccggccgggccagccagatgccagcatctacgtggtgcaggacgggctgctggagctctgtctgccagggcctgacgggaaggagtgtgtggtgaaggaagtggttcctggggacagcgtcaacagccttctcagcatcctggatgtcatcaccggtcaccagcatccccagcggaccgtgtctgcccgggcggcccgggactccacggtgctgcgcctgccggtggaagcattctccgcggtcttcaccaagtacccggagagcttggtgcgggtcgtgcagatcatcatggtgcggctgcagcgagtcaccttcctggcactgcacaactacctgggtctgaccaatgagctcttcagccacgagatccagcccctgcgtctgttccccagcccggctcccaactcgcaccagccctgtgcggggctccaagagaatggtcagaactcagctacagacgagcccaggagacccaggcggcaccgatccaccgggaccgctgctggactacaggtgacctgtgaagcccacattcctggaaacccctcgtcccatctgctgaagcggtgagtctcattcaggggaccatttcaggctgcaggtggcccgttcgatacgaatggcctataagcggggcggtctcgtgtcctgagagagctcggggggccgggagcccgtcggacccaatcaagcgcatagaacggaggcgaataataaggaggatgcggggcttcgctacggagtaagttaggaagaggcagggtgg

SEQ ID NO: 172095 - DNA, 561 bp, Homo Sapiens
  misc_feature (500)..(500): n is a, c, g, or t
  misc_feature (544)..(544): n is a, c, g, or t
ggattaagatccatgagaaaagggtgtcagataacttgcgacccttccatgaccggatggaggaatgtttcaagaacctgaaaatgaaggtggagaaggagtacggtgtccgagagatgcctgactttgacgacaggagagtgggccgccccaggtctatgctgcgctcatacagacagatgtccatcatctctctggcttccatgaattctgactgcagcacccccagcaagcctacctcagagagctttgacctggaattagcatcacccaagacgccgagagtggagcaggaggaaccgatctccccggggagcaccctgcctgaggtcaagctgcggaggtccaagaagaggacaaagagaagcagcgtagtctttgcggatgagaaagcagctgcagagtcggacctgaagcggctttccagggaagcatgagttcatgagtgacaccaacctcttcggagcatgcggccatcccccttcaaggcgtctgtcctnttttcaaattgagcttttgccagccagttcccttgcctaccatncccagcccttgggggtt

SEQ ID NO: 172096 - DNA, 812 bp, Homo Sapiens
ctctatcaccgaaagtgcacttctaggagatattttagctagtgtttttcctcgcttcaaatgacctcagccccgcctgcagtggctagaagccagcaggtgcccatgtgctactgacaagtgcctcagcttccccccggcccgggtcaggccgtgggagccgctattatctgcgttctctgccaaagactcgtgggggccatcacacctgccctgtgcagcggagccggaccaggctcttgtgtcctcactcaggtttgcttcccctgtgcccactgctgtatgatctgggggccaccaccctgtgccggtggcctctgggctgcctcccgtggtgtgagggcggggctggtgctcatggcacttcctccttgctcccacccctggcagcagggaagggctttgcctgacaacacccagctttatgtaaatattctgcagttgttacttaggaagcctggggagggcaggggtgccccatggctcccagactctgtctgtgccgagtgtattataaaatcgtgggggagatgcccggcctgggatgctgtttgggagacggaataaatgttttctcattccaaaaacggaaagggccccccagcagccgggaacattggtcggcccgccctcgggcccctcgaaagaagccttttctagaacccaattttcgttttgggccccgccggggccccccaagtaacgcgaaaggtggaaaccttggggtccataagccgtggttttcccctaagggaaaaactccctgggccccatggaactaaggggcctggggcatttctctcccccaatat

SEQ ID NO: 172097 - DNA, 987 bp, Homo Sapiens
  misc_feature (684)..(684): n is a, c, g, or t
ggcttctcagctctctggaccttcctgtggtttgttggtttctgcttcctcaccaaccagtgggcagtcaccaacccgaaggacgtgctggtgggggccgactctgtgagggcagccatcaccttcagcttcttttccatcttctcctggggtgtgctggcctccctggcctaccagcgctacaaggctggcgtggacgacttcatccagaattacgttgaccccactccggaccccaacactgcctacgcctcctacccaggtgcatctgtggacaactaccaacagccacccttcacccagaacgcggagaccaccgagggctaccagccgccccctgtgtactgagcggcggttagcgtgggaagggggacagagagggccctcccctctgccctggactttcccatgagcctcctggaactgccagcccctctctttcacctgttccatcctgtgcagctgacacacagctaaggagcctcatagcctggcgggggctggcagagccacaccccaagtgcctgtgcccagagggcttcagtcagccgctcactcctccagggcacttctaggaaagggtttttagctagtgtttttcctcgcttttaatgacctcagccccgcctgcagtggctagaagccagcaggtgcccatgtgctactgacaagtgcctcagcttncccccggcccgggtcaggccgtgggagccgctattatctgcgttctctgccaaagactcgtggggggccatcacacctgcccctgtggcagcggaagccggaccaagcttcttgtggtcctcacctcagggtttgcttccccctgtggccacactgcctgttaatgatcctggggggggccaaccaaccccttgatgcccgggtggggccctcctggggggctggcccttcccccgtgggttggtgaaaaggggcacgggggctcttggattgccttcacatggggcaaccttttccctcccc

SEQ ID NO: 172098 - DNA, 1002 bp, Homo Sapiens
gaagacctggtcattggtgacctgctcttctcagctctctggaccttcctgtggtttgttggtttctgcttcctcaccaaccagtgggcagtcaccaacccgaaggacgtgctggtgggggccgactctgtgagggcagccatcaccttcagcttcttttccatcttctcctggggtgtgctggcctccctggcctaccagcgctacaaggctggcgtggacgacttcatccagaattacgttgaccccactccggaccccaacactgcctacgcctcctacccaggtgcatctgtggacaactaccaacagccacccttcacccagaacgcggagaccaccgagggctaccagccgccccctgtgtactgagcggcggttagcgtgggaagggggacagagagggccctcccctctgccctggactttcccatgagcctcctggaactgccagcccctctctttcacctgttccatcctgtgcagctgacacacagctaaggagcctcatagcctggcgggggctggcagagccacaccccaagtgcctgtgcccagagggcttcagtcagctgctcactcctccagggcacttttaggaaagggtttttagctagtgtttttcctcgcttttaatgacctcagccccgcctgcagtggctagaagccagcaggtgcccatgtgctactgacaagtgcctcagcttccccccggccccggtcaggccgtgggagccgctattatctgcgttctctgccaaagactcgtggggggccatcacacctgccctgtgcagcggaaccggaccaagctcttggggcctcactccaggtttgccttcccctgtgcccactggctgtaagaatccggggggccaccaccccggtgccgcagggcctcctgggcctgcctcccctcggttcgcacagggcccgggtcttgcctgccccacactgccccttccctccctctgcctccccacccaccttgtgccacgcccc

SEQ ID NO: 172099 - DNA, 916 bp, Homo Sapiens
cgacatggagagcggggcctacggcgcggccaaggcgggcggctccttcgacctgcggcgcttcctgacgcagccgcaggtggtggcgcgcgccgtgtgcttggtcttcgccttgatcgtgttctcctgcatctatggtgagggctacagcaatgcccacgagtctaagcagatgtactgcgtgttcaaccgcaacgaggatgcctgccgctatggcagtgccatcggggtgctggccttcctggcctcggccttcttcttggtggtcgacgcgtatttcccccagatcagcaacgccactgaccgcaagtacctggtcattggtgacctgctcttctcagctctctggaccttcctgtggtttgttggtttctgcttcctcaccaaccagtgggcagtcaccaacccgaaggacgtgctggtgggggccgactctgtgagggcagccatcaccttcagcttcttttccatcttctcctggggtgtgctggcctccctggcctaccagcgctacaaggctggcgtggacgacttcatccagaattacgttgaccccactccggaccccaacactgcctacgcctccctacccaggtgcatctgtggacaactaccaacagccacccttcacccagaacgcggagaccaccgagggctaccagccgccccctgtgtactgagcggcggttaacgtgggagggggacagagaaggcccctcccctctgccctggacttttccatgagcctcctggaactgccaacccctctccttcacctggtccatcctgtggcagcttgaacccagctaaaggagcctcctaaccctggcggggggcctgggcaaaccccccaaccccaaagggccctgttgccccaaagggggtttcagagcaagtgtgcttcaactcccttccc

SEQ ID NO: 172100 - DNA, 831 bp, Homo Sapiens
  misc_feature (663)..(663): n is a, c, g, or t
  misc_feature (720)..(720): n is a, c, g, or t
cttctcagctctctggaccttcctgtggtttgttggtttctgcttcctcaccaaccagtgggcagtcaccaacccgaaggacgtgctggtgggggccgactctgtgagggcagccatcaccttcagcttcttttccatcttctcctggcgctacaaggctggcgtggacgacttcatccagaattacgttgaccccactccggaccccaacactgcctacgcctcctacccaggtgcatctgtggacaactaccaacagccacccttcacccagaacgcggagaccaccgagggctaccagccgccccctgtgtactgagcggcggttagcgtgggaagggggacagagagggccctcccctctgccctggactttcccatgagcctcctggaactgccagcccctctctttcacctgttccatcctgtgcagctgacacacagctaaggagcctcatagcctggcgggggctggcagagccacaccccaagtgcctgtgcccagagggcttcagtcagctgctcactcctccagggcacttttaggaaagggtttttagctagtgtttttcctcgcttttaatgacctcagccccgcctgcagtggctagaagccagcaggtgcccatgtgctactgacaagtgcctcagcttccccccggnccggggtcaggccgtgggagccgcttattatctgcgtttctctgccaaaggaatccntgggggggccatcacaccctgcccctgttgcaaacgggagcccggaccacaggcttcctttgtgtcccttccacttcaaaggttttggcctttcccccctggtgcccccac

SEQ ID NO: 172101 - DNA, 618 bp, Homo Sapiens
aagaatcctgaatttaacaagatggttctgaatgagacctacagaaacattaaagtgctcctgacctctgataaagctgcagccaatttctcagatcgttctttgctgaagaacttgggacattggctaggaatgatcacattagctaaaaacaaacccatcttacacactgacttggatgtgaaatcattgctgctagaggcttatgttaaaggacaacaagaattgctctatgtagtgccctttgttgccaaagtcttagaatctagcattcgtagtgtggtttttaggccaccaaacccttggacaatggcaattatgaatgtattagctgagctacatcaggagcatgacttaaagttaaacttgaagtttgaaatcgaggtcctctgcaagaaccttgcattagacatcaatgagctaaaacctggaaacctcctaaaggataaagatcgcctgaagaatttagatgagcaactctctgctccaaagaaagatgtcaagcagccagaagaactccctcccatcacaaccacaacaactttactacaccagctaccaacaccactgtacagccacggttccccacagccacagtacagatagccgacggacctc

SEQ ID NO: 172102 - DNA, 504 bp, Homo Sapiens
tggatccataagaagctctttcccctaaaggcagcacagctaactctactctctacctgccacaactcagtcaagaattggcacctgtagccatctgggtaagcctcgatgcttctttcagggatgtgacacaaatggcaactcggagctatttgttactgcttgtctgtcaagattgtagccaggttaatgggtcattttccttctctccagactccaccactgactgatttcagaagaggtagagaactccaaactgtcccagcaggtttgctttagacaacagagcacagcccacatggccctacctgttcagaaagtcatgttagatcaacaaaccacttccattctgagtgcacttttataggttttatgctttagcatgtccgggagatgagttaattaacaatataaacattatgtgagtaaatggaaggtccaaactttaagtttttcttataaaaatattggagctattcatttaagaatttgctcaaaagggaa

SEQ ID NO: 172103 - DNA, 1073 bp, Homo Sapiens
cttggtgtgttgaaacagatttctgtaatatggaaagaaggagggaactgcagtaaggaggatgagccacatgagctggaaggagtggaaactagatcactgaagacaggaaagcaaaccatagaactggaggacagtggggaggttggggtcacctctgggttcctagacaatatgcttcagtctgaggggagcagaaaattgggagtggagggttaaaggtcaaatgacaactccctggagtcccagcaggaagtatttcagaacagaaaggtgaagaatggagagacaggaagcctgcctccaggcacttctctcctcagcctaaagtctccacagactgaagaaggcccagtggggcagctctggggctgcatctgagccagtggtgcttggcgaagaaggcttgtggattccccagcaccaatgaataccctgatctggaagaggagagagcaacctatccacaggaagaggaccgttttctcactcctggcagggcccagacagctgctttggtctccctggagccccctggatcaggaggaggcttgtgcctccaggcagctgcactctctggcctcgttcagcactgtcacagccagaaggaacccccttcacaatccctgggggatggagttggcagcgtctgaagagtaaggagaaaccaccgatgccgagaggctagtggtgccccagggacccaagactagttccgtcactagagtcaccctcattgctgacatgaaggcgtttccccttccttcgtctctccaactgcctttcccatcctctgaactaggcattaacagcccccgtgggctcccatctcaacccaccgctctcacaggagcaccccaagtcctgttttcctccaggccccgctcctggccttgtattctctctgctctgttattaaaaagcaagcaagtggaacaccccacacgatcatcaatcacagaagtttcgcccccgggactggcaccaccaagccggagggatccataaccctcctcacgaagatccgagcttagtcaacaccagtcaccaaggggcgaaggacggcacacaac

SEQ ID NO: 172104 - DNA, 716 bp, Homo Sapiens
  misc_feature (14)..(14): n is a, c, g, or t
  misc_feature (36)..(36): n is a, c, g, or t
  misc_feature (39)..(39): n is a, c, g, or t
  misc_feature (48)..(48): n is a, c, g, or t
  misc_feature (63)..(63): n is a, c, g, or t
  misc_feature (72)..(72): n is a, c, g, or t
  misc_feature (93)..(93): n is a, c, g, or t
  misc_feature (121)..(121): n is a, c, g, or t
  misc_feature (138)..(138): n is a, c, g, or t
  misc_feature (162)..(162): n is a, c, g, or t
  misc_feature (168)..(168): n is a, c, g, or t
  misc_feature (238)..(238): n is a, c, g, or t
agctcggaccggancttcctggggtgtggcatattnaanatttctacnccaccgtatgtcaantgggtaaanccttccagagctctctaaatncctgaaagacttaagcctttttttaagnattaatacttaaaaaanagatcctggcatctatttatgcantaaatnctttccagtaatggtatataaaaggctacagtttaatatctgtatttttataaaagtatgatgaagggtntggggtgtttttatttgtagcagaggtaagaatatgtattcatataatctgcctacttttgagttctcatattaacatttagataacatatgaagtatggcccccttggatcctggtttttaagttactttcgatgtgtatacgaacaaagaccagggagaaacagaacttttaaaactataggctgctgtgttggggccagaaataaggtgacaagtaaagacttttataatacctaccttcaaaattagaatcagcagcactgtacaaataaagtgcctgtgcttcacctcacaccaagaatcttgcctaaccctgtcagagtgcctaatatcctgtggtgattatgtataatgaaacagtcttattttgtgctctttggtttcttaaaaggaaagcttgttttctttcctttatcattacagaggtatgtctttggttcttaaactatctgtctaaaataaagctgtaaaaaatt

SEQ ID NO: 172105 - DNA, 382 bp, Homo Sapiens
ctgtgcggtcagggtacactcagctctcctccccaactccagcagcctttaagaagtgtccctttggcgccccctggaggcagagcactgagctggaccctgggtagactcccacagggaggacggagctggcctcaggagtgggacacccagacttggcagggccttcaagaggcctgtgtgggggccccaggaatccttagctgaagcggggagactcactctccatctcaggaaattctagcccttgccctcagggagccacggttgagggtgaggcccaacacctgccttagggccctgggtgggcaagtctgggccctggggtagggagggagactcaggcccacacttgggtattttctaatttcagacaaacaca

SEQ ID NO: 172106 - DNA, 251 bp, Homo Sapiens
gccatttctggagcaagagggtcttcttcctccttcccccagccagccagctgtcctggggccaggctttcctgggtggaaagaagtatacctttccctggggccctaggatagcaaagtgagccatagtgggccaggctgcccttccatgctgggccccagcccaggtctgcactcgcctggatcaccttctttgagccttagccatctcctgtcaggtaggaatgaacttgccagccttcaggctcgtt

SEQ ID NO: 172107 - DNA, 319 bp, Homo Sapiens
tgggtgtagtaagcaatgacttggagcagagccctctagccattgggctcaccctcacaggcaggcgccactgaccctaggggggtgtaggcagctggaggaagtactgtgtgtcccccattccagcgatggtggcccctctcagagtcaatacccttccttccaagagactgaacatacaactggacaatggccaggccacatatgacaatagactctggccagaaacccacacccagagccttccctttttttccactataacatttcacagtacctgcctgcctttgacccctgccaaatacaaacattcagccgt

SEQ ID NO: 172108 - DNA, 295 bp, Homo Sapiens
catctgtatcaccaaacatgtaaagttaattattttgttccatctttaacatgaattattttatgtacattactttttagttcaataaatttgaacaatatttaaaaatgatctaaattcataaaagtatttcataaatgtcaacatttaattattatgtacaaataaggaagtccatgaaaaaagttaaaacgaaaatgtagtcataaagttcaagcaacattacctatttagacaatattccaaccaatctagccgagggcattcatacattcagccgttaagatccgagtcg

SEQ ID NO: 172109 - DNA, 665 bp, Homo Sapiens
  misc_feature (21)..(21): n is a, c, g, or t
attaaagtggaagatgccatnatatgtactattcatgattcccaagctgggagcaagtcctcctgatgtgaacacacttagcattgcttttgatgcaatttcattttcagtttggaagaaacactggattttcaagttttctaagaaaagatacaacttgattatttcattctcttgagggaaccctttgttagaacatgcaaagcgtttctctgtatcatctttatgatatactattcctgatgaaaattcaaatatgttcaaaagcaaaactgaaacatatataagtggcgattccataagtaaatccactgttaggaatgagcactgtaaaagctatcagctatcagcgtgaacccttccatggtttcctttgatcacatgacatcattatgatttccttctccttgcgtaagtgggtaaaggtcaagaaatgcctaggcaaatatgaagagaagttattttggcatagaatctcattttttactaccagctcctaacgtttttctcacaatatgcatacctattagcaggagattggatttttatttataggtccacataaagcttcaaggaaataaccagcattagtacctcctcatcttgaatgaggcttatagtaaacacgtaagtttacattagatattagttgtatcatactatgt

SEQ ID NO: 172110 - DNA, 763 bp, Homo Sapiens
ccattccaatgctgttttttggggagtggtttccaggagctgcctggtgtctgctgtaaatgtttgtctactgcacaagcctcggcctgcccctgagccaggctcggtaccgatgcgtgggctgggctaggtccctctgtccatctgggcctttgtatgagctgcattgcccttgctcaccctgaccaagcacacgcctcagaggggccctcagcctctcctgaagccctcttgtggcaagaactgtggaccatgccagtcccgtctggtttccatcccaccactccaaggactgagactgacctcctctggtgacactggcctagggcctgacactctcctaagaggttctctccaagcccccaaatagctccaggcgccctcggccgcccatcatggttaattctgtccaacaaacacacacgggtagattgctggcctgttgtaggtggtagggacacagatgaccgacctggtcactcctcctgccaacattcagtctggtatgtgaggcgtgcgtgaagcaagaactcctggagctacagggacagggagccatcattcctgcctgggaatcctggaagacttcctgcaggagtcagcgttcaatcttgaccttgaagatgggaaggatgttctttttacgtaccaattcttttgtcttttgatattaaaaagaagtacatgttcattgtagagaatttggaaactgtagaagagaatcaagaagaaaaataaaaatcagctgttgtaatcacctagc

SEQ ID NO: 172111 - DNA, 394 bp, Homo Sapiens
aaatcagctatgatccaatgattatcgaatttcgtagtctcggtatcccctggactgttacatgagtattgattcatgagatgagtgtccactggccctggctaaagaaggtctaactccgaaggctccctgctcagcgaccatcttccttctgggccttttatctacacaaaaccactggttacaggaatgagaaattggcagcttggctccaggagggtgggaattcagcatgtctgcaacctgatatatgggaaaagctagaacaggaagacgagagggttagggcaagccatggtgttgcctgtaggttttcactacatttttcctctaaccaaccaagctttgtcagaagccttgaagagtcaaatccatcaatactcatgtcaaccag

SEQ ID NO: 172112 - DNA, 221 bp, Homo Sapiens
cctgacggctgaatgtttgcttccaagatggtgccttcttgcttgtgttctcacatagacaaaagggcaaaaagctccccaaccctcttttattgggggcactaatcccacttataagcgccagaaccctcatgccctaatcacctcctaagggccccacctctaaaaactgtcatattgagcattagattccaacataagaatttaagtgggggatacta

SEQ ID NO: 172113 - DNA, 428 bp, Homo Sapiens
ctggtgtacatgaatttgactatcatgttggacatggccgaaagggaaggggtcgtagacatctacaactgcgtcagggagctgcggtcacggagggtgaacatggtgcaaacagaggagcagtatgtgtttatccacgatgcgatcctggaagcctgtctttgtggggacacctctgtgcctgcttcccaagttaggtctctgtattatgacatgaacaaactggatccacagacaaactcaagccagattaaagaggaattccggacgctaaacatggtgacaccaacgctgcgagtagaggactgcagcatcgcactgttgccccggaaccatgagaaaaaccggtgcatggacatcctgcccccagaccgctgcctgcccttcctcatcaccatcgatgggagagcagcaactacatcaatact

SEQ ID NO: 172114 - DNA, 372 bp, Homo Sapiens
  misc_feature (142)..(276): n is a, c, g, or t
gcatggaaatgttattgagaagacactttgatgctgcatgagaagggagagaactgtaacaacgttcatgaactactgagggagaatgggatttactagtctagttcgagcatgtgtaagtacaataacaagagggaattannnnnnnnnnnnnnnnnnnnnnnnnnnnnnnnnnnnnnnnnnnnnnnnnnnnnnnnnnnnnnnnnnnnnnnnnnnnnnnnnnnnnnnnnnnnnnnnnnnnnnnnnnnnnnnnnnnnnnnnnnnnnnnnnnnnnnnacataagataagtacacacataagtcagatcatgtgtctatttccctaaaccctctaatggcttcccaacttggaccataaatatataaaaatcct

SEQ ID NO: 172115 - DNA, 425 bp, Homo Sapiens
gggagtcttggggccaaggctgtagttggtgctcagtgggtctccaggaggggcactgtacaggatttcacttgctgatgtgttcacttccatggcctgcatttccatgatggacatgagatcttgccactgctgttccaaatcaaatggtgactctgtcccggtcagaagaggagacaggaggttgttttgaagagcagggggctcactctcgctaggcactgcttctgttatgctggaaatgtctgctggaaactgtgcagggaagctctccccagtctctccatccactagcaggttccgtgccagagcttccgcgccctcgcctgcccaggtgtcctgctcgcctccatctcgcagctccttctccacatcctgctccttctggcggtgactatagtcaaaaacctcacgccagcccccag

SEQ ID NO: 172116 - DNA, 239 bp, Homo Sapiens
ctgattggtggtattcgggcaggaggctgaagaatcaggcttgggggagttgggaacgagcagataggatttagcagcaaaaatgatttcatggttttattcaattgcagtctctagatggaaaccatttttttcttctgaacttgtgtcctgctattcaagattcaaagtcacaggagagagaatccaactgtctgaatctaggttctgctattgacacatggttgccctggaacaga

SEQ ID NO: 172117 - DNA, 151 bp, Homo Sapiens
  misc_feature (125)..(125): n is a, c, g, or t
ctatggattggtggtattcggccaatcacaggacatctctgtaatgagtccattccaagtctaccagtgagaaagtaggcggtaggaatgatgctggagaggcaccaccaatttgactgctaccnctttgcccttcattaactctaatcct

SEQ ID NO: 172118 - DNA, 262 bp, Homo Sapiens
  misc_feature (147)..(147): n is a, c, g, or t
tctccactgtaggccgattaacactcagcgcggtaacaaagaccaggtgggctaacccgaaatgaaatgagaagcctgtggtgatgaggaggcagagaagtaaaatcaagtttgagcatttcgtttaggagagtttgggctcccatntacttgcacatgcaaacgaacctggaaacaaacagatcagatgtctaccacttctaaaagggaattgcattgccaaagaagtcatgaaagcagactctatactgattaggcatta

SEQ ID NO: 172119 - DNA, 278 bp, Homo Sapiens
ttcgagctcgggtacccctcctatctatgcatatcagtccatgcatcaatgtttaattcttaaaggattcccctaggtgtgcagagttatctatgagattatgtataattaagtcctaattttagcacttgctggccatgagaatttgtgtaaattatttaatcttcacaacggctgataagattagcattaatgttttatttaaaagataagagaactcaaactcacgattctttctaaaacgatttatatgaaaatctttaacagtcttttatgta

SEQ ID NO: 172120 - DNA, 413 bp, Homo Sapiens
  misc_feature (300)..(319): n is a, c, g, or t
  misc_feature (347)..(347): n is a, c, g, or t
  misc_feature (349)..(349): n is a, c, g, or t
  misc_feature (380)..(380): n is a, c, g, or t
cttgatgatatttccactggaggcagcctcttcatggtaaagaaagctgccagaaggctctggccgggaactggtctttagaaacagacagagtaccctgaagacacagctggcattgccaggaaagtagtccactgatgggaaagcagcccaccaatgctgctctgagagcatgcctgagggtgtaggtggaactaccagtggaagtcatttcctggagttgcttggaagctgctaggtggagaatgtgagcagatagtgggtaggacactgtctgaggattactggaatcccatgacnnnnnnnnnnnnnnnnnnnnggaggattgaaacttggaagagaggcancncttctgagggttttgcttggtactgtaactncagaactctctattcacaaagcctagaactata

SEQ ID NO: 172121 - DNA, 124 bp, Homo Sapiens
  misc_feature (67)..(67): n is a, c, g, or t
acacaaagatagagtgaattggtaacactgacacagaatgatacgtacacacagattatggtgtcantcacagtgttaccgtgtagaccaaagtttctcagctttggaactattaacattttgg

SEQ ID NO: 172122 - DNA, 195 bp, Homo Sapiens
  misc_feature (162)..(162): n is a, c, g, or t
tgacttcactatatttcaaaggtataaggcaacaactctggcaataaaagcagaacttagaaagcctgacttatttcaagagttctctgatacgagaagagatatccaatagatgtgttccctaattacacaagtataagaagatgcattggggggatcctntagagtccgaaatgcaggcggccatccaatggg

SEQ ID NO: 172123 - DNA, 273 bp, Homo Sapiens
aggacttcttagacgatattcatggaggcaacataacagtttacttagatgtcttcattagaaactctcaagagtctttcaagaatgacaactagtttggcctctactaagtgctggacaggagtgagccaaatcttgcattaagcgaacaataaggatcttttccttgttgttgaaagaagctggcacatggaaacccatccttacacggatgtcagcccagcctagcccctacttatacagcctccagaggagatatgcctccagtggaga

SEQ ID NO: 172124 - DNA, 239 bp, Homo Sapiens
cttgatgatatcttctctggaggcctggtgaacagaaggctgtcataataatatggaaagaatgatagcttggccttaggccttgtcagtagggatcaagaaaaaggagtaactgaaagacattatagtgatagagtgaataagttaagtgaccgattatatgaggtgaatcatgaggaggagttaaaggtgttggcagggaatataggaggagaaaaaaggttgagagggctttgtga

SEQ ID NO: 172125 - DNA, 281 bp, Homo Sapiens
tgctttctaaaacaaacttctatcttctatgcaaatggaaattaatagacatttataaacatgagaataatctaatcacacttaggaagattatctgatggcagaataaacagactggcggatgcaaagacttgggttaaggagtgatcagaggaaactactaggcattgctggaggagaaagacaagagtctaagctagataataatggagagggtgagttcttgagtcgttgtcttcttcacggaaaacccaaatttcatctattgattagaattcacg

SEQ ID NO: 172126 - DNA, 518 bp, Homo Sapiens
  misc_feature (487)..(487): n is a, c, g, or t
gccatcacctgcaaacagctcctgtggctttgtttcactttgtattataaaataataaaagactcccaagaagttgcaaaaacagtacagagagatcctgtgtaccctacctcctccatcccccaagggcacatcagagtaactaaggacatgagcaaaaccaggacactaacccaggcacacagctatgacctggactgcaggccttcagcacgctgcatcatcttctacacacaccaacattcttacatgtcatgtgtagatacacacaaactgtgaagctttatcacacacacagacacatctccccaccactgtactcgagacgcggaactgttccgtccacacgcaggcactcattccgccagcttcctgtttaactgcacgcatcaccatgtgggcccacgagtgcacaaacagaatgtgagcacgagatcggggaccgtgtctttcttattcaaaggatccctggcaccaggtctggccnacagcaagcactcaataaacacctaatgaat

SEQ ID NO: 172127 - DNA, 326 bp, Homo Sapiens
  misc_feature (21)..(21): n is a, c, g, or t
aagacagactccagagctaanatggctataaggatatctctacccactgctaatttagcaacgtgccaattttcagacttgctgtatgacgtgttagttgaaacaataactattaatttaagaaggaaaatttcctttcactgttgagaaaattaagtggtgatctttcaaacattataagatggaaaggatgtaatggaacaaaactcccaatggcctttgaaagtctaaattggaaaatgcattctcaatgtaattttaattaaagcaattgaatttaagcagttgagataaacaagaaattggaagccttaaaccttaattta

SEQ ID NO: 172128 - DNA, 192 bp, Homo Sapiens
ccaggcacccaggacaaccctagacactcacaggcctcacgagactatctcccaatgacctgtacctatacagggatggctcccacagcatccctcagtgaccccaaacccatctccacttacactcagacactcccagggcctgacagctactccccattatctgtccttcagctcgaagacactgaccca

SEQ ID NO: 172129 - DNA, 442 bp, Homo Sapiens
tccatccaaccgtctctcaacgccattctcatccctcctcacttgaggtccccagcgggcactaccaccctcaccccgtcctcacaagctttaactgagactccgaccagctcagactggcagtcgaccgatgccacacctaccctcactaactcctcctgagggccccaccaagcacccttccacttccatctgggagccccaagaggggctgggaaaggggggccatagcccatcaagctcctgccctggctgggcccctagactagagggcagaggtaaatgagtccctgtccccacctccagtccctccctcaccagcctcacccctgtggtgggctttttaagaggattttaactggttgtggggagggaagagaaggacagggtgttggggggatgaggacctcctaccccttgggccccttcccttcccccaaaa

SEQ ID NO: 172130 - DNA, 335 bp, Homo Sapiens
  misc_feature (24)..(24): n is a, c, g, or t
  misc_feature (176)..(176): n is a, c, g, or t
cccaagacctccacctcctcccanaccccctcccctcctgtgtcccttgtaaatagaaccagcccagcccgtctcctcttcccttccctggcccccgggtgtaaatagattgttataatttttttcttaaagaaaacgtcgattcgcaccgtccaacctggccccgcccctcctanagctgtaactcccctcctgtcctctgcccccaaggtctactccctcctcaccccaccctggagggccaggggagtggagagagctcctgatgtcttagtttccacagtaaggtttgcctgtgtacagacctccgttcaaaaaattattggcatgaaaaa

SEQ ID NO: 172131 - DNA, 828 bp, Homo Sapiens
  misc_feature (37)..(37): n is a, c, g, or t
  misc_feature (744)..(744): n is a, c, g, or t
tgttgcgttcgaagaggcgcagcatccacagggaagnaggcgcctccttccctggggttcctgagtggaacatggcgacttgcgccgaaatcctgcggagcgagttccccgaaattgacggacaagtcttcgactacgtgaccggcgtcttgcacagcggcagcgcggacttcgagtctgtggatgacctggtggaagctgtaggggaactattgcaagaggtgtccggggacagcaaggatgacgcgggcatcagggccgtgtgccagcgcatgtacaacactctgcgtctggctgagccacaaagccagggaaatagccaggtgctactggacgcccctatccagttgtcaaagataacggagaactacgactgtggaaccaaacttccaggactgctaaagagggaacagtcctcgacagtgaatgcaaagaagttagagaaggccgaggctcgacttaaggcaaagcagaagaagcgctcagagaaggacacgctcaagaccagcaaccctctagtcttagaagaggcatcagccagccaggcaggcagcagaaaggagagtcggttggaatcatctggcaagaacaaatcctatgatgtgcgaattgagaactttgatgtgtcttttggcgatagagtactgctggctggagcggatgtgaacctggcatggggccgccgttaccggctggtggggccggaatgggttggggaagacaaccgttactgaagatgctggncaccccggagtcttgcgggttccagcccacattttccttgcttgcacgttgagcaagaaggtgcttggaagatgacacttcctg

SEQ ID NO: 172132 - DNA, 427 bp, Homo Sapiens
gaacgatccgctttatcagcagttctaaagccttattacctgagatttatattctggggggaaaaatcaagattggattatcaatacgtatttcacaggagatttgagttttggccctgacagaagaacacgtactaacctgaaaaaggctacgtgagattaaagagagaaacagctaaacaccaaatcctggtgagagagacgtcgatttaaaaggccagccactcactgtagcgtgacaactccctctggggtagccaggagcagagcgtgacccactggcatggagcgtgggccacgagggccacctccccaggagcccacagcagccagggaggcttgggagagctttcctcagccgagtcacttctcatcatcccgccatagtaatcgtctgtaggcctgagctatgagatcgcatctccgg

SEQ ID NO: 172133 - DNA, 677 bp, Homo Sapiens
ggggcgcagcattttgggaaagagtggaattctgggtgttaggcccgccattcgcttgactcacgccttcgccgtagcatctttcgcagcggaccgaagagaagaaaagtaggccagagccgaactctcttcctgccaagatgtctattggtgtgccgattaaagtactgcatgaggccgagggccacattgtgacatgtgagacgaacaccggtgaggtatatcgggggaagctcattgaagcagaggacaacatgaactgccagatgtccaacatcacagtcacatacagagatggccgagtggcacagctggagcaggtatacatccgtggcagcaaaatccgctttctgattttgcctgacatgctgaagaacgcacccatgttaaagagcatgaaaaataaaaaccaaggctcaggggctggccgaggaaaagctgctattctcaaggcccaagtggccgcaagaggaagaggacgtggaatgggacgtggaaacatctttcaaaagcgaagataattttctaagttgaacagaactttgtccttttttctttcaggttatctgagttcattggagtgggtgcttgtgcatatatgctaggtatcttttgccatctttctctttagatcaggggaaatgtttaagctaaataaatctggggggtttttgttc

SEQ ID NO: 172134 - DNA, 567 bp, Homo Sapiens
tttaacttgaacagggaaagtttaatatagagaattactggctttaacagtgaactggaataatgagggcttcactggtaaaatgcttctgaattgactggaaatccatttggggtgctggggaacgttattcccagagaggtgcctcagtggaggcgctgtgtctcctacgcaacttctgagggctggagggtgccaagggcagctgctgaccgcctggtgcttcaggagctgggtgctggggaagccacatgcactgcggcgtccagaggcagaagcacaaccaacaagaaccacgaaggaggcgcctttcctcctataatgcctgtttggtgccctctactgacaaagcttatcccctttcaaaaaacagccaactgaaaaagctgaatttggaacataaagtcaataaatccataaccagcaatactatggggcctggggtgcgctggcctttagtgagtggaatggggccaaaggatgatgcatgtcctgcagtgggcacagcggccctgcacgggggagaaccaaccctgtaaagtgtcagtagtagcccctgtgcagtca

SEQ ID NO: 172135 - DNA, 1113 bp, Homo Sapiens
tggcttttcctccttccctgggcgccgccatggccgacgtggaagacggagaggaaacctgcgccctggcctctcactccgggagctcaggctccaagtcgggaggcgacaagatgttctccctcaagaagtggaacgcggtggccatgtggagctgggacgtggagtgcgatacgtgcgccatctgcagggtccaggtgatggatgcctgtcttagatgtcaagctgaaaacaaacaagaggactgtgttgtggtctggggagaatgtaatcattccttccacaactgctgcatgtccctgtgggtgaaacagaacaatcgctgccctctctgccagcaggactgggtggtccaaagaatcggcaaatgagagtggttagaaggcttcttagcgcagttgttcagagccctggtggatcttgtaatccagtgccctacaaaggctagaacactacaggggatgaattcttcaaataggagccgatggatctgtggtcctttgggactcatcaaagccttggtttagcattttgtcagttttatcttcagaaattctctgcgattaagaagataatttattaaaggtggtccttcctacctctgtggtgtgtgtcgcgcacacagcttagaagtgctataaaaaaggaaagagctccaaattgaatcacctttataatttacccatttctatacaacaggcagtggaagcagtttcagagaactttttgcatgcttatggttgatcagttaaaaaagaatgttacagtaacaaataaagtgcagtttaaaacccaactcttactcttaatttgttcctaatacgtatttttggcagggagagggaacggaccatgaaatctttatgtgatataaggattttaagtttgggccagtgaacagggtaaataaaatttaacttttgagcatatggaattttggatgccctttaaaggtactaattctggaaccttggattccttcaagaaaaaacctagaaatctggaactcccccttccctgggttcaaatccattggaaggggggaaaagggggcccggaaaggtatttttttcttaaaatctccgggggccccccaaggggattttaaaaaaa

SEQ ID NO: 172136 - DNA, 395 bp, Homo Sapiens
cggcccggcttgaggacccgcaccctagtcgcgggccggacggaggtgggtccacgggaggccccacccccggaagtgcccagcccagccccatctcttgactccccagtgaaccctgcggcttcgtaggcgacctacctggagctggccagtgctgtgaaggagcagtatccgggcatcgagatcgagtcgcgcctcgggggcacaggtgcctttgagatagagataaatggacagctggtgttctccaagctggagaatgggggcttaccctatgagaaaaatgtgagtatttacagcgttgggaggacctcttggtcaccctaccccaacagtgcatcatcctgtcattccactcctctagctcattgaggccatccgaagagccagtaatg

SEQ ID NO: 172137 - DNA, 834 bp, Homo Sapiens
  misc_feature (774)..(776): n is a, c, g, or t
gggacacccggaagcaggggcccgagcggagccggccgcgatgagcggggagccggggcagacgtccgtagcgccccctcccgaggaggtcgagccgggcagtggggtccgcatcgtggtggagtactgtgaaccctgcggcttcgaggcgacctacctggagctggccagtgctgtgaaggagcagtatccgggcatcgagatcgagtcgcgcctcgggggcacaggtgcctttgagatagagataaatggacagctggtgttctccaagctggagaatgggggctttccctatgagaaagatctcattgaggccatccgaagagccagtaatggagaaaccctagaaaagatcaccaacagccgtcctccctgcgtcatcctgtgactgcacaggactctgggttcctgctctgttctggggtccaaaccttggtctccctttggtcctgctgggagctccccctgcctctttcccctacttagctccttagcaaagagaccctggcctccactttgccctttgggtacaaagaaggaatagaagattccgtggccttgggggcaggagagagacactctccatgaacacttctccagccacctcatacccccttcccagggtaagtgcccacgaaagcccagtccactcttcgcctcggtaatacctgtctgatgccacagattttatttattctcccctaaccaagggcaatgtcagctattggcaataaaggggcgctaccagggaaaaaaccacacaacacaaacccnnncccttgtgggcccgcctcgggcctccagaagcttttctagacctttctttgggcgcgc

SEQ ID NO: 172138 - DNA, 489 bp, Homo Sapiens
tggtaatctccaataaaataaaaaatatatttatcctgttgcccaacgattctaatcctgagaagaagaagaaaaaaataccagttcataacaacatatatatgagaatattttctactgacataatttatagtagccaagaactagaaataaagtaatgcccacctatagaagaataaatacattatggtttaataccagatattgcccagccacttaaaaagattgaactgagttaaactagatgatttgaagaaattttaatgaaacattgttgcattaaaaggaaaaaaatctgtaaaatgatagacaagcatttgtttatgtatatgtaggtctacataggattgtataaacagaaaatacagtgtatgcacactagataattacctggggaagtagggactggctgtgagagaagagacaggaaaattgtctataataaaaacagcatgtgtgttatgttcttatttctataaaattaaaaaa

SEQ ID NO: 172139 - DNA, 445 bp, Homo Sapiens
gggatttagattcaacaaataccatatgtccttatcattttttgtaagaagaaattggttaagtcctaactttcaatgtgtacccaaatacttgtatttatgcttttgataaaatgtattttcagcactaatacacatccgattatgccttatttatatatgaagaataaagttaccatgttatactgttatgtcctaaaattcaaatcactatttgagaaaccctcaaattggtgctttcattatataatgatacatttagacaaaaccccaaactaagccatttgaaacaagattctctccattgcagtttgtagcaatgttatttctgtgtatgtcatgagaaggctaaatatcagtgttaatttcttggttgaatccgtgaaatcatgcctgtaaagcccaaacatttgtaacaaactccctaataaatttagagaaagtc

SEQ ID NO: 172140 - DNA, 200 bp, Homo Sapiens
  misc_feature (178)..(178): n is a, c, g, or t
catacctgccgccagccccttgtgcccacagcacctgctcctcctctctcagccctcttcttacttgattgtgatgcattgtgttactgccatccagactgcccatttcgagttcccgtgtgcagcctgcctggacggaggccttagcctctgcctgagtcccggttgcatgggaagncctctgggtctcagtttggatg

SEQ ID NO: 172141 - DNA, 411 bp, Homo Sapiens
  misc_feature (16)..(16): n is a, c, g, or t
  misc_feature (23)..(23): n is a, c, g, or t
gttcttcaatttaaancggttcnttcttcaagactcattacattgctgtccaattaggttagctttatctacatgtaacagttaggtgatatagttagatatattaatatacatgcttttccagttacctttaatgaacttaacctgttactatatcttcttgcacccagttaccagctcttccttaaagtgggacattgacaggtagttgattttaaatgttacatttgtatttatccttgtttcaccctcattgtaatcttaaacttgaggtttcagagaaaccttaatatcaaccattaaacacatttaggagatgcggcctaatgaataatgagatttagaggcagatgggattgtgggttaatgtcaagtgaaggtctggaacaacaaatgtggacattaagaacc

SEQ ID NO: 172142 - DNA, 948 bp, Homo Sapiens
  misc_feature (845)..(864): n is a, c, g, or t
cctttacaaccctaaccaggaggtttctcggttcctttggaccctgagcattcagacaaaagtgctgcacctcccctgggcaatattgagtccctttgaagaatcttgcaaatatcttgatctgaagactgccatggtaaacctcgtgccctgactacggtgttatcatcaataaggttccatcttgctgcaagttccacttcaaaacttgtaattcactctctctggatctgaaaacctgtgattataaggctctgaaatcattgctaaaattatattccccatatcttcaacttgagaggctccatatcgagagactgaactactcttctcaaaatttaaatactctgtcattgtggcaacgtccagtttgtcaatatcaggtgaaccagggcaacatttcttgaattcttttcgaagatcaaaaaaggaatagaagcattcaggtaatagtacattcttcttggaagcctcaggatgcaggatttgcctgacatgaagctgcccatcagtacagagacagaaggaagtccctactccaatattcagttcattgctcactgactggttaaactgtcggagggcttggtccagctgcgacgccgaggacaggctttcgacgtctattttagtttcttctttgcagtcctccgtcagttccaactgatccggtctaactagcacttcgtgcaactgtcccaccttcttgttggccagatccacgactttccagaacagcaggatcaactccttctcatccgagcctagcttggccccggtggccccagcagtgatcccaaaaagcaccaccaagtaatccggagaggccgtcatgacgataggtnnnnnnnnnnnnnnnnnnnntcgggaggcggtaaggtggtgtggaagtgagaacgaaaaaacctgtgctaaaccctcttctaagagaaaaagaaagagcgccca

SEQ ID NO: 172143 - DNA, 1249 bp, Homo Sapiens
catggaaaacacagatatgtgcccaggtgtcaccttaacccttaaaggggcccgcgccgcgcccaaaccgaaatgggtttaaaaaaactcttttcaaagggccgcaaggccggcccacacaggcccttttattgtgggtttctcgcttttttaccggtgggaaagtgccaataagctgggtgttgcgttggtggattagaagggaagttccaatggccaaaaataaaaattgcaaggtcccaattctgggttttagaagctagaaaaggaaaaaaatgttattatcagttaaatgactgtgggggaagaattcttttacacaacagtgagggtggagttcttttggaaacaactgtattctatgtttatacatatttatatataaaaggtgtcctcattgggggaggggggtgctgatgccaccaagttcctttgaagccttttctcccccactgccaatgcccgaggggaaggagtcttcaatggcggctcaatctagctcttgcgtttagacttggatctcattccaatttaggcttttctttctcttcttccatacttttctgtgtatcccagatatagttgttcagaacttctcccagcaggtacaggaagttcattaagatggttgtagacccaaagaagatgattctggctcctgggccaatgtgttccaggaaagggtacacccacatgccagttacatgatgcacccagcacacccataatatatagccaacagagaaggtacatatggcggtaagtccgctgctcctgctgggatactgatggtgcgatgtcctcatctcgattaatataaagggctagaaccgtcgtgtgcattccgtgattcagccaccctgggataaaattatccagcagcttcgggtatatcatctctctgtcataggcataaatgatccagaacactgctacaacaaaaaccccaacaggaaaggccaacacagctaacatccagtcccggagagagatgagcttcttgagctgcctctcttgctcctggttcccacttcctcgagtcagaagactggaaagatcagtcagcacacagatgccaaaaaagacagcctggataaccagatcaatgaacgtcaggaatttccagctccctccgtaggtctggtgtgagggcatttcgatggccttgtagttacacaggatagagcagtaagacagcaggattgccatccgcagcacctggcaggggacaagcgccatgttcgccccc

SEQ ID NO: 172144 - DNA, 294 bp, Homo Sapiens
atgcatagggtgagatagtcggtacattctaacagtgagatacacaagatcctgagaatagatgataatctgagttaaaactgagaaagcctaaaccaggaaacaatgcgagcactggtctttggtgcccactggaaaaacaattgggtgctttaagacatgccgcctgatggtgtgtttccatgtttttcctttgctcagtgacctctggatggtgataaaggctctgccaatgaagcacagctggcaactgcctttgggtgtgcttgtgctggccaggcttgcacccttatg

SEQ ID NO: 172145 - DNA, 228 bp, Homo Sapiens
cgcagtcttcatcccatcaggatgtaaaaatgtcttcccacaagtcaaggcagcctcttcagctccatgtggcacatgtgaaaagcaatttggagctgttaccatggccgcgattgttagcacttcatctacacagtcaaattcacaggacgctaagatagacttcgagagttgtggatcaagaggaaactctgacatgatgattccaaattcagaaagatttccatc

SEQ ID NO: 172146 - DNA, 998 bp, Homo Sapiens
cgcctctttgccaccggtctgctctcttatgactgagcgacgctcgcgcagtgccccatgtctcttgtccattctatgggccttcatcctgcacagtcacaggagcaggctccagatctcacccgtttcttttttgccgtacccaagaggctgctttgaggctcgggcttgcagcctggtagaccaagtaggtgggaaccccatctccggcccggccctggtacagcacccgcagccccaccctctccgatgtccttgctgttcagctgaatgtgtcggggctctttctcgctgaaacaaggggccccccgtccgcatgatgagctccgtgcccaccctcaggaaggcctcctccacgttgctcgagtcccttggcagacgtctcaatggcacacaggatgtcatagtgctcagccaggctctgtgcctcagccaaggagacctcccgaagctcgctgaggtctgacttgttcccgatcagcagctgcacaatgttggagcccgcatacttcctcacatcctcaatccagtgaggcaccgacaggaaggagctcctcttggtgatgtcgtaggcaaggatggcccctattggcactgcggtagtagctctgggtgatggtgcggaaccgctcctggccggccgtgtcccagatctgcagcttgacccgcttgcctggatctccagcgtcttcatggtgaagtcgacgccgatggtgcttccctggcgctccgagaaggcgccggtcttgaagcgctgcaccacgcacgtcttgcccacgcttgcgtcgcccaccagcaccagcttgaacaggaaatcgtactgctcgtccgggtcccccgggcctgggcccggccctcccatggcctagaagaagccgaaggccggcgctctggacgctggaccggcctgagctcacgacgcgtgggtcgacgatatcccgaaattccggaccgggtacagcctgctttataacgagcgtttctatattcactatgct

SEQ ID NO: 172147 - DNA, 557 bp, Homo Sapiens
cttggtcgcctagactggatagtgggggtggccggaaggcaacgcaccatccctctcccccaggccccaggacctgcagggccaatggcctggtgagactgtccataggaggtgggggaactggactccggcataagccacttccccacaaacccccaccagcaaggggctggggccagggagcagagcttccacaagacatttcgaagtcatcattcctctcttagggggccctgcctggtagcaagagggaatgtcagcaggaccccatcgccatccctgtgtctctacacgctgtattgtgtatcaccgggggcattattttcattgtaatgttcatttcccacccctgctccagcctcgatttggttttattttgagcccccattccaccaccccagtttcctggggcacaagtgtctgtgcatgtcccccaggagccaccgtggggagccgatggggaggggatggagaaacaagacagggcttctctcatgcccagtggccggtcagccacaccagggcaccgcagccaataaaccgaaagtgttacagcc

SEQ ID NO: 172148 - DNA, 678 bp, Homo Sapiens
ggcctccgctgcgagaccgcagcccttctctggagtctcagagccgcaagacaccacgactcccagaggaccttgcgtcgggcaagaaagactacaccttccagaggcctctgcggcgccgcgacaggaagcggcgggcgagccgagtgtccttgcgcgtggatccgagcgaccatggtggcccgggtgtggtcgctgatgaggttcctcatcaagggaagtgtggctgggggcgccgtctacctggtgtacgaccaggagctgctggggcccagcgacaagagccaggcagccctacagaaggctggggaggtggtcccccccgccatgtaccagttcagccagtacgtgtgtcagcagacaggcctgcagataccccagctcccagcccctccaaagatttactttcccatccgtgactcctggaatgcaggcatcatgacggtgatgtcagctctgtcggtggccccctccaaggcccgcgagtactccaaggagggctgggagtatgtgaaggcgcgcaccaagtagcgagtcagcaggggccgcctgccccggccagaacgggcagggctgccactgacctgaagactccggactgggaccccactccgagggcagctcccggccttgccggcccaataaaggacttcagaagtgaaaagaaacaccacacag

SEQ ID NO: 172149 - DNA, 1105 bp, Homo Sapiens
agacacttccatgaacagttcctgcctgacaaatgcagtgcacctcaataatgtcagtgttgtttctccagtcaatgtgcatatcaatacacggacttcagcaccatcgccaacagccttaaaacttgccacagttgctgccagtatggacagagtgccaaaggttactcccagcagtgccatcagcagcatagcaagagagaaccacgaaccagaaagattgggcttaaatggaatagcagagacaacagtagctatggaagtgacataacctaaaacacgtggctctgacctgtgctgatggtgtgcagtcattcatattccagctgaatgcaaaaggcaacactctgtggatcacagagtgtaacaatggacctaaatggactatagtatattggatgttaaatccatatatgatgtatattttgtaaaattgggaaaatcactaccttgtaaaatagtttatttgtatcatcaatattatttctgttacttgaatagtagatattcatcatcatgcttttgcacttgaatttgcaactgaatggattttaaaaaataattctttaatgggatcatgagcatgaaatgggatcctgcatcacttgttttaactatttattttgccatgtttacattttgtatcttgtaaaaataaatccaactttgtgtctaaaaagttaaagattcatagctaggaaatgaaattcttgtaatttttttctaaaggaactgtaaagttttcacttggttcattttgtttcacaatttgactagatggactttttggtaaatactttagtggcatttcactgtcaaatatgaagttcaaggcaaaatagtattttctattactgtgcaggggaaagggatggatcgatacatgcaaatttaatgtagtaactcacttttccatatattttgaatgtatatttctatttatgataccaatttataaaaaataattacacagaaaaaatggaataggaaaaattatgcatctagcacatttaaactgtgcaaatatgaaaatttttcgaggattacattttatctgaaggctgcatatttaactggctttaaaactggtaacacatcacaatac

SEQ ID NO: 172150 - DNA, 484 bp, Homo Sapiens
cgaccgttgagcagtatgtgaaggactttctaaactgtgctttcaaggttttgaacaggaaaatgatgtagactttctgttttttgtaagtttggaggatggcttgtgtcttaaaagaatatgtaacataaccatctaatttgtgagtagtggactaaggaaacaccactctaacctttttctctctgcgataatcccatcttcagcctctcaagcactgtgaaaaatcactttctcttgttgtattcttggagcccctgctaattcattattgaaaaatacctgctgcctgcatttggccttatgttgtcatttacttggtacttcctaagcgtggctactccaatgaagctttagtatatgtactgaaagaagatcctctcatactgccacagccaagagataaggttgtaaatctttattgggagaagccgtcaaggacagttctgtgaaatgaaaggatctctgatcaccacataactgc

SEQ ID NO: 172151 - DNA, 485 bp, Homo Sapiens
cccctatctgagcagtatgtggtgctagactttgcatccttgtctgttgacctgcatacatgtgagagctatttctttaagaactatataggctgtgaaaacgcactttctttcccccaaagagctgggaatttatgaagttatggcaatgaactgcagcatgctgggacaattatttgactactttttttgtaatattgtcaaatgtctctatggattctgacagagatttctttttgttttgttattcttttggttgtcagtttcattttaacgagtgtaactagtaacattttattctttggattttgtataattacagtacatgattgtgtattgtgacatgaatgctgtcaaaatgacattgatggcattgtgaagcctgttactttgtgtcacttcctgataaataagaggtgatgacatggatatacaacagaaaacactttgagttgaaagtaaacacaatactggctcagacaggt

SEQ ID NO: 172152 - DNA, 984 bp, Homo Sapiens
aggagcgaggcctgggtgggtgggtgtgaaaggagcggtggccacagaggcgggcggagagatggccttcagcggttcccaggctccctacctgagtccagctgtccccttttctgggactattcaaggaggtctccaggacggacttcagatcactgtcaatgggaccgttctcagctccagtggaaccaggtttgctgtgaactttcagactggcttcagtggaaatgacattgccttccacttcaaccctcggtttgaagatggagggtacgtggtgtgcaacacgaggcagaacggaagctgggggcccgaggagaggaagacacacatgcctttccagaaggggatgccctttgacctctgcttcctggtgcagagctcagatttcaaggtgatggtgaacgggatcctcttcgtgcagtacttccaccgcgtgcccttccaccgtgtggacaccatctccgtcaatggctctgtgcagctgccctacatcagcttccagcctcccggcgtgtggcctgccaacccggctcccattacccagacagtcatccacacagtgcagagcgcccctggacagatgttctctactcccgccatcccacctatgatgtacccccaccccgcctatccgatgcctttcatcaccaccattctgggagggctgtacccatccaagtccatcctcctgtcaggcactgtcctgcccagtgctcagaggttccacattcacctgtgctctgggaaacacatcgccttccacctgaaacccccgttttgatgagaatgctgtggttccgcaacaccccagatcgaaaacttcctggggggtctgaagaagcgaagtctgcccccaaaaatgccccttcgtccgtgggccaaaactttcccagtgggggattctggggtgaaagctcactggcctcaaggtggcgcccgggatgggccagcacctggttttgattaactacccatggcctg

SEQ ID NO: 172153 - DNA, 365 bp, Homo Sapiens
agctagaggatcccattcactcaagctgcgctgtctcactaacttctctgcaaccttggagttttcagagggaacaccctcatcatcctgtgaccagactagacaaacctgcctgtatctgctcccgtttactcctcttcccttctgttgtcccacttctatctttagccacatgcatctctcctttttatggataatcagtaaaatgagtaagattctctccagaagcctcatctttaaacaaaacacaccacactgaccttaccttcctagtaactaccacctctgccaggtctcccagctctctcacctgtccttctacattgttttctacttgctcccccatctgatctgttctccatata

SEQ ID NO: 172154 - DNA, 414 bp, Homo Sapiens
ttgtgggatcgtcaagttgagtcagggcttaaaaatggagcttgatgagatttgctctaaatatgttgactaacaccactttaacccctacacatcacatgcaaattgattatgtcaccttcactccttttaaagacccaaagatgcacctagattaataacatgctctatgtccttaataaagagcaggctaattaaaaattgtatgctggctgaaaatgaataaatgaagcagtcatcatattcaaaatcaggcaacttcagcctgcagaaggagccaaataaaagctcagtggggaatgcaaaggcaatcattttgagccttttccacccaagcatgcaaacatatgcatgacacgttgtcatccacagtgcataaggtcctggggtcaagcaaggctcttgcacaggacg

SEQ ID NO: 172155 - DNA, 339 bp, Homo Sapiens
gagattctcttcaacagggccaaagtactgaagcaaacttatgaatgggctcacttggaatccagcaggggggaaatcaggtgtccaccgtccccatcatctctcagcaatatgcaggcagtaggcactgacattgtcattgagcttcggctcccgtccttcgcttgtatatctgccagcagatgagcccgatcaggtcctgcacactggcgctggccattgtcaccacggtcattggcagcagtctgtcctggctcgagtgcagagggaggtagacatcgatcttcttggttgctgttgtacctacatgacccttgccatcaaatttggaatactcgt

SEQ ID NO: 172156 - DNA, 164 bp, Homo Sapiens
tgagccagtatgtgctgtagccatatggaactcctttcagttctctgaccatgccctttcctgcctcagatttcagcttaaattttgcctcctcagagagatgccttcccaaactccccaactgaagctggcctctgccttttactccctatcatgtcacaata

SEQ ID NO: 172157 - DNA, 571 bp, Homo Sapiens
  misc_feature (31)..(31): n is a, c, g, or t
  misc_feature (33)..(33): n is a, c, g, or t
agccagccagcgtcaccctcttccccaattngnaggtgtatttaatgctctaaaggcttcatcttctccctgtaactgagatttctaccacacctttgaacaatgttctttcccttcgggtaatctaaagactgtcctgaaagaaagacataagtgttgtgattagtagaagctttctagtagaccatatttcttctggattgtaataaaattgttagtagctccttttactttgttcctgtctctggaaagccatttttgaattgctaattactttggctttaatcagtggtcacctagaaaaagctttgtaatcataacacaatgagtaattcttgataaaagttcagatacaaaaggagcactgtaaaactggtaggagctatggtttaagagcattggaagtagttacaactcaaggattttggtagaaaggtatgagtttggtcgaaaaattaaaatagtggcaaaataagatttagttgtgttttctcagagccgccacaagactgaacaaaatgttttctgtttgggcatcctgaggaagttgtattagctgttaatgctctgt

SEQ ID NO: 172158 - DNA, 768 bp, Homo Sapiens
  misc_feature (16)..(16): n is a, c, g, or t
  misc_feature (48)..(48): n is a, c, g, or t
  misc_feature (188)..(189): n is a, c, g, or t
tactaattggcccaanccttccaaattttatattcatactaataaaancagtgaaagtttggaggattagtgtttattgtgtatgtttaaaatgtaagctaaagaaaaccttcacaaatggttaagtgtgtttaaaaggtgaatttgtcaaaaatttgtctgcatatatcagttgtttgcaaaaaaanngatcctgtagggatttttcctcattgagttagtaactaagtaagaagtaatccagtctgaataagtgaaaataacaagagcatcaccatctacctaacagaacagacttaaaaattccattaagtgttcatttccagtgagtttgctaaacaaagatccagttggcaagtttttaggatctttagactgtctgatccacactcctgagcttcaggcacagaccccctcaaagcattgtagtgtttgcagcttcaaaaacctaacaaagttataaaagaaatcaaataacagaaaaagttatccctcctcttcccagtggccattataaatagacaaaaaggcacataaatatgggaaggtgcaagaaataggaacaaagctaaaggaagaggtttaggctttcattcctatcccacctaaggaactgggcttccaaattacttttgtcccagtaattaatcttgtgaaaaaacatctttataaaatgtctaccattgtccttataggaagtgatcagctttgtaaaactgtagctcattaaccaagattgacacaatcccatctactttttaaaaaggc

SEQ ID NO: 172159 - DNA, 1429 bp, Homo Sapiens
  misc_feature (38)..(38): n is a, c, g, or t
  misc_feature (684)..(687): n is a, c, g, or t
  misc_feature (697)..(708): n is a, c, g, or t
  misc_feature (793)..(855): n is a, c, g, or t
  misc_feature (898)..(916): n is a, c, g, or t
  misc_feature (947)..(962): n is a, c, g, or t
  misc_feature (1204)..(1214): n is a, c, g, or t
tgggggtcagagcgaagaagaggcatcatcacctcatngcccatcaccgctgccccccttcccggacctgggcgctacccttctcctatgggcgtgccctgcaagcctctgcactcattgcctggcgagggcaacggaccaatgctggggctgccactgaggagttcatcaagcgggctgaggtgaatgggcttgcagcccagggcaagtatgaaggcagtggagaagatggtggagcagcagcacagtcactctacattgccaaccatgcctactgagtatccactccataccacagcccttggcccagccatctgcacccacttttgcttgtagtcatggccagggccaaatagctatgcagagcagagatgccttcacctggcaccaacttgtcttcctttctctcttcccttcccctctctcattgctgcacctgggaccataggatgggaggatagggagcccctcatgactgagggcagaagaaattgctagaagtcagaacaggatggctgggtctccccctacctcttccagctcccacaattttcccatgatgaggtagcttctccctgggctctccttcttgcctgccctgtctcctgggatcagagggtagtacagaagccctgactcatgccttgagtacataccatacagcaaataaatggtagcaaaacnnnngagaagaacnnnnnnnnnnnngcgaacagacggagacagaacgccgcgacagaagaagcaacgaggacgacagccccgccaaccgagccacaagagtaaggaccgnnnnnnnnnnnnnnnnnnnnnnnnnnnnnnnnnnnnnnnnnnnnnnnnnnnnnnnnnnnnnnngctcacccccaccacaccgtcgactgaaccccctttggaccgnnnnnnnnnnnnnnnnnnntaaatagtttttctccaacccactgttcgtnnnnnnnnnnnnnnnnccccccaggacagggtaacgaccgggcgccgactttacgttttctcaaggaaagacgcccaccggccctcacaacaggggtggtggaccccgaccccacaataaaacaccccccgggcggggcagaacattgggttccagacaacaatcaccgggagaggggtgtactgcggacctattttgcggtcacaccaacttaagcgtcgcgtgccccggggcccgcccaccctcataatatatcannnnnnnnnnngccaagcacttagtgccaggaaggtggggggggaaagactgggaacactaccgtctcccccggaagaggcgtcctcccatcaagaggacgcaaagcgggcgtctcgacgcgccctccgcgcgggtatctcaccgtgcatcagtccccctcatgacaatatataagtgtccccgcgggcgagaagagacacggcgagtcagaaataattcgtcccc

SEQ ID NO: 172160 - DNA, 419 bp, Homo Sapiens
agacccaatatgtgctgctatacagaatacacagagtcgggtcatcgaataaagaacagaaatgtaattctcacagattccagaggctggtaaatccaagatcaaggcacgggcaggttggtgtctggtgagcatctggtctcttctgccaagatgacacctagaatgctgcatcctctggagaagaagaacacgtgtcctcacatggcagaaggcaggagggcaaaaaggagccaaactccccacctctcaatactgttgcattggggattaagtctccaacacatgaatttgggggaaacattcagaccatagcatcaggcatggccaagttaagtaacttgccacctactgccaagcaacccaaactcaaaggtctgcgacctgcaagttcagatgaggaaactgtctcaagcttc

SEQ ID NO: 172161 - DNA, 301 bp, Homo Sapiens
acgctggccacctgttgagctagtattgtgcgcagggtcaggacagcatctcacatgtgagggccgctcagcacaaagtatcacagcccaaaggtgtgaaaacagtatccattatagggatcgtgttgggggtcaaaagtaggatgttggggtccaagcagggtgagaaagaggtccctatggtaaagcaagcagggaggctcagcacagagtactagagttgaaacatggtgagaaaggtgtccttgtggagaagctgtgtgtgtcatgtcagagcctgagaggaaggaaaaagctgtga

SEQ ID NO: 172162 - DNA, 560 bp, Homo Sapiens
ggtatggcaatacatccacttacaaataagtctcattcaagtcacaataaacctgatactacaagaaagcagagtttgaggaacaacaagaattttaatagcatctgacttagagaaagtcatttaatttatttggaaaaaaagtacatggaattcaagtgaggaggcagttgggcggaatttcagttattagaagtgaatagaaaagcttaatgttgtaacttagggccatttccttatgagaattgactataatactgtgaggaaaggggaagggagatttaacatttattcctaggatattaactatcttcacctctacttctgaattgaaccagtgtcatataaggagactggtgaagagagatcataacatttctcctaagctatgtccttattgtggcttttttgtaatgcatactgtcttagtgtatattttagggcaaccttcttgtctactaagtgacagaggtagaccagttgacctcctaactaaaggtcctttagcatctattaacatgctattgagaagcactgcctgggacagatgctaaatagac

SEQ ID NO: 172163 - DNA, 406 bp, Homo Sapiens
ggtttggggctcagagtcgagggacggggtgtagcctcggcatttgcttgagtttctccactcttggctctgactgatccctgcttgtgcaggccagtggaggctcttgggcttggagaacacgtgtgtctctgtgtatgtgtctgtgtgtctgcgtccgtgtctgtcagactgtctgcctgtcctggggtggctaggagctgggtctgaccgttgtatggtttgacctgatatactccattctcccctgcgcctcctcctctgtgttctctccatgtccccctcccaactccccatgcccagttcttacccatcatgcaccctgttacagttgccacgttacttgcctttttttaaaaatataatttgacaggaaaccagggtgccttcaggagggctcttttga

SEQ ID NO: 172164 - DNA, 1273 bp, Homo Sapiens
  misc_feature (971)..(1015): n is a, c, g, or t
caagcttgaaggacccggggagcaggagaccaagttggacctcattagcaaaggagaggagccaagagcaggcaaagaggaatctggagtttcagtctccaactctcagcccaccaatgaaagccactctatcaaagccatcctgaaaaatatctcagtcctggctttctctgtctgcttcatcttcactatcaccattgggatgtttccagccgtgactgttgaggtcaagtccagcatcgcaggcagcagcacctgggaacgttacttcattcctgtgtcctgtttcttgactttcaatatctttgactggttgggccggagcctcacagctgtattcatgtggcctgggaaggacagccgctggctgccaagcctggtgctggcccggctggtgtttgtgccactgctgctgctgtgcaacattaagccccgccgctacctgactgtggtcttcgagcacgatgcctggttcatcttcttcatggctgcctttgccttctccaacggctacctcgccagcctctgcatgtgcttcgggcccaagaaagtgaagccagctgaggcagagaccgcaggagccatcatggccttcttcctgtgtctgggtctggcactgggggctgttttctccttcctgttccgggcaattgtgtgacaaaggatggacagaaggactgcctgcctccctccctgtctgcctcctgccccttccttctgccagggtgatcctgagtggtctggcggttttttcttctaactgacttctgctttccacggcgtgtgctgggcccggatctccaggccctggggagggagcctctggacggacagtggggacattgtgggtttggggctcagagtcgagggacggggtgtagcctcggcatttgcttgagtttctccactcttggctctgactgatccctgcttgtgcaggccagtggaggctcttgggcttggagaacacnnnnnnnnnnnnnnnnnnnnnnnnnnnnnnnnnnnnnnnnnnnnnagactgtctgcctgtcctggggtggctaggagctgggtctgaccgttgtatggtttgacctgatatactccattctcccctgcgcctcctcctctgtgttctctccatgtccccctcccaactccccatgcccagttcttacccatcatgcaccctgtacagttgccacgttactgccttttttaaaaatatatttgacagaaaccaggtgccttcagaggctctctgatttaaataaacctttcttgtttttttcta

SEQ ID NO: 172165 - DNA, 209 bp, Homo Sapiens
acctgtctgagccagtattgtgtgaggagtcccactgttgctcatcttctcaatccctggctgttctgagtttgatgtctgctcacctgatgactgtgaaggatgactgtgaaggaccatcccaccaggatcgtaacatacggcttcctgggcatgccgcagttgagcagcatctcttcatgcacaatactgctcaacaggtggccagc

SEQ ID NO: 172166 - DNA, 616 bp, Homo Sapiens
tgatgccattcagagacatggtgagtagggcactgggccagccaccaggcaagggtagaaggaaaaataggaaatgaggttgaagaggctggctgggaccaacaggtgcctgataaaggaccctgggggtgagtaggtacaagtcaaattcccctttccaaggccacacaccccggcatgaggctgcatcagccaggggagacagtgcatctagccctggagaccagaaggaggaagacctctaaggctgggcttaggagacagaatttagttcaggagataatggggagcctgctgagagtttagaaacaggggaggaacatgggggattgagttagacttaaggaagaattaatttctgagccagacactgtaagaggtgacgctgggctacatcaaaattaactgggaaactctttctgatgaactggtgtctgtacaacaggaagagatggaagactagaaaacaggaattgctcagaaaggaattgagctctttggatgggacacaagaactccgatggaatgcaggaggaaggattgagcaagagagaaggagagtggctgccaacctgtccagtggagaaaaggacctgacacacatactgactcaatt

SEQ ID NO: 172167 - DNA, 548 bp, Homo Sapiens
agatctgaatcaatattgtgggctcgctcctactcaagtgtggctgcagatcttggcttggcactcccaggctgcagccctggggtgagctaaggctttatgttctctcccagcttggaggcagcaggggaagggaccttggcagtggctatggcagagggcctttcccttgtctctggggtccaccccagtagaaatagcagaactgctgccagtcggtgtgattggctttgagtaggacagctgcgttgtgggctcaagctggggggatcctgggggagacagactgacctcttcttagggccgtggcagcttgctggaggtgtggttaaagcactctgggtctttgctcctttcctagtacaagggtagcaagggcagtaccactgcagtggcagtggcagaggggctttcggttgcctctgggagctccactgcagaaacacagatccgttgctactgggatgttcagccagggggtggggcagctgtgctgctggcctgagccgggagccccaccgggtgaaaggtggggtgccgagggctca

SEQ ID NO: 172168 - DNA, 479 bp, Homo Sapiens
gacagacagcccagagcagtaatgtgacagacagctgtgtagtacaaactagtaatgacacacagggcttaaataagtctgacaacatagatggaaaggcatctcttcagattggtgagaaaacgccagtcacagccagtgtattgtctgaggaggaacaaactcattgcttggagataggaagtaacacacgtcatggcaagagtaatttatctgaaggcaaaaagtccgctgaactcaaattaagaagatgctatgctcaaaagatagcctgggactaaaagaggaactgacagatgaagacagagaaaaggttgcagtgcaggaggggattaactcaggaacagccatgtcaagaggattgtatcaaccagcaacaatctttatgggccgccaaatgtcagccatcttaagcatgagagatttcagtacagagcacaaatctccccagcccacaaagaacttttcaattcctgacc

SEQ ID NO: 172169 - DNA, 824 bp, Homo Sapiens
ccacggagcgctgcttcgtcttctgagggccgggcacggtcacacggccacccgccccgcgcaccccacgccctgttcacgctcacccagtcacctccccacatcgcacactggggccccgggttcagcctggcctgcccgtgccctggtgaatcacctggctgagcagttcccctggagccccttcgggagcagggctgtgtcccagatgggccacggctgagccttcagagtacgtcctgcctggcacttactggtccttaccagagacgcccagccccatacctgtcctcatgacccctcgtccaccccacacacacactataaggctgagggctgccagcagccccgtctgcccaccattcccggccgtggaccatagtcgggatgtcagcagacacacatgggcagcccaaagctgcaggtgccagggcccaccccaagaccatcgacatgtcaaccccaatcccgactcagggccaggcccagggctcaccgactgacgctgcatgaggacattgacaccagaaaagcctcttgggggcactgctcccgtaccccagggcctgcgccagcgcgggagccatgactcacactcatggcctacgactggcgcagacggggcgccagacccaagaacgcccccgcaacacaccatcacgcgcacttcccctaccaggcccaatacaaccacgtgagcgccggccaaggagaaacccccgacactagcaagcgtgcgaaaccaccaggcgacgcctacgggacgacacgcagcccacggaccgcacgcccacaccccctacctgacacgaacctccaccacc

SEQ ID NO: 172170 - DNA, 530 bp, Homo Sapiens
ttctttacagctttaaaattgcgaactgatttaacacatctgtgttggtattctttccatggcttgacatggctgggtactaaaattgtaattcataaagcatatgaaactttgacctataatggctgacattcaaaaagtaatctcagatgacattcagagtaatctctgttaagggtgagactattcactagaatttcaaaaacaatataattgttacctaaaaaattacctattgtcactttacttccggtaaatatctttcattaaaatttcagttactgccacttgacaattggcaaatatttgatatgtcacactatctaaaacatggctaggactcaatatatttttattttaggtatgtataagagttaattgccaatggaaaaaaaggttgcttgcacttagctaggatttttttaagactttgttagcagattcctccaaaggtatcaaagaattgtcatgtttccagttattaaaattctactctcactttcaaaattccgataggaccattagaactg

SEQ ID NO: 172171 - DNA, 628 bp, Homo Sapiens
caaccaagtgagttctacaggggctttcccagccctgctcaccttggcacccagattcccaggtgtggctgccctgcgcggcctgaagcacagctcagtggcctccccctcaaacatgccattcagcccttctggtcttccctcagtctgtctcccagcttctgtctccctgtctgtcccccagctcctgtctacctgtcccctccgtgaattctggggtttcccagacttctgtccttggtgacaactctaactccatgtcccgcccagatttcagaccaaccctcccccaagctactgacccatgtagccacttggtttctagcaatgtgggcatggacatcccactgacaccttgaattaacacaaaggaacagagtggtccccttctggctggcaggccctgtagcccctactctgggaagctggaaacttcgatcccctgtagccactccccacccccatcccgtctgctggcctccggctcctctccaccccgtcttcttccggagatggaatgtgggagacattcctaggacatgaaaggatcaagacactaactttactacatcaatttcagaaagagaatgaggcaatgaaatatccatcatgatatgagatattctcc

SEQ ID NO: 172172 - DNA, 401 bp, Homo Sapiens
  misc_feature (341)..(341): n is a, c, g, or t
  misc_feature (345)..(345): n is a, c, g, or t
  misc_feature (377)..(377): n is a, c, g, or t
cagatgcaccaagtagttctggtccgcatggaatcaacaaggatgaagctgagcgctgtatcagcatcgccctcaaggccatccagagcaaccagcccgaccgggcgctccgcttcctggagaaggcacagcggctgtatccgacgccgcgagttcgcgccctgattgagtccctcaaccagaaaccacagactgccggtgaccaacccccacccacagacacaacccatgccacccacaggaaagcaggtgggaccgatgccccctcggccaacggtgaagctggaggagagagcaccaaaggctacactgcagaacaggttgcagctgtgaaaagggtnaagnaatgtaaagattactatgagatcctgggggtnagcagaggggccttcggatgagga

SEQ ID NO: 172173 - DNA, 249 bp, Homo Sapiens
gtgcctgcgccccctcccagttaagtgcgcacagaccaggcccagtgtgaggatgacattttatcttctgcgggaacctttcaagatgagtcttatagaggaaactgttccaacatgaaatttcagctcagaattgaccttctcaaaagagcacatccactggccaaaagctatttctctcgcgtaatctgaatttatgacagaaccatagttatctcatcaagacagactgacttgttgggaccgacc

SEQ ID NO: 172174 - DNA, 271 bp, Homo Sapiens
ttgtccctgcgagcacattatcagctgcaccacaaaatcatttttcatactctagaggaaatgttccttttttctacaacctttttttccctctgactccacaatgcttttcaatttattgccccttcctagagccctttaggaccccaccttcctttatagatatgctggatgctaaaagacctcagaaagagaagctgagcagaataacccaaatagagaaagcaaaccttattcagagcatatctgtaacttatgtactgccagcctg

SEQ ID NO: 172175 - DNA, 637 bp, Homo Sapiens
cgcatgtggagtatgtatccatttacagtatatatccacttacggtttatttccataaaacacgttctcgtaatgcttacaaagtgatggctaagttatggatgattctactcatctttttcaaagtgccccttatttttaaaatggtttatttgcttcatttttattaggtcttcgccaactatagttagtaacaaaagagtcagtacgagaaaatttatcccaccagccttcacaaatgtcagtacaaaatttgaactactcagcctaggagcaccattgaagttcactagtgagtagattcaggtacacaagttaaacaaggatcaagctacagctctaattcaaatagctcaaatgatggcatccacatgaaagcatagaagaagtgaaggaactgcaaactcataccttccctatcacaatcatacatggtgtgtttgtagcaggaaagagttacttgctggcagtggtgattttgttctttgtacagctgtttgaaaagagtgaagctcccaccattggaaatgcaaggccgtggaaacttctgatttcttcttctactaatgtggctgttgtcagagtacttcttgggtttatcagtggtggatttgaaaactttatcagagtccgaagc

SEQ ID NO: 172176 - DNA, 302 bp, Homo Sapiens
atgatactgctgaggtttgcactatgatgaaatggccttataacgatgctcgcagaatgcatgcccctctgttaagcaatgcatgactgtatatgtgcctcctactccttcagctagcattatgctactatttggcattaaagctcacctttgcttcataaactgctgacattgtatgtgagaagataactttaaaagtatatacgtgtcattcagtatgctatattctctgtattctggcatggactgtgtctgtgtatgtgacctgtctaacgctctttatactctacatattgccacca

SEQ ID NO: 172177 - DNA, 454 bp, Homo Sapiens
tctcaccatcatgcccgacctatcctgtcaggctacccatacatcgttacctctcacctggattagtgcaccagctgcctctcctcttccactttggctgcctacattttatttctctccatgcagccagggggagctttataaagcccaagccacggttgcatctttgctctgctaaaaccctgccttgactttccacagcacttaaaaatagaatccacacccccaccatggcctgccaggcccctgatgacctcatctcctacaaatcttgccctcttgctctgttctgccctctctgccattcctccatcacaccaagtttattcccaaatcacggcctttacatctgctattccctatgcctggaacaccagttcccccaaatttcacatggagactaacccatctgatgtaatcagccaacctatgccctcatggctctctctcaaag

SEQ ID NO: 172178 - DNA, 230 bp, Homo Sapiens
ttgcattatatagttcttcatagaggagacgccacttggttactttcttcagttaattctgctgttgtattctcttatttcagcggttcttccttcttcatcttccagctgttttctaaagtcttcctcctgttgcttgagttggttctgcaaatcagttatcttttgaagaaaagaaactgtgatttctttaatttctgtttcctgctattgaaacttctaaaactagg

SEQ ID NO: 172179 - DNA, 994 bp, Homo Sapiens
tcaaataaggacgcaaatcttcaggacagtaagcagaacaatcagaatggaattaaaggtgtaaaaacgtgttacagtggaatctggtgcttgtcacggtgtttggtaagaactgtatatagtcagagttacctaaatcacctagaggtaccgtttacatggttttgtgtatatagagttggcttgcattttaggggccattttgtataaaaagtgcatatgattaaaattagactcagtcatcactgtgagatgcctttgctaagaggataaaggaactgagaccagatgagaaaaagaaaggatatagattccttgagtggaatagtgggctagattaatataccgaaatatttccattgtttcccttttttgcagagcatgtggaagttaaacctgcttgattctactatacatcttgggcaactaggtaccaaatgaattgtgccaccataactgattttaattttgcattatttatgattttaaaatatttgttgcccaggtgttatgaaagaataaagcttttaagtatagactaccttagcatgaagatgctcatgcctaagaatgaaaattgttgaggttatctcccattcaatcatgtagcaagaacttaaagaaattcactactgcagtttttatttttaaaaaacagtaattgagatattgaagacattacaatttagtttgtgtggtctttttttaaattgctgtatcgttcagtctcttgtggcaatagcactttgaagaaaatagagaatttaatatatggtgattgggatatgtagcattcaaaaaaagtgaattgccaagatactggtgtcatgtaaattcccactttacataaaaacccatcaggacagaatgatgctcaatattttaaaattctaaaaatagggtgggatttttcattgtctctactttataattatcaaaacttattttgtattgctactaccttaaattgaaataaaatgtttatacttacgga

SEQ ID NO: 172180 - DNA, 346 bp, Homo Sapiens
gcagcgtccagcccatggtagctgctcagtaagtggccccagatgctcttgtgtttctgtcttttaggacaaggtcagggagcttcagaaccagggcagagatgtgggcctggaggtgttggataatgccctgctagctctgcaaggtgagagggctgggctggggttggagccaacctttgccttcctggcttcattgactgcttagcacagaggccataccaagaagaatgtgtccaaggtgtgatatttgtgcgccataattttaagttttgtatcgtgccctcctcctacctaccacaaggctccatgggctagggacaagggcatctgtttatcctctaga

SEQ ID NO: 172181 - DNA, 501 bp, Homo Sapiens
gtcagttctaggatatcatagtgggaagtattgcttagaatgccagtacttgtttgctgtggaaggtttctaggaatggattgcttagtctaaagtaagcactaccaccatccacgttttcactcaacacagtgccttttaattggtgactaacatcgaaacaccttgaccaaccgttaaaacagtatcagaaaccatgtgtacatccctgtgcctcttagattgctaagttctgctctcattcttacttcaaaggacactttttaaagaattgttaatgcttttttataatacaagtcatagccctgttggcaaaaagaaaaaagattcagtgagaaagaaaaatcactgataattccatcatccagggagaaccactgttatttaagtatatggccttccagacttttctgtgcatttatagatatttttaatgggatcaaagtgtacatactgttttgtaactttttttcactcaacaataccatgactgtcttgctg

SEQ ID NO: 172182 - DNA, 514 bp, Homo Sapiens
ctagtccaggaagagctctgcatggaactgagcagaccccaggtcctcttagccaatccccgggcctggtgaagcaggcgaagcagatggtcggaggccagcaactacctgcacttgccgccaagagtgggcaatctttgtaggtctctcgggaaggccccagcctccctccccactgaagaaaaggagttggtaaccacagagcaaagtccctgggccctgggaaaagcctcatcacgggcagggctctggcccatagtggctggacagacactggcacagtcttgctggtctgctgggagcacacagacattggcacagacttgctggtctcttggaagagggcaagaccccaaaccagagcaaaatacacttccagctcttaaccaggctccttccagtcacaagtgtgcagaatcagaacagaagtagtaccaatcaatgtcacatgaacgaacaagctgcccccagggtaccatttggggaggggaaatcttttctttctttccccctt

SEQ ID NO: 172183 - DNA, 1157 bp, Homo Sapiens
tttagcattttgtacacaaatgtttatttctcaattaaacattccctttaaacacaaggaatgagttctaaatcttcataaagatgaattaaaaatgaaatccctccagtatagtgtatataatcactgtgttcttggtcactactggcatttactgtttaacatcaaaaacaaagacaggttatttaaaaatcatgctactggatttctagctcttcctctatgaccagttctacactgatctgcaatgtttaaaagtttacatcaccaaatcaaagcaagtttaaggtgtgaagtagctgtgcattaaacacaaaataaacaataaaattataagatatagtcacagttcataacgaatataggtgttcttatcatcgttgtagattcttgggtaatgtgctatgagagcgtcctgggaaccaatgtagatggagttgtaaattttccaatatacatctctgactttccgggctgggtgaaacagaccctgtaaacaatattgcaacattctacatggtccaatagcaactctcaggccctctagggctcccataactgcctgaattacatgaggagatgtctcaaacacattgggccatacatagttcaacaagtgattcagcgaatcttcacaaccaaatccataaaccccaagtgacatgtgctgtaccactgcactagccgtctgtctgtgtacaaggtctctatccattaaagcatcttcaagtaacggtgttacggcataaatgtagtcttttcccatgtcaccaatatattcaaacaagaaggaaagcgattttaacactccattttgaacattcagttcaggaactctgtattcattcattaaggcagggagtactgtaaagggtgaacatgtttctgcaacaatagctattgctacagtggtacaaactctgttctgcctttcttgtactttgaggttgttcagaagtgtagccaatacatcatgagggccaatggcctttgcaatataaccaaatgtgttgactgtggctctacgaatagccctttttgtgggcttttaagagctctaaaagctcaaagcaaatcctcatccactctcttgcagatacatattcagctcccctgtcagcaatacgaccaacaagatcaatacaattctcttgtcc

SEQ ID NO: 172184 - DNA, 1809 bp, Homo Sapiens
  misc_feature (1778)..(1778): n is a, c, g, or t
ctccatcacttcatatctcccatgtcttgggtatcaaaaagggctacttcgggcctaattgaaagccgtcttcattaaaggccccataaccactggaaggtattgctgaaatccttttccaaggagtttgcacattctggcccatgctgagatcatgtaagagatctgaggatcatcatcttccatatcattgatagtctgtctgggtctttaacataaagctgcatcacatctgatgcatcctgcatgaatttttccgtcacaacagccagaccaatgaggctaatgcattcaatagtttttcctctcagaagtctcagttctttttgaaccgcattctcaacgatgtgcttcagtgatggcataaataaatcatagtaggggacaaatttttcttctgcagtatcggcaactgatgcaatggatgtcacaacttgttccaaaactaacttggtgcctttctgaatcagctcttgaagcttcagtaccataatggaatgcagatgtttcaccaaattatccaagtatggaataagtagtgacttgggacagtcttcagtaaagttaatgagggcagcagctgcatgggcctgcacacgttgattgccttggtcttccatggtctgcagcagagctgcaatcaccttctcatgaaatttcttttggaaaccaggtgcaaaatctgtagccatctgtcccacggcattacaggctgcataccttactcttggatgaggatcctggagaaaaagtaaaacaaaatttacgatctcatttagaattccttccatttgctggtggcacccttcaccaatggcagataaggccatcaatcctgcatgccggtatttccagtcaggattttgaagcatttgcataatgtgttccttgatcatcggcagaacgagctttccaccaagtccgcaagccattcgatctagagcactctcgcctgcaactgcattgctgtcaaaatcatcatcttctagttcatctgcatttgcccagtcctcatcttcttccaaatcaaccatcattgctaacatctgaggaatagtctgtgcaacaatattggtatgttttcttaacatagcagctgcagtctcagagagggtgacgatcacttcaagggcaagctggcgttgcatattgttgaggctagtgtctccacacaactttagacttagctgtagagttgcttccaagtgaggacgcaaatactttggaacagtatctgcaatctcaacgagggattttaggacagaatcatcattctggtagcacgagtcatttaccgcctgtaggaatcccggtagcaagtctgcaaaatgtttgaacagagcaacattatgctcatttgcaagtataaatgcagctgtagctctagcagataacgtcctgatcgacgggtgttcctgatcttgcatacactgaactaacattcgtttgatgacatctaaatagtgttgttgctggttcccaaaaattccaggaaagttccagaaaatgtgaagggcagcttcccgcagtcccacattttgagagctgactgaatcaaaaaggaacttcaaaccttcgggccactggttattgccatcctcatctattaaattcctggccagttctgccgcaatatcacaaacttttttcctcatgctagattgtgtttccatcggaataatcatgagtagctcactcttgatggcagtctgaacatcagagggaagtgctggatagacttcatcaaatgcagaggacaagagacgtcttagagacgncgggatcagaaatgagacgggatcctctaga

SEQ ID NO: 172185 - DNA, 776 bp, Homo Sapiens
tctcagctccttggctgcccaccacagctgcgcctctgcctctttaatgacgttgagccctgcctgtgttcccgacaagtcttccttattttcaaactccatgcggatgggatcatacggtggcaaccccatggggtaaacaatcatcaccgcgcctcgaagctggtccaaggcatctttcaccatctccatggtaacacagacaccggcttccacttgtttcttagatattattgctttggcttcttctatagtcttctttaacacttgcttcatcttctcatttggagcttgcccattccttcgtccaatatcatcctttttaaacactgcacctccgctgggtacgcatttttcaccccattcatccttcaatttcaattcttcaatctgatcatcggtcagtccttgcatattaggagggagaaatatgccatgttcggctaattcttccatttctgagcagaggcgctgcaccttgagccgcccattatagacccgggccacctgcaccgtgagctcctccagctcggtactcccaggcgcctgcagcaggaactggctctcgtcgccccgcttcacgtgcagcagaaccatggcggtcccgccgaggtactgaggcgttgagaaggccccggctgcgtggcccgcgggtcctgccggccgagggtcgccggatcgccagcagctgcgacgcactaacaaccgctcacagtccggaatcccacgctccctagcccgcggtgagcgggggaaacggcactcgctcccggccc

SEQ ID NO: 172186 - DNA, 419 bp, Homo Sapiens
atccgcgtcatgggtataggctgcaggcagctcgaggacgcggccgcccggctcggcctggcagatagcagaggcagcaggccgtgccgggggggcatgttgcttgtaaccagtggcccagtggatgttactggtggacagtgcacctggagggcgggccccgcagggtgaaccatgctgcagtggctgtcgggcatcgggtatactccttcgggggttactgctctggtgaagactatgagacactgcgtcagatagatgtgcacattgtcaatgcagtgtccttgcgttggacaaagctgcccccggtgaagtctgccatccgtgggcaagctcctgtggtaccctacatgcgctatggacactcaaccgtcctcatcgacgacacagtcctcctttgggacggccggtggtcccga

SEQ ID NO: 172187 - DNA, 874 bp, Homo Sapiens
  misc_feature (42)..(42): n is a, c, g, or t
  misc_feature (51)..(51): n is a, c, g, or t
aaaattccaagccaaagccttaagttcttggtgtcaaaagantcgaaatgnggttgccagtaattctcaattgttggaaatggaatggcccaaaaagcggttgggacggcccccaaaagccatacatgtgactttcccagcattgtggctaagtggaagtccctccagagtgcaggacatgcccttaggacagataagagtccatgtcatggtgctggaatctagcttgtgaatgtcattggaaaaacagtccgcctgctgctcgtagcccccaaaaatgtacatgatcttgcctaggacacaggctgaatgtccatcccgggccccaggaactgtccctgacactcggggtgtgaaccacttgtgcgtattgacgtcaaaggcatagagcacattgcaggccccttcggtgtcattccgcccgccccaaaggaggactgtgtcgtcgatgaggacggttgagtgtccatagcgcatgtagggtaccacaggagcttgcccacggatggcagacttcaccgggggcagctttgtccaacgcaaggacactgcattgaaaatgtgcacatctatctgacgcagtgtctcatagtcttcaccagagcagtaacccccgaaggagtatacccgatgcccgacagccactgcagcatggttcacccctgcggggcccgccctccaggtgcactgtccaccgtaacatcccctgggccactggttacagcaacatgcccccccggcacggcctgctgcctctgctatctgccaggccgagccggggcggggccgcgggtcctcgagctgcctgcagcctagaacccgttgcgcgccaaccgacgccttagtccccaacgagataaacacagccaagctc

SEQ ID NO: 172188 - DNA, 272 bp, Homo Sapiens
agcgtctcccgtcagattcgggtcttcccagatggacgtcttcgggaagatgacaggggtgccgtgtcctttcgccactcttgaggcacatcatactgttccctgtgccgttttctctgggataggctgaataagatgattaggatgatcaatgcgagcagcagcaccgccatcacagcccccacgatcccatacacgaggctcggggcgatgttgaattcacaggtctctccccagtaccagtgtgtgttcgtatttgggcacaggcagcg

SEQ ID NO: 172189 - DNA, 365 bp, Homo Sapiens
  misc_feature (186)..(309): n is a, c, g, or t
ccaggaccagtcttaaaatgctgcacgtaagtaattaaatttccttgtgaactgggaagtttcatcagacttttatcataactattgtttccatcatccacagttactgttttgaattcctctctaagaatatttgtaattggcaatagtccaaattttcttttgttttctttcctgtttttgagnnnnnnnnnnnnnnnnnnnnnnnnnnnnnnnnnnnnnnnnnnnnnnnnnnnnnnnnnnnnnnnnnnnnnnnnnnnnnnnnnnnnnnnnnnnnnnnnnnnnnnnnnnnnnnnnnnnnnnnnnnnntgcgattacatgcgtgaagcattacatccaagtgaaacttcttaagactggtcctg

SEQ ID NO: 172190 - DNA, 558 bp, Homo Sapiens
tcgaattctgtcagtcacatgatgattatgtttttgtctaacattctttccatgcacttgttattttattaatttgcctgaatgatgagaccagaccagtgtctacagattttcattgtcagaaaaatctataagtctgccctttttacaatgatgatttaaaaaaaacaacagcgtaaatattagcccacaagagcagtcctaaacaatcacaattacactgtactacccaagaagactgtttattgtgaagcatttacctttcaaaaaatcattacatttctatttcttggtggagcagcacattgtggagtgtgattcttaattcttcattgagtttgtcaataggacattgatgctggataggttgtctttggtttttatgtctcagaccatcttgtgagatggttggcctatctcataatacagttttatgcagaaaggttgaaactatgtaaatggtttttatggaaattatcagttacaatattttaaaggtgtagaatggcatctttgtttataggagaacatttgtaaataaagttaaatttctaagtc

SEQ ID NO: 172191 - DNA, 1020 bp, Homo Sapiens
  misc_feature (635)..(635): n is a, c, g, or t
ggggctggagtttgaagagcgggcagtggctgcacacgccaaactttccctatggcttcggtgaccagggccgtgtttggagagctgccctcgggaggagggacagtggagaagttccagctgcagtcagacctcttgagagtggacatcatctcctggggctgcacgatcacagccctagaggtcaaagacaggcaggggagagcctcggacgtggtgcttggcttcgccgagttggaaggatacctccaaaagcagccatactttggagcagttattgggagggtggccaaccgaatcgccaaaggaaccttcaaggtggatgggaaggagtatcacctggccattaacaaggaacccaacagtctgcatggaggagtcagagggtttgataaagtgctctggacccctcgggtgctgtcaaatggcgtccagttctcgcgcatcagtccagatgggtgaagaaggctaccccggagagttaaaagtctgggtggcatacaccctggatggcggagagctcatagtcaactacagagcacaagccagtcaggccacaccagtcagcctgaccaaccattcttacttcaacctggcaggccaggcttccccaaatataaatgaccatgaagtcnccatagaagcggatacttatttgcctgtggatgaaaccctgattcctacaggagaagttgccccagtgcaaggcactgcattcgacctgagaaagccagtggagcttggaaaacacctgcaggacttccatctcaatggttttgaccacaatttctgtctgaagggatctaaagaaaagcatttttgtgcaagggtgcatcatgctgcaagcgggcgggtactagaagtatacaccacccagcccggggtccagttttacacgggcaacttcctgcaccgcacattaaagggcaagaatggagctgtctatcccaagcactccggtttctgcctggagactcagaactcacttggttggtggatcctactagagtcggccacacc

SEQ ID NO: 172192 - DNA, 970 bp, Homo Sapiens
gtcacacgggggactcaggttgttggacgacactgtgtgaccttcacatcactggacttaggtttagtgagggctgattctgaagctgagggtctgcagaagggagtgtggacgactttggattaaccacagctgtggggccgacgagaagctgggctattgatccaaggccaggcaagctgaaattcacaggtcctgtgtttggcagagcaccaagagtagaagaaaccgggcccggcattgcaggagaatagagaacaggaaaagggcccagaggtggagatggtaagaccatgcaagggacactgaaagacggcagctgacctgaggacgggcccacagtagggggggtttgactgccagataaaagtacattgaaaccatttaatcctgcaggagactgcacacaaagatattgtagcaaagaaggctctttggtgccttcattttcttttgaaggcttttcaacatctgtatttcttgaaggatttccccactcagaagaaacaagagagtttgctgttgcctttcctgaaatctcttctgcagcagggagttggccattcacatgaatgtctttgaggggtatagatgccctgttacacatagtcttgggaaaggcaaggtctgtggaatctgagggtttcttgggcatgacaagcgacagcgggccgtcttcatattccctactttgccttttagtggctggctcatcctcctcctgaggtttcctctcctcacagaggcgcttctgagctgagggtgcagatgacagctctactgtggctggggcttctgagcttctgtcatccctctctgaccctgaccctgacgctgctccctcctgcagacttccaaccggcatgaacaatgagccagagggcacatacaatagaggtagccctgcatggtattgctggcttcagctctccacagcagagactgcagaagcaagtgacctatgatgcct

SEQ ID NO: 172193 - DNA, 870 bp, Homo Sapiens
acatggtagtcgtggtacaccccggaaatctctatgactctcagcaagacattgcaagaagccttagatgactgagcagtgagctgatgtggcaaagaaatgtggtcctgccagcaggatcagcacacatggcagggtgaaatttgggatgatgaaaggaaaggcaggacttgacacctcagctagtctgtatactcagccactattgaaagaaggacggtgatgtcatctggctttccacctctcacattcaatccattgtcacatgcaaactgtgcaaaaggtgacatataatttgggtcataggccagctcatgagcttgctcagcaatgcttctggcagtctgttgtatactctcataatttgaattctttaacttttttagctcctgaagaatcatataatcaggcatgctgtcaaagagtccatctgttgccgtcaggataatgtctcctagctggacatcgaaagacgtgctatcagcagcatccggactgtcgctcaagacgacttccctcggcttctagggggagcgattgagagctggaatggagtgttgaagtaatgctgctgctccatctgatcggtgcacgaattcaccacccctaacaaccaggaagcctgaatcgcccaggtttgctgtgtgtaagcggtggctggttctgtccagcaccacaatgcaggcggtgctgctaccgagcaaagggactttattttgcagcaactcacagtagcttgtggtgagaattccaatgggattacaaggtacgaaccgtccttcttttactaaacgttcacacgtccgcattaaagtccctgagaattgagatggatcaactccatagtctctccagcctcctacacctatc

SEQ ID NO: 172194 - DNA, 145 bp, Homo Sapiens
gcattatactggcaggaccagcctcttctcagcatcctggtctaagctaaagtgccagctcctgagggctccccttcccatcagcccctttccacacccttctctccatttgctccccctttggagacaggatgtcactctgtca

SEQ ID NO: 172195 - DNA, 364 bp, Homo Sapiens
ctcaaaaaaggcacttctctgctgggcgtctagtgccaaggtctccagaaactggttctcatctgcatgatttaagcagtgccccaccaaaatctccaggtgcgcagcggccctacgctcctccggacagtgaagtgccaagctcacgggacaaaatgcaggacaacccgagttcaggcaagaaacagaaagacagcaggccagcctcactgaagcaactgtcaggttgtacttaagtgaaaataaccaacattgtgtctagagaataatccattacaaagaggaaatgacccacaaagccactatcaactattctattacaggacggcccagtgaagattatttaaaaatctccgggggtacc

SEQ ID NO: 172196 - DNA, 285 bp, Homo Sapiens
  misc_feature (167)..(239): n is a, c, g, or t
gacagtttctcacacacatttcaagtaagtttagccaggactgaagacacgtcccaggtaaccggaaggccatatatccccacctccgggactgataatctagatcaaaagagctttaagtgctcctattagctaaatgtaggttggttattttatttattttttgnnnnnnnnnnnnnnnnnnnnnnnnnnnnnnnnnnnnnnnnnnnnnnnnnnnnnnnnnnnnnnnnnnnnnnnnntcgttcaagcaattctcctcagtcaacccctgctcccccgccccca

SEQ ID NO: 172197 - DNA, 319 bp, Homo Sapiens
agagcgaaactccatctcgaaaaacaaaacaaaagtattttttgggttccctttatttcgttactctgttgattgaataactgatgttttgataaattgtaaatgcctacagaaaagggggctcttgttcttcttcaattgagtgaacatttgcatgtcctctgtatgagatatgagtcgtggtagaagctcttgtttataaaagtgaataaggtttggtctacatctgcttttaatgttgagataggtgtgtcaatacaggaaaacttgaacacagataagaccatggccgttaacagttagaggggttgacatgtgg

SEQ ID NO: 172198 - DNA, 201 bp, Homo Sapiens
caaagaacaacaacaacactgcttcatatcataaaagggggtctctgttacctacagctaacatgatattcttataaacctgatcagtaagattatggggcatgattcactgtatagttaacacccaaggaaatctataaaaggcataaaatttagatacacctccataacttgatagacaaagattgctttaatgcatct

SEQ ID NO: 172199 - DNA, 128 bp, Homo Sapiens
ctatagtgctcgttaaatccatgatatgtatcaagtagcatcattagcaagccaaattctttcaaatggttatttgcattctcagctactgtgatgaaatatggagtattttattttattttattttg

SEQ ID NO: 172200 - DNA, 629 bp, Homo Sapiens
agccagcatcttagggatttcgctgtcagagatacacgtacacagagatttaagatttactgggaagatccccactcccactgaccttccaatttaaaggagagttaaccattcacacagggtattcccaatttcacatcactctggtaagtaaaattttattaaaacctttgaactaccttggaactttatccatattaagatatacacgcaaaaaggcacatttccaaagaacatcattacggtaattgaatctttctagaaacaaaatttctttggagttagaaaaagagtgtatacagagctctcttttcaaatctgatcaaatgcgttaataaagcagcagttctttggcacaatttcctcagtgacaagatatgtcccaacttctcaaggtcttctttaaataagttataggtaaccaatgaccatctgagagccacttccaccctcccaagtgattttcttgctatgagcaactctaaggcaccactcacaacactggacagttctttaccctgtattctcagccagccatcaaagacagagaaagttctaactctcccttccccaaacttcaaccaagttaaccattcgttagctaaaagatataggcttccaaggtgggt

SEQ ID NO: 172201 - DNA, 560 bp, Homo Sapiens
  misc_feature (54)..(121): n is a, c, g, or t
caacaatcttcagggggcaggaggcggatatgtgagagggggatcctgcccgtnnnnnnnnnnnnnnnnnnnnnnnnnnnnnnnnnnnnnnnnnnnnnnnnnnnnnnnnnnnnnnnnnnnntgagccactgcgcctgggccaaagggaatagatttttattatggcatactgtagctgaaggcaaaacctgctagggaatacctttttgaaagatctacaaatatttcctaatgacatagatatgattaatacgatgtgtagagacggaattggggagggcagtacagtaggaagaaacagcccacttttcttcaaatgtggctaagcagtgacagaacagttgaactacttttatttaaataattgcaggctttggaacagagaatcgggtgtctaattatggcactatctaaaggtaatcgaggaagtctagttgtcccagggtcttcctttaacctcccctgaaacagctctcctccacctacctgtggctgcaaagccatcttgtgtcagctggaactgccagtcagtagagaacaaactgaccttttctgcatat

SEQ ID NO: 172202 - DNA, 510 bp, Homo Sapiens
ttgccaaccatctgagcccagagtcacagatccatcgtggccccctatgacccccaagccctaccgagggggcactcactctctgcttagccagggggcgtcggtcaaaaggtgacctccatgctgtgctgtcgtgggtgtgagacgtgctcatggccttccactgccatctctcccttatctgatgcctaaagtcacgatggggacagagctacccaggggccagccatggggtaaccagccacctgagggtcagtcacctgtggagagcaggcacctgtgaagaccaggcacctgaggactggcgcctacttcccactttggccctacactggcacagagcccctctttattcatttctcatgctgagcatggcacacttctggcctctgggcatttatggattaagaccaggatggtatttcagaagcttcccacttccttcctattctaaccgagtgcccagctcctttgctgatcatggaaagacccttaataattaggcctgca

SEQ ID NO: 172203 - DNA, 150 bp, Homo Sapiens
gccacaatcttcagggtaatcttaaaaacgaacaaagctggagtcctacaccaaagcctataataactacatcaaataccaagtcctgtagcaatgattgagagtaatccacacagagtggtactgctacagtaacggacaaaacagacc

SEQ ID NO: 172204 - DNA, 494 bp, Homo Sapiens
catgcaatctttcaggggaatcatcctcagttttagcactgcgtgttcttcaggagagaagtcctgagtgaggatggcccagctgttctccagatccaactcctcgggggtttccacagagagctggtatcaaggcagctgtcaggggcggctgtgcctggtgatgcggcatcgtaccttcatccccatctcagaatgggcagccagtctcagattcaaggaggaggaatcctgaggtgtggcgttcagtcctgaggtagacctgaggtcccctggaaattgtgttgatgctgtatgatggatgaggggtgctcattctctcaggtagacagtgaggagtcctggttcagccgagcctccatgtctgcatggatggttatgaacctgattgtttttggaaacagccaagctctctaggtgtactcagcaaatgcaaggtatagtgggtcctgcatacccagggtattattgagccatggaacagaacagagact

SEQ ID NO: 172205 - DNA, 1177 bp, Homo Sapiens
  misc_feature (962)..(962): n is a, c, g, or t
  misc_feature (967)..(992): n is a, c, g, or t
ggggcatgcgtagaacgcgagcgcttggcaaggctcggctcggaagagtccaagcgtgagggaagagggctgtggattcagatactgtttttctcccgaaataggaaattggcttatttttttctcctcggcagcatcttaatttaaaatatgacacttgacctacggccctgcacggagcggttaagagggtcaccaaccagtttcttaaacaattaggtctacatcctaactggcaattcgttgatgtatatggaatggatcctgaactccttagcatggtaccaagaccagtctgtgcagtcttacttctctttcctattacagaaaagtatgaagtattcagaacagaagaggaagaaaaaataaaatctcagggacaagatgttacatcatcagtatatttcatgaagcaaacaatcagcaatgcctgtggaacaattggactgattcatgctattgcaaacaataaagacaagatgcactttgaatctggatcaaccttgaaaaaattcctggaggaatctgtgtcaatgagccctgaagaacgagccagatacctggagaactatgatgccatccgagttactcatgagaccagtgccccatgaaggtcagactgaggcaccaagtatagatgagaaagtagatcttcattttattgcattagttcatgtagatgggcatctctatgaattagatgggcggaagccatttccaattaaccatggtgaaactagtgatgaaactttattagaggatgccatagaagtttgcaagaagtttatggagcgcgaccctgatgaactaagatttaatgcgattgctctttctgcagcatagcttgtcaataatggaaacaccaaaaactgtattatttgcaactaaattttctctgccatacactaactcaaaaattttgatattttcattaacttgatgattaaactttatgtgagttngaaannnnnnnnnnnnnnnnnnnnnnnnnncttgtcgggccggctcggcctcgagagcttcagacatcgttgcgcgcggccatagtagtgactgtcaagtgtttctagagactggctgacaggctggatctcacataaaacgcggggacgacgttgacatcaagagttagctatgactcacgacacagcgatatagcgcgccttcaacggatata

SEQ ID NO: 172206 - DNA, 346 bp, Homo Sapiens
cttacaaaaaccaaccatgtctaagaagaacaccatctgcctcccccaggactccaggtcccaagcgataacactgtctaagcacccccaagccactatccacttagaatcctgctccatacatagggtgtatatttattctgaacgggagaagttatattgttaaaagtgtaaaagaataattgtgtatgaagctgccttattttttttctttttgtaagttactattttcatgtgaatatttatgtagataaaatttgcctcctggtaaccctgtaatggatggggcccagaaatgaaatatttgagaaaaacaagtgaaaaggtcaagatacaaatgtgtatt

SEQ ID NO: 172207 - DNA, 891 bp, Homo Sapiens
  misc_feature (809)..(809): n is a, c, g, or t
gggaggaggcctgcacaggctggaggagggtttgggcagagcgaagacccggccaggaccttggtgagatggagtgccgcccacctcctgcggatactcttggagagttgttcccccagggggctctgccccacctggagaaggaagctgcctggagtggagtgactcaaatcagtatacctatctgctgcaccttcactctccagggtacatgctttaaaaccgacccgcaacaagtattggaaaaatgtatccagtctgaagatgtttgtgtatctgtttacatccagagttctgtgacacatgccccccagattgctgcaaagatcccaaggcattgattgcacttgattaagcttttgtctgtaggtgaaagaacaagtttaggtcgaggactggcccctaggctgctgctgtgacccttgtcccatgtggcttgtttgcctgtccgggactcttcgatgtgcccaggggagcgtgttcctgtctcttccatgccgtcctgcagtccttatctgctcgcctgagggaagagtagctgtagctacaagggaagcctgcctggaagagccgagcacctgtgcccatggcttctggtcatgaaacgagttaatgatggcagaggagcttcctccccacttcgcagcgccacattatccatcccctgagataagtaggctggtttaaccattggaatggacctttcagtgggaaccctgagagtctgagaacccccagaccaacccttccctccctttccccaactcttacagtgtttggacagggagggtatgggtgctgctctgtgntagcaagaactttggccttatgaaaagaggcaagccacgccatttttgcactaaggaagaatcaggtaatcactttttcaaa

SEQ ID NO: 172208 - DNA, 255 bp, Homo Sapiens
  misc_feature (171)..(180): n is a, c, g, or t
gcagtttaggggatgttcagggattgtagtgggatgctggatcaagtgatagttctacttttagttctcaaatgaatctccacactgttttccatagtggctgtactagtttacattcccaccagaagtatagaactgttccctgttcaccacattcacacaaacatctannnnnnnnnnaatggtcattcttgcaggagtaaggtggtatcacattgtggttttgatttgcatttccctgaagattgttggtgg

SEQ ID NO: 172209 - DNA, 489 bp, Homo Sapiens
ggggggaagtgacgagagccgggtggacccagggtggggaactacctcttcctctccacgcggttgagaagaccggtcggcctgggcaacctgcgctgaagatgccgggaaaactccgtagtgacgctggtttggaatcagacaccgcaatgaaaaaaggggagacactgcgaaagcaaaccgaggagaaagagaaaaaagagaagccaaaatctgataagactgaagagatagcagaagaggaagaaactgttttccccaaagctaaacaagttaaaaagaaagcagagccttctgaagttgacatgaattctcctaaatccaaaaaggcaaaaaaagaaagaggagccatctcaaaatgacatttctcctaaaaccaaaagtttgagaaagaaaaaggagcccattgaaaagaaagtggtttcttctaaaaccaaaaaagtgacaaaaaatgaggagccttctgaggaagaaatagatgctcctaag

SEQ ID NO: 172210 - DNA, 391 bp, Homo Sapiens
  misc_feature (244)..(244): n is a, c, g, or t
  misc_feature (250)..(250): n is a, c, g, or t
  misc_feature (261)..(261): n is a, c, g, or t
  misc_feature (326)..(326): n is a, c, g, or t
  misc_feature (331)..(331): n is a, c, g, or t
  misc_feature (354)..(354): n is a, c, g, or t
gggacctgcgaaggaaaacagggaggaagtgagcggtttgatcagcctgctatcacggtgttcatgactctcttatttagccaggcgcttaagtggacagatacatcacatcctaagtttgggaaaggcctttgacccatgtcatctgagcgtctcctccagtagctctgaaagctgtggacaccaattgccagggttccttctcccctgggttttgaggatccctggggtctttctgagactnggccanggagagggatngttgggccagtggttgtgtgaaagcaggaggggcagcccttctgggacaagtgtgatcccccttntaaanggcttttcagggaaggtttagtnaagtagggagatttttgccttgtttcttgattgagcc

SEQ ID NO: 172211 - DNA, 332 bp, Homo Sapiens
acaaacacatgcacactggtaacaaaggcagagatggagaggagacacaagatctccttggggacaggctgaccacatagtgtttctacaggcacgcctcacttcagggaagagggtatctctaagaccggactgacaagctagataaattaggacagggctttgtttcttaaggcacttcactcccctgaggagtgaagtagaagggatttaggcgggagtattcacaaaccccttcagctgtgctaactgggcttcatcagtacctgaggtggttctagaagcaggaaggcagaaaacatttccctgggagggctgctttcctttcccag

SEQ ID NO: 172212 - DNA, 140 bp, Homo Sapiens
ctagaggatcccctcaagtttacagcaactcttaggaaatcctttttctgagtaataattagtatctgtcccatctctataatcggtgacaccacaacaatgcaacgtattttggatcttgtctactgcatggcttctat

SEQ ID NO: 172213 - DNA, 437 bp, Homo Sapiens
gacaggatacaggaaggtccagcacataatgagtacattgccagacgaccagataaccaggaaggggcttttgaccccaaagaatatcctcacagtgcgaaagatgaagcacatcctgttgaatcagcctagaggagaagcagcaggaatgatgctttgatactctggaggagaagttaactcaagatggaattcatgttctgatttgaggaatgaaaatgagatgatcaggcaggaaactgacattccaaggatctaatccaggaagtactctcagtggggaccacctgctttcatcccctgacattgtgggagaaattttgcaatgtatgctaatcaaaatgtatttatatgttctctgctgatgttttatagaggtttgtgaagaaaattcaacctcagcaacttcagaaactgcccctgaagatcgtcggtgg

SEQ ID NO: 172214 - DNA, 210 bp, Homo Sapiens
  misc_feature (14)..(14): n is a, c, g, or t
gctagaaggatccnccccaccatagcaatcgttccagggtgctatctcggtacaatgcctggcatatagtacggtgctcaaagaagaaattaagagtcacttggaaatttttttagcacttaaagactcatctttcccatcctccgaaaatccatcttaggtctcacatcctcctatctctctctccttccactaatcatctctctcggt

SEQ ID NO: 172215 - DNA, 305 bp, Homo Sapiens
atttctaaagtgagggaatatgtccaattaattagtgtgttatgaaaagaaactcttaaacctaactgtccgaattgacatcatggagaaggataccatttcttacactgaactggacttcgagctgatcaaggtagaagtgaaggagatggaaaaactggtcatacagctgaaggagagttttggtggaagctcagaaattgttgaccagctggaggtggagataagaaatatgactctcttggtagagaagcttgagacactagaccataaccatgtccttgccattcgccgagaaatcgcgg

SEQ ID NO: 172216 - DNA, 788 bp, Homo Sapiens
gggttgcaaatagaaaaaaaatagaataagtatatatttttggagtaacatcaatatttaaacatttttacacagatcggtgtttgaaaatttgccatttcaggctaatatttttatatatttttgactttttaaaagttcatcagtgtttttgctactgttaagcttatgcagtttatactgtattttttatgtatcctttatatttaccaaacctgactccctgtagaggagtgctgtcttaaaaacaactgaaggggttaaagtcgtttcttttagtttaatagatgtgcataaggtagctttagcaattaaattctagtgaagttgatatagtctcatttttaattgtcctgtaatggaacagtagcaaattcactaaacttttgtgttcagagttaaattgttctcagtactttcaatgtaggggaatgtaataaacatagtgtgtatgttttgggtttgaactacacatttgatatatgagccatttagatatgcagtgttaattctatactgcatttgaagtgtatgtaacttagcttatgttaatgcagccatgaagttcggtttgctccagcatcccgggagtctttaaacattcttttacgtgaaacttgtcattggtttatcagcgctaatggtgtggaaaccagtttttctaatttgctttctctccctgccatcagaaaaggtgggggccgctcccctgtaactgggattggcccccaggggaacccttctttggcgcggggaaaggaacgggacactttaaactcctcccttcc

SEQ ID NO: 172217 - DNA, 1360 bp, Homo Sapiens
  misc_feature (1232)..(1232): n is a, c, g, or t
  misc_feature (1235)..(1235): n is a, c, g, or t
ggggaaccgcgccaggagacggaccgcaagtccagcgtacccacagacgactcaggcgggagacgagcggtgtcatggccgccgacagtgacgatggcgcagtttcagctcccgcagcttccgacggtgagcggcttcccagaggtggtgtcagcaaaagcacaacatctggggaggagctagtagtccaggttcccgtagtggatgtgcaaagcaacaacttcaaggagatgtggccatccctcctgctagccataaagacagctaatttcgtggctgtggacacggagctgagtgggcttggggacaggaagagtttgctgaaccagtgcattgaggaacgttacaaggccgtgtgtcatgctgccaggacccgttctatcctttccctgggcctcgcctgcttcaagcggcagccagacaagggtgaacatttctatctggctcaagtgttcaatctcactctgctgtgcatggaggagtatgtcatagaaccaaagtctgtgcagttcctgatacagcatggcttcaacttcaaccagcagtatgcccaaggcatcccctaccataagggcaatgacaagggtgatgagagccagagccagtcagtacggaccctattcctggagctaatccgagcccgccggcccctggtgctacacaatggccttatagacttggtgttcctgtaccagaacttctatgcacacctccctgagagtctgggaaccttcaccgctgacctgtgtgagatgttcccagcaggcatttatgacaccaaatatgctgctgagtttcatgcccgtttcgtggcctcctacttagaatatgccttccggaaatgtgaaacggaaaatgggaagcagcgggcagctggcagcccacaccttaccctggagttctgcaactatccttccagcatgagggaccatattgattaccgctgctgcctgcccccagcaaccacacgtcctcatcccaccaacatctgtgacaacttctcggctaatggctggtgccccctgagacacagtgtcctcagtctcccgatattgaccttatcattgacactgatgaagctgcggcaaaagaacaccggcgacggcgacgacttagggaaaaacgaagagggctttattgaacttacggggaacccaaactctggggaaacttaggatggtccctcccagaaacaggcctgggggggatagcatccaaccctgaaaaaaccncanccaagaagtggcttgcccaatgaaccttaggaacctggcctcactcccagccagggcaaccaaaatgactttaaaaaatgggggatttagggcgccaagggcccgtaaaatactgggatacaacc

SEQ ID NO: 172218 - DNA, 785 bp, Homo Sapiens
  misc_feature (598)..(598): n is a, c, g, or t
  misc_feature (769)..(769): n is a, c, g, or t
ggggtggtgcagagcacgcagagtccttctgtcggttggtcctggagcggcgcagccggagtggggccgtgaggagaataaaggcagccccgttgatgactgaaaatgacaaagcatccacctaacagacgaggaatcagctttgaagtgggagcccagttggaagcccgggaccgtttaaaaaaactggtatccagctcacatagaagacattgactacgaggaaggaaaagtactcatccatttcaagcgttggaaccatcgttatgatgagtggttctgctgggacagtccttatttacgccctttagagaaaatacagctgaggaaagagggcttgcatgaagaggatggatcttctgaatttcaaataaatgagcaggtccttgcttgctggtctgattgtcgtttttacccggccaaagtcactgctgttaacaaggatggtacttacactgtgaaattttatgatggagtagttcagactgtcaaacatattcatgtcaaagctttttccaaagatcaggcctaaagaaacagatcacaaaagtctttcatcatctcctgataaacgagagaagtttaaagaacagagaanagcaacagtgaaagtgaagaaagacaaagaagataaacccttaaagacagaaaagcgacccaagcagcctgataaagaaagaaagttaatctgttctgaaaaaggggaaagtgtcaaagaaaagtctttccccagaacgaggagggaagacagggaaaacattttccgaanaatgaccggagaggta

SEQ ID NO: 172219 - DNA, 969 bp, Homo Sapiens
  misc_feature (20)..(20): n is a, c, g, or t
ggcactgagcaccaattttncggggggcggctggagaaggcccagggaaccctgaccacgcccaactggcccgagtccgattaccccccgggcatcagctgttcctggcacatcatcgcgcccccggaccaggtcatcgcgctgaccttcgagaagtttgacctggagccggacacctactgccgctatgactcggtcagcgtgttcaacggagccgtgagcgacgactcccggaggctggggaagttctgcggcgacgcagtcccgggctccatctcctccgaagggaatgaactcctcgtccagttcgtctcagatctcagtgtcaccgctgatggcttctcagcctcctacaagaccctgccgcggggcactgccaaagaagggcaagggcccggccccaaacggggaactgagcctaaagtcaagctgccccccaagtcccaacctccggagaaaacagaggaatctccttcagcccctgatgcacccacctgcccaaagcagtgccgccggacaggcaccttgcagagcaacttctgtgccagcagccttgtggtgactgcgacagtgaagtccatggttcgggagccaggggagggccttgccgtgactgtcagtcttattggtgcttataaaactggaggactggacctgccttctccacccactggtgcctccctgaagttttacgtgccttgcaagcagtgcccccccatgaagaaaggagtcagttatctgctgatgggccaggtagaagagaacagaggccccgtccttcctccagagagctttgtggttctccaccggcccaaccaggaccagatcctcaccaacctaagcaagaggaagtgcccctctcaacctgtgcgggctgctgcgtcccaggactgagacgcaggccagccccggcccctagccctcaggccttctttcttatccaaataaatgtttcttaatgagaaaaaa

SEQ ID NO: 172220 - DNA, 1212 bp, Homo Sapiens
aggcccagtgccagcaccctcctgaaccactctttcttcaagcaggtatcgtagccccttcgttctggttctggttctagttctggttctaacaactcacaatccctttagctttctctcccctcactttgaatgagagaaactaccccgcttccgaagcccctgaaagacactgctccttcctctcatggagttggctccgacagcccgtctgccaccaggccatggttccttgccccatggtgtcctgggacccagagcaacaggatctgtcacccacctctctcttctcccccagatcaagcgacgtgcctcagaggctttgcccgaattgcttcgtcctgtcacccccatcaccaattttgagggcagccagtctcacgaccacagtgaaatctttgccctgataacaaaacctgaaagagctggaggtggacgattgggagttctgagcctctgcaaactgtgcgcattctccacccagggatgcagaggccacccagaggcccttcctgagggccggccacattcccgccctcctgggcagattgggtagaaaggacattcttccaggaaagttgactgctgactgattgggaaagaaaatcctggagagatacttcactgctccaaggcttttgagacacaagggaatctcaacaaccagggatcaggagggtccaaagccgacattcccagtcctgtgagctcaggtgacctcctccgcagaagagagatgctgctctggccctgggagctgaattccaagcccagggtttggctccttaaacccgaggaccgccacctcttcccagtgcttgcgaccagcctcattctatttaactttgctctcagatgcctcagatgctataggtcagtgaaagggcaagtagtaagctgcctgcctcccttccctcagacctctccctcataattccagagaagggcatttctgtctttttaagcacagactaaggctggaaaagtccatccttatccctcttctggcttgggccctgaaacctaagtctttcccacggtttatgtgtgtgcctcattcctttcccaccaagaatccatcttagcgcctcctgccagctgccctggtgctttctccaagggccatcagtgtcttgcctagcttgagggcttaagtccttatgctgtgttagtttcgttgtcagaacaaattaaaattttcagagacgctga

SEQ ID NO: 172221 - DNA, 530 bp, Homo Sapiens
ccatggtcatcagctgattcctgagggtaaaccggcggcgctcgagccaccagaggcaggcgtgtttcttctgtgaaagacaacatttcagaagcaagctgcttattttgagaaaatgatttcatactgtacgctctcttgaaatctcatgcattcctgaatatgcaaatgtttcaagtcactgtcaagtgtcccatctagagccagaagaatgatgatcctggaccatgttatggccttttctggtcacaaaagcagggctagcaatgctgcacaaaactgaacacaaatgagaaacagaaatatgaggaggaaggaagacaggacacaaagcatctggcagaaggaaaaaacaaaactccagaatgggctctggatgtccttctgccatagacagtgagttctagcttgggctttgcagacaaggagtctaagagaagtggcagaaatagcacatgatggcagggaaataggaaaatacagaagagcaagagaactggctagggttatagcaatagataataatgggg

SEQ ID NO: 172222 - DNA, 520 bp, Homo Sapiens
tggaaaacataaccttatgggaaagtacctaaaaatggttgaagaacaagactgaaggctagaatatgaaagcttaaattctgattctgccccttcctagttagcatattcctgagcaaatatttgtcaactggtatttctaaaactgtgccaaggcacccagggcattagagtgactcacaagagtatctcagaatatgtaacaatttgaacacacaaacacaatgaaactcaacatctgtcagacatcacgtgaactactacgtgaggtagttcattctattcaacataagattgcactataatccttctgataatttcatatttttagtgagactgggttttccaggccatctgataaaaaatcaagtactatatggacaccaacatggagcagaaaatgagggcagcagtgtccaatctcattccaggtgagaagtagcacagtgtccaataggtgcatacatctccttagtaagtagttgtgatatacaatgaaatagaaatgaaaaatatatta

SEQ ID NO: 172223 - DNA, 862 bp, Homo Sapiens
gggggtactttgacagcattcaaaacagcatcggccataacaacagaaatggccagacagtcccaagggatccagcagcttctgcaagctgagaagcgggcagctgagaaggtggcagatgccagaaagaggaaggcccggcgactgaagcacgcaaaggaggaggcacacatggaggtggagcaataccgcagagagcgagagcacgaattccagagcaagcagcaggcggccatgggctcccaggggaacctgtctgctgaggtggagcaggctacaaggcgccaggtgcagggcatgcagagctcccagcagagaaaccgagagcgtgtcctggcccagcttcttggcatggactgcgacgacaggccccaggtccaccccaactaccggatttctgcctagggccaccgtaaggcctgactccttctgccagttccctccctcaaagaaatcctccaatcaaaatcacctccccaccataatcccctgtcttctttccatcccctaaaaatcctggggaggcaagatcccaataattttccgtggggacacttataaaatatcctggctcacatctgaaatctccctgggtggtcctttaacccctcactgggaactttgggaaaccttcaaaggccattcctcaccctaaacccctctgcggaaattttggaaataatggggaaaccagggaatgtgggaaaaacctccccggaccttccgggggtctggccccaatgtggggtccccctcctcttgggaccccggtccccttgccggggctttggggaaaaccaggaaaaaacgctaacttctactctgggggagccccccaaaagggccccccctctcgcggaaa

SEQ ID NO: 172224 - DNA, 887 bp, Homo Sapiens
  misc_feature (686)..(686): n is a, c, g, or t
cctctgctgtctgtgaataaatccaccagtaccccaacttctccggggccccggactcattcaactccctccatcccggtgctgacagcaggccagagtgggctatacagcccccagtacatctcctacatacctcagatccacatgggaccagctgtgcaggcacctcagatgtatccatatcctgtatccaattcagtgcctgggcagcagggcaagtaccggggagcaaaaggctcccttcctccgcagcgctcggaccaacaccagccagcctcagccccgccgatgatgcaggccgccgcggctgctggcccgcctctggtggctgccacgccctattcttcctacatcccctacaaccctcagcagttcccaggccagccagccatgatgcagcccatggcccactacccctcacagccggtgtttgcccccatgcttcagagcaacccacgcatgctgacgtcgggcagccatccccaggccatcgtgtcatcctctacccctcagtacccttctgcagagcagcctaccccccaagccctttatgccactgttcaccagtcctacccacaccatgccacacagctccatgcccaccagccgcagccggctaccacgcctactggaagccagccgcagtcccagcatgcggcccccagtcctgtccagcatcaggcggngcaggccccacacttgggcagtggacagccacagcagaatctgtaccacccaaggggccctgacaggcacgccgccctctctggcaccggggaccttctgccccagtcccctcaaagcagccttcccccagcccaacccgctggggtatgccaatccaacccacccaggcaggcttggccccaccggggttttcaaccaaa

SEQ ID NO: 172225 - DNA, 791 bp, Homo Sapiens
gggggttgtggacctgaaggcgaacgtgatatcaaagagcatgcatttttccggtatattgattgggagaaacttgaacgcaaagagatccagcccccttataagccaaaagcttgtgggcgaaatgctgaaaacttcgaccgatttttcacccgccatccaccagtcctaacacctcccgaccaggaagtcatcaggaatattgaccaatcagaattcgaaggattttcctttgttaactctgaatttttaaaacccgaagtcaagagctaagtagatgtgtagatctccgtccttcatttctgtcattcaagctcaacggctattgtggtgacatttttatgtttttcattgccaagttgcatccatgtttgattttctgatgagactagagtgacagtgtttcagaacccaaatgtcctcaggtagtttggagcatctctatgagatgggattatgcagatggcctatggaaaatgcagctgcataattaacacattatcaaagtcctcttacaatttattttccgccgcatgtcagctaagtagacccaatgggggagagaaaaatgcctgcctttctttcccctcttttttctgcactgcccatatttcaccccccaaccattccaatctgggggataatttgaatgttagccggtaactccttccacttccggggccctggagccttggcctttgtatccaaaggtgtatggggttgccttttgccctaagaagggaatcccctctaatttcccccctgtttcttggaaggccaccacgaacctt

SEQ ID NO: 172226 - DNA, 538 bp, Homo Sapiens
cccctctttgaggagaagtctgggatataaaagcaagcatacctcatcagctgatatgaaattataaaattccacaagtctgagtatttgaaacttataaaagtcatcagaaaatgcaagcaaattgggctttagttcagtggttcccctggtttagatgacagtccctctgtgagctcaaggtagtcttcttgttcattcccttggatctgttgattcagtgacactggcgaagctcttggtagaggcggaggagagtctgagaactaaggaaatgctcaccgactccctctgtgcacgctcacacatggggacgtgtctcctggagaacacactaaggagacggatgttaatgatgctgtgctgaactgttcttctctgccaggtgccgcagaaagttgtcctcactctggcctctatgatttaaaggctcactcttaaagagagctggaggtggcgggaggtgagggactggagggatgggaaggtggtgtgggtggtgagggtgtgggtggatgtgcaggtatgtgagggcatg

SEQ ID NO: 172227 - DNA, 253 bp, Homo Sapiens
ctctactgccatggtggacctcaccaactcacttcgagcatttatggatgtcaatggagaaagcgagataaatatgctggacgagaagctgatcaagtttctggccttgcagagaatacatcagcttttcccctcccgggtccaaccttcaccgggcagtgtcgggacacatcagctggcttctggagggcaccacatagaagtgcaaagaaaggaggtacaggcccgagctgtgttctaccccctcttaggg

SEQ ID NO: 172228 - DNA, 234 bp, Homo Sapiens
taatcgagccggaccagcaggctgggccccagattaagatgtcatgccttcattccacaaaggacgaacttggattacatcaactttggacccattggttttgtcgctgtcgtcaactgacagtgattcatcactggtgatgataaaaatgatggaagaagagctgaaagtcacttttttctttggcctgtccccatctttctgtgacatcttaatctggggcccaagcctgct

SEQ ID NO: 172229 - DNA, 928 bp, Homo Sapiens
  misc_feature (40)..(40): n is a, c, g, or t
  misc_feature (74)..(74): n is a, c, g, or t
  misc_feature (87)..(87): n is a, c, g, or t
  misc_feature (121)..(121): n is a, c, g, or t
  misc_feature (167)..(167): n is a, c, g, or t
agacaaaagaccttcgaagtcctgtcaggggcagcaaatntgggggaagccaaatatatgggagtttgccttgnagactccctctgntgctgggtctcccaggctgacaaggattcaaagntgtccctgaaactcctctttgtcatactgcacatataaaacgtctnttgttccaacaagaagattttctttttcaattctagaattatctccttgataacttgatcagatataggacatgacactgaatagagtccaacagtacaaaaaaaattcagtatgttctagctacttcacaccatgtgtacgcgacagttatttttacagtaaggtattttcgagaaaaatgcattacgtgttttggaaaatagagtaatttaaaaaatatatttgaaatgaaaatctccaacacattagaagatgatgatgttagatgcccatcgtgtgccacaagtggttttttcattatgtaaagcacccgttgaattaaaagaatttgtttttgttcaacctcttcctgaggcccaagagcatatgggcaattcggatttcctgctggaccacaaggttctgttgatattacatagaacgggtattccagacacttcttatgatgaaagtccaaaagtggcatccaatttaaggccccatctttcgttgccattcttcattcctacaaaggacgaacttggattacatcaactttggacccattggttttgtcgctgtcgtcaactgacagtgattcatcactgatgataaaaatgatggaagaagagttgaaagtcacttttttctttggcctgtccccatctttctgtgacatcacaatgggtctgatctgcatttcacttccagctgctggtaggtctttagcaggcctctggcacctcagcagtcggaggcacagaagctgcaaaagggatcc

SEQ ID NO: 172230 - DNA, 661 bp, Homo Sapiens
agcaggcttgggccccagattagatgtcatttttagcaatagtgttgccacgatttgtctttttttatataatgaaccactcttttttaactttgtaaccttcccttgaagacagaattttggtgttggtgcttgtaagcattttcattaataatatgagaaatgatacctggagagagagattatgagcaaatgtattgcttcttttagaggaggaagcatacaacctcttttgtgtgaattttgttattatggtcaaagaatgcattcctaagttttcatttgagtacccaaatacacaaaaggtgtccctttaaggaaaataaagaattaagttttaaataacattacattttacaatctgacatctggagtatattgaacataggctatttcttgatataacactcatttaattgtggccatccaaatgaatattattgcagaatttatcttgttcataatgatttgtaaatggtgttatagctgaatacctgtgcatgaaaatgggcaatattttcatctgtttacttgtagtgccatagaggccaatatgcacaatattaactaatgccaagacatggctgtttaaaaaatttaatgttcaaacagttatcactgatgcttttgcactatttattaataaaatcatatattgtgt

SEQ ID NO: 172231 - DNA, 1213 bp, Homo Sapiens
  misc_feature (1035)..(1035): n is a, c, g, or t
  misc_feature (1058)..(1058): n is a, c, g, or t
  misc_feature (1139)..(1150): n is a, c, g, or t
  misc_feature (1155)..(1155): n is a, c, g, or t
ttaagggaataaattaatatagtataattagatcaataaaagaaagtagcgaggcctgggtggctttccagcacgaggggttggctctgtggtgcacgtgctaagccacagacaggagctgagaggctggactgggaaggaagccccagggcccaacccccgggtgcaggtgctggctgctcagctgctctctgagatgaagctgcaagatggcaagagacttctggggccccagtggctggactatgactgtgaccgagctgtgatcgaggactgggtgttcagggtcccccatgtggccatattcctgagtgtggtcatttgcaagggctttctcgtcctgtgctcgtctcttgatctgactaccctggtccctgagcgtcaagtggaccagggcaggggttttgagagcatcctggatgtcctctctgtcatgtacatcaacgcccagctgcctcgggagcagcggcaccgctggcgcctgctcttttcgtctgagctccatggacacagcttctcccagctctgtggccacatcactcaccgggggccctgtgtggctgtcctcgaggaccatgacaagcatgtgttcggtgggtttgccctcttgctcttgggaggtgaagcctcagtttcaagggggaccaatagaatgcttccctgttcctccatactgccccaagcatgagctgtggtacccaacacaccggggcttatcaacgaaccaactaaccatggtacctttggaaacccattaggaaccagccacaaatcaaatccccccgcacacccgggaccttgtgggctaattgggggcgggcgggccgcagcaccaccccaaatattccacctttttttgcggcggaccctttttttgggaggcacttggggcacacctctcgctttttggcacactcttcttttttctcggggggaggagaaaaaacaagggggggaacaatcccctcccccgaaagggcctcccgaattggtgtaaagaggggccccccccacacttagtaaataatggtttancaacaacccaaaacaaatagatntactttgggttgcacaccaagatcttctctaacaaccagggacttcttttatacccgacacaaaaaccttccaaggggggnnnnnnnnnnnngcggnttcccaaacaaacacccttgcgggggggtaatccccgaaggggccggttttttcttaa

SEQ ID NO: 172232 - DNA, 281 bp, Homo Sapiens
tccggcccagcaggcttgggccccagattaagatgtcacattgtgcatcaactctacttcaataaattttttaaacaatgaaagaaaaaacatacatggaccccaaaaagtaactcttcaatcacaaacacataatgacaaatatttgggtaaaacaacctaattaaatattgtctaccttctctgtagccaagctattcaccacagacagaaaaccaatctcctaatgcccgggatgacatcttaatctggggcccaagcctgactggtaccgagctcga

SEQ ID NO: 172233 - DNA, 292 bp, Homo Sapiens
cgtagatcgagctcggtaccagcaggcttgggcccagattaagatgtcatcccaccggggtatgcgagggtcactaggcgaggaggtgcggggcgctgtctgtgttcgagagagttggcctgggaggcgctaggggagagggcaggacttgcgtgatctgtagcgtggggcggtgattcggttgagaccgacggcgaggtgcaaggggtagggggggaggtcggatcttcgggtgcaagggggagagttgacatcttaatctggggcccaagcctgctggtaccggctcatc

SEQ ID NO: 172234 - DNA, 314 bp, Homo Sapiens
agcaggcttgggccccagattaagatgtcatgcaggggaaagtgctatcgttgattggggatgtctgccacaggttggggaagggcagcctgccatccccaccacctcaccagaggcagctgaacaggaacagggggtagccacagtgattaaaactagacttggccccaagagacccagacccaataccatctttccttgaacccacagaagaataacagaaaccttaaaagcattgtattctttgtttttgtttgtctggttgtcttgagatgacatcttaatctggggcccagcctgctggaccaggctag

SEQ ID NO: 172235 - DNA, 242 bp, Homo Sapiens
agccaggcattgggcccccagattaagatgtcagactcttagttaaatctcttctggatcagaaaaagacctggaaacagaaggagattctccacagatgcaattttcctccacaaaatatggttttgcagggccatttcaaaatatgtcaagaatagattttggggtaaaatacttttatttccttcagggcccactatctattcttgacatcttaatctggcccagcctgctggtaccgc

SEQ ID NO: 172236 - DNA, 314 bp, Homo Sapiens
agcggaccagcaggctgggccccagattaagatgtcatgttgaagggagttgaagaaagctatgaggggagtcgtcacaatccagggaatccaggtgctgtagcaaggaattaaggaaacaggttttagaatttcttaggagttagttagcttccacagaatatgggaatgtgggggtgcagaatgttgtcaggagggctgtaaagaaattaaaatagaaggataggatagagaggagcaggggcttccttagagtaggggacctctctgagagatgacatcttaatctgggcccagcctgctggtccgctcat

SEQ ID NO: 172237 - DNA, 687 bp, Homo Sapiens
aatgagccggaccagcaggctgggcccagattaagatgtcaccgaatcggagctgtagctgccggtctacgccacagccacagcaactagagatctgagccacatctgagacctacaccatggctcacagcaatgccggatccttaaccctctgagtgaggccatggatcgaacctgcaacctcatggttcctagtcggattcattaaccactgagccatgatgcaaactctggttattaattctctattgcagctatatattacgaagttttttgtcaatgtcacatttttttatcagctgacatcttaatctggggcccaagcctgctggcaggcgtgggcgcctgattaatattggacttagctgatacctgtggtagataacggaagaactggtctcatgtgccaatagtagctccaaactactcaggtcggatgtctaatatcacagtaacactcccccagcgaacgaaatgaacaatataatgtctttgcactgtcgctttccacagacattttcagacaagcactccattccatatatcagtgttacactgtagcatttgcaacttaaatacctgggaatgaggggtttgtccaaaatgccgatttttattaactcgtgcagcatctggttcttcaaaattgctacacgtaagaaattgtaatgatgactctacactggg

SEQ ID NO: 172238 - DNA, 381 bp, Homo Sapiens
agcggaccagcaggctgggccccagattaagatgtcacttcaaagataacttttgaattacggaagaaatggttcatggcaatagtacctccaaacttctcaggtcggatgtctaatattacagtaacactcccccaaaaagaaatgaaaatataatgtctttgcactgttgctttccacagacattttagagaagcaatccattccatatatcagtgttatcaatgtagcatttgcaaattaaatacctgggaatgaggggtttgtcaaaaatgcagatttttattaaatagtgcagcatatggttcttcaaaaattgctacactgtaagaaaattatgaatgatgacatcttaatctggggcccaagcctgctggtact

SEQ ID NO: 172239 - DNA, 228 bp, Homo Sapiens
atgatgagccggtaccagcaggcttgggccccagattaagatgtcaggtgtgagagtcagcagtattaactacattcatgttaatgatgcgaccatcaccaacattcatttccagaacactctgtccccagtaaacaacatgtccccgttcctcccagccactggtacctaccattctactttctgtttgtataaactggacatcttaatctggggcccaagcctgct

SEQ ID NO: 172240 - DNA, 333 bp, Homo Sapiens
agcaggcttgggccccagattaagatgtcacctgtatagcatactagtagtgaatgtaggctttgaagtcagatgaatccggctataagctatgactagtcatatactagttgtgtcattttgaacaggttacctaacctctggctcctcagctttgtttattctgtataaaaattagtgggaataacagttcctgtctgggtcattgccaagatgtcatgtgagaccgtgtcaagtgtcttagaatacagtgcttcgcataagtagactctcagtagagtacggtgcttatttaatcaccagatataacctgaccatcttaactctggggcc

SEQ ID NO: 172241 - DNA, 298 bp, Homo Sapiens
aagaatcgagctcggtaccagcaggcttgggccccagattaagatgtcaatagctaagtacaaggaggctgtatagcacttagaagactgaatccaaagaagactacatcagggcatttaataattaaattcccaaaggtcaaagattaagaaatgattctaaaagcagcaagagaaaagaaacaaataacatacactgaagctctaatacatctggcagcagacttttcagtggaaaccttgcaagacaggagagtgacatgacatcttaatctggggcccagcctgctggtccggc

SEQ ID NO: 172242 - DNA, 254 bp, Homo Sapiens
atcgagctggtacccagcaggctgggcccagattaagatgtcaggtgatagttggagaacacttgggctaagcacccaggagactggctgtgcagcaaggagcccagagcttctctgagaaattgggctgcctcctgaggaacacaaggaagaaccacaaggaattgctcagggcctccctggaggaagccccttcatttccttggacactgtagggccactactgacatcttaatctggggcccaagcctgct

SEQ ID NO: 172243 - DNA, 306 bp, Homo Sapiens
agcaggcttgggccccagattaagatgtcaaaaaactgaaaggacaggatatccaaaggtcatgttagtggatgctcaagtagcaaaggataatgacagaaaatgtgatttttttaaaaaatagttttatatcaggcattgtaataatttgaggaatattgaaaaatatattagaagctgcaatagatggctataaggaggaataatcttaaccattattaagcaccaccactatatcttttaaaatgtcatgtatattagttgcatcacttgacgtcttatcgggcccagcctgctgggccgcta

SEQ ID NO: 172244 - DNA, 172 bp, Homo Sapiens
agcaggcttgggccccagattaagatgtcagcagaatagggaacacagttggaaaattgcttttcaaagcaaagaatttctaatatccactcaaagtaatgagagctgttgaagacttttagcgcttgacatcttaatctgggcccagcctgctggtccggctcatcacgag

SEQ ID NO: 172245 - DNA, 517 bp, Homo Sapiens
tttttaacttttttgaaaatttatttcacatttattactagtcacataatcctcaaaaatctaagttcacaaatgatcatcacatgagccctcttctctatatacacatttgttagtgtgaaaaaacaattttgtacagtattttagtagttacatgattagcaagcaacagagaagtagtgaaagctgaagaactccaaatgcattgctcataggacaaccactcaaacacaagcagctaggcaataaaggaaaatttcccatccagtcattgagaaatgctaaaggcattttatggtgacatgaatgcttaagttagtatgcaacctatagggcaaataaaactgctataataggttggtaattttgcaattaaatatttgtagtataggtacacccattaatctcacatttaataatacataaaattttaagtctgggttctcaaaacacgttgcttggtattttggtatagtgtctggttatactcaaatgcttcattcacctcacctttgct

SEQ ID NO: 172246 - DNA, 507 bp, Homo Sapiens
  misc_feature (465)..(465): n is a, c, g, or t
  misc_feature (493)..(493): n is a, c, g, or t
gtgggaggagataagagatacaaactgagacgccagcctctcctcctggggccacccaagtggggagaacccctagtgtcctgccacaacctgccttgtataaacatgtacattttttcataacattttgaacaaggtttatattgactcaagtttaaaaacaaaaagtgtgactgaaaaatttttacagagtctagtgcaccaatgctgatgtgaggggttgtgtatgcgagtgaagaaaatgtgtattctggtggcctgaagctttactggacaaggatgtgtgagagtgcagagatatatttagtgacacagtagagaggcaaaaaaaaagctaaaattccaaatgtatattttttcgtattgccctgtcctcacccagaaatgatcaattcctgttactgtattaacccttgttattaggaactctaagccatgccagaacaccgtcccgccccttgggancgtgtaggtttctgcccggggttccctnggccctttgccgtt

SEQ ID NO: 172247 - DNA, 841 bp, Homo Sapiens
ggggagcctggaatcacagggcctcctggagctaccagagagagaagggaaagggagccaaagttctggggttaggggagaggaagggaaagggaagaagggcctagacctaggtaccatgttcaggtaccaagggactggtgaccaattgctcccaagagagaaaatgggagagggggagaggcaaattatattttgtgcccaaacctaaaggaccatcaggaagagaatttcccagaggcccctggcacacgatggactgtaacgcctaggtattgcgttccaagctgaagccaggccagagtagccaagtggggttcggattttggtccaaacagctcaggcaagcttctggtgagagaagggaaggtgggaaatgggcagatgctctttgggcgagaacccactaccccttcaggccccgcacacagctagagcctctaccagccatgttctcacactgcttggaacagaacagccccacgggcctaaaaccactctcctgaaagtggtagggagttccgactgagtgaggacaagccaagaccaaggcctgtaggcagaagggagcaagttaccttgatttggaaaacaaaacaaaactaaagccagagagcctcccctcccaccctgcctaacctgaaatcccattcaggctattgtgcttgcagccaggactgggcctgtgcttctgcattgggccctgagttcaagtgcccagaaccgccctgtgaccaagagcaagccagggtgggggaaggcatgctcccctctcactgggccctgcctgccttctcctctgaccttccctccgtgcctagccctctgagcctggtcctac

SEQ ID NO: 172248 - DNA, 333 bp, Homo Sapiens
cagcaccacgagtttgtacccaccacagcagcagcagcgatgcagcatcacatgcaacagatgcaacaaggaaatatgggacagataggccagcttccccaggccttgggagcagaggcaggtgccagtctacaggcctatcagcagcgactccttcagcaacagatggggtcccctgttcagcccaaccccatgagcccccagcagcatatgctcccaaatcaggcccagtccccacacctacaaggccagcagatccctaattctctctccaatcaagtgcgctctccccagcctgtcacttctccacggatcacagtcgcagcccccccc

SEQ ID NO: 172249 - DNA, 616 bp, Homo Sapiens
gtatatggtgggagacacacattggagcgaagttcccgtagtggctgcacaagaactgaagatggctctttagggggcttctggcacacttcagcataacctaactttcggggttcctgtagagccacagctgtagctgcatttatgttattattacatggtgaagcagtacttgccctcgatggctttgtagtacttggaggagaaactggtatagttgtctgattgagaccatccttctgaacagaggaatcttctattagatccttttcttgctgagatgtgcttaatgcagtaagctcagcagcacatggagaactggtactcatatgaagttgctgggcagaagtgcattctgtctgctcatctgcaggcactgggcaactaattgtcaactcttcattatccttttctttgtagacacctttaacaacatcagacatcctattctccaaaacgagtcacctggcattcttgatgaacttccaggtacaggtggaaaatttgaggctaataagtcaaactttggtgttggagcctttgattcagctgttgaaggatgaggtcttgagatcctgtcatcttctcgtcgtgttcgacctctggagagaggttt

SEQ ID NO: 172250 - DNA, 250 bp, Homo Sapiens
ggcatcaaccatggctggtggagccacacaaggaaggcctcacacgaaccacacgcactacagagccaactgcgacccaagcacgatcgaggctgtgtgtttctgaaaggatctgaccgaactgagcactaagattgttcagaatctggccaacgcagctccccatccatccccagccaggttggcccatggtgagtgaggcagagtcttggtttcctcagctgtgagatgggggcagcggtacccgaca

SEQ ID NO: 172251 - DNA, 177 bp, Homo Sapiens
ccgcggttatgtcgtacgccggtccgagaatgtcacctgtagcggcgcaatagcgaatgcgccccggccgtccctgattaatgagtagccgtcagtgtgcgcgaatataccaacagaaatagaaccgcggtcatattccacttagtcctagctgcgtagacatgacccgcgggggga

SEQ ID NO: 172252 - DNA, 183 bp, Homo Sapiens
gactctagagtatccccccgcgttcatgtcttacgcacagcgcttaactcgcactgatattttacctcagtatgcctagaaataaacatctagctttataccagtactaaccaaaaaaataaaccctcgttccacacaacctgccaccaactatttcctcacgtcagacatcatctgcagggt

SEQ ID NO: 172253 - DNA, 302 bp, Homo Sapiens
ccgcggttatgtcttacggattatccatgttgctgctttcccatccacagtgtgggaagtgatttttaaccactgaatacagggcacctctactcatgcagtgcttaagacagaagttagagaatcttttttgtttgctctcttttctgcttatagcagacaatccaccataagtgccagccaatgcttttgtgttcacattgcacaggaggtctttgaggaatgaccagggagactggctataaaatatgaagggtattacacaatgaagcgtaagacataagccgggggggatactctaa

SEQ ID NO: 172254 - DNA, 310 bp, Homo Sapiens
atatcccccgggcattactgtctacgaacgcaccggcccctttctcctttgcgtggatgagggtgcacgagaatccctacgcgtgacgcatgaaccccgtcttcccaggcatgggcggtgttcgtctacgccgtgccgatccgtgctctactctgcgaagacgaactacacggaggatcggcgatgaccggcgtttttcacggaacacaggtcggtgaggtcaccgagacgtggtccatgtccagtccggtgctgttgcaaacaggatcgattgacatcgaagtcttctgccgtaagacataaccgcggt

SEQ ID NO: 172255 - DNA, 315 bp, Homo Sapiens
tgttcttagagtatccccccgcggttatgtcttacgggtgtcagggttcatcctgatgagaaatccttttttccacatcactcattctgctcatgcttttctggtcaagccccagctgatactactggtgacagcatctgaatgttgtaagaaggcagcgtaagacataaccgcggccgcggttatgtcttacggacggtccccagtattgctctgctttatttatcaacaatgcctcagatcatgccaatgagcatgtgttttgttggtgatggtgggtttattttttgttttgtcttcggctccagtttgagt

SEQ ID NO: 172256 - DNA, 435 bp, Homo Sapiens
ggttcattctacggtgtgagttctcacaggagtgagagcaacaacaggtgttgcttgctcacaatgccatcctctgttttgccttctgaggtgattggggccacaagtggtgcctgttcatggacccctagtggtggaaggccatgcccacctccggagtcgaagataactatggtggtttgtccccatcacttgtagaatgtgaaagaaacatcctatcctgcttagcccacaaggaagcgtaagacataaccgcggccgcggttatgtcttacggaacatgatggaggatgatgtgagaaaaagaatgtatatgtatgtataattgggtcactttgctgtgcagcagaaattagactagaacattgtaaatcaactataatagaaaattaaataaatatactttgtaatcaagagattaaaaaaaatctacca

SEQ ID NO: 172257 - DNA, 224 bp, Homo Sapiens
  misc_feature (163)..(163): n is a, c, g, or t
atccccccgcggctcatgtcttacggagcctactctgaaaatgtggacggaacacactcgctcgctcctttaaaggacgatcaccagcacactccttaacaagctcccgtctgcttgtctttttttgtgcgttataaagtccatctgaccaagttcacccttnaagaggggctgcctgggtgctcctgcttttttagctgcgttaagacattaccgcgttggct

SEQ ID NO: 172258 - DNA, 247 bp, Homo Sapiens
ccgcggttatgtcttacgggttctacaactaaatctgatttaaccctttgtctcttccttcctcgatcagaaaagagcctcaccttttcctggtagatctctaagtaggacatagtgacagagagagcccatggccggccctcagcaccctcctcccttgtgagctgcaggaggtccatgagagcgcgggggatcaccccaggttgctctgggccgtaagacactaaccgcggtggtaccgagctcg

SEQ ID NO: 172259 - DNA, 209 bp, Homo Sapiens
gttatgtctgacgggcacacacagcatatatacatctattgtgtcatcacacgtaccctccaccacgctccatccatgctcatccttgatcacatgaaaagactggcgccaacctttccttttcatcaaaggggggtgaaatccacctccttaaaatagacctcttttcccttcacgatttatctccgtttgacctcaccgcagtgtgt

SEQ ID NO: 172260 - DNA, 790 bp, Homo Sapiens
  misc_feature (586)..(591): n is a, c, g, or t
  misc_feature (593)..(597): n is a, c, g, or t
  misc_feature (599)..(607): n is a, c, g, or t
  misc_feature (609)..(676): n is a, c, g, or t
  misc_feature (684)..(686): n is a, c, g, or t
  misc_feature (689)..(703): n is a, c, g, or t
acgtagcaaaggagattcttcttcgagtacttacgctatttcagaatataaagaactgcctcaaaatagaaggccatttagctgtgcagcctactttcactgaaggttcattgtttttcctgttacatggagaagaatgtgcccagaaaataagagctttagttgatcaccatgatgcagaggtgaaggaaaaggttgtaacaataatacccaaaatctgattggtcatatttttccaaagagtaatgcagtctggatataaatgtattttctgtcttccttataaggggattctcccagctgctaaatttaaacagtaaatatcacattttgtcattaacacagctataacttgccgtggttctcagatttattttggactattttgatgccaagtgaatataagagcttgtactgaaaccatttatttctttctattttgctatttgcaaatgcttgttatcttccctacatgaagtggcagtaacctttttcacatttaagctacccttctaccttttgaagtgatttgcagttactcatctgagacagcatcagtatttgactaaatcattgtttcacaaannnnnnannnnnannnnnnnnnannnnnnnnnnnnnnnnnnnnnnnnnnnnnnnnnnnnnnnnnnnnnnnnnnnnnnnnnnnnnnnnnnnnaaaaaaannnaannnnnnnnnnnnnnnaaaaaaggggggccccccctgggcccccgaaaaaatatttttaaaacaatttttcggggggcgccgcggcgcccccaaaaagaataa

SEQ ID NO: 172261 - DNA, 1370 bp, Homo Sapiens
  misc_feature (466)..(466): n is a, c, g, or t
  misc_feature (1085)..(1136): n is a, c, g, or t
gcgtttgctgtggcggctaggcccgcgtgcgctggagacctccgcgctggcccccgcgagcctcctgccctggcccggcgctgcggctctgccgcggcggcagcatgggtggcccccggggcgcgggctgggtggcggcgggcctgctgctcggcgcgggcgcctgctactgcatttacaggctgacccggggtcggcggcggggcgaccgcgagctcgggatacgctcttcgaagtccgcaggtgccctggaagaagggacgtcagagggtcagttgtgcgggcgctcggcccggcctcagacgggaggtacctgggagtcacagtggtccaagacctcgcagcctgaagacttaactgatggttcatatgatgatgttctaaatgctgaacaacttcagaaactcctttacctgctggagtcaacggaggatcctgtaattattgaaagagctttgattacttngggtaacaatgcagccttttcagttaaccaagctattattcgtgaattgggtggtattccaattgttgcaaacaaaatcaaccattccaaccagagtattaaagagaaagctttaaatgcactaaataacctgagtgtgaatgtggaaaatcaaatcaagataaaggtgcaagttttgaaactgcttttgaattagtctgaaaatccagccatgacagaaggacttctccgtgcccaagtggattcatcattcctttccctttatgacagccacgtagcaaaggagattcttcttcgagtacttacgctatttcagaatataaagaactgcctcaaaatagaaggccatttagctgtgcagcctactttcactgaaggttcattgtttttcctgttacatggagaagaatgtgcccagaaaataagagctttagttgatcaccatgatgcagaggtgaaggaaaaggttgtaacaataatacccaaaatctgattggtcatatttttccaaagagtaatgcagtctggatataaatgtattttctgtcttccttataaggggattctcccagctgctaaatttaaacagtaaatatcacattttgtcattaacacagcnnnnnnnnnnnnnnnnnnnnnnnnnnnnnnnnnnnnnnnnnnnnnnnnnnnncagcaagcaacatgcccgaacccagagacataaaaacggaaataaacaagaacaacccaaactaagggagagcaagcacacaagacagacaaaagacgagggagcggggcagacagtagaaacaaacccgggcaatggagacacagcaaaagaagagaagaccacaaaatgagaagaaggagagagggaaaccagaaaaggcagaaaacaacaaagcagcgacggagcgcacag

SEQ ID NO: 172262 - DNA, 235 bp, Homo Sapiens
ccggctttatacaggctgccacagctatgacgagatctgctgcaagacaggcatgagctaccatgagctggatgagcggcttgaaaatgaccccaaaatcatcatgctgtctggatagtgaggctggtagtgagctggatggacacattgctgtgggtagcccctcctactaggaggctttcatactgtctagaggttgactcttagttctgtaaataaagacatccatttcaaa

SEQ ID NO: 172263 - DNA, 562 bp, Homo Sapiens
accatcaccggccccatgtgggattcatcataacaacgtaaaagacactgatttccttggaaaaacaaagtgcagtacgaatataaaggagtcaccacacccctcttccgaaaataatacataagagaactcttactttacatgattagtgtcactcaaggttcacacatggaaaaaatagctaaaaaataatctatcataaattctcactatgaagtcacaatagaatctgataccctttttagaactggtgagttggagagacacccagaggtcatgctgtccaccccttcatttgataggggagggcacttgaggcccaggaaggtcaagcgtcggacctggggtctaacccctgtggcagagcctgcgtaggatgcgggcctcctgaagcctagctcagggttccctccactccccttcctctttaaagactctcaaaagtaaaatatggtgatgatctccaaagatgcaccacaccataaagcacatgcactgacccaggtcagcaatttggtctcacaaggcggttcctttgccatgacaggtatgtgagggctgg

SEQ ID NO: 172264 - DNA, 433 bp, Homo Sapiens
tagtcttttctgaagaaccgtgtatcagtgttagatgtgcatcccgtttggtcattccctcagactttgaatacagtcattactctctggaagagaaatgtaagtatattttttgttatctgcagtatggtttaacatgtattaataatacacatatgcagactcactaaagtatccccagtaattagtaaataccaaatttaagtcagtacagttctgtatttgtaaattctgtctttcaaaaagtagttcgtgtttttaaaagttgatgtccaaaggaaaggagcttcttttaagtacttttggtgtatgttgaatatttatttgctatgatattctagaagaaaatatcaaacatgttaaatataagaacatgttaaaatttaatatttgctatttcaaaagttactgaagatgtctcggaataacaatt

SEQ ID NO: 172265 - DNA, 405 bp, Homo Sapiens
gaaacactatgacatacataattgagtagaccattagtacagaccgatatgatcaaaggcatgctggaaacaagcctattaaaggtcagcttgaatcaacatttcatatgcatttgcgaagacctaggagaattcatactgtagagaacaccttacaaatgtgaagaatgcgagaaagttttcacgttgcaaatcatcattcttgaaatacataggataattcatactggagagaaaccatacaaatgtaaggtatgcgacaaggcttttaagcatgattcacacctggcaaaacatactagaattcacaggggagacaaacattacacatgttatgaatgtagcaaggtttttgatcaaaaagcaacccttgcatgtcatcatagaagtcatagctttttcctg

SEQ ID NO: 172266 - DNA, 635 bp, Homo Sapiens
acgtggttggaaaacccgttgactcgtggcacataccatatgatgaagactaggtagaaatgatgttcctgtgaagtaccaaccaaatggctttgcctccaccaaaagacatagagattcttacctctatgctaagtttgtgtttgggtaccctctaggttggcatcagaggctcctgagctggtgtttgtttagggcattgcctctgtcctgaagataaaaggattctattaacagcattgacattgattttttaatgaaatgagatatatcttttcataaccagctgcgtattcttcccctaacatttgttcttggaggcttatcaagagttggagaacttagtgtagagcaaaacctgcatttctcctactgggccagctattccacttagctagggtgactaatagtgcttttggtatccattttttgctacttctgaccttgccttccaggcctaccaatagcagaatcaatccatctgtccctgagatactcatgttgtttcaaatgcctcctcccatttctggcatagtctcattctctgtatgttatgccctatccacatggaatcatttatcgtcctctgtaataaactggccaagatactaaaggcttactagtcctagctgttc

SEQ ID NO: 172267 - DNA, 805 bp, Homo Sapiens
gcgaccaggggacgagccttaagggcgaccggcggacagagcagagcggaccgggctgacagaaccagaccggaccggagccagacgggacccagagcccgagcccgatttcaggaaagggacgagtccgaagattcctgaaggccagagctctgacaggcggtgccccgcccatgctggataggacctgggatgctgctggagctgaaatcggatgccaccaaggctcggtccagcccagtaccgctggaagtgaataaactccggagggtcggacgggacctgggctctctccacgattctggctgtttgcccaggaacttagggtgggtacctctgagtcccagggacctgggcaggcccaagcccaccacgagcatcatccagtcctcagccctaatctgcccttaggagtccaggctacaacctggagatcccaaacctagccccctagtgggacaaggacctgaccctcctgcccgcatacacaacccatttcccctggtgagccacttggcagcatatgtaggtaccagctcaaccccacgcaagttcctgagctgaacatggagcaaggggagggtgacttctctccacatagggagggcttagagctcacagccttgggaagtgagactagaagaggggagcagaaagggaccttgactagacaaaggccacacacatcattgtcattactgttttaattgtctggcttctctctggactgggagctcagtgaggattctgaccagtgacttacacaaaaggcgctctatacatattataatatattcgcttacta

SEQ ID NO: 172268 - DNA, 453 bp, Homo Sapiens
tgaacttggcaacttctgagaacaggaatgtctagtggtgcttctagcctaaagtgacccagtttcagataagacagtttaatccagaactcagagggagaaaagattaatattttctcctagggaaggatacccagagctaccacagctgaaatgggaataacatgcttaaaggtggatatgagatggccaaagtcccatgaggaatggcctccaggtatgatgaaatccagtgcaggagggaaggtctcttctcatagtatccaattgcaaaactggtcaaaattcaaccattttctcagggttattctaaaagctgttggacttgtactgcttctttggcttctctggctcttgttccagcttttgcagttacaaaatgagaaagacctcgctgtgctgtcctccattcagtgggttctggatggattgccagatcatgtgaagggctct

SEQ ID NO: 172269 - DNA, 286 bp, Homo Sapiens
tctctagagtatcccccccgaaacctataacctctgcaattccaattcactttctggcaagctgttcaaatggattgatctattctcatattaaagcggaaaaaagatttgattaaaaaatagaactctcatttgttgcgacatgatacccaatggagaaattaaatttcattactcatttctggcattagttgtattcatttcacattgggttagcagtactttagaatggatattgctgaagtaagtggtgtgtcaataagatgtgagtcatagctgtctcctg

SEQ ID NO: 172270 - DNA, 382 bp, Homo Sapiens
tccccccggaaacactatgactgcaacgctgtactccaccctgcgcacagagactctgtctcaacaaacaaaaccaaaccagtagaataaattgtagtgtactctataaacatgctaatagtatgcaattatcaaaatgaacaaactactgctacacataatgtggataaactttataaacatgttgaacaaaagaaaccagatgtaaaggaatacatactatatgatttcattaacatgaattcaaaaataggccaaaccaacctatagtgtccggaaggagtgtgctgccgggacaaaaggagaggatagtgattagaacaggggctgctgagagagtgttagtaattcatctgatggtggttacacgaatgtgttcact

SEQ ID NO: 172271 - DNA, 236 bp, Homo Sapiens
gtcagtaggtgacaggaaattatgagcttcattatcatcttaacagaccatcatggtatgtgcgccctattgttgaccaaaatgattagtggtgcatgagtgtgcatcatatgctttattattatctgtaaattggtgacaacaatacctgcctcattaggttactgtgaagagttagtgaagagcacaaaacagagccagttagggagcaaaaactcataaatgttagttagatc

SEQ ID NO: 172272 - DNA, 295 bp, Homo Sapiens
  misc_feature (56)..(116): n is a, c, g, or t
ctactgcactccagcctgggtgacagagcaagaccctgttgcttaaaataataatnnnnnnnnnnnnnnnnnnnnnnnnnnnnnnnnnnnnnnnnnnnnnnnnnnnnnnnnnnnnnagattgtgctactcttctgcttaaaaccttccagtggctcattatttagcttacaacttgagaagtcttacataatagaaaagcagaaagagactaaagaatcagattctgttttcttctcactcaacagagaatagatctctattaagcattaatctatttacaaagatcaccaaata

SEQ ID NO: 172273 - DNA, 481 bp, Homo Sapiens
tcgtgatatctatagtgattctagagttccccccggaaacacccttatgactccggaaggggtaaggagactatactcagccatgcctatgtgacagactccccaaaaaactctggacacccaggcttaagtgagggtccttggttgacaatactctgtgtgtgttgtcacgcactgcttggagaagtgttgtccacatgactccatggggagaggacaactggaagcttgtgcctggtttcccctggacgctgccctatgcacttttttcatttgatggttttaatcagcatcttttcattgtaagaaaccatcaccatacgtgtaacagttctgtgcatccttccagtgaatcagtgaagttgagggtagtcttgggaacccccaaacacctccctacaacacttcccactctaagaacacctcagaggcagaaagctgtatagcagattgccgctcagcttgtcatagctttttcctg

SEQ ID NO: 172274 - DNA, 569 bp, Homo Sapiens
acgtcatccctttactgcatcatagacttcatactggagagaaaccctacaaatgtaatgagtgtggcaagacctttagtcacaagtcatcccttacatgccatcgtagacttcatactggagagaaaccttacaaatgtgaagaaagtgacaaagcttacagtttcaaatcaaaccttgaaatacatcagaaaattcatactgaagacaatccttacaagtgtaatgagtgtggaaagaccttcagccggacatcatcccttacatgccatcgtagacgtcatactggagagcaaccttacaaatgtgaagaatgtgacaaagctttccgtttcaaatcaaaccttgaaagacataggagaattcatactggagagaaaccatacaagtgtaatgagtgtggcaagaccctttagtcggaagtcatacctcacatgccatcatagacttcatactggagagaaagcttacaagtgtaatgagtgcggcaagacctttagttggaagtcatcccttatctgccatcgtagacttcattctggagagaaaccttacaagtgtaaggagtg

SEQ ID NO: 172275 - DNA, 585 bp, Homo Sapiens
tgtctgagatggttggagtcctgcatatggaatgtatggccaggatgaacagcaaggatttaatcagacacagtcttctgcaccatggatgggaccaaattatggagtgcaaccgcctcaagggcaaaagtggcagcatgttgcccaagtcagccttctgggtatcgagtggcaggatatgaaacccagtgaataaggactccagaatctaaagccagtggcttgaggctacagggagtgtagtaaagccgttgtttacttaaagatttatcaaatcagtcagtgcaaatgtcagatacaatgtatttatttaaaagattcatttttaatcatgaaattacttatcatccacattgttttaaaaagaaacaagatgctggatgtctgccaatgttgtgccttcattaccttttttgataaagtttctcagatccttgtatcaaacacaaattgcagggattgctgccactttttaactattaagaggcagaaaattgcacaatattgaacttttttccactgaagtagtgtgcagttctagtttgcattcctgatatgatttaaaacatgtaatataaagatgtt

SEQ ID NO: 172276 - DNA, 686 bp, Homo Sapiens
caaccatctttgttgagtggagtgcaccagggacctttcctggcttcttagagtgagagaagtatgtggacatctcttcttttcctgtccctctagaagaacattctcccttgcttgatgcaacactgttccaaaagagggtggagagtcctgcatcatagccaccaaatagtgaggaccggggctgaggccacacagataggggcctgatggaggagaggatagaagttgaatgtcctgatggccatgagcagttgagtggcacagcctggcaccaggagcaggtccttgtaatggagttagtgtccagtcagctgagctccaccctgatgccagtggtgagtgttcatcggcctgttaccgttagtacctgtgttccctcaccaggccatcctgtcaaacgagcccattttctccaaagtggaatctgaccaagcatgagagagatctgtctatgggaccagtggcttggattctgccacacccataaatccttgtgtgttaacttctagctgcctggggctggccctgctcagacaaatctgctccctgggcatctttggccaggcttctgccctctgcagctgggacccctcacttgcctgccatgctctgctcggcttcagtctccaggagacagtggtcacctgtcgacgcggccgcgaatttagtagtagtagtcgacc

SEQ ID NO: 172277 - DNA, 932 bp, Homo Sapiens
tcagaatcccatggccagctatccttaccggcagggctgcccaggagctgcaggacaagcaccaggagcccctccgggtagctactaccctggaccccccaatagtggagggcagtatggtagtgggctaccccctggtggtggttatgggggtcctgcccctggagggccttatggaccaccagctggtggagggccctatggacaccccaatcctgggatgttcccctctggaactccaggaggaccatatggcggtgcagctcccgggggcccctatggtcagccacctccaagttcctacggtgcccagcagcctgggctttatggacagggtggcgcccctcccaatgtggatcctgaggcctactcctggttccagtcggtggactcagatcacagtggctatatctccatgaaggagctaaagcaggccctggtcaactgcaattggtcttcattcaatgatgagacctgcctcatgatgataaacatgtttgacaagaccaagtcaggccgcatcgatgtctacggcttctcagccctgtggaaattcatccagcagtggaagaacctcttccagcagtatgaccgggaccgctcgggctccattagctacacagagctgcagcaagctctgtcccaaatgggctacaacctgagcccccagttcacccaggcttctggtctcccgctactgcccaagctctgccaatcctgccatgcagctttgaccgctttcatccagggtgtgcaccccagctgcagggggctggacaaaggccctttcccgggaaaaaggacccagcttgtccaaaggaaacattcccggttcagctttttgaaggactttcggtcaaccaatgaacagcttttctctggattgcttatgaaccccaaccccttttttggttggaaaaaattggaaattc

SEQ ID NO: 172278 - DNA, 1076 bp, Homo Sapiens
  misc_feature (777)..(826): n is a, c, g, or t
cgcaaagggcttctcggatgctatgtcccaaccatctgtggagagtggagtgcaccagggacctttcctggcttcttagagtgagagaagtatgtggacatctcttcttttcctgtccctctagaagaacattctcccttgcttgatgcaacactgttccaaaagagggtggagagtcctgcatcatagccaccaaatagtgaggaccggggctgaggccacacagataggggcctgatggaggagaggatagaagttgaatgtcctgatggccatgagcagttgagtggcacagcctggcaccaggagcaggtccttgtaatggagttagtgtccagtcagctgagctccaccctgatgccagtggtgagtgttcatcggcctgttaccgttagtacctgtgttccctcaccaggccatcctgtcaaacgagcccattttctcccaagtggaatcttgaccaagcatgagagagatctgtctatgggaccagtggcttggattctgccacacccataaatccttgtgtgttaactttctacctggcctgggggctggcccctgcatcagaacaaatcctggcctcccttggggcatcctttgggcccaggctttctggccccttcctgcaaacttggggaacccccctccactttggcccttggcccattggcctccatggattccggggttttccggagccgctccccaacggaaagaaacaggttggggttcaccacaccttccttcccaccttgctcccacaatgacgcttcnnnnnnnnnnnnnnnnnnnnnnnnnnnnnnnnnnnnnnnnnnnnnnnnnngggcggaggcaccaggaagaagagtcacacgcgcgggaaaaatttcgttaaaagcccttttcatattcacacaaggggaaatgcaaaaacctcgtgggggcacgttacgatcatgcacccacgcacaatgaacgaagtgccccaaaacaaacacggacggaacgatagacatcataggaccgactcccccggcgcacttcaatactgcctcacgggttgtccgcgacgaaaaagaggctgtactggggcc

SEQ ID NO: 172279 - DNA, 880 bp, Homo Sapiens
ctatccttaccggcagggctgcccaggagctgcaggacaagcaccaggagcccctccgggtagctactaccctggaccccccaatagtggagggcagtatggtagtgggctaccccctggtggtggttatgggggtcctgcccctggagggccttatggaccaccagctggtggagggccctatggacaccccaatcctgggatgttcccctctggaactccaggaggaccatatggcggtgcagctcccgggggcccctatggtcagccacctccaagttcctacggtgcccagcagcctgggctttatggacagggtggcgcccctcccaatgtggatcctgaggcctactcctggttccagtcggtggactcagatcacagtggctatatctccatgaaggagctaaagcaggccctggtcaactgcaattggtcttcattcaatgatgagacctgcctcatgatgataaacatgtttgacaagaccaagtcaggccgcatcgatgtctacggcttctcagccctgtggaaattcatccagcagtggaagaacctcttccagcagtatgaccgggaccgctcgggctccattagctacacagagctgcagcaagctctgtcccaaatgggctacaacctgagcccccagttcacccagcttctggtctcccgctactgcccacgctctgccaatcctgccatgcagcttgaccgcttcatccaggtgtgcacccagctgcaggtgctgacagaggcctttccgggagaaggacacagctgtacaagggaacatctcggcttaagcttcgaaggactttcttcaccatgacagcctttcttcggatgctattgacccaaccccttctgttgggagaag

SEQ ID NO: 172280 - DNA, 220 bp, Homo Sapiens
tgctgcgacggagattccactacggcactgcgtttggaggcagtaaagtgaaggatgtgtgtgaggacctcgttcgccatggttataactacttggggaaagactatgttacatccggcatcacaggtgagcccttagaagcatacatctattttggccccgtgtactatcagaagctgaaacacatggtgctagataaaatgcatgcccgggcccgggg

SEQ ID NO: 172281 - DNA, 405 bp, Homo Sapiens
cccggaaacttgtggtgttatgcaacaggccttcctcctaaagaaaccatgccagcacagccctcacttgcctggtgcaccgggcctgcaccacacgtattattattctgagagcatgagcgccaagaaagaaaaccgagactcaaaagcccaagggctgtttcttcacgtttcagtcaatgtacactgtgcaaacacatgcaacacagatgaacaaaactcacaaggtgaagggggttcttccactctttccaaaatcagccaagccaactggtacaaaagtcactcccaatacgaccccatggacatctgctgagacgcgacgaggtaagagggggctgtcgacatgaccagctctacttgtcaccataacaccacacaattccgtgtacccgagctcgaatt

SEQ ID NO: 172282 - DNA, 405 bp, Homo Sapiens
  misc_feature (382)..(382): n is a, c, g, or t
caaactctataggtcacacgatgggctgtccgtctttttagagggaatacaccttcattggttcaaaaccatttaaggtgatgaaaccaaggtgaagggggttcttccactctttccaaaatcagccaagccaactggtacaaaagtcactaccaatacagcccaccgagcttgtgttgatactcatggagatagctggttcctgacgacatgagcagttctacttgtcaccaagcaagggtcctgtcactctcgggtttccatgatggatttcctcttccgcagtgttctggtctaaggcaatataaatctgtccacaaactctatagttcacacgatgggctgtccgtctttttaagggaatacaccttcattggttcanaacctattaaggtgatgaaacca

SEQ ID NO: 172283 - DNA, 404 bp, Homo Sapiens
aattgtgtggtgttatgagcaagctctgtacttgctttggtcagtgtcatatctggccatctgattggagagtacaaagtaggtactggcgatctccaaatgtaagcactgctcaaccaggtaattggttagtaggtcacaaaaaggaagttaatttggaggtaggggaccaagctggccttaaactctgagaggtctgctttcagggtaccatcaaagttcagggaggtagtgatggaggaagtctggtccaagcagtggttaaagtatgtggggccctgggggtataggttgcaatgacatgtgttggtccattgtctcccaagaagacacagtccaagggttccagggtggcacggtggtcaggatagagttgtagggttccaccataacaccacacaatt

SEQ ID NO: 172284 - DNA, 320 bp, Homo Sapiens
aattgtgtggtgttatggcaccatcttgattcagtgtgtgtcataggtatatcaaccctgacccaaatagacatacaaataatttaatctttactgcagtctttcataaacatacccaaagcgagaacatagaaaaacttcctaaaacctctcttctcccatttctttccttcctttcccccgatatgcctaggctcacctaaagtctctcttctccccaactctaagctcccactccaagatattctccaagcccaccttcaggttcttttgtctcccttcctaagctcttcatatctgtatcataacaccacacaatt

SEQ ID NO: 172285 - DNA, 479 bp, Homo Sapiens
  misc_feature (193)..(228): n is a, c, g, or t
actctagacgatcccggtatgtgtggtgttatgctagagtcaccccaatggtgtgctcagctagagacttgcacacgagacacagatggtgaggggtctgggtagctagcgctcacagctccacaaagggctttgtcatttgtggagtgaccccctttcctcctgcttctggggactgcacctgccccctctnnnnnnnnnnnnnnnnnnnnnnnnnnnnnnnnnnnntcagtgaagtatagctgacacacactgttataccctcttctccgctggggttattgcttcccagtgtgtgaggtcttggagggacaggccagattttactgccctccaaagagaagccaaccagcctctttattctcaggatctggctcatgtgcagagaacttggagcctgaaaaaggtgatgctccttcagctgtaggggacaccctgagccactggccctccataacaccacacaattccggtaccga

SEQ ID NO: 172286 - DNA, 508 bp, Homo Sapiens
tggaattgtgtgttatggatggcttcatgcaaataatacaacaaataaatataatatgaagttgtgatgcatgtaaagattttgatataagatataaatgcaacaagagtaaatgcgatgcataaatagatgacttgacacatttaatcatcatataattatgaaaggaaaatatcacatgagatttcacatttgatatcatgataagttagttaccataacatggaaaacctgttttcaaaacttgacaacgtattatatcaaaacatgactgcgaatttagaacatgacaacttacatctcagaatctgtgttaagaatgcagcacatgacaacaatgcaatttccagaacaaatcaaatacaattatcaaaatatgacaccactattcagaacgttttaatgtagttatgtcaacacctgacaatgcagttacatccgaacatgacaatgtgatttcaagaacatgaatatgaagttatcaaaacataacaccacacaattccgg

SEQ ID NO: 172287 - DNA, 446 bp, Homo Sapiens
  misc_feature (28)..(28): n is a, c, g, or t
aattgtgtgcttttatgggcataccccncaggaagcatccccacaggggggcatacccccaggaagcatccccacaagggacatacccacatgggtttacccatatggggctaactttaattgtttaattgaactttttctaaaacaaacttaaaatctatcaaaaacctaaaatttgctagatacactagatttattggtagaactacatttggtttgatctctttcggataaagagtacgtaagaaactcgcgtgagtgcaaccatgattcaaaactacgttttgacttgattctccgatagacacgtaggaagccttctaaaggcccaatctaaccaatgcataccattgcatcaaaacctcttaagttttccaatctaagaacgcttaaaaattgctacacgtcttagtgtttctaaaacttgtgcataacaccacacaatt

SEQ ID NO: 172288 - DNA, 278 bp, Homo Sapiens
aattgtgtggtgttatggcaagaaagcaaaaagtagtatcagaagaatcctggaagctgtataagatctgtctgcagaagtaattggatttataaaccagaaaagtgtcgtacaaaataaatttaaaacgtagttaaattgatttcttagaggtacctcaagctggggaagaaacactgccaagcgtagtgtcatgtcttgaagcaactgtatctctaacttgcatcaatacatgagtagatataaagtaaaactctttacacataacaccacctatt

SEQ ID NO: 172289 - DNA, 985 bp, Homo Sapiens
gatctagaggatcaccggaatgtgtggtgttatgcacagataagtggagccatcatcacaatgaattttagagcattttcatcacttcaaaaagaaaccccaccttctctagctgttaacatcctatagactcatcccctactcaatcctaagcaaccacaaatctgttttctgtctctataaactttcctattctgttttcatctaaatagaatcatacaataggtggccttttgtgcctggcttctttcagttggcataatgctatcaaggttcatgtacgtattggtactttatttctttttataaccgtataacattcaatttcatggatataacattttgtttatccaataatatttttattgacatttgagttgtgttcagcctttggctattttaaatactgctgctaaaaataattgtgtacaatttgtgtttgaacacctctttccaataatctgggtgtatacctaggaataaatttctgggtcatatgacaattctatgtttaatatatttagaagccatcaaattattttacagagtggccataacaccacacaattccggaattgtgtggtgttatgcatgaaaatttaaagtatatcaagttcagccaacactctaagctctagtcacctgctctattcaatagtcctgtcccctagagattatctgtgtttcaagtatttgctgacgtttcatgggctttatacttttggctgaaaatgttgctgcaaagatgtgggcaggattaaatgaccacatgaggtttcaaagggctcccagtaattctccactcccaaagaggctgacacctgatctttgaaaggcttctgcccaagcattggatttgaggactggaaagggtatccgcctgtcaacctatcattttacagatcaggaaatagttacaaatcaggagcagagagagattctgtaacatattcataacaccaccttaccggggatgctctagatc

SEQ ID NO: 172290 - DNA, 278 bp, Homo Sapiens
aattgtgtggtgttatgacctcctaatgtctgtccctttcctgaatctacctctcaatctagaccccatctcctctcccatgtcacctatcacaaataggtcaccaggctttgtttggtcgtctcctctcaaatgacacaagcagggtcatctaggccttcaggacattttcatgtcaacaggtcagctccctgtagagaaggtgaatttttctctcatttgttgattccacatccattcaaagatacgtggtgagcaccataaccacacataattcg

SEQ ID NO: 172291 - DNA, 412 bp, Homo Sapiens
aattgtgtggtgttatgcaataaatatttgttgatcaatatgtaaaaagtagacgaacatgtaattcaatggtgagaaataaagttgaataatgtgaagacaaattcattgttgaacatcgtaaaaaagtacatgcatttgtctcttcggcccccaaacctctcactcaaaatgtataaacacacacaaacaacgagaataggacaatagttaaaagtagactagagagttaaacaaattaattagggattgaaagtgaactaaatgagctgaatctgtcttagcaaagcagggattgctaacaccttaaagatctttgaaatgaataccaaagagtagataaactgatttctacccacagattccagaaagtctcatacaccacacatccggggtcgctctagagtcacct

SEQ ID NO: 172292 - DNA, 271 bp, Homo Sapiens
aattgtgtggtgttatgaaagcatcatcgagaatttttttcaaaaagtggagcttgacgtgcaaaggataaattggagcttattcataccgatgtgtgtggtgttatggagaatccaactcatgccaacaataagtatttcatttttttattgatgactatactcgtatgacttggatttacttcatgaagcaaaaatctgaagtgtttacgatttttaagaattttaaagctatcgttgagaaacaaagtgggcataacaccacacaatt

SEQ ID NO: 172293 - DNA, 585 bp, Homo Sapiens
  misc_feature (508)..(508): n is a, c, g, or t
  misc_feature (561)..(561): n is a, c, g, or t
gggcaatcaatcgcgcccccccggggcgaagctcgtctggtatcttcgacccaccataccccagaggacacgcatccacacaggtgcacctcaactagagaccccagcgaaacccgcctcgtgggctcccgggagcctactacacggccggagggaaaaccaccacaagccagacgcaacgcccaccggggccccaacatacgcttcagaaagtcgaatggcctaactaatacagccctacctccctctccactggggagaccatctccagatagctcgtccctaagggttcggttgccggaaacccgggaacgtatcgctcctcttaatctccccgcctcgggaccaggcaattcccggaggcaccagttctacaaacaacatcccccatacagagcgcccagcatacacacctcaacgtccaatacatcttacttaaatttttccccaaccttcctggccactggattccgcaccccaactaccccacgcccgctgtccgcccggngacccgctagtgactagatcctctataatcacacggacgaacgagacctcatncgcgaggactggacatcacccagt

SEQ ID NO: 172294 - DNA, 771 bp, Homo Sapiens
  misc_feature (36)..(36): n is a, c, g, or t
ctgtaatactggttctccattaaaatgtagatgctntgtctaattccacttcaagatgattaaattgagcttctataactatcaactatcaaattctagtttcaagtatctcactgtacctatatcatatctgttctcaacttagtttgattctccactcattttcaatcagagttgaagccttctttgcctttcttctttgtcttatttctgccttcatctcccacttctcacccaactctgccactgttcaggagcagttgactaaacttttatccttcctttaacttaatctttttatccttctgtttttagttcttacagtggtaatcacatcagtttggcaatctaagatgtctttatcaagggtcagcccttttctatttggagctgaatcttttctttcatgtagaaatctacatgtatatacaagaaatgtatttttatctgcaggataatattgtttcaaataattttattaagagttaactttttaggtattttcccttttaatgtggttttgaaatgttaattgcatttttacacatgatgcattcagtggacactcttttttcctaattataactcatctctgaatgcattgtgccaatcaagagtaagataggattcagtgcgcaaaatttgcttttgatgcttattaagagtaaacccatgaatttgaatttttatattatgcttggtacttggaattgatatataccttattaaagcttgaaaacatttagcatttgaatagtaagtttcatcacg

SEQ ID NO: 172295 - DNA, 720 bp, Homo Sapiens
  misc_feature (343)..(343): n is a, c, g, or t
  misc_feature (434)..(434): n is a, c, g, or t
  misc_feature (602)..(602): n is a, c, g, or t
  misc_feature (604)..(604): n is a, c, g, or t
  misc_feature (647)..(647): n is a, c, g, or t
  misc_feature (700)..(700): n is a, c, g, or t
ctctgggtggagctgtgcctgttcctgggcctcctgctgctgctggccttgggcaaccgaaaggtttctgtagtcagagcccttcgccacgccgtcccggcagggatcctctgtttaggactaacggttgctgtggactcttatttttggcggcagctcacttggccggaaggaaaggtgctttggtacaacactgtcctgaacaaaagctccaactgggggacctccccgctgctgtggtacttctactcagccctgccccgcggcctgggctgcagcctgctcttcatccccctgggcttgggagacagaaggacgcacgcgccgacggtgctggcgctgngcttcatggcactctactccctcctgccacacaaggagctacgcttcatcatctatgccttccccatgctcaacatcacggctgccagagntgctcctacctgctgaataactataaaaagtcttggctgtacaaagcggggtctctgcttgtgatcggacacctcgtggtgaatgccgcctactcagccacggccctgtatgtgtcccatttcaactacccaggtggcgtcgcaatgcagaggctgcaccagctggtncncccccagacagacgtccttctgcacattgacgtgggcagccgnccagacaggtgtgtcttcgggtttttccaagtcaacagcgcctggggagggtnttaattttttcggcccagga

SEQ ID NO: 172296 - DNA, 553 bp, Homo Sapiens
gatatagcaagtgctcaacaaacgttagccacttccatgatgatggaggaggagaagggggaggaggagggaaaaagaagaagatatgcaaagcatagcaatagttgactttcaacaaaggttactccctttcctctttcctattccattattggttgggggaaagcttcatttacccattctagggtcaaaccccattacaataaaattattgcccaacttcccctgctgaatgggaaccttcttatattaaattttggtaagaattacctacattataaataattcaggttacttaattcaatatgtttgacaatgtataggcataactcttagaaaaatagatcatgtaaacactgtcagattatttccccacactttctttttcttgccagcaccattataaaattatagagggcttccatatatcgggacctgcatcatgcaaaaatggttggggtggagtgggagtagaggttccaaacttctagtggctttatggagaaagcctcactgtccctattacctgaactcttacctctgaggtggttgg

SEQ ID NO: 172297 - DNA, 512 bp, Homo Sapiens
ccctggcccgacatgcttgagtgcgaccgtttcccccaggacaacgacctttgcatccccctcgctagcagcgaccacctcctgccagccaccgaggaagctccaaaggtatgtgaagcctgccaaaataaaaatgatgatgacaacgacataatggaaacgctttgtaaaaatgattttgcactgaaaataaaagtgaaggagataacctacatcaaccgagataccaaaatcatcctggagaccaagagcaagaccatttacaagctgaacggtgtgtccgaaagggacctgaagaaatcggtgctgtggctcaaagacagcttgcagtgcacctgtgaggagatgaacgacatcaacgcgccctatctggtcatgggacagaaacagggtggggagctggtgatcacctcggtgaagcggtggcagaaggcgcagagagagttcaagcgcatctcccgcacgcatccccaagctgcagtgctagtcccggcatcctgatggctcctaca

SEQ ID NO: 172298 - DNA, 574 bp, Homo Sapiens
cgaggatctcatggtagtagatataatcccttccgttatataagtactagtcaagaacttacactagaccaggcattcttgttaggtatccaggatgcctcaagctcagcactatggacacttcggaataaatcattctcggtagtgaggaaactgttctgtgcatgacaggacattcagcaccatccctggcctctacccactaaatgtcagcagcacccctcgaccctcgccagagttatgagaagcgaaaactgtctccagacttagccaaatatccccaggaaacaaaatcgacgtctggttacgaagcaactggactagatacacaaaaagggccctgcctactagttgcaatataggtattatgctccttaaggacagtcagtcctcaaaaactcagtgcattatctggcgtacaggttgtcaaacctcctcttctccatggctgggctactgctgacttctgaccaagtggaggaggttgcgggggttctgggagcatccagttccttactctcagttatgctgtctaagtctctcatcatatccattagcattctgatctttaaga

SEQ ID NO: 172299 - DNA, 277 bp, Homo Sapiens
atattcacaccagaatagaccaagattaactctcccaagcattcctgactctttggtctttatgatgtagagaaacatcaacaatgtatgaaacatgttatttctgccctttggcaggttgtatacatgacgctggtagatgagctcataatggggagggttgatagcactctgataaatgcaaaaaacattctcatttgtaacgtctggtttatttggtgtctgaacaaagtgctgagaagtaaaagtttttccgtctgggtactcggcgtgtgca

SEQ ID NO: 172300 - DNA, 1294 bp, Homo Sapiens
  misc_feature (1227)..(1227): n is a, c, g, or t
  misc_feature (1238)..(1238): n is a, c, g, or t
  misc_feature (1250)..(1250): n is a, c, g, or t
cgctttcccactcatgacatgcctgcttttattcaaatgggcagagataaaaacttctcgagtctccacactgtcttttgtgccactggaggtggagcgtacaaatttgagcaggattttctcacaataggtgatcttcagctttgcaaactggatgaactagattgcttgatcaaaggaatcttatacattgactcagtcggattcaatggacggtcacagtgctattactttgaaaaccctgctgattctgaaaagtgtcagaagttaccatttgatttgaaaaatccgtatcctctgcttctggtgaacattggctcaggggttagcatcttagcagtatattccaaagataattataaacgggtcacaggtactagtcttggaggaggaactttttttggtctctgctgtcttcttactggctgtaccacttttgaagaagctcttgaaatggcatctcgtggagatagcaccaaagtggataaactagtacgagatatttatggaggggactatgagaggtttggactgccaggctgggctgtggcttcaagctttggaaacatgatgagcaaggagaagcgagaggctgtcagtaaagaggacctggccagagcgactttgatcaccatcaccaacaacattggctcaatagcaagaatgtgtgcccttaatgaaaacattaaccaggtggtatttgttggaaatttcttgagaattaatacgatcgccatgcggcttttggcatatgctttggattattggtccaaggggcagttgaaagcacttttttcggaacacgagggttattttggagctgttggagcactccttgagctgttgaagatcccgtgatcattacctggggaggggttcctgaaaccttccacaatgggatctgtggactttcatttttttaagagacttactcaatttcatgactgtactacctgaaacaaagtgagaaaggacaggtgtatttttctaagtcatcaagataaatccttaagaattcagtctaaattagcaaccaggaaggaaaaatatattaaaaacaacaaaaaagtggcacatgtccaggcagtgtgaggatttgctgtatataagttgcctggctttgtatttttgaaatctctgcatcactcattgggaagtgcttctgaagagagctgctctgtgttcagttgactggttttgtgtcctgtttgaacttgctgaaatgtnaaggcaggctnactatggcgttntgaatccgaatcacaatttggtgcaatgatgggtcttgggcaat

SEQ ID NO: 172301 - DNA, 524 bp, Homo Sapiens
agacggcgagtataccagatcacactcttcgaggactcacggcatagcagaactccagatgatacagatgcaaccaagtcagtgctctctcggggactaactgcaacggagagactcaagatgattccctttttacccatgttttctctactattgctgcttattgttaaccctataaacgccaacaatcattatgacaagatcttggctcatagtcgtatcacgggctcgggaccaaggcccaaatgtctgtgcccttcaacagatttcgggcaccaaaaagaaatacttcagcacttgtaagagggggtataaaaagtccatctgtggacagaaaacgactgtgttatatgaatgttgccctggttatatgagaatggaaggaatgaaaggctgcccagcagttttgcccattgaccatgtttatggcactctgggcatcgtgggagccaccacaacgcagcgctattctgacgcctcaaaactgagggaggagatcgagggaaagggatccttcacttact

SEQ ID NO: 172302 - DNA, 682 bp, Homo Sapiens
gagaagttgaaagaacagattttacagggtgaacaaagttacagttctgcactagaaggaatgaagatggaaatctcccatctaactcaggagttacagtcagcgagatatcactatggcgttccaccaaaggttcttcctcagacatggaaaagcgactcagagcagagatgcaaaaggcagaagacaaagcagtagagcataaggagatttcggatcagctggagtcactcaaattagaaaatcgtcatctttctgaaatggggatgaaattggaatggggtttacatgagtgttccttgcctgtatctcccctgggttcaatagctaccagatttttggaagaggaggaactgaggtctcatcacattctagagcgctgggatgcccatattgaagaactaaaaagagagagtgaaaagacagtgagacaattcacagccttaaagtagcctcttaaaaaaatcacaatcttggaaataaaaataaacaccaaagagttactgtcatctgaagtagcagctctttaaaaacatgaagagataaaattataaaaatgatacatctaaagcagtggtgaagaaagctgaaaaactgatacttttgataggcatttctctgcactggtttgtttaaaggacttcttccagcaataagttgaaagaataaaccactttgctag

SEQ ID NO: 172303 - DNA, 264 bp, Homo Sapiens
cagatgttgaagctgtcaccagcagctctgctcttaggagaaaagcatttcattagtgttgtattacttgagtctaagggtagatcacagactgtgtggtctcaactgaaaggatcacccttggcatctgtgtgcctggattcttccagaatgtctacaatgctaatctctcacatagaggttcccagcttcttaagacctcacttgactggcatctaatcatatctcacatccctccccacacattggcatactgtacccctc

SEQ ID NO: 172304 - DNA, 1848 bp, Homo Sapiens
ggggcggctccacgtcggcaccagctgcggggcaagatggaggcgctgattttgtactatgacgacacctaccccagtgtcaaggagcaaaaggcctttgagaagaacattttcaacaagacccatcggactgacagtgaaattgccctcttggaaggcctgacagtggtatacaaaagcagtatagatctctatttctatgtgattggcagctcctatgaaaatgagctgatgcttatggctgttctgaactgtctcttcgactcattgagccagatgctgaggaaaaatgtagaaaagcgagcactgctggagaacatggaggggctgttcttggctgtggatgaaattgtagatggaggggtgatcctagagagtgatccccagcaggtggtacaccgggtggcattaaggggtgaagatgtcccccttacggagcagaccgtgtctcaggtgctgcagtcagccaaagaacagatcaagtggtcactccttcggtgaagacctcactgttcctggctcttcatcctcttcaaaaaatttgcatgtctgctgtgaattttcatctagttccccaatcgatgctctcagggtcatctcggggatcacagggatccttaaatctccattctgtttgtggttgccccctcaacctcccctacacccttcctattctttttcattcttcttgcagttctgggagtaaagctcccagcatatttagataatagggcaggggaagcaccctctttctttctagactggattatgctcacatgctcccttgccctgacatttttgtaaattctgtgccctttgctgtagctacacttcagattaaagtaggagaaagaatgtgctgagtgttttcctccctttgcctctacctggccctcatcccaacagcccagcaaggggagagagaaagagaattcttttctatagaacgagtgggggcggggatgggtagggatttatccaatctaagccctaaccccacttagtgacctcagtgttttcttccattccttcttactgccctgtcctctgccttggaagaggctttgggaatagttcatagggaagggacaacatggaagaaacagcgatttaaattgtattgaacagggcatataaaatgcattctgtaccctgatctggcatatagcttcaaaactgcagtggcgagtgtccatctcttagttagctaccttaactgtccacccttactacctgtgggatcgttgcctggtttgtcttctctgtgtcctggagcaaagccagttcctaaaactaaaactccattctagtcttgggaagaaaagtttctactcagaactggggaaggagtggaacttatgacttgggcctctaggctgtctctgtcccctcagctccccgacatgcatttactctctgccgtgggtctgcagtcgctgcaacctaccctctctctgcctcagccttacacccaagcagtaggtctgtgctctccctgtctctaggtcgctgagagaggtgcttttcttcataaaacctttggggtttggatttccccaggaagatggagaatggaatactcactcttgggtctaatctttccccttgacccagaacttcctccccacaaaaatgcctttaaaaaccttcctgagacttaagcattctgccccacttactaactgccagttctccagcactgaggtggggcagataacggggcatatttaagggggcatctttgtgtaaaagatgcatggagtcaggagaaaaccaccttcataaactgctctgtgcaaagaagaataaaacatttttttcagtcgacgcggccgcgaatttagtagt

SEQ ID NO: 172305 - DNA, 855 bp, Homo Sapiens
  misc_feature (749)..(749): n is a, c, g, or t
gggggcgcggctccacgtcggcaccagctgcggggcaagatggaggcgctgattttggaaccttccctgtatactgtcaaagccatcctgattctggacaatgatggagatcgactttttgccaagtactatgacgacacctaccccagtgtcaaggagcaaaaggcctttgagaagaacattttcaacaagacccatcggactgacagtgaaattgccctcttggaaggcctgacagtggtatacaaaagcagtatagatctctatttctatgtgattggcagctcctatgaaaatgagctgatgcttatggctgttctgaactgtctcttcgactcattgagccagatgctgaggaaaaatgtagaaaagcgagcactgctggagaacatggaggggctgttcttggctgtggatgaaattgtagatggaggggtgatcctagagagtgatccccagcaggtggtacaccgggtggcattaaggggtgaagatgtcccccttacggagcagaccgtgtctcaggtgctgcagtcagccaaagaacagatcaagtggtcactccttcggtgaagacctcactgttcctggctcttcatcctcttcaaaaaatttgcatgtctgctgtgaattttcatctagttccccaatcgatgctctcagggtcatctcgggggatcacagggatccttaaaatctccattctggttgtggttgcccccctcaacctcccctacaccctttcctanttctttttcattcctcctgccagttctggggagtaaagctcccagcatattttagataataagggcaggggaaagccaccctccttttctttccagactgggatta

SEQ ID NO: 172306 - DNA, 502 bp, Homo Sapiens
ttacatcgagctcgctccctgtacggcttgaatgtttgttaaagcaatggtatatgttgtataggatagtgtattgggatcaacaggtttttggggttttttttcagcccattccaaaaagggagctggtggggtgcaagtggcagggcatccctgtgcggatgttcacgtactccccgattcccttgagcttggctgcttggtggaaataggcagcacagatgcacttcctgacgatgtcccagtcagtgccacacgaggccaggctcatccgctgctgcaccatgatgtccttgagttgagctcgcacctcccggacctagggcaggagacggaggcaccaggagggagccctcctttcctctcgaccctcccctcatcccaacatcctgctcatccaccactctaccttccgcatggccttagcatggatgaaatgatcgttacaccagatggtggagtaattattgttcttccactgcaggcaaacattcaaccgtca

SEQ ID NO: 172307 - DNA, 607 bp, Homo Sapiens
  misc_feature (536)..(549): n is a, c, g, or t
ggtaattgttgaaccaccagctttctgtgttgcggggagagcaccctgatttgtaactgtttgccatttattgtggctggtcaatatttccatcacagctgatgtcaagctgccaactgggacatcactgaaagcagcattgggaagagatgtacacagcctgggctcctgagctagtgcaagtcactgggaactggctccccaataccactaacttcatcatccaattgagtgcataagatacacagaaggaacatttccagcagaaaagaattgaacagctatagtatggcagagggacgaaaatcactgaaacaaatactgaccatgcccttttgagtactattcaggagagaggaaggcttgacaatctgaactttaaatatttcgaaatccaaagactacatccccagccctgtaaaataaattcataaggttattttagctcagtgccattaaacaacaacttatctaatgccttattttccatccttttccagtcaaacaagcttctgctcatggcctggctttcttcnnnnnnnnnnnnnnaataatacttaaagtccaagggtacttgtgcccaaggtgcgggttggatacatcggtg

SEQ ID NO: 172308 - DNA, 657 bp, Homo Sapiens
  misc_feature (300)..(325): n is a, c, g, or t
ggtcgtttaactgggactatcaaatactacagtgtatgctggcatcgcaggaattttagctgttggagtgaggtgcagcctgtccaggtgaaggatgttttggctaatgcttatgtcagagcgcgtggaggtgggtctgggttgtaaaatctcttaacgatggactaaacatattttagttgaaaggcccaccaaggctcccaaataaaaacagatccgtaatcctgtttgtaggcatgggatacaggtgattttgccctcagtcttgttttaaaacactagcttgtcagaagagaacannnnnnnnnnnnnnnnnnnnnnnnnngtacattgagaggtttattcccccctcccttcacccccaaatcactagagtttaaggaagcatagctgattgttccagatttatctgatcaggtttctgggatgtcctatggggcatggcatgctgtgaaatgtagccacacagctgtgtcgtctctcgagcctccgcaaccaccatgcccagaaatgagcctgagagccatctcgcctccagtctgaacagcgtgtgttagtttcccctctggttctcctcagacactccgcactctgtgggacacacatgctcaacagagcagccgtaacagctatcaccgtagggaccctgacccatga

SEQ ID NO: 172309 - DNA, 822 bp, Homo Sapiens
  misc_feature (203)..(225): n is a, c, g, or t
acattagctagtggtcagggaggcctttccgcggtgggatgttgagctgaggccggaggagaagtagaagtcgctctccttccacacaggctgctctgggggaagagctggtgcgtttaaggaacaggccagcactggcattcgcaagcagtggggaaggggagagatgccgaggtggtcagtatcctgactttcagaggccnnnnnnnnnnnnnnnnnnnnnnngctagattgatattaaaaactcatgtggaggaactcaaggaatgtttagaagaccaaaagtccccaatgacaggaacaaaagcaaccaatttttaactttctcttctcattcctgttttcattgatttcccacatgtagtccttttgctcaggaagtctttggggaaattaaggatctttgaagctctgaaataggtgatcaggttagtggtgtctgtcagctgtctaagaggttggaaaatgaactactcaagacagtcacgaaaatactgaaagcttgatttttctttccatatttgaattaattttttctgtttgactggaaagggtttttgtataactaaaaccctccgcgcataaaggagatttaaaaggagcacatgatttagtgggtgggccctgaaactagagatgggaattggggggtgaatttgtccattatctgggattttaatccagacattctcctgctaccaaacccttttgggaaagtcctttccgaaaactttttcccccctttttacaaagaaaagggctgggtttagattatttgcccaaagcccccttttcaggggcttgaaattccccccaggaccg

SEQ ID NO: 172310 - DNA, 969 bp, Homo Sapiens
  misc_feature (41)..(67): n is a, c, g, or t
ttaagtgctatgaagaaaataaactagggtgatgattttannnnnnnnnnnnnnnnnnnnnnnnnnnacattagctagtggtcagggaggcctttccgcggtgggatgttgagctgaggccggaggagaagtagcagtcgctggcagagcacacaggctgctctgggggatgagctggtgcgtttaaggaacaggccagcactggcattcgcaagcagtggggaaggggagagatgccgaggtggtcagtatcctgactttcagaggcctttttttgtttgctttaatttttgctagattgatattaaaaactcatgtggaggaactcaaggaatgtttagaagaccaaaagtccccaatgacaggaacaaaagcaaccaatttttaactttctcttctcattcctgttttcattgatttcccacatgtagtccttttgctcaggaagtctttggggaaattaaggatctttgaagctctgaaataggtgatcaggttagtggtgtctgtcagctgtctaagaggttggaaaatggactactcaagatagtcacgaaaatactgaaagtttgatttttctttccatatttgagttaattctttctgtttgactggaaggggattttgtataactaaaacctcatcggctgaagggagatttaaaggagcacctgatttagtgcgtgggccatgaaactaaacatgggatttgggggcgaatatggcaatcatctggatttgtaatccagaaattttctgcctaacaagccctttggggtaaatcaactgcaggaataactttttccctcccttttttacacaacgaagagggccctgggccttaactttattttgcgccaaaaggccccccgtttcccggggcccctggaaattctccacccagagttacgaatttttcacctcggtaaggtggctccttcaattgaaccacgccttttcccacggacc

SEQ ID NO: 172311 - DNA, 609 bp, Homo Sapiens
acgtgttagcagtaataagggcaggccaagcgtcttagctcacgtagagctctggcgtggttggcgggagggtgggggttctccatctctagaagctctacactttaacattttaagtcatattacatttatatagtattttcataatttatattgcttaaaattatgatttgcatgctaagatgcaaacttacgtgatatcttctttagaacataatgctattaagagcacatgctttataaaataaaactggtctcattcatatcaggtgcagaaagccagtcctgaaagcatagactatcccttattctggctgttattaaggaaaaaattcatttaaaaaatacagtaaagattgaaaccaagtttactgtttcttgaacagaataggaagaaaatattttaaatggctgagctggtcattagactattactcatttatcttaaaggcagaaacttgtcaacccaacaacgtgaaacagagaagcatgatttgcttaagcaggcgacattagagttaggcctctccactgaagcttcccgaccgtcagcacgtggcagacaggacgcgcccatcattccgcaagggagaaccggagaggccggga

SEQ ID NO: 172312 - DNA, 1387 bp, Homo Sapiens
  misc_feature (28)..(28): n is a, c, g, or t
  misc_feature (40)..(40): n is a, c, g, or t
  misc_feature (290)..(290): n is a, c, g, or t
  misc_feature (377)..(377): n is a, c, g, or t
  misc_feature (652)..(652): n is a, c, g, or t
  misc_feature (654)..(654): n is a, c, g, or t
  misc_feature (684)..(684): n is a, c, g, or t
  misc_feature (690)..(690): n is a, c, g, or t
  misc_feature (1357)..(1358): n is a, c, g, or t
  misc_feature (1377)..(1377): n is a, c, g, or t
aagcatctggcaaggtttcgggagccancgggttggccangttatgctggaatatttataagcaccggaggtttatccccatgtcgtagaaaatgaaactgaagctcagagagatttgcactctctgcccttttgtacaactcatttttccccagtatgtggaattgagggagcttcacgcttctagctgtcatgattccaagattctacgacatgtgggagaggatcctaaggttcggggaaccgcggaggtttcggggttctagaaatccgaggttctaagcctaggngctccaataaacccagtgagagccagcccagggtttccggtctgtacccgctggtgcaagcccagagacaagcaggcgccacccatngagcccctcggcggccccctcccgggtcccacctcgcaggccagctggagggcgcgatcctggcgtcccccgacggcctggggccccaatccagaggcctgggtgggaggggaccaagggtgtagtaaggaagcgccttttgctggagggcaacggaccggggcggggagtcgggagaccagagtgggaggaaggcggggagtccaggttccgccccggagccgacttcctcctggtcggcggctgcagcggggtgagcggcggcagcggccggngngatcctggagccatggggcgcgcgcgcgancgccantcctggatgcgctggagaacctgaccgccgaggagctcaagaagttcaagctgaagctgctgtcggtgccgctgcgcgagggctacgggcgcatcccgcggggcgcgctgctgtccatggacgccttggacctcaccgacaagctggtcagcttctacctggagacctacggcgccgagctcaccgctaacgtgctgcgcgacatgggcctgcaggagatggccgggcagctgcaggcggccacgcaccagggctctggagccgcgccagctgggatccaggcccctcctcagtcggcagccaagccaggcctgcactttatagaccagcaccggcgctgcgcttatcgcgagggtcacaaacgttgagtggctgctggatgctctgtacgggaaggtcctgacggatgagcagtaccaggcagtgcgggccgagcccaccaacccaagcaagatgcggaagctcttcagtttcacaccagcctggaactggacctgcaaggacttgctcctccaggccctaagggagtcccagtcctacctggtggaggacctggagcggagctgaggctccttcccagcaacactccggtcagcccctggcaatcccaccaaatcatcctgaatctgatctttttatacacaatatacgaaaagccagcttaacnnagaaagccgcatggagganaaattcattt

SEQ ID NO: 172313 - DNA, 327 bp, Homo Sapiens
tgtttctcctgtgtcctcacagggtcaacccatgctgcctggggagagggacagcctgggctcccagccactgaagagaggatccaggaggggagcccctacccaggaattgatgaggctacggtaggaacccagcctgcctggccaggcactgtgctcttacatgacagaccatgaaaccagcccatggcctgaacgttgtgtcgctgtgcggtcacttttctaggtttatgtagaggaagaattcctggaattttatgaggactatcctccctactgaaaaaagtgtggctgtctgtcctgggatgggctgtgtcatgcacagag

SEQ ID NO: 172314 - DNA, 191 bp, Homo Sapiens
ggcagcgagctcctgagtggagggagggccagtgactgaggtggctctgaagaaattggcatgttcttttgtttaacgtccccagacacctccatgatcagaatgtccctcctctagcagcgtctacaggggactcttagactcttctttgcttaactattctttcaaaaaggtagttgaaaatggccgta

SEQ ID NO: 172315 - DNA, 420 bp, Homo Sapiens
  misc_feature (405)..(405): n is a, c, g, or t
attcggaacgagggggagcggtgatattcaagagatgctccttcgccgagattctggcacatccggggatggattgagaatcatgaaggcatccgataggccggttttgacaggatgctgggaggagctgatttccgggacagacatagggatctctttataggcaaagacaatgcggccgtcatggtgcagagctgcctggaaggtgaaactgcccttgtcttcccagccttggagataaacgtggtcccactgaaccacaaagactgtcccattgttcaaagtaaacaactgtgggagttgttcggagtagccaggggttgaagttgggccatcaggggcgccacatactgagttagctgttgagcttccgatgggttcacgtcccccttgaaggtggaagcntccatttgttatggg

SEQ ID NO: 172316 - DNA, 604 bp, Homo Sapiens
agaccccattagcacctcattagcccacaagccagccaggggccccaggaagatggggcaccccccagcacgctccagattgagagcaaggtagaggaaggagtcccagcctctgggcagaccagaggcccagagggagagagtagcagaaggcttttgatttttctcttgcctgaggcgtgaatcgtgacaaaaccttggtgggcactgctaccttaggttcttccacacctcaatctacctgcctagagtagcagctcccagacccagttctgggaactgaaggttaacccttcacctgctgtccacttcttaacacccaggcccccagagccagctgggcctgtccagcagccacctgtgggtatttatgagtttcatatgaagtactgtgccccttcccttcctcatcccgaccctgcccgagcttcctgaaggtcctcactgtttgcatatcgctcaggccacctccaaaccccacctaggttttataatgtatattatatatttttttgtgtatttttaaaatccagctgtgatgggttatatcataaatgcagcttggggttggagcagggccctcaaaggcccagctcctgctcaa

SEQ ID NO: 172317 - DNA, 848 bp, Homo Sapiens
  misc_feature (787)..(787): n is a, c, g, or t
ggggcgcgccgggcgggaatgtaagatggcggagtagcaacgcaaagcgcttggtattgagtctgtggccgacttcggttccggtctctgcagcagccgtgatcgcttagtggagtgcttagggtagttggccaggatgccgaatatcaaaatcttcagcggcagctcccaccaggacttatctcagaaaattgctgaccgcctgggcctggagctaggcaaggtggtgactaagaaattcagcaaccaggagacctgtgtggaaattggtgaaagtgtacgtggagaggatgtctacattgttcagagtggttgtggcgaaatcaatgacaatttaatggagcttttgatcatgattaatgcctgcaagattgcttcagccagccgggttactgcagtcatcccatgcttcccttatgcccggcaggataagaaagataagagccgggcgccaatctcagccaagcttgttgcaaatatgctatctgtagcaggtgcagatcatattatcaccatggacctacatgcttctcaaattcagggcttttttgatatcccagtagacaatttgtatgcagagccggctgtcctaaagtggataagggagaatatctctgagtggaggaactgcactattgtctcacctgatgctggtggagctaagagagtgacctccattgcagacaggctgaatgtggactttgccttgattcacaaagaacggaagaaggccaatgaagtggaccgcatggtgcttgtgggaaatgtgaaggatcgggtggccatncttgtggatgacatggctgacacttgtggcacaatctggcatgcactgacaacttttttag

SEQ ID NO: 172318 - DNA, 535 bp, Homo Sapiens
accaaaaaaagtgtgttctttaagagtagaatatttgctttttacaatatagtcctcagaatgacccagttccatttattattctagaatgtggtgcaaactcaatgacattggaagagactctttttgttgggcagtgtaggaacgagaaaagaaaataaaaatgccatgagtatattatttaaggaacttttgttttatccaaaagtagtcatgattgctgtagcataggctgtgaaaaatgagagagtgcaaatctctctcatttaaatgtccacagtggctttagtctcccaggtacaagggccagatggcagagaacagcttaaactgagccttcagcctcattaataggaggaagtcttggtacttttggtgactaagaaactggattatttaaaaccttaattatctcctttactcctggtttacagaaggcaataaatatacaactcctttagatccctctaactcctgctgaattttctttctttttttctaagtctgcatcctatctcttgattccattgcctga

SEQ ID NO: 172319 - DNA, 849 bp, Homo Sapiens
atgtaggctatccaaaaggagaactctattaaacaacacaaattactgacgctttcatttctactactcagatgatgccagctatatatttaatttataatagcaatagataatgatttcaatttgaagcaagataaaggacaaaaacagtgggaccccgactgatttaccagtcagtagttcccaactctcaaacacaacatcccctatttgtactgattcagtttgaagcagctgttctctatttttaaatgaaatgaatgttataacctattagacacatatcgagacataccctacaatagatgccctaaatgtaacataaaggagacctaagaagtaattttaataaaataatatgtatttctgtatgtaactatttcaccacaactacactagatgatattatgaatagattttgaacccagggaataataacatccacacaggcaccagcacaggcattggcacaatccataaagctggatggtcctggaagcccttcaaccccaaggtaccagtgattaactctttcattgctaactgcaggaaatccgaagggccctatacatggacacactaggaggtagggaagctcagagcagctggtatttaccaagctgttctctaagcagttcagtattttaataccagtctttacttctacctatacataaaattaccatgaattcaacagctacaaaggcaaagcagcacaggtgtgttgtaccagtgcctcaaagagaaggtagcgatgccactaatgacgtaattttcccaagtcagccatgtagaggtaaataaaaacaaacccatagggaagggtgaatacgctcgacagtagaaaaa

SEQ ID NO: 172320 - DNA, 889 bp, Homo Sapiens
gatcccctggctggtcccggaatcctgaaaaggatggacagatgctttccccaagctctctgtacaccatctggttacagaagttgttctggactggagaccctcatctcattaaacaagtcccaggctcttcaccggagtggcttcatgcctatgatgtctgcatgaagtactttgatcgtctccacccaggtgacctcatcactgtggtagatgcagttacattttctccaaaagctgtgaccaagctgtctgtggaagcccgtaaagagatgactagaaaggctattaagacagtcaaacattttattgagaagccaaggaaaagaaactcagaagacgaagctcaagaagctaaggattctaaagttacctatgcagatactttgaatcatctggagaaatcacttgcccacctggaaaccctgagccacagcttcatcctttctctgaagaatagtgagcaggaaacactgcaaaaatacagtcacctctatgatctgtcccgatcagaaaaagagaaacttcatgatgaagctgtggctatttgtttagatggtcagcctctagcaatgattcagcagctgctagaggtggcagttggccctcttgacatctcacccaaggatatagtgcagagtgcaatcatgaaaataatttctgcattgagtggtggcagtgctgaccttggtgggccaagggacccactgaaggtcctggaaggtgttgttgcagcagtccacgccagtgtggacaagggtgaggagctggtttcacctgaggacctgctggagtggctgcggcctttctgtgctgatgacgcctgccggtcggccccgcattcacgtgctgcagattttggacccatccatggtaccgagctgatatt

SEQ ID NO: 172321 - DNA, 271 bp, Homo Sapiens
ttaaaaaacatgaatgatgatgacagaaccactatcacacataaacaaaaatagagcaaaccaagcgtgtccacatctccatgaattcagtgatttgaaataaatgttgttatgttaaacattatgagcgaatctaaaggttcaaccaaaaaacttacatatttttgagtattttttaaacttttaatagtttatctctgatcaaggatggagaaaggaccaaacacaaatactgtcgctgaattgatcatcacagggcctgctcgatcag

SEQ ID NO: 172322 - DNA, 668 bp, Homo Sapiens
gtggagctggagctcccagggataccggggtccccgccttccccgaaggcagcaagtgcccatctttccccgaggcgtctcatcaccgaccgtgcccgctgcaagtacagtcacaaggacatagtacctaaggggttgcgccaagctgctggggaagaagaaataccgccaggaccttgacttgtgcctccaggctactgcacaaacttccttgctgtgcgccagcaactctggtgcttgtgcttcccgtgaggacccaggaccccttcctgccatacccaccaaggtcctgcccacagggccaggctgcctctagcgccactactcgagaccctgcccagagggtggtgctggtgttgcgggaacgctggcatttctgccgggacggccgggtgctgctgggctcgagggccctgagggagcggcacctaggcctgatgggctaccagctcctgccgctacccttcgaggaactggagtcccagagaggcctgccccagctcaagagctacctgaggcagaagctccaggccctgggcctgcgctgggggcctgaagggggctgaggggatgatgtggggttcaggatggcccccccatggggggtggatgatttgcactttggttccctgtgttttgatttctcattaaagttcctttccttcccc

SEQ ID NO: 172323 - DNA, 514 bp, Homo Sapiens
ccacagactacctcccttactatctcctgttctacaatatgcgctgcaggtaggacagagcaagagacacacaaaggtcagtttgtactacttacaggccgtccagcacaacaactccagaacaaggacttgggaatctgcctaccgggctgtgcatcagatacagtcctcagacagctgtaccgcccctctgtgtcctggctgttatgatagcattgcaatgaggaaagtatctgcctatgtgtgcattgatgggggaaactagagaagtctgtatgtaaagcacatggagcaggccaggcatccattgaagactactgcaggtgtgtgcacttactctcatcattgtaatgacacttgatgctataagactataaattagagagatttatagttacaagaggcactgaaaaaaaatcactttaggtatgtctaaaatatcgttgtaaaaagtgtaaaaataaacaaacccagtcaattaaaaatttagactgttattgaggtaatccgtgag

SEQ ID NO: 172324 - DNA, 986 bp, Homo Sapiens
  misc_feature (940)..(940): n is a, c, g, or t
ccaatgggggggctcccaccgtgggaagtcttcccccgggtttcgggaaaagggccccccccgcgcaaggttggccaatggaaggccccccgccccagggaagcccttggcagggctggggggtcttgcgttaggggagggggttccgggaacaccaatgcgcccactgtccggtggcacatcagcttgcgaaaaggagccctcgggcctcccagcctggtcccgtgaaatacacctcaatgtcctctttctgcaccttgtcacacagtaggaagatctcatccccaccgaggcagctgccagagtttcggttcactcggcagatcttgagctcggcagtgttgggggcacgattgtcaaagatgggatgagaaaggacaggcggcaggcggaggggcctgcctgatgggtcccgcactgtcacctggaagcagagccgcacagcattcaggtcgtagtccccacgctgctcttctataggaacttggaaggggttgttgttggtctggatgcgctgactgatagcctgctccaggtcccgcttcttcacacactggattcccaggttctggaaactgtggatgcagcggtccgggcagagctcagcctcatagaagccatcccggcagtcctttcctacaagctcgtgggggtgaggccggtgaggagggtccttggtgaccagggagatgcgcactgtccctggtcctgtgtagccattgatcttgatggtggggtgggtcttggtggtatctgtgctcctctcgcctgggatgctgcccgcggagcgcccctcgcacttgtagcggaagcgcatgccccgctgcttgggctgctcaatgatctccacataggggccagaggcctgggctggctctgccgggaagatgagggggaacagttcgtccatggccggggtcccgggggcggggccggggtngcagctgggcccgcggcgtgcactacagacgagccattcgccagag

SEQ ID NO: 172325 - DNA, 1031 bp, Homo Sapiens
ggggcattaactggttggtagcttctatcctgggggctgagcgactgcgggccagctcttcccctactccctctcggctccttgtggcccaaaggcctaaccggggtccggcggtctggcctagggatcttccccgttgcccctttggggcgggatggctgcggaagaagaagacgaggtggagtgggtagtggagagcatcgcggggttcctgcgaggcccagactggtccatccccatcttggactttgtggaacagaaatgtgaagtttttgatgatgaagaagaaagcaaattgacctatacagagattcatcaggaatacaaagaactagttgaaaagctgttagaaggttacctcaaagaaattggaattaatgaagatcaatttcaagaagcatgcacttctcctcttgcaaagacccatacatcacaggccattttgcaacctgtgttggcagcagaagattttactatctttaaagcaatgatggtccagaaaaacattgaaatgcagctgcaagccattcgaataattcaagagagaaatggtgtattacctgactgcttaaccgatggctctgatgtggtcagtgaccttgaacacgaagagatgaaaatcctgagggaagttcttagaaaatcaaaagaggaatatgaccaggaagaagaaaggaaggaaaaaacagttatcagaggctaaaacagaagagcccacagtgcattccagtgaagctgcaataatgaataatttcccaaggggatggtgaacattttgcacacccaccctcagaagttaaaatgcattttgctaatcagtcaatagaacctttgggaagaaaaagtggaaaggtctgaaacttcctccctcccacaataaggcctgaagattcctggcttagagcatgcgagcattgaaggaccaatagcaaacttatcagtacttggaacagaagaacttcggcaacgagaacactatctcaagcagaagagagataagttgatgtccatgagaaaggatacgaggagta

SEQ ID NO: 172326 - DNA, 868 bp, Homo Sapiens
attggtttggctggggacagccggagaaagaagcccaagaaaggcccaagcagtcaccgcctgcttcgcactgagcctcccgactcagactctgagtccagctccgaagaggaagaggaattcggtgtggttggaaatcgctctcgctttgccaagggagactatttacgatgctgcaagatctgttatccgctctgtggttttgtcatccttgctgcctgtgttgtggcctgtgttggcttggtgtggatgcaggttgctctcaaggaggatctggatgccctcaaggaaaaatttcgaacaatggaatctaatcagaaaagctcattccaagaaatccccaaacttaatgaagaactactcagcaagcaagaaacaacttgagaagattgaatctggagagatgggtttgaacaaagtctggataaacatcacagaaatgaataagcagatttctctgttgacttctgcagtaaaccacctcaaagccaatgttaagtcagctgcagacttgattagcctgcctaccactgtagagggacttcagaagagtgtagcttccatgggcaatactttaaacagcgtccatcttgctgtggaagcactacagaaaactgtggatgaacacaagaaaacgatggaattactgcagagtgatatgaatcagcacttcttgaaggagactcctggaagcaaccagatcatcccgtcaccttcagccacatcagaacttgacaataaaaacccacagtgagaatttgaaacagatgggtgatagatctgccactctgaaaagacagtctttggatcaagtcaccaacagaacagatacagtaaaaatccaaagcataaagaaagaagatagttc

SEQ ID NO: 172327 - DNA, 362 bp, Homo Sapiens
ttctaagcccaggactgcaaggggtgggggtctgagcttactcccacccccgccaggaggcaaagtcactattcccccaccatcctcctcagttgccatcagcaatcatgtcacctcaccacccattccgaaatctaatcatggaggcagtgatgcagatatccttttagatttggattctcctgctcctgtcacgacaccagcaccaactccagtttctgtaagcaatgacttgtggggagacttcagcactgcctccagctctgttccaaaccaggcaccacagccatccaactgggtccagttctgaatgcattgcgacattaaggacagacttgaggaataaatatgacgtgagtatc

SEQ ID NO: 172328 - DNA, 310 bp, Homo Sapiens
aagacaaggaggaggacagaagttccggagatctaagaatctaggacctcattcacgggatttatgaaagctgttcaatacaaaagatctccatgctgtgggacccctaaacagttatataggcagtcacaaaattataaaaagaataataacagggcagaaccgaagctcaacaaaaaaccgtttaccacggccctgtctcaagattccatgttatatcacctcacatagcatatagctagtcaagccgctgcaggaagtagcctggccaacaacccagctgacggtgactccaggcagggagacggga

SEQ ID NO: 172329 - DNA, 327 bp, Homo Sapiens
actactccaacggtatttaacctctgctatgccattagattagtaaagagaaatctaaaacgatcagcatctccagcccaatgagccatgtctcaatttttgaaaactcgagcggaattccacattaaaaagaaaaataacagggcttcaacaaatcaacagagaaaggagcaataatgtttaccaatacttatcattgccataggaactcacacaaataacatgtatcagatgtattaataaacattaatacgtgtgattaatgaacacaaaataaggtatgacatccattacaagcaaataatgcaaacattttaaaaggcagca

SEQ ID NO: 172330 - DNA, 140 bp, Homo Sapiens
ggctcgaagataatgggtacgcagaaagtcactgtaagtgtaatatgaagatacacagcccttttaagcatttcattatattacatctagcttacttctaacgtgatttattcagatgtgactgaagaaagtctaaaggg

SEQ ID NO: 172331 - DNA, 850 bp, Homo Sapiens
gggacatcccggtactttggggtccttcagaggtcactgtatgtggcctgcactgccctggccttgcagctggtgatgcggtactgggagcccatacccaaaggccctgtgttgtgggaggctcgggctgagccatgggccacctgggtgccgctcctctgctttgtgctccatgtcatctcctggctcctcatctttagcatccttctcgtctttgactatgctgagctcatgggcctcaaacaggtatactaccatgtgctggggctgggcgagcctctggccctgaagtctccccgggctctcagactcttctcccacctgcgccacccagtgtgtgtggagctgccgacagtgctgtgggtggtgcctaccctgggcacggaccgtctcctccttgctttcctccttaccctctacctgggccgggctcacgggcttgatcagcaagacctccgctacctccgggcccagctacaaagaaaactccacctgctctctcggccccaggatggagaggcagagtgaggagctccactctggttacaagccctgttcttcctctcccactgaaatctaaatccttaacatccaggcccctggcttgcttcatgccagaagcccccaaatccatggactgaaaggaaatgccccttctactacttgaaaactttattcctctggggtccagctcccttaccctaaatttctgaggtttcaggccactggaacttccagggtccaacttcttccccattcaaggaaaaaatggggggaatgggaaagccttctggtcccctttccctggttagaagaaatgaaaattcttcccccttaaaaagcctccttg

SEQ ID NO: 172332 - DNA, 568 bp, Homo Sapiens
cattaccaggtttctggctaccctggttcacatggaatcacagccatggctggcagcatctatccaggtcaggcatctcttttggaccaaacagattcatggaatcatagacctcaggagatagcaatgtggcagcccaatgtggaggactctacagtattggacctgcgagggattgggcaagtgttgccaacccatctgatggaagagcgtctaatccgacagcaacaggaaatggaagaagatcagcgctggctggaaaaagaggaaagatttctgaaacctgatgtgagactctctcgaggcagtattgacagggaggatggaagtcttcagggtccgagttggaaaccatacatatatagtcagcctgtgggtaaaccatgatcctgcagctccaccaaatgaaaccgcctcgccctggagctcccggtcatctgggaaggccttgccagcctcagcagccctgctgacagctacaacgagggtgtcaagcttcagccccaggaaatcagcccccctcctactgccaacctggaccggtcgaaatgataaggtgtacgagaat

SEQ ID NO: 172333 - DNA, 608 bp, Homo Sapiens
  misc_feature (62)..(92): n is a, c, g, or t
  misc_feature (151)..(165): n is a, c, g, or t
gccacaatgtgccccgccctccccattcccccgggggccaaaggggggggttcccccaaagnnnnnnnnnnnnnnnnnnnnnnnnnnnnnnntcttacttctatagacaataaaacattggaaactgaagttaaaaacacagtagctcctnnnnnnnnnnnnnnngtataaatctaacaagacaaaacaggatctgtatgctaaaaagactatgtatgtggagagacggcacacagcacgctcatagactggaagactgaacataagatgccagtctcagaaggatctgtgaaattaacaaaattccaaaacattgcagtaggactctttttagatttagaaaagatgattttaaaatgtatacagaatggtgaaggagctagctaaaacagtaaaaaggatagataaaacaatgttttaaaaaagaacaagaaagttagatgaatcacattacacagttttaacagactttaaagccacaaaaatcaagactgtcgtattggcgaagaacagacgggtgggtcagtgatcagagagtctagaaacagacccacataaatagggccatttgatcttgacagcagagcaacaaagcatggatgagtgga

SEQ ID NO: 172334 - DNA, 142 bp, Homo Sapiens
caatggaagagatagaaaacaaacaaacaaacaaaatctacgcttttacgccaattgattttcaacaaaggtaccaagaatattcactggggaagggacagtccctttgataaaaggtcctgggcgaaagtcaacgatgtgt

SEQ ID NO: 172335 - DNA, 189 bp, Homo Sapiens
  misc_feature (98)..(98): n is a, c, g, or t
  misc_feature (157)..(157): n is a, c, g, or t
  misc_feature (174)..(174): n is a, c, g, or t
taattgtgggtataagatggtttcaagttgactggcttcatttttggaaagatttcaggggccagggctcaacccaaacactcctggactggtgtganttaatgctaagaaggctggtactgggccccaagtctatcctggctccctggagggtaangaacctgttgacttganaagcttgaggaagtt

SEQ ID NO: 172336 - DNA, 628 bp, Homo Sapiens
tcctctaatcactgtcagctccgctggtactggccgtcgtatacatcgtcagatactgtgtagaatcccgtggacgatcacataaacctcagccatttctcctgagcagagagggcaagaaataagaatgaaggtgcattttagttgagggtgcttttcatacccactcagaacttcatctgcctgtggatattctaaacaacaacatctatcttgtgatcaggcccgaggctcatgacagcacagttaaggttacagtccctctctggtgttttagaatggcgactgcttgctcatgagtaacaccttccagggtctcgccattaacagctaaaatctgatcccctcgttttaatcggccgtcatctgcagctgctcctctgtgtcttctggatggtgttcagcagtgggcgaaccaaggtggtagcctgtagacatgttttcaagctgagctgctatggcgcttatattggtatctgctacaacctggggaaaaagtgaaaaaaaggtatttcattataaagaaggggagaattagagaaaccatgctgtatccaagggtcagttctcaatcctaatcttattcaatttatctagaccatttgacacaaggactattctctcaaac

SEQ ID NO: 172337 - DNA, 738 bp, Homo Sapiens
  misc_feature (79)..(306): n is a, c, g, or t
cctttgagcgtccctacctcacctcccgagtagctgggatacaggtgcgtgccaccatgcctggctaattttgtatgtnnnnnnnnnnnnnnnnnnnnnnnnnnnnnnnnnnnnnnnnnnnnnnnnnnnnnnnnnnnnnnnnnnnnnnnnnnnnnnnnnnnnnnnnnnnnnnnnnnnnnnnnnnnnnnnnnnnnnnnnnnnnnnnnnnnnnnnnnnnnnnnnnnnnnnnnnnnnnnnnnnnnnnnnnnnnnnnnnnnnnnnnnnnnnnnnnnnnnnnnnnnnnnnnnnnnnnnnnnnnnnnnnnnnatgagtgacggtgcccagccattcgtgacatgtttatacaaatataactttagcaaatatttagcataactatcaaaattacaaatcatattaaatttgtataaatgtatgcaatttttggaacacgcatatcaacaacatacccataaatataactgagaggagatctaatgtcacctcacttgacagtgccctcccatgcagtatcgccacatttgacaatgcctgcccatttaatctaccaaataaatcgaatcacttaatacctctacaagatgagagatacattctttagactccccaagggatgcagctgaaaaaaatcccaaagttagttttaagccaaaaagacttgatttaggattttgacactggagaaacccatcaaagatgtcaagtttgaaaacacttgatcaaaacagaatccccggt

SEQ ID NO: 172338 - DNA, 993 bp, Homo Sapiens
cggacctgcagagcagcagcacccttccggtgtggaggctaggtagctggtgcgctgctcacggccattcactgcccatgctgagcgcctctcacacaggtaatgcccagcttttctgctgctaacacatttggccagttgttgcagttgctcatcatcttgggaaaggtgttgtgacttttcagagcccagattcctgtgtctattaaaacttgaagggaggggtgaatagtgtttctctcttcttcccaaaatgaccttagctgtcctaggatagttagtaaaagactttttagcattttgacctagggccttggctttcactaaaagtggggacctcagtatcccagattgtaatttgccaagtgttagatttgagtctctcatgtggatgcattagtcaggtggttactccttgcttcaaggtacttaccttatttcattgaagacaccgcatttgtgaactcttgcttcctggcctagaaccattcagcctaccctgtatgtgccataaactccacaattcacaccaaaaggtctgtacttagagctaattcgcatatatacaggaagggctcttagaatcagtttgtgggcacagagcctcaggagtaaatgaagttactagggctgttcttaccatctccttctggccaaatagcacaacatttcctcgttctgctctgacctcttagcttagaaggaagattcagaagtgagggcctaaagaagggtgtcccttgccttaattgctctgattctgtaaggtgaataggggcagaaacagttcaggcttgacgttagaactttagcaggaagctatccctgaacttaattatcccgttgggggggtttggcaaacacaaaacccggtgtttttaattcttggcccgtagttccatttaagacctcctttcttaggtggtactttaaaatgtttttccattaagcccaatacattagttcgacagatggaagttttttgcttctccc

SEQ ID NO: 172339 - DNA, 548 bp, Homo Sapiens
caagaacagtgcttggcatttgttaagcattccataagtgttaactgttctaatatctcaggggcatctcaaacattatagagcattgtatagggaaaagagagagatccgactgttactgtgtctatgtagaaaaggaagacataagaaactccattttgatctgtactaagaaaattgttttgccttgagatgctgttaatccgtaaactttagccccgaccctgtgctcacagaaacatgtgctgtatggcatcaaggtttaagggatctagggctgtgcagcatgtgccttgttaacaatatgtttacaggcagtatgcttggtaaaagtcatcgccattctccagtctcgattaaccaaggacacaatgcacatgcggaaagccgcagggacctctgcctaaagaaagcctgggcattgtccaaagtttccctccactgagacagcctgagatgtggcctcgtgggaagggaaagagctgaccgtcccccagcccaacacccaaaaaagggtctgtactgaggagaacgcgtcaaaatcgggg

SEQ ID NO: 172340 - DNA, 596 bp, Homo Sapiens
ctggattactctgcaggccgctagcacaagctgccggagctgctattcggtgtcccttgcttgctgaaaccttactttaggacatataacacttcttcttcctcctccgggatgcttttcctgaaggccagctctttcttccccaaaaggaattctattcttgaggttacttcctcttgtcgtccaggtagtgtgcacggagagcacttctggctccaaaactgccatctcgtgacttgtgaagcctccttcttggtcattttcacaacagcgtagagcctctcacgtcactttgggaccactgctccctagcagataccacatggccggaaggccaaggcacaggaagcaacggagacactagaaagacaggtgacatggtcgcacacacctgtgctcactcaaaaggccatgcatccaggcccgatcccgaccagtcacagccgcacactcgctggccctttcacacccacagacgctcacaccagagagacactgcctgtccctgtcaacctgacagaagtgcaaaggcacatttcagagacacggagaaccgtcctggccgtgccacctctgcagaacccaccagcattgac

SEQ ID NO: 172341 - DNA, 687 bp, Homo Sapiens
  misc_feature (489)..(497): n is a, c, g, or t
aaactttaattaaatgctactttctcatagacttccctagactggtttgcaatctaaggtaataggaaacaaggcattgggcattttgaagaaactgcaggttaagctatggtgccaagcagaagactaaacactgatttgagtgtcaaatctccagcacattctgggatagaggcaggttctcaaatgtttcctagtgttctttccttttcactaattaaattttcccttctctggcgaatccagtgcagtatacaaccccctgattgcctctcttggtcaaatagttgttaggagggaacctgtcaggcacctgtggcttcggcttagattggaaaggtgacagactagctctgattcacctcctcctgagacagcctggacagtggagggatcaactggaaggccgaaacctggtaacagctgcctctgattcctggtggaaatgaccaaccagattcaatccatatcactgggaaagatcaaggnnnnnnnnntagcttcccctccaaaatggtaaagaggaaataaggagacaagaaaccaaaaatacttagaatggcacaaaaagtgatacgcatagacttctttttgttattacatctaactgtaagtttcctaaagtccagttatcaagttgaattgtgtgtagaggcataggtccaaaatatgtttccccactcaaaa

SEQ ID NO: 172342 - DNA, 832 bp, Homo Sapiens
  misc_feature (574)..(574): n is a, c, g, or t
  misc_feature (739)..(739): n is a, c, g, or t
  misc_feature (818)..(818): n is a, c, g, or t
gggcttaaactgaagcaagttcggtggacgccggcggcgccctgatctaaagaaacgactcagggactgcggcgcttgcacgtcaacgggaggtgtgagcccaaagaaatgggacgtcggtcatcagatactgaagaagaaagcagaagcaagagaaaaaagaaacaccgtagacggtcctcctcgagcagttcttcagatagtagaacatacagccgaaagaaaggaggaaggaaatcaagatcaaagtcaagatcttggtccagagatcttcagcctcgttcacattcttatgatagaagacgcaggcatcgatcaagcagtagctcttcttatggctccagaaggaaacgaagtcgaagtcgttcaaggggtcgagggaaatcctatagagttcagaggtctaggtcaaaaagcagaacaagaaggtccaggtcaagacctcgtctccgttctcatagtcgtagcagtgaaaggtccagtcacagaagaacgcgtagtcggtctcgggatagagaacgacgtaagggcagagataaagagaaaagagaaacaggagaaggataaagggaanggacaaggaattacataacatcaaacgtggggaatctggaaacatcaaagctggattagaacatctgccaccagctgaacaggccaaagccagactacagctggttcttgaagctgctgcaaaagctgatgaagcattgaaagcccaaagaaagaaatgaggaanggaagcaagaggaggaaaggaggaagacccaggccaccctgggaagaacaaggtaaaaaaggagtaaaaagaaatttgnaagcttattggaaa

SEQ ID NO: 172343 - DNA, 1004 bp, Homo Sapiens
ctatgccattgcttacttcccctgaatcagatataggtttggatgcctttctgcctttaattttaaattcatgagatgttccttcaggttctttctctgctttgaaagccacatttggtggcacaggaggaacacgaattcgcaacccaaacaaatgcttcttcttctttatctctttcccagacataaacatggtcttgtaatcatgtaatgcctccagaacatgctcatatctttcagattttggggtgtctgccagctctccagggtgcaatctatcccagttttcattaatgtatgtcataagctcaagttcagaatcaaagtatttcttcttatgaataacacttaggttgtaaaggcataggtgtgctatatctacccactgtaatggtagacgtttgaggtattctggtccagaactgcagacagagcatataaacgtataaaatctgtctccaaatagcattggcttttgaaggcattgcacacaagcctcatgaaaccactgcttacatttgcagcactgtagcatcttcaaataccagtctccagggcctccacaatagcagtaacactgctggacattggttttatgacctgcatcccattcaaggtctgccacactatagggtaatgtctgcttcatgacttgcaatgctttggcatttggtcctttcttaagtgcaccacccctctttgttgttgttgcaaaaacacactgccgacagagccatttttcatctgaatcaatcacactggaatcaatatgaggtgtgtgacacaactgatgatatccttggccacacttgtcacatataaccatttcattgggagcttctgaatactcttcttgacatattgtacagaccatttccccacttccagtggctcctgtttgaatgtccttccagagaacccaggatttagaactgtcttcaaatatgatgaagcagctctgtttcaatatgtttatctttttgatagtgccaagataaaacaag

SEQ ID NO: 172344 - DNA, 1056 bp, Homo Sapiens
  misc_feature (475)..(483): n is a, c, g, or t
  misc_feature (871)..(920): n is a, c, g, or t
cagcactaatatagagattttatttaaactgtattgaatttttacagcacattgcatgtttgtcacaacgcaactgcacagtttggatttttggccacatcatgtcacttacacccacaacagctctgaaaggagtatttgatgaacacatctgagccaagagcccagagtctctctccaaggccatgcagtttgttcactgatgggacagtccctcaaaacagccacgctaagtagacagatacagtctccccaaatgttaccaatcttactccccttgaaaacaggcagagtgaagtgcaatgaaagacaagttaattaaaaagccactcacaactggcagtaaattttaatgattgataaaatgcttaaaataattttatgtatcagaaacaaggaacagcttgttactttttcaatgatctcaggaattttgcagacacaaaatctccattattcagctccatttaaatgnnnnnnnnngtcccgctaggctgacctaaatatgccaaaactttttaggttacatctatggcaagtacaaaagaaccacagatgcgtctctgtaggactgaaaaggtcaggacaaataatgattcttgttctaaatgcagatcctagttattttggaatgaaatgcggttttctagaaagcaacatgaaagtagcagtaagaaagatgactaccatcatttcaaaacaggataagcctaaaaataatttaccatttatatgtcaacaaattaaggaaaactgtataaagtcctagtggtttcattataggccaaggagactgtatctgtcccacccacagtacatggatatatcactgtatcttttggttaagtgccactggtacatattaagatgnnnnnnnnnnnnnnnnnnnnnnnnnnnnnnnnnnnnnnnnnnnnnnnnnncaacaacgtttggtccaaatggacacatgttctttcccaattttggtatcaaggctttattctcttctgtttgggttccattgttaagtgcacagaaatagacagcagcatttgtactgaaaccctcacatacccc

SEQ ID NO: 172345 - DNA, 266 bp, Homo Sapiens
gaaagtactcaaagaagatagatgctatggaatcgaaagtaggtaacattttaccattaacttacaactgctattctaagtctgcaattattgacataaaggttgaagacacatgataaccatacaaataaaagctttcgtattccaggctactcttctaaaaccaaccccatcacaaagaaaatattttcaagattagactcaaccagaggctcatgtctatctaatttgtatgaactaaactgaactaaagggcacacagggat

SEQ ID NO: 172346 - DNA, 882 bp, Homo Sapiens
  misc_feature (323)..(381): n is a, c, g, or t
caaccagattttgtgaaaactcactcattactgcaaggacagcaccaagccatgagggatccacccgcaggacccaaacaccttctattagggccaaccttcaacattggggattacatttcaatgtgagattggagggacaagtatcccaactatatcaggcagaatatatgcattgatatatattgaaattataacattctctataatcaagtgactgtaaattatgtcgaatctgaccctggggaatgtgttatctaaagaatttgactaagaatcaggaactctgtgtccatgtcctggatgtatttctgtatgttccnnnnnnnnnnnnnnnnnnnnnnnnnnnnnnnnnnnnnnnnnnnnnnnnnnnnnnnnnnnaatgtgttcaatttgatctcaaagatctttccaaaatattaaatgccattaatcatggaatagaccaaattattgtatcacaggaacttgaatccagccagaaaaaaattccctggacaattggataaacaaatgtgattgctaccttatggatacaacggacttttacatttctttttagcctttttagtcagttgagggtaactcaagcagagtatgtccaatcattagcttcctttgatatttacattacaggtaaaaacggccaaaaatatattttaaggtctctccccaaatgtttttatttttaaactatcaatgttgtttaaaataatcatgtacttgttgagttcctgaggtttggaacaaattacacataaaatttagaatactttatttctgaaaagcatatacatatatgttatgtttatttttcgcttgttgatcagaaaggtgatgcaatatgtgacaatgcaaaatgaattgataatttttctgtat

SEQ ID NO: 172347 - DNA, 660 bp, Homo Sapiens
ttattcgtgttgcactgagaaaaatgttactgcttcaaaacaaccaaaaatgggaaaataactgaggtctagaaacagattttctctttctagactcccagcgggctcggccagcagttccttattcaaaatcaatgtgtctataatcaactctagtatgtccacagttcacccaaatgccagatacattaagactaccaaatacaaacctaaaatgttccccccaaaatttcccttaaaactgttccccaatacctgcaattcacagatataatttagcatttttgtttttatatactaatttaggcaaaacccccccgccactgaatcgtccaacaaaaatgattaatttgatagaaacaaatttaaataactgcacatacagtttatgtttatacaacgtgtggctgctctacagagaaaatgcttgtctgtagacacactctcttaaaaatcctacaagccatcccaacgccctcagtcaaggatcctggaggttccaggacaatctggagaggcgaggaagaaggtgccttccccatctgagatgctcaaagttgcgataaaatgctgccagcttccgaatggctgaccgggatatctgcagcacatatcatacagggtcaatacttccattaacaattttaagacaacaataga

SEQ ID NO: 172348 - DNA, 1388 bp, Homo Sapiens
ggggctgcggcaggaacatgggggatcggctcacgcagcttcaggacgctgtgaattcgcttgcacatcagttttgtaatgccattggagtattgcagcaatgtggccctcctgcctctttcaataatattcagacagcaattaacaaagaccagccagctaaccctacagaagagtatgcccagctttttgcagcactgattgcacgaacagcaaaagacattgatgttttgatagattccttacccagtgaagaatctacagctgctttacaggctgctagcttgtataagctagaagaagaaaaccatgaagctgctacatgtctggaggatgttgtttatcgaggagacatgcttctggagaagatacaaagcgcacttgctgatattgcacagtcacagctgaagacaagaagtggtacccatagccagtctcttccagactcatagcatcagtggataccatgtggctgagaaaagaactgtttgagtgccattaagaattctgcatcagacttagatacaagccttaccaacaattacagaaacatgaaacactatgacacatgacctttttagctatttttaatagtcttctattttcactcttgataagcttataaaatcatgattgaatcagctttaaagcatcataccatcattttttaactgagtgaaattattaaggcatgtaatacattaatgaacataatataaggaaacatatgtaaaattctgttatgacataatttatgtctccatttgttgtatggccagtacttttacaaatcaaaacatctctcaagccaaaggagaagacagtaagaacagacataagggacattttagtttaggctactgtcctgcctcttagaggtggcattgtgtaaatctgagctttgagcaagaaagttttggaaattgtgttgcttttaagaaatagagttagtgtggctggataagaaagtcacatttatgcaaatgtttcttctgctagaacctcatacctgttctagttcatctccacgtttattttaccaagagatcctctgtcaagagaatttcctggctgttgtgaaagaatttttctacatcctgaactatttttcctatttcttttcaccttgctttttttcatccttaatttgcttgtcatcacaatgaagtatgttttttgaatcatcaattctttctcattctccatttatctgaaggttcttttgcccttattaacctctcaacttttattgctgtattctagtcagaccagaacatacttccactacatcagttacttggcatcatttcacctcagtttatgatgtgccaaataataattcgtgtcagcattttcaactatggttattcatccaacccttggatctc

SEQ ID NO: 172349 - DNA, 189 bp, Homo Sapiens
agtcttaggccctctcttattcctcgattgctgaatggtattaccatcagcaataccaggataactcaacttgagataactcaagccagaaacattggaatcatccttggcttgtccctcttccggctctttctgtgtctgtgaggttcacctcaaacatttcttacaaaaatcaaaatcctcctctat

SEQ ID NO: 172350 - DNA, 603 bp, Homo Sapiens
ctactgaaacattttctaggttttatgaaagtcagaaacaaccgaaaaattagaaaatgtaacccaaagtgtgtcttggagagctgagaaatatgcccaaagaaggtgaaagatgttttattggttcttaggaaaccaaaatgcatggagacccaaagaggctggggatagcaagcagactgagtttaggcaaattgtagagcagtatgaagttatctctcagtctgtccttaccacttcctatcccttgtgtttcagctcagcacagtaatgtactttatctaataaatatcagattcagtgaggtttttctgttagagctctaaactatttgtttaagtgcttatgtatttcaaacatctgcttgtgttacatgattgctcacaattttaaaagagggaagcttggctgtggtcttcttaattgaaaaaggaatatagagtaaaaagaaatgatttccatcttgttcaagagtataaaaagaatcctaaagcataaattgtaatacttcaaaatgctataaaaaaataagaatgttgagtcttcagtaattcagttcccacaaggtgagtatttctttctatcacacaaaaggacaaaata

SEQ ID NO: 172351 - DNA, 260 bp, Homo Sapiens
ggggaaaaggcatcaacagcaccagcaaataaagaacacaggctcaattagtgatggtgatggacaacattcctttatttttgaagcaaatgaagcttggaaagattttcatgggtctcttcttcgattttatgaaaatggagaactctgtgatgtcacactcaagtcacagcaaactgtacaatggcagttgagtgggttttgaaaaacgtctgaattgtagtgtctacatctaccttctgccttctctctaccctttg

SEQ ID NO: 172352 - DNA, 419 bp, Homo Sapiens
  misc_feature (74)..(117): n is a, c, g, or t
tttatagacacttctaaatatggctttgctctatctcaaaaattctgtccttatgactaggtgtgatggctcannnnnnnnnnnnnnnnnnnnnnnnnnnnnnnnnnnnnnnnnnnnagcccaagagttcaagcccagcacaggcaacatggcaagaccccatctctaaaaacaaattttaaaaaacacacattagccaggataggcatggtggctcacacctgtaatgccagcacattgggatgccaaggtggggagatcacttaaggccaggagttccagactagcctggccattgtgtcacaagggtgctgctaggtctgttgtttaaatggcatatagcagcattgtttcggttaaagatgcagttttcaacaacctattttgaacattaagtgagaacttaccatacatctgtg

SEQ ID NO: 172353 - DNA, 226 bp, Homo Sapiens
gaacagtttttaactctaagaatatcagtgctgttgagaatataagccagatgcaaaagaatacatactgtatgattctatttgtatgaagttcaaaaagagacaggactgatctttgatgacagaaatcagaataatggttactttttgggcttgagagggtggtattgactgggaaagggcacgtgaaagcgttcttgggtttttaaaatgaaccacgttttca

SEQ ID NO: 172354 - DNA, 434 bp, Homo Sapiens
  misc_feature (239)..(253): n is a, c, g, or t
ccctgcattgggaaatgaaaatagaccacccaatttagagaatagtctggcagtttcttaaatttaatcatacattatagtatcaccaggcaatcccaccattcagtatttatttaacagaaataaaaatctttgttcacataaaaccatgtatatgaatgtttatgatagctttatctattattgccccaaagtggaaaaaaccaaaatgtacttcagctggtgaatgtacggatttnnnnnnnnnnnnnnntattcatacaactacccagcaataaaaaaagaatcaactgataaatacaacaataggaatgaatctcaaatacattaagaaaagccagacttaaagggtacatactgtgtgagtccggaatttacagcatactcataaaacaggaactatagggacaaaaaagcagataagttgcaggaac

SEQ ID NO: 172355 - DNA, 1028 bp, Homo Sapiens
ggcctgggtggcgaattcggcacgaggatttgttaactcggactacagaagggaagaaaaggcagctctacatggtttctaaggagttgcggaatgtgctgctgaataacagtgagaagatgaaggttattaacacggggatcaaagtctggtgtagaaataacagcggtgaagagtttgactgtgctttccggctggcacaggagggaatatatacattgtatccatttattaactcaagaattattactgtatcaatggaagatgttaagatactgttgacccaggaaaatcccttttttagaaaactcagcagtgagacctacagtcaagcaaaggacctggcaaagggaagcatcgtgctgaagtatgaaccagattctgcgaatccagacgctctgcagtgtcccatcgtcttatgcggatggcggggaaaggcctccattcgaacttttgtgcccaagaatgaacggcttcattatctcaggatgatggggctggaggtattgggagaaaagaagaaggaagggattatcctcacaaatgagagtgcagccagcaccggacagccagacaatgacgtgactgagggacagagagcaggagagcccaacagcccagatgcagaagaggccaacagtccagacgtgacagcaggctgtgacccggcggggggtccatccaccccggtgagcaggcccaaggcagcgggggcccacacccctcacacgcaaaactggcttcttctggtcactggtgtctgaaaccaaatccagagcagcctgtggcctgtaaagcatatatttctaatgactgcagactggtgggatcataggagccttctgaatgaccaggactgctttctttggagctgatgaaaaatgtacctcttttaccgggtttagaaatcacctgggttttatttttggttcctttgggcccaggctgggggtctaagggtttcctttttggctgggaaataaaacttttccaaaagttggaactttcttattccggaaaaaccaaac

SEQ ID NO: 172356 - DNA, 705 bp, Homo Sapiens
  misc_feature (401)..(401): n is a, c, g, or t
  misc_feature (545)..(555): n is a, c, g, or t
  misc_feature (558)..(559): n is a, c, g, or t
  misc_feature (564)..(564): n is a, c, g, or t
  misc_feature (566)..(566): n is a, c, g, or t
  misc_feature (578)..(648): n is a, c, g, or t
ggtccagaggccataggtgacatcactaaaattgcaagataaattgtaatctttgctgctgctgcactccccaacctctcccccaccccccgtggtgtgctgctttctagatgagcgtgttttggagcaggcccatctgggacactctatgctttcaccaaggaagtgcgatctgagcagccacaatccagccaaaagaggatcgtagatatttgctctgatcaactagatgaaaatatagcagaatggatttagcccactgctctgttttatccaactgagtctctgagccagcaattggtgcataattattacagcaaaagttaagaaatgaaactgtagccattatgtaaatgaatgtgttggcctcttaatacctgttactagtggacttcctgtgnagaagttagtttttggtttgatgaaatgctttccgttttttaatcttaattcctgctggtcacatccctccaaagtgtgcttacttcattttgttaatttaaatgaaccttcctccttgtatgtatgaggtgacttggtgggtnnnnnnnnnnnctnnccctntncctttttttccnnnnnnnnnnnnnnnnnnnnnnnnnnnnnnnnnnnnnnnnnnnnnnnnnnnnnnnnnnnnnnnnnnnnnnngttcctccgttcgcgcctctgcgccgccgtgtcgttcttctcttcctcctcccgccc

SEQ ID NO: 172357 - DNA, 687 bp, Homo Sapiens
actctgaggatcccattgcacgcctcggttatgtagaaaacttacaccttttgttccaaggtgctcttcatctataaaaccgtgggcatacttcagttgttcttctgaggccaaattttgtgctagtgggacaattttgtataacatacatttattttgtaattcattctcccaaatttgaagctttattaaaggtattctatttccactggcttcccttaactagaataaaatttactcccaaagtgctgggattacagacatgagccaccacgcctggccaaaagcactttttatatacgtcctattttagtcttacaaagtgaggtcagttgaccagagatttttacccccatcttcacatgagaaaactgaggcccagtggggttaaatggttcaccaaagtcctgactccggagaaagatataacttgtgagaaatcacggtcttacacaatggacgtggatatccttcctcagactcaggaagcaagacagcaggcacagaaggagaagccaaaccgtggccagcgcgtgccattgccacttgcctcctggatgtgacacccagccagggtgcaggtgaggcttgaaaagcttctctggccactctgattatgtttttcactgcatgctctgcgactgagtatgtggagagatatctcatgcagctatcggaaaacataac

SEQ ID NO: 172358 - DNA, 618 bp, Homo Sapiens
gccccctgcctcagcaaactcagtgacaggccaggacaggtcacacagctgttcagaggacaccacagaagccaggaactgcagcacactgttaaacagctcaatgatggcgccaggctcctgagaagcaagaccgcccagacgcctctctcttctgtcatggaaaaagcggccactaaactcatggccaatcccgtcttcgacgtactgaatgagagtctggcagcagaggtcaagggaatgggggcagtgggaaaccagccactgcactgcttgcaaaaccttagttgaaccttgtagatcattaatggtatcagggatctcggtaacagtgtaatctgaaatcagcttagctgaaaccaagtcctgtagcatcagaccatcttctacttccttctcaacggcgtcccctcctgggctaggcacaagaaccaccagaggaagcgcaggctggaagggcttagcctgcaggagctgcttgagctgcaagcaaggccgacagccagtacacgtcctcctctgccatgtcctcactcttcattttggggggaagcagcagcatgagcccactggctcccaggaggtccttctgtgtctccacagcatcaatggcaccat

SEQ ID NO: 172359 - DNA, 919 bp, Homo Sapiens
tggcgtcctggatcgggtgaaggtactggtgttgggagactcaggtgttgggaaatcttcgttagtccatctcctatgccaaaatcaagtgctgggaaatccatcatggactgtgggctgctcagtggatgtcacagttcatgattacaaagaaggaaccccagaagagaagacctactacatagaattatgggatgttggaggctctgtgggcagtgccagcagcgtgaaaagcacaagagcagtattctacaactccgtaaatggtattattttcgtacacgacttaacaaataagaagtcctcccaaaacttgcgtcgttggtcattggaagctctcaacagggatttggtgccaactggagtcttggtgacaaatggggattatgatcaagaacagtttgctgataaccaaataccactgttggtaatagggactaaactggaccagattcatgaaacaaagcgccatgaagttttaactaggactgctctcctggctgaggatttcaatccagaagaaattaatttggactgcacaaatccacggtacttagctgcaggttcttccaatgctgtcaacctcagtaggttttttgataaggtcataggagaagagatactttttaagagaaggtaaatcacgattccaggctttcctgatcggaaaagaattggggcaggaacattaaagagccttcattatgactgaattacactcatcctttggaagagtgagcaaagcagtggcagttttttcacagctcatcttgcctgtgtccaatttattaccatcacagtcttttaacaaaatcatcttaaaaatgctaccttcagccttacctttatggcacaactgaacgggaagtgaccatacggaaggtccaaaatttgtccctgttcctcctgtgttccttac

SEQ ID NO: 172360 - DNA, 629 bp, Homo Sapiens
gaccattggtgtctcagctggatcatgattcactggaatcgaagcgaccacgtctggaacaggtttctgattctcattttcagcgtgtcagtgctgcggttttgcctttagtgcacccgctgccagaagggctgagggcttctgcagatgctaagaaggatccagcattcggaggcaaacatgaagctccatcctctccaatttcggggcaaccatgtggagatgatcaaaatgcttcaccttcaaaactctcaaaggaagagttaatacagagtatggatcgtgtagatcgagaaattgcaaaagtagaacagcagatccttaaactgaaaaagaaacaacaacagcttgaagaagaggcagctaaacctcctgagcctgagaagcccgtgtcccctcctcctgtggagcagaaacaccgcagtattgtccaaattatttatgatgagaatcggaaaaaagcagaagaagctcataaaatttttgaaggtcttggcccaaaagttgaactgccactgtataaccagccatcagataccaaggtgtaccatgagaacatcaagacaaaccaggtgatgaggaaaaaactcattttattttttaaaagaagaaatcctgccaggaaaacc

SEQ ID NO: 172361 - DNA, 630 bp, Homo Sapiens
  misc_feature (372)..(380): n is a, c, g, or t
  misc_feature (613)..(613): n is a, c, g, or t
aattcgacggtttctctttgttttcgaatttctgggaactgcttttcatagtattcccttgttttgctttctttagctttcctccgaggattattttctattctgtccacttttttctcccatgcctccatgagctgatcataacgctggcagattttttgttccctttgttttcttgcatgatttcttcttttaaaaaataaaatgagtttttttcctcatcacctggtttgtcttgatgttctcatggtacaccttggtatctgatggtaggtagcacagtggacagtctttgatcatcatgtagaatatggctatgaatcaggaaagagattagaacatttaataatgtatgtacagctggtgcttagnnnnnnnnnaatctaaatttaattaccttattggatatttgatatttggttatttaatcacagtcatctttaacagcttacactgattggtgttttatctcctgtgatcctttgatggcttttttggcctaccatttcacagaggtttagacagcagtagtagctccctaggagagtttactgatgaaacagcctctgcaagattttaaaagttttgttcttttatagactgatttagaaanataatatatgattagtt

SEQ ID NO: 172362 - DNA, 881 bp, Homo Sapiens
  misc_feature (760)..(822): n is a, c, g, or t
ctcgaattcgacggtttctctatcgttaaagtaaggctccgaaatcccacacataacagcttcttgttagcacctggttcccaaagggactcagaaaaaataaaaacattgcaaacaggaaaagattatttgacagcagatagaacaatttcatcatcacccttacctaggctactccccctcacattttcctgtcatccccaacagcccagaatattctccaatcatctgggaagtgttaagtactcagatctgtggagaaaacagatctgtggagaaaacctagctaaggtggccagtagccaaggttaatttccaaactgatatttttgcctataaatctctaataaccaattctgtttgttaaatttggtttggggagttaaattttcagtctattttgagacccaagtgattctgctcctctgtaacactgcagcaaattacttcactaatcaaggtaaacagaaccatgttaactgtcaggttttttccaaattaaaaatgcatgttttccccatgactgctaattaagaaaaccatattctaaacagtcattcgaatgtttacttggcacatctccctctggtttcttctaatttataacaaagcaagcaagtctagaatgatgagggcccagtttcaaaggcaataacctctgtaacataacctgttcataacctctctctctccatccatattccctttctttgggaaaaactccatgctgacatacaaagaaaacccagcaggtaggtgnnnnnnnnnnnnnnnnnnnnnnnnnnnnnnnnnnnnnnnnnnnnnnnnnnnnnnnnnnnnnnnctgagttcaaaggatttatgccagtcaggacttaaataggagaaacgcgtcggttacga

SEQ ID NO: 172363 - DNA, 608 bp, Homo Sapiens
acttgtgagattcagagaggttaggctggtagatatggattctacactacagggccgggatggaagcaaaagggctcctctccttaccacctcccactcccaggctccagtccagagtctgtaaggattttctgcccaccctggaatctgttgttgatacagagattgccctccagcttagtagatccccgccgaagtaggctggtgacctggcctttgggaatcctggagattgcatttggaggtgtgctgagtacaacgggcttgagcacttggttgtgttggctgaggtggtggctgtgattgtggtggctgtggccctggccacacctgtgcctgtggcaattcacacactatctgctatgaccagagagtagccagtctcgagatgcggtaccctttgaagtcgagcggttgctcctgtgatgtccacaatttcgccactggtggttgcggcacatttaacttcttatgtggctggagtttttcctccgattgttgttcttcctcctggtgattcttcagttcctggcaagaagcccccgggcaagtggcatcatcctctccccacccaatcacccatctgccagagaaaccgtcgaattcga

SEQ ID NO: 172364 - DNA, 1049 bp, Homo Sapiens
tgtactataacagttgtgcgaaatagcaggctggtacggtcggaatcccgggatatgtcgacccacgcgtcgggcggacgctgttaggggtggcggggggttggcggcggttcgagaggctctgggccggcagtctaagctctcgcagcctggctcttgcagccgcaccctcaagcaacggatccccatggcgcttgttgggcgcgttgtgcctgcagcggccacctgtagtctccaagccgttgaccccattgcaggaagagatggcgtctctactgcagcagattgagatagagagaagcctgtattcagaccacgagcttcgtgctctggatgaaaaccagcgactggcaaagaagaaagctgaccttcatgatgaagaagatgaacaggatatattgctggcgcaagatttggaagatatgtgggagcagaaatttctacagttcaaacttggagctcgcataacagaagctgatgaaaagaatgaccgaacatccctgaacaggaagctagacaggaaccttgtcctgttagtcagagagaagtttggagaccaggatgtttggatactgccccaggcagagtggcagcctggggagacccttcgaggaacagctgaacgaaccctggccacactctcagaaaacaacatggaagccaagttcctaggaaatgcaccctgtgggcactacacattcaagttcccccaggcaatgcggacagagagtaacctcggagccaaggtgttcttcttcaaagcactgctattaactggagacttttcccaggctgggaataagggccatcatgtgtgggtcactaaggatgagctgggtgactatttgaaaccaaaatacctggcccaagttaggaggtttgtttcagacctctgatgggccgagctgcctgtggacggtgctcagacaagtctgggattagagcctcaaggacattgtgtgattgcctcacatttgcaggtaatatcaagcagcaaactaaattctgagaaataaacgagtctattactgaaagaaacaacacacaaa

SEQ ID NO: 172365 - DNA, 757 bp, Homo Sapiens
  misc_feature (297)..(309): n is a, c, g, or t
cctgcccccgccccagtcttcccagtgagaatcctgccagctgggtggtggcctggcgcagagtgggagaggctgccactgacaggatggctatgacctgggacatggaaacagtgacctccgcgttctggtcccgagatcctcgcatcagcgtcatcgtgtgcaccggcttggggggctggagttccggttttcgttgttttttctctttattcgtcctttctcaaagatgggatactgatcagaattgctctgtatatgcttgggactggatggaaagactttggagcagctgtnnnnnnnnnnnnnacaccgacaaccaaacagacgtgctggctccagtcctgtttttactttcaaaaaccaacaagcccgacagtggagcctgtcccctcccgggagggtgctcatggccccactcacctcatcaccccacggaaacctttgtgtcttgccctggaagacacccgaattctttgtacattgacatgcccttctccttcctccctcccctgtagctggtctttgttttactccctccctttctgatccatgtatatcatattatgtgagatatcatctgcctgaaaaaagactttgtgcggattattgggaacattgtagctgtttctgtgttttttcttaccttgtagtctggttctgaattaagagaggaaaaaaaagtaattatgatacattgtagtttgtgtacgatatatgttgataacgttttattaaagggacatcttttttccgc

SEQ ID NO: 172366 - DNA, 310 bp, Homo Sapiens
gagaaacttatcccaagtcgatagaaggacagactgacacataaaggtgcctacatttattgataagcattatttataagatggtaaaattggaaacaatcggatcatccactatttgggaatgtttaagaaacctattgtatatacttacacagtagtctagctgcttagccattttttgaattctgttttatgaaaacttgtaaagacatgggaaacgtcttaagtggcaaaagcaggccatagcctaggtatgtacaatattacaccagccagataaaatatctgaaatgagaaaccgtcgattcga

SEQ ID NO: 172367 - DNA, 940 bp, Homo Sapiens
ctccccagccaggacaagttctaaaagttttcatttttaaatctttgctttcctatcaggataaataatggaaattctacactgtggattcctaaataggaacagctgtgctttctttctgttatctacatgcttgatggggggaacaaactgagtaagaaggtttaataattttattttaagaatctccaatgatatatgcagccttttaaatatgtaaaccagccccaatttttcccattgttcaattttttgttcctttttaaaacataacaataaattcattgttctttgtcagtgcaaatgttgggtggattatttaaagccagttaggagctgatcactgaagtatgtgagttttaattttctcctagttgtcttgatcttaagaaggaattaaagaaaatctcaagtgtctggcttcatactaagaacacatgaaatttctgaagcaaatagaaagatgaagaaataataatatatgttcatacttttggaatatgaaaaggatctgcaggagaacaattattataacatttgtctcaaaagataccatagaatcagttggaagttaataagtctctgtagacattttttaggaaaaatttttaacaatactcatctcagtaggttttgaaagaaaaagtttaaggtatgagtccgttgtacttatcacatgtttagaattaggtgaagtagtttttatttatgactcttctttctcttcctctgaaccattagcctcaatcttctttggaataaaaagaactctcagataaaacggagagaagtaatagcaaataatatattttttctttatattcttggagctgtattttaatatttaacacagttttaaagtttaatatcacctctacttttctataagcttgatattctaggcttgctactgtcatattgagaaaccgtcgaattcgag

SEQ ID NO: 172368 - DNA, 646 bp, Homo Sapiens
ctcgaattcgacggtttctccaggacaggtaatgtccccttccaggcctcagcattgtcatctataaaatgaaggggttagactggatcagtgtttatcaagcctgtggtcttcatattaggaccactctgggattacaggcatgagccactgtgcccggccaggaaactttttaacagactcccaggtggtctgcacaatcattaactggacaagccttcttagagcctgggaggccctagaagaagcaaccctcaagtaggttaggtcacaaaggacgagtggtcccagagtttgtgtagattgctgagacgggacaccagaagaggccctgacctctcttggaaggtagcatgcttctgcttccagaaaccctggaaaataaaaggccgtgtttatgcagctgtggagtactagtctgtggcagggagctggagtcccaaggtgggccagatggatgtgcagcctctcggtctctctggatgcagtaaatactcataatttcatatgactcaacccagggagaagagaaatgtggcattgaacgggtgcctttagaaacagaggtcaccgcagtacctgtaaaaggagaactgtcagcctgggtggtgtcctggagtgaccgggattgtggggctaagatagg

SEQ ID NO: 172369 - DNA, 619 bp, Homo Sapiens
gaattttgacccttacgtcctgagttcaaatcctgcctcttccacttactagcagtgggattttgagcaagtaattcaacttctaggtttcaacttctaggtctcctcatctggaaagctggaatcacttatttaagttcagctaacaaggccacaaagtgtaacagttaaaactgtgggttctcagagtcaggttgcctcggttcaaatttatacttactggcagagcaatttggtgtcagttttctaatccctctgtgcctcagtttctttctacgtaaaaacaagaaaaacaaaggttgttggggcagttgcgggggactctcttagccccaacctaaatagctttttcagcaatacttgacaaaatgtgttccttctatggacacttgtagaataaacagaggaaaagggcgtggggaggaaaggcacctaggtcatgtaacctgataagcggtatataatagaagctttttgcaaagttatgagagaatcaggagtgagtggttagcctctgaggggcggtgcgcagtgggggcctttatacaggatttgagtccggtctctgaagacacagcacacttccccatgttaaagaagagaaacctcgaattccgag

SEQ ID NO: 172370 - DNA, 664 bp, Homo Sapiens
gaactagaccagccctcgagtacagaaaggcgacgagacagggagcccagtcagaaaacactctgcttgcaagtatggtaacaaataaaggacaaccttctagaaatagagacagaagtccaaaagcagacaagagaggcttcttgaagcatgaggaggaagactcatgtcacagaaaagcccaggagcatcaatcaaagtcctgggaagcagactgaatttcaggggctgaatttcaatccttgggagagaaactttaagtcagataaagtctcatcctacatctcatgtaggatcctaaaggaacagctgagatagagtagaaagatctacttttcagaatgtggggccaagagcctttaatataaaagagaagtctagttatttgaagtcataaaataaaacccaaacttgcagcaggcacaatccaccaatgagctaatagggtagtggattgcagctccatcaaacctgctaagaaagggcaatatctgttcaagaaaagttgataagactgagaccgcaagacttttcaagaggccgtaactatggagtgaggaggggtatgcagactggaaccagccagggcataacatcaactataagcaaattaagggaactccttttctgtaggtttaaaaatagttgattgggttgacgtcag

SEQ ID NO: 172371 - DNA, 782 bp, Homo Sapiens
  misc_feature (19)..(19): n is a, c, g, or t
  misc_feature (41)..(41): n is a, c, g, or t
  misc_feature (57)..(57): n is a, c, g, or t
  misc_feature (166)..(166): n is a, c, g, or t
  misc_feature (386)..(386): n is a, c, g, or t
aggaaaatggcccctggtnaaaggacctggggatttggtantttaggaggcctggtnccccctattaaaataccagacatttcctacccctcagtttcctaaatgtagactatttgttggctagtacttgatagattccttgtaagaaaaaatgctgggtaatgtnccctggtaacaagcctgttaatatattaagattgaaaaagtaacttctatagttactccttctaaaatatttgacttcctacattccccccacccaaaatctttcccttttgaaaatactaaaaactaagttatgttattataaagtgtaaaatggtttgtcttaattataggagaaaaaggccttgttagaaataaaataaactgacttatttcactantgaaaaaaatctacaatgttaacccagcatgctgttggcaattgttgtaaacaaacaagttaaaggcaaaaattcttgccaagagaattaatgtgcgtatcgagcacattccgcaatatattatccaaaatatctttctgacacgcgtgcccgaaagtgatcagaaaaggaactaagccttttcacaaaggaacctggggttcaactaaaggggccgggcctgctcccccctaaaaaaaagcccccctgtgttgacaaaccaagtgtataagaaacctgcacgcagggggggacccagatgcccctatgggggttcctgggccataaggggggtgcttaagcgaagcctaaaattaatggaattttcgggccccctcccgttggaaattttttatg

SEQ ID NO: 172372 - DNA, 377 bp, Homo Sapiens
agttgcccgtctctatggcaaaatcattactgcagatcccaagaaagagctggaaaatttggcaacatcattggaacattacaaatttattgttgattactgtgaaaagcatcctgaggccgcccaggaaatagaagttgagctagaacttagtaaagagatggttagtcttctcccaaccaaaaatggagagattcagaaccaagatggccctgacttaatccttgtttttaaagaaaggaaatgtgcaatattgaagtgatctttttccctagtcagacaggcccaattccattgtgacgtttacctttatagccagggtgagtgcagttttgaacttgaggttacagttcaactgagtgttttgctagggttcc

SEQ ID NO: 172373 - DNA, 616 bp, Homo Sapiens
  misc_feature (62)..(71): n is a, c, g, or t
caggtcttttcccctcaaaatatcaatctttcaaactataataaagcctttcctataattgnnnnnnnnnncttttttgttaaaggtaatggtggttgttacttggcctttgaagagtgtacctttgtaagtatttgtaagaagtctatgtgaattaggaaatgtctgtctgcataccttttaggagcgtgtgaatggtgtcttcacttattatgtatgtttatctgtatgtatattccttattttgtcatatatgtagagaaaattgcatgacttgaggcatcatttaggttgaagaagttaatgcttaggatgcattctaggagaaaaaatcagttttaaaaacctttgttgttaacaaagtatatccagattggttaattttattgaagggtttttttctgtaattgataaaaatgtaatgacaacaattcaggcatcataaaatactgaactattgtgactttattcttagaattgctgtcttacattaaacatgtttttagggggaagttaggtaggagatagaaaaataagtgcccctacaagggggattaaaattacaagttaattcctaagagaaaaatggaatggcctttgaggggaaaagaccctg

SEQ ID NO: 172374 - DNA, 309 bp, Homo Sapiens
accaggatttccctcaattttacttacaggattctcactcccccatctgatccctatacataacttcttccattcctgtctcacatgaaacagccatcttccatgctctctcacccatctttgagtctctctctgacactcctttctcctactcttaaattattaataattctattcaacagacatttattgagcacctagtatgtgccaggcactgcgttaagaggtggggaacaatacagagatgaaaagacattgaccttttcctcaagaaattcagactttgggttgaattaaaaaacgttcttc

SEQ ID NO: 172375 - DNA, 527 bp, Homo Sapiens
cagggtatcttttcccctacaaagcgctcatagtccaggagcctgacaagtggacaggtgattacatgcaatgtaagaaaggctgtgatgtcatacaagaagacaagtgggagtatggttttgaccagttcctcctcttagatttattccttcttctttggctataaagcaaaagaattggtcctattttttttaactagtgcaaattaaaccataaattttaaaaactttataaagattaaagacatgagccaccacgcctggcctagaactctccgtttaatggggtaatacaggaacatagtggtaacatctagtaagtaaattaaggaacaaaatttgtgctacaagcaagttaagaatcatattttccaaaattgttaggaaagcccatgacaccttttaagagaggactcctagaactcaagactaaatcacaggttaccctcccttatcagagtttggggtaatggtggctatcgccgcctattcatgagttatccccggcgaaaagggaaagttcacga

SEQ ID NO: 172376 - DNA, 631 bp, Homo Sapiens
tgattttcccctcaaagtgttcaggttaactcttctaaaacatctcatattagtctacaccagatatagtcttccttctagatatattagagttgaccaagtctttccctaaaaggataattatataaaagagtaggaacaaagatagtcatttctctcccattctgagaattacatcttttaacacatgggcaaaatttaagacaaagacattcattcattcttgataaacaagctactcggaggtgaagtgaggaggtggaaaagggcaatgctgagtagaagaacatacgttttcttctacacacacattaacagatttcatctcatctagactagaagagggttaatgggacaagtgaaagaatcctctccaccccattgtgaaaagcaaagtagctcctctagcaaatatgcttcagaattagtctgatgctcagaacactcagatcaaattatcctttattaaaatgaagcacagtcaagtataggaaaaaaataaaggtaacttcatctctcacatacaaacgtacacaaaaaacatcaaagacaagtagtatttgccctgttaaagtatgactttctgcatgtttgaggggaaaagacctggggtacgagctcgaatcgtatc

SEQ ID NO: 172377 - DNA, 816 bp, Homo Sapiens
  misc_feature (795)..(795): n is a, c, g, or t
aaggggtcttttcccctcaaagtgtgtcgaaggtgtgacgagaactgcttgagctgtgcaggctccagcaggaactgtagcaggtgtaagacgggcttcacacagctggggacctcctgcatcaccaaccacacgtgcagcaacgctgacgagacattctgcgagatggtgaagtccaaccggctgtgcgaacggaagctcttcattcagttctgctgccgcacgtgcctcctggccgggtaagggtgcctagctgcccacagagggcaggcactcccatccatccatccgtccaccttcctccagactgtcggccagagtctgtttcaggagcggcgccctgcacctgacagctttatctccccaggagcagcatctctgagcacccaagccaggtgggtggtggctcttaaggaggtgttcctaaaatggtgatatcctctcaaatgctgcttgttggctccagtcttccgacaaactaacaggaacaaaatgaattctgggaatccacagctctggctttggagcagcttctgggaccataagtttactgaatcttcaagaccaaagcagaaaagaaaggcgcttggcatcacacatcactcttctccccgtgcttttctgcggctgtgtagtaaatctccccggcccagctggcgaaccctgggccatcctcacatgtgacaaagggccagcagtctacctgctcgttgcctgccactgagcagtctggggacggtttggtcagactataaataagataggtttgagggcataaaatgtatgaccactggnggccgagtatctatttctaca

SEQ ID NO: 172378 - DNA, 1121 bp, Homo Sapiens; identical to SEQ ID NO: 71741
  misc_feature (582)..(745): n is a, c, g, or t

SEQ ID NO: 172379 - DNA, 536 bp, Homo Sapiens
caggatctttccctcaaaagtattctcagtgctcaagaatattaaagtttggggggaaatacctaagtcataaataagcaagtattccctccaagattcactaatggggataaaagtctcagggttaagcccacaagaatggtctgcaataaagaaaaatcaggtctgtgtagagtaatttctgccatctttagcagaaaagccaaaaacattctgagccaaataaaagcaaagatcttttgattcagcgccttttgttgtgttagttttaatttctaacttctcaacatgttatagctcagaaattcccatatgcttactatctgtaataaggaactataacgttaaagaaaaaattcagagacgtgatcattttccatcataggtctgtctctctttggtaagaaacagatcaagacttacttattttctctcacctacagaagagaggggagttaaatgtcattaacctagtaaacaatacctgtgtataaacattaagtttgaggggaacagaccctggggtaccgagctcg

SEQ ID NO: 172380 - DNA, 649 bp, Homo Sapiens
gtcctcttccagaccacagcaacttggcctccggaacagtttgaaagtggcagtgaggctggccttgtagtgctgagacacgcgggcattcttgatgctgatgggagtatgctggatgcccctcagaccaaacagtgccaccacatccatgggttcctcatagtagccgtcaatgaaaactgttatcatctgaggagacaccccctgggctgaaagcagagagcgcagcatcctgtacaggtaattggctcggttccctgcaatgacagccacaggcacattgaggaccttgttgtctgggagtgggtcaggcctgaactcgatgggtgtggggtcattgcagctgcatacacttccatagccctcaactttgctcgcagaagcgccggcggcgacggttcagctctgtgtctgcccacgtggcactctgcctcttctgctgagctcaatggcacatctgtcttcagcaggactgggtccccccaggaagagagggcaggtgatttagaatgtttctcctcgaagacaggacctccttttcgtcccacgaaggcccatgtgtccctccagcaccagggacagggccagcactggctgcccaggctcctcagcagagccattggctgtgtcctttgagggaaagaaccct

SEQ ID NO: 172381 - DNA, 555 bp, Homo Sapiens
  misc_feature (521)..(521): n is a, c, g, or t
ggcgtttgctgaagcaaggagaaatatggaagaggaagaaaatgaaacctttggattgagcagagaatataaagaactgatcaaattaaaaaggagtggctctattcaagctaaaaacctaaaaagcaagtttgaaaaaattggacagttgtctgaaaaagaattttgaggatctagaaaaagaacgtgaagagaaagaaaggatcaagtacgaggaagataaaagaataagatatgaagaacaacgaccatctctcaaggaagcaaagtgtctttcattagttatggatgatgaaatagaaagtgaagcaaaaaaagaatcactttctcccggaaaattgaaactaacttttgaagaactggagcgacaaagacaagaaaaccgaaacgaagcacagctgaagaggaagcatagaaaacgtttagaagaagagaagcgtgcttttgaagaagcaaggcggcaaatggtaaatgaagatgaggaaaaccaagacacagcaaaaatttttaaagggtaccgncctggtaaactcaaactcagttttgagggaaaga

SEQ ID NO: 172382 - DNA, 634 bp, Homo Sapiens
tgaaaaaatcagagaaagatacaaattctaaagtaagcaaggtaaaacccaaaggccaagttcgatggactggttctcggacacgtggcagatggaaatattccagcaatgatgaaagtgaagggtctggcagtgaaaaataatctgcagcttcagaagaggaggaagaaaaggaaagtgaagaagccatcctagcagatgatgatgaacaatgcaaaaaatgtggccttccaaaccatcctgagctaattcttctgtgtgactcttgcgatagtggataccatactgcctgccttcgccctcctctgatgatcatcccagatggagaatggttctgcccacctggccaacataaactgctctgcgaaaaattagaggaacagttgcaggatttggatgttgccttaaagaagaaagagcgtgccgaacgaaggtatttttatatgtgtgttaatgttttgtttgggaatatgagagcagaattgtctcactgtatggataaatggatccatctaaaacaaggattggcaaactgtggcctgtgggccaaatccagcctcctttttatttttgtactgcctgctaactaagaatgttttttatgtttttaaatgttgaggggaaatagaccctg

SEQ ID NO: 172383 - DNA, 1483 bp, Homo Sapiens
  misc_feature (975)..(1032): n is a, c, g, or t
  misc_feature (1037)..(1061): n is a, c, g, or t
cagctctgcaaacactgtcacatcctttcctggaagggcactgaccatccgtgcactgccaataacccagagagctgctccgtttcactttcaccccaggactttatcaacttgttcaagttctgaatcccagcacatgacaacacttcagaaggtccccctgctgactggagagctgggaatatggcatttggacacttcatttgtaaatagtgtacattttaaacattggctcgaaacttcagagataagtcatggagaggacattggaggggagaaatgcagttgctgactgggaatttaagaatgtgaacttctcactagaattggtatggaaaagcaaaatactgtaaataaactttttttctaacaatttgccagcaagactataaggccaataattctatttcagcggtgaaaatggagtcctcttaatggtcacagaaactctcttatagttccctaggaagaaaaaggcaaaactcaaatacaaaataggacgctttgtttacaatgtgaaaatttgtttagaaaagaaaaaatgaagaaggaaaactatataggagaaattcctgggctttggggtttgatctggtgtttgttttgagaaggcgaaggaagcgccacccatcctaaacctgcatgggcacagagccttaccctacagagataccacacaatggtctacctctaaaagcgtagagtgccctctctgacaacgcatgtgatccagtaggcagtgtctgtttttctcgtaagtgttttcatcactataaaaagtgatttaaaatagaaaaggatattggaggcaatcctctggtttcacacttccttttcaggcaaacagggccctccttagagttatctgttcaccagaacaacccaaaagcacatgttccttttttcctgtcatgttgtagctcatttgggggaaaagaaggccaacttaaaacagtcccaggggaggactgcttnnnnnnnnnnnnnnnnnnnnnnnnnnnnnnnnnnnnnnnnnnnnnnnnnnnnnnnnnntctcnnnnnnnnnnnnnnnnnnnnnnnnngccgtcccagaggaagtcctgctgcagaaaagatgatagaattggtcacccaatcaatagctgtgaagacttccttattcctgctgaacttccttccttggatatcttcatgaaatctactttcacagctcccacatacgagtgagaacatgcaacatttaggcctggggcattattgacagagaattgttgctttgaagttggaaaatgccttatggtgctaaaagccaaagagaggcctctgagaacttgaagctaaccatgtgttcctttccagggcactgaccatccgtgcactggcaataacccagagagctgctccgtttcactttcaccccaggactttatcaacttgttcaagttctgaatcccagcacatgacaacacttcagaacggtccccctgctgactggagagctggg

SEQ ID NO: 172384 - DNA, 987 bp, Homo Sapiens
  misc_feature (121)..(313): n is a, c, g, or t
ctagggtctttcccctcaaacggctgcctcttgaaagtgcacaccacgatcagggtcaacatattcaacagttgaatgtatattatatgcctggcatggttctaaaaatcacaggtaaaannnnnnnnnnnnnnnnnnnnnnnnnnnnnnnnnnnnnnnnnnnnnnnnnnnnnnnnnnnnnnnnnnnnnnnnnnnnnnnnnnnnnnnnnnnnnnnnnnnnnnnnnnnnnnnnnnnnnnnnnnnnnnnnnnnnnnnnnnnnnnnnnnnnnnnnnnnnnnnnnnnnnnnnnnnnnnnnnnnnnnnnnnnnnnnnnagaaacaaaatcaacttagttttgccatccttacttctccatgagaacaaattttgcacatgtcttttctgtttagtggatattaaaagaaaacaaaccgtgggaggcctggagattttgcagttgatatttagatatcagttttgttgccctcactttgtacattagacagaatcctgaaaatttgtgtaaattgccattttggtaggcaaaactgtactttaagcacataaaagagttttataagtgtctatacttactatgtgaacacattacaactcatgctttacattggtgagacatggaaagtgcttctttgaaggactattcaagtatcacccactaagcagctaaagctaatattatgtttcctgcaagtattactcatacttgtttcatcaacaccacccacatttaaaaataaggctttattttgacacttaaaaattgaaagctactaagaatacatgaatgccctgggaaattaatctaattagattttagaatgtgggtgtgaagtcttctggaattagtgtttataaaggaatatttgtttcctgttttacttgtacactcatactagcttgagcctagtaatgtgtttagttaaaaaaactttttttaatgatgaggccaaatatgtgtattatattagagagtaatttgaggaaaga

SEQ ID NO: 172385 - DNA, 703 bp, Homo Sapiens
tcttttcccctcaaggcacacgagactgttttagttactgagaatctgtatcccttcctttttactttttaagaatctcattgattaaagagaacaaaagaggttggcacaaaggggcccttctcgccctagccatcctgaacaggaaacaaacacaaagttctcttccgttctgtttggtccatgaaatagaacactccagatattacgcttttcattaaaaaaagcatcttgtttgtgttgcttgactagacacacaggaaaatttacttttgaaagattggggtaattaatatggaaaattaatgttaaaaccagttatttttttggagggaggggcatgtagagattggaattgttttaaagcgggctaacgagaaaagaaaatcataaagagagaaaagtttatttaaagaaactgcctaagttttctgttcccctcttcctttttactagttcagagttagtctggcttagaggatatactaacttgcccaatcaatcttacattacagcaccagtccagaaatagctccccagccgccctggcctccagcatgttaccatggcaacagaaccacagttctataaatagatcatcagcaccaaatcttgtgagagagacctctggagtgggagccagccaaaacccagctcaaaaataaaatagaaggtaagaaagggccctacagtttgaattact

SEQ ID NO: 172386 - DNA, 746 bp, Homo Sapiens
gctggtgccagaggccccggtatccttcataaaagcatctgttggtgctgactaacacacggaaattactgtgaaaattgggtaataaataggaaaataatgtaaaaccagtattttttggaggaagggcatgtagagatgggaattgttttaaagcgggctaacgagaaaagaaaatcataaagagagaaaagtttatttaaagaaactgcctaagttttctgttcccctcttcctttttactagttcagagttagtctggcttagaggatatactaacttgcccaatcaatcttacattacagcaccagtccagaaatagctccccagccgccctggcctccagcatgttaccatggcaacagaaccacagttctataaatagatcatcagcaccaaatcttgtgagagagacatctggagtggagccagccaaaccccagctcaacaaataaaaatagacagcttaagaaatgggcacactaccagtatctgaaatttaacataaaggcagttccaccaggtatctcccggtcacgacagatgcaggcgctcgtttgagtccacgggtgaggaagcacattttaaaagttttaagcagcctcgttctctttctctccgagtctccttgaaacttttcatgatctatacaaatggagcgttttcatgcactaagtctttcagtgagtaaataagtcgtatgtcttataaaaccccaaaaacttctaaatgatttgaggggaaag

SEQ ID NO: 172387 - DNA, 1135 bp, Homo Sapiens
  misc_feature (1092)..(1092): n is a, c, g, or t
cggggatctttcctcaaacaaaatgtcttctcatttgataagattcaaactgatgtgtctcatggatcctatttaaaatttgcttctcccccccatcataatcccatccatactgggaagaaaagttgtaaacaaacgttctaggtgagaggaaattgatcctgtcccacaagtcattttaagatgaatgaactcagttgctgacttagcatcccagtcatgggagctgaatgaactgagtggccctgatgaaatggtaccacttcttgtggaacagggtcctgaccattatagggcgggccaggtaccagactcaattgctctgaaaagtaacagactcttctttttgcagtgctttgagtacccgaatttcatccgagtggtcatcacagtccccgaggtgatgatgctggaggcgtgcagccggatccaggagttctgtgagcagcactaccattgtgctgaaggcagccaggaggagtgtgataaataggcctgcatccattctcctgaggatgtgtcccatctagggaaggctggactaggccttgcggctcctcagggactcaggtggccctactgggagaggggcctcaaatgcaccatgtcaacggttcaagattgttcctgcctttccccaagtacaaccacacccacactcagatcctcctcattcacatcgcagattctcccttgctctgcgctgctagagtgactcactaattcattaatctgcctccctctcgtaagatttccttctttttttcttgaaagtaccaggtgaacaaagtttaccagaaagcagttgagacaagaaaataagagctcaggatgagggaaaagaaaaagattgagagaatttgtgcccccaaccatttcctcagactctaagaaagaacacgctctctccagggcaggtctgaagctcaactctcttattgcctcacttcaggtatacctcactttacacaataggaattataactggaaaagaagttgggggacacatgtattttgggtgattaccattttaaacacattagggaaaagttgctattttggaactttttattggatttttgggggggagtnaaggattatttttgtggatgccaattaatatccctttaattgg

SEQ ID NO: 172388 - DNA, 627 bp, Homo Sapiens
agatgaagtgaagccaggttgtgcttagactggggtggctcaattcccttctgatagtctcggagtctcaggcatcccaaagatgaaagctctagaggagagacaccagtcctcacaggactcatgtccatgctcagtccaaggagacctagccacttccttacccttcctgctcagtttcagaagaaaaggattggggattggttgggctgctctcccaccttttaagagccaactgctttggtcaccactcaagacaagagcaagtctattttcagaaagcacagggggtgctctgtttctctatcctccctaacaaataggctgggctagaacctggagggcaaccatggaggagtgtgggaaggattcacccttgcttcagaagctccttgcaatcagggaccagggtagtgtgacaaatgccacttcaaggttaaactggacatgaccaggggaaggtgtcaggctgtgtgttgttacagattgtatatttgcatgcctgggggttaccaggctgtacgcatataaacagggaggaggcaggctctgagaacctgccagggtgcctgggataagctgtgactttttgccactgatgccataagtttgaggggaaagaccact

SEQ ID NO: 172389 - DNA, 882 bp, Homo Sapiens
  misc_feature (521)..(521): n is a, c, g, or t
  misc_feature (525)..(525): n is a, c, g, or t
  misc_feature (528)..(528): n is a, c, g, or t
  misc_feature (530)..(530): n is a, c, g, or t
  misc_feature (534)..(692): n is a, c, g, or t
  misc_feature (698)..(698): n is a, c, g, or t
  misc_feature (714)..(714): n is a, c, g, or t
ttatcttagggactgatattggtaattatggtcaatttaataatattttggggcatttccttacattgtcttgacaagattaaaatgtctatgccaaaattttgtattttatttggagacttcttatcaaaagtaatgctgccaaaggaagtctaaggaattagtagtgttcccatcacttgtttggagtgtgctattctaaaagattttgatttcctggaatgacaattatattttaactttggtgggggaaagagttataggaccacagtcttcacttctgatacttgtaaattaatcttttattgcacttgttttgaccattaagctatatgtttagaaatggtcattttacggaaaaattagaaaaattctgataatagtgcagaataaatgaattaatgttttacttaatttatattgaactggcaatgacaaataaaaattctttttgattattttttgttttcatttaccagaataaaaactaagaattaaaagtttgattacagtcaaaaaancccncancncccnnnnnnnnnnnnnnnnnnnnnnnnnnnnnnnnnnnnnnnnnnnnnnnnnnnnnnnnnnnnnnnnnnnnnnnnnnnnnnnnnnnnnnnnnnnnnnnnnnnnnnnnnnnnnnnnnnnnnnnnnnnnnnnnnnnnnnnnnnnnnnnnnnnnnnnnnnnnnnnaaaaanaaaaacaaagttgtgngccgctcccctcgccccccaagaaaatatctctttcaaccccttttggcgggcgggccgcggccccaccaagagagaagagagaaccccggggataaaccttcgtgttctcaaaaagaacaccaccgccggcacaacacaaagcgggcttgtccttcttcccaccaac

SEQ ID NO: 172390 - DNA, 803 bp, Homo Sapiens
  misc_feature (79)..(97): n is a, c, g, or t
tcctcatccaactatcccactggaaaccagctcctcccaaacctgccccccacttatttttcccttaattcccccctcnnnnnnnnnnnnnnnnnnngggagcagtcttgggagaagatgattgtgagtgtagactgagggtagtacatgaatgcaatggagatggggggaatctgagcagaaatggagattctgtgacaaggagagggtgtggatggccccaccaaacatgaattggggaaaagtgcataacaatgtgcagggtagggtacatatggctctgtcagaagaataccatgatttaagggaagaaagtacacaaggtacatggagggtacacagggaaagtacatggataaacatggacgtgtgcaaataggaaagacatgactcagcatgctagacaaattgcacatgcctacccaaacacgctcaagggcagacccatgaccatgagaggggcacacgtagctgtgaatgcagggcacccgagagcacatgtgactgaacatgaagaaagcatacgggaaaagcgtgtgtacacatgagcatgttcagtgggcacacgcaggagaggggaggatgcatgtgtgctgagcgtgagtgcacagagcagaggcaaggagcatgtgagccttggcgaaaagaatgagctcccaaaggaagcaaaattcagggggagccacatgtgagaaagtatagaagggcaagtaagatggaaagagattatgacagtggagaaaaggagagcccctttggggtggaaagagcacttgttgggagacccctgctggacaggaaca

SEQ ID NO: 172391 - DNA, 916 bp, Homo Sapiens
  misc_feature (905)..(905): n is a, c, g, or t
ttatcgccaaaagtttccaggggggtggaatttcgccgggggattaaaggtgcatcaataccgtttttggaggggttttcaaggggggcgaaatggtttaatgaatttccaccagttctttgaataaattgcaagggggggtgtctatcaaatatttgttattgaaatggcaataaaataaaaaaagagcagtgatctctttaacccaaacttattttataaatataaaaatatagccaacgctggtttcttttatgcagtagccataaccgtaataccagaaaagttctcaaagccaaactataaatgatgcttgaatactatgatgtgaacgcaataaccaaaagtttaaatttataaattcagggtcttttcccctcaaagaacagcataatcaatatatcttcccaacttatctctatttttacgatatgatccattactaagatacaaaatacacctgaactggcctaatctagagttacctaggttttagtaagtttttttccacaaaaacaagcttaataactataatacaagctaatattaaaatgtgttttatggctcaaatcaaattacagtattaggtttctcatcacgatttgaacaaaagcaaactgcttgaaatgagtccagtttaacccaaataatcagtgatgtataacaagtgaagtaagtatgggaaaatcaaatcttatgctacagaaagctgacttatactacagtcaacaaccactaagccttctttggcaatgaaacatacaaaattgcaaactctgatgcagtctcagtgattggcatatactgttccaaacactatgaactagtaaaaacattaagtttgaggatggaaaagctaccccaagcatttcatctcaagtgactgaacaagagaaatgagatgntggaagggggt

SEQ ID NO: 172392 - DNA, 495 bp, Homo Sapiens
tgttaacgggactcatttcaggcagccgcttttgtccaaccgtgaggagaaccccaatacggaattcgattggcccataaaacacattttaatattggcctgctattctagttattaagcttgtttttgtggaaaaaaacttactaaaacctaggtaactctagattaggccagttcaggtgtattttgtatcttagtaatggatcatatcgtaaaaatagagataagttgggaagatatattgattatgctgttctgttgagggaaaggtcatgtatttagaaatttaaacttttggttattgtgttcacatcatagtattcaagcatcatttatagtttggttttgagaacttttctggtattacgtttatggcaaatgtataaaagaaacaagttttggttatatttttatatttgtaaagtaagtttggttaaagtgatcactgttctttttttattttattgtcatttcaataaaaaatatttgaaagag

SEQ ID NO: 172393 - DNA, 486 bp, Homo Sapiens
ggttaaaaacacatcgctaaagtgtgtcctcaagagctagttagggccctgtgttaataggcctcacggggaatactatgtggcagtggatccagtgagagctaccttttcagtataaggtattttcagcatacctgagggacttccagggagtccttggaaggggctcagcgattgacagttcacgctaagatactggttgacagtctccccttatccctagctgaaaaagaggagccccttagggcctcccagagacagacaagctgagcccaactcagcacagtatgaagtagccaataagctgcttgcccaaggaaactgtttttaccagttttagcgaaatagcactggacagttgccaatcacttacactgtgtgtgattgcacctcatagtatttccctccaatcagtgaggcagtacagtggggcctctgtatgtgtttgactaaattgcatatctgttttgaggggaaaagaccctg

SEQ ID NO: 172394 - DNA, 537 bp, Homo Sapiens
ctgagggcgcgtggcacttcccagagggcactgcagcagcctctggcagtggccctccaccttacccactgaaaatgtctaaggggtcccagagtgtgaacctgggcatccctcttcctggtcccaagggtgctcccaatacaatactttccctcccgcaggctgtggccaaaaccatcaccaccctttcacttccaactcagtttcagaaagggtgtctcctgtcctgtggggtccctgagtttgagataatgcgaacatactggaggctgtagcaataacatgtgaagtcaggcagtcactttaaaacctaagcaatctacatgcagtataagccagttgttgttatctcagtaacatttcttaccgaagtagtttttccacacaacttacaacataaaggacaaagaaaaaatattgctggaatatgatagactttttaaagttcagtgttgaaactccttatggaaaagaaaaggagatattacttttccactttctatttcctgtctgtggctttgaggggaaaagaccctg

SEQ ID NO: 172395 - DNA, 673 bp, Homo Sapiens
  misc_feature (218)..(245): n is a, c, g, or t
agggtctttccctcaaactaaggagttgcagaaaaaaatggatttcacagagccttgtatccctaaagttctgtcccagtcagcagtctttatagtccaaacagattataaaaaatgttttccatttgaactttacagtttgcaaaagtgcttttatacattttctaatttcagaaacaggataatttgttaagtgggtttcagtttgctaatagggnnnnnnnnnnnnnnnnnnnnnnnnnnnncagcatctcttgaagaatcttgctacagccaaatggcatctcactttttaaagacgtttgcaattattagttgattcacagtacagaacaaggtataaaggaaaaaaccctgctaggtagtgttataattgctagattaaaaatagactagaacaggttcattttaagatttacttggaagagcaaagaaggaaaaattatatttttaaagaaagagaatattcaggctttatttctggtatgaagtttatattttttaaaaaaatcctatattatcacaccagagattttagattcttttctggttagaaacattgctggtagttggattatatttttattgtattcatttatcttagggggaacattgtaaagaaacaaaaaggtccagatgaatgtatgctagaaataaaagttgaaagattctt

SEQ ID NO: 172396 - DNA, 636 bp, Homo Sapiens
tttgtcagggtcttttcccctcaaattgttaaggcagcacttgttacaaagccaatcttcaaacttaggtctgggattgctataatgcattgcaatgtgctttccttgaatcaccaactttttctgtaagaaaagaagtaattagttattcccattgtgaggaacatgtgtccattttcccagggcagagcacacttcggaaaaatcagtgctctggaattaaatggacaacatacggggaggaccaaccaccgccacctatactctgcccatccaatccttcagataggcagtaagagaatgggatgcggagtaaaggtaaacggagtcagggagtgctgagaaagctgtcaaaacactaaacgctgacttgcaccaagccgtgtctccagcggagacagaagtcctaacattcagcattgacaggctgcctgagcgtgacagtctacttcaaaaagcagaagacacaattctctcagttctgagactgtctcttacttttgcccttagcatggtgtccttgggcttcgcttcacctttttccccagtcccccatccttatgcaaagtaaaagcctttacatttctccttccccacacaccttctgcttcaggatgagtcctttgaggggaaaag

SEQ ID NO: 172397 - DNA, 821 bp, Homo Sapiens
  misc_feature (27)..(27): n is a, c, g, or t
gatgaggtctaccaggttgcctttagnaggagtcatgctgtcaggaaagaaatttactaaggtgtcaaagagctgagttctttgagcataggtgtgatccacatcagaaaagcccagagctgtaaaatctgaaccagatttgaatagagctgatgccaggagctgaaactcttttgtctcttctgggtctgaatgatccacagttatataaagatcattttgtaaatatttcagagcactaaggggatccacttgggccttttcttcaaacctgtgtcttcttatgaggtacttgcaatgcctcagtaaataatcttttgaaggtctacacaacttcagtgaccagaagtcatctaatctcatctttggagagcaagattttcctggattcccaccaaataagtaatgaaccttgtgtagctcatcgtatacaagctgatgggcaaaccttggacatggttcttcttcctgaagacttttagttggattatcctttgcagcttgatcattcttatagacacaagaccaactattcctcacaatgtcataaatccagaatgaatttctaacattttcttccctcttttccttatctttgctgagtccagataagacgtgtatttcattcagttctggatcaatagttgctctctgtgtaaatcctgtcattggaaccatcccagagtctttcttggtgccatctgatattatgtctacatgatcagagtccacatcataactaaagaaatcattcaaataggtctttgatcgctggccaccaaatacatattagcaacgattttttgaggggaaaagacctg

SEQ ID NO: 172398 - DNA, 862 bp, Homo Sapiens
  misc_feature (20)..(20): n is a, c, g, or t
  misc_feature (29)..(29): n is a, c, g, or t
  misc_feature (397)..(409): n is a, c, g, or t
  misc_feature (564)..(576): n is a, c, g, or t
gggtttttcctgggaccaanaaagtttgncccatgcaatggtggcttccctggactgtgtgcagcagttcaaagaagaggttgagaaaggcgagacacgtttttgtcttccctacaggatggatgtggagaaaggcaagattgaagacacaggaggcagtggcggctcctattccatcaaaacccagtttaactctgaggagcagtggacaaaagctctcaagttcatgctgacgaatcttaagtggggtcttgcttgggtgtcctcacaattttataacaaatgacttttttccttagggggaggtttgccttaaaggcttttaattttgttttgtttgcaaacatgttttaaattaaattcgggtaatattaaacagtacatgtttacaataccnnnnnnnnnnnnntccacaaaagccactttattttaaaatatcatgtgacagatactttccagagctacaacatgccatctatagttgccagccctggtcagttttgattcttaaccccatggactcctttccctttcttctctgaaaaaaactaatttaaatttgcnnnnnnnnnnnnnaactgagttgaattgagattgatgtgttttcactggatttttatctctctcaacttcctgcacttaacaatatgaaatagaaacttttgtctttactgagatgaggatatgtttgagatgcacagttggataatgtgggaaaatgacatctaagctttacctggtcaccatgtgatgtgatcagatgcttgaaatttaacacttttcacttggttcttataatgaatgccgaatctgctctgtgttagagatatgaaatggtgttatactgttgaggggaaaaccc

SEQ ID NO: 172399 - DNA, 429 bp, Homo Sapiens
cagggtcttttcccctcaaacctgggtcccctcctctggctctctgacagtcctcatggtactactgtgttagtttagtgaagtattacactgacttgcactcccccaagataaaccagacaattaacaacttcatttaatttgaaacccctttgtttcagctttcaatgaagttcatacatttactgaaggatagtagaacatggacatttaaatgatatattatcaacataaaaaatgagtctaatgaatctaaaatgagcttctcaaagaatggaggtttaaaactcatcaaataaaatgagtacctgaaaatcaaaatctatactgaagcattttccacttacagaacagtttctatagctctggacctaattttactcggcaaggggatatggaaatgttgggatttgaggggaaaagaccctg

SEQ ID NO: 172400 - DNA, 820 bp, Homo Sapiens
  misc_feature (582)..(582): n is a, c, g, or t
caggtcttttcccctcaaagtactctatgatcaagtatctttggcatccatgtatatacgcacagtcaaatctagtatgatatataatcacgacatgctcacttgatcagggaagactcatttttttctagcatttaggattgtatatccggctgtgtccactgtctaatggtgatgtttgtaattctgtgtgcctagcaaggtctgtaggatcaaactacaaactgctggtagtatgtgtagcactatgcaaatacaaggtagtaataatgctgttactgtcactgtccttgagacatatcttgtgaatttcaggggattaagacagatgactgaaaagttgataatctgttgaataaatctttaatttagagcttgctctgtgctatgtaatgaaaaaaagacaacgaagatatagggggtccttggtttagtctgagtattattttagtggagccacatcttaagtaagttcagctatagagatttagttaatagaaataagatggtggttgaaagagaagtctgattttacagcagaatagtatagtaatttcctgctctgagtccatgccagaatgncctggagtgagaatgaggtgtgtgggagtcatgaatctgctttttccttgtgcactcaatttttctgccactgatgttgggtcagtcttgctgttgtgaatattttgggtaaagcatggctcctaagtataacaaaaggaaggcataaaaggaaagctggctgcatagacagtttattgagagaagatgttagagtactgaactttacaggggacttcaggaatttttgaggaaaaga

SEQ ID NO: 172401 - DNA, 692 bp, Homo Sapiens
tttggatgcctgagactccgagactatcagaagggaattgacccaccccagtctagcaccacccggccttcacttcatctacataaaggtggtataaaaacatagactggaggaggtaatccatggagagagaaaaagaagagggctcaggacaaggccctgaggaggcccaatcctaaaagtttgggcagagggaaccaggcacgttaaagaagacagaaagcggactatgcagagtgcttgtgagggtttcactaaaacagaggcaaaactgtccattgaattcagtaacatgaagtgtttgatgactatgatggcagcagtttcaggaagggcggtatggaaggcaggctgtactggttgagtgaatggaaagttggggagtagaacgtgtgagaagttggccttcaaggggctcaggttaataatagagagctatggagtcaaggcatgtttaagatgggaggtagagcatgccaatattgatggcaacagtcaagatggtgtgatgagagagatgggaggggcacaaagaggaggacccctgaaggagcagagtccatgagaaagaaggagggatgggacctttgtaggaagagacacagtcctgcagcctcatatggctcaataaaacagaaaggggcaagtatagaagattaggatgactaaatttgaggggaaatacgaccctg

SEQ ID NO: 172402 - DNA, 504 bp, Homo Sapiens
cggtaccttacttccacgaacactgcagtaagtgtaccatcccagctcctgaatcctgatagaggggaagacaggtgtgtgcagagccccactcaacacacacacacctagagtgcccagacatcctactctaaactgaccatctcagagctcagcctatgccctgcccttctgctgttgccttaatcaacctgttttccaacacctaggaaaacatctacttcataccttctgagaacacactccacccacaaatagctgatagtctcacttcatttcacaaagaagagattcaaaactccttcatcatttccccattaatttagtcatcctaatcttctatacttgcccctttctgtttaatagagccatatgaggctgcaggactgtgtctcttcctacaaaggtcccatccctccttctttctcatggactctactccttcagtcagcctcttctttgtagtagttttgagacagggtctcactctgtcacccaggttgg

SEQ ID NO: 172403 - DNA, 713 bp, Homo Sapiens
aacccctcaaagattaccatgtttagaaggcatggactctccttatccatgtaaatatcacagttaactagtgcagtgcctggggcatatggaatattcaacaaatagtagtgaaaataaactttatgcttatattgcacagctttcactttcattgatatgtctgatcattgattttcttctcagttcagttaacactgagcaaagctttatagaagagattcctaaattagtcttgaagcagattgtaggtggtgatggtggttgtatatgtatgtggaagaaagtttaagggaagcatggccaagagaacagcaagtactaaaacatgggggtgggaggaaaagcatgttgggaaacgttgaatattgctggagtgtatggtagaatgaaaaaggcaagaaatgagattagaaaacagcatacgggttttatataccacaacaaagggtttgcagtttatcttttggataatgggattttgaagaattttcagtggaaaatacattaattgagaatagaatatgtttttgcaaatttataagagacagactgagagtaaaaaattcaattgaaagtgcagtgtgttttaaaatattcagcaataaagcctcgtgtttctgttgattagctatgtaggactttaaatggatcttcaccattatcaagcagtttttactttctaaactttattttgaggggaaaagaccctg

SEQ ID NO: 172404 - DNA, 707 bp, Homo Sapiens
gcagtttcattggctctttaaatacatacatgggacactcatgcagaaccacagaaatcatgtagacaaactagaaattatcgtgcactcacaaattatagcttccattattaggtaatacatgctaaaccctagcaaacattaagtacgtgaactcctattactaaatagtaatcactcaagtaaactggacaaaatgtcttacggaggtacacatctcatgtgaaattaaaccatgttgcaggcagtgctacaacctgagattttacacagttatttacatttctattgcctttgtggcaatatgtgcctgttaagataggctattagagaactgagcaatgagaacacttacaccttaaagtacaaggaaggtaatgtgacaatatcagcagatattttgcattatttagttagtaatgaatcctcaaactctttgaaaacacaaaggaacttgggcagcaagtgagggtgtttaatttaatcagaatatcacagaagtttataaaaagaaaaacaaaatccacatggtatctggaagcctaaggcttacagagacctcacatatatctctgtcaacaatctagtaatgaattactatgaaaaatttgaggaatgggaatacattttaaaagtttacagagttttaaaatgaaacctttgtaccatgaaaaatttacatttcatgcattgtaactatttgtaaa

SEQ ID NO: 172405 - DNA, 708 bp, Homo Sapiens
caggatcttcccctcaaaccactcatcccaaacaacaaataacaagttacgatacatgctttgtgcgaacaggagttcaaatcctaggtgtaccacttatgagatacgtgaacttctacaaaatatttaagctcacttcaatttcttcagttataaaatagagatagcaattgcacccattttaagggaattgtaataattaaatgaaataatacatcaagtgcttacaacactgactagcacatcataaataaaatatagattagcaattattaattcagccctgtgttttcagtagcaagcgttctgtggtctgacaatgcttccataagatacaacttcaggatcagcggcaagagaggctactctaatcctgaatccagtggttttcaggttaacctcatcccttttccagtgcctccagatgcctacaaacaggttgctcatattccgcacattccatatgccctctccaggaatctggcacaccttccatgtagaaatgtcacttttagaggcttcagctcaatgttaaattaaaatatgaagttcgctgttagcaaattttaaaaggagtatgactcttgggagagaacatagagttcaaacactttcatcagattttcaatgcaaattcttaccctatatgaactttggaagctgagttaatcttatttgtatttttaatcttttctttttacattcata

SEQ ID NO: 172406 - DNA, 622 bp, Homo Sapiens
taagacacagaaaaaaaagactgtcattttcttgagcagctttcttgagctctgtgctgtgtatgcctatgtctggggcatacacaaggactctggcaggcccactaaactctaccacgtagttgccagatatgctgtaaactgtcacctggaagttgggatttactcttttatttttctgtttattttgcatgagtactgtatgtataaaaaagtagccacatatggatggtcaaagggtttcctagaaatatggatagtcagagggcttcctagaaatatggatggtcaaaggtatcctagtttttcaggtaaactccactagaaaccagaaccatatcccaattccatagcctttattatttcagatcaatagaagcagaatcaaaatgcatttggagcttagaggtcaattgatttggaaaccactccggtgcaaagaatctctagattcattgattttggagtattgtttgaggggaaaagaccctggttaagacagttttagggaatccagggtgtacatcaatgcgttattcacaaatttaaacaggtaatactgaactcatttgctagatttgacacagaacttgaagactccataatataccttgtcagaagc

SEQ ID NO: 172407 - DNA, 448 bp, Homo Sapiens
ccggcccaggtcttcccctcaaacaccactgttgcattagcgagaatacatacacataagaaaattcaaataacagtacaagactacccgtgattagtgattataaacaagaaaaatgccagcattacattatgaataggaaaatactccttggtatatggcattcatttctcatatatttattgagcacctcccaatatagagcatacatttaagcatgttacatagtgggcacttaaatatttgttgaatattatcagtggataagacagacacacaccgtctgtactcccaaagaactgatagttttattggggaataaagctgtagaacttaatcattacaactcagtggtgaaagtgctgatttgtagatgttagagtagtgtgcaggcttgatcgggacagaaagaatgaatagaattcaaatttgaggggaaaagaccctg

SEQ ID NO: 172408 - DNA, 468 bp, Homo Sapiens
cagggtcttttcccctcaaaccttgagagcacagcagcctaagagaagatctaagctgtaaccttgtgagaccctgagcatgaggcacccagctaagcgacactcaaacccctgtgagataacattaactgtcttaagctaagtttaggataacttgttccacagtatagacaactaatacgatcccaaatctcacaacctgcatcactagcaccctagtccaacctcatcaacagcctaggccatgacttacaacagcttaagtgagtagcctgcttccacacttgccttgcctccttcctttattcttcacagcaaccacagagatgcttctaaaaatgtaaatcagagtgcaaaagtcattaagtgggcccgaggaatgtagacatctgcacttggtatgtgagggagaatgttgcggtagcccagaaagatgtgtcagagcctttgaggggaaaaagacccctg

SEQ ID NO: 172409 - DNA, 681 bp, Homo Sapiens
caggtctttcccctcaaatagctcgggtaagtatccacaattgagaaccaaggtaattaaatgcaacataagcatcagaaaggcatggtttgtgatttgcttttttgttatatattatcaagtacatacagtactggaaaagtctattagctaaatgaataaatgaaaaaggcttaacagcatcttttaattatgggctttctttagctgaatgttaacccaaagctatagtgctcaaatacaaacttcagtaaaatgctcaaattgcaagtggccaagcccaatcaaaatctcaagagtggaaccaagatgggtgctgagagatcccagacctacagagaggcagagaaattgctaaatatcaaagaactggggagaaaagcagacgtaggtagaactatatattgttgagggcagaatccatgcacttatggctcaacttcctcaaaagactcacataaaggggggaatacttcctaatatacctattaattctgaatgaagtcagaagatttcaaatctatttactactcttactggcgtgatcttaaaagaaagcttcacacagcagaagtcatacttaatgggattagtcattttcctcccttctttctacaaagtattttatacctggttgacacactgtagtccaaaactataacaatgtgtactaaaacactg

SEQ ID NO: 172410 - DNA, 639 bp, Homo Sapiens
acaacagcttgggaacactgaaaattgcaacaaagcagaccagactgctgagtgagtaacatgaaggagaggcccagcaacccgttatcctacagccctccaggtggttctggtccattctacgtgcagcagcctctgcagtacctgagccgtagtttatcctgagttaacatagtcatactaggaatacgccatacacatgtggtaactttagagctggactcaaaactccaaaaatgtatgaacaaaaataggtctgaccgactccacagcctttattggtttcttgctctttcccatcttccttcactgcttccttctgttcctgggatcacctttcaagtaaatcacttgcttttatgtgttgcatcatcatcatgcaaattaaagcaccacaatttattgaacattttatcaaaatgtaaaaccttacaaaagattaacaggttatgtttgattatgggattgaatattacattctcactgttgtgtttgataattttcattacaaagtcataagtaatcaaatgattagacagctgtttaattatacctctaaagaataagcattccatttgcttacataattattgtgactctgggatgaatgtattctgaatttgaggggaaagaaccctg

SEQ ID NO: 172411 - DNA, 661 bp, Homo Sapiens
tagtactcagataatacgctcagtactgcagagctgctgcacgtagaatgaccagaaccaccggagggctgtaggataacgggttgctggcctctccttcatgttactcactcagcagtctggtctgctttgttgcaaattttcaggtgtttccaaagctgcttgtcggggaaatgacttgaagaacttctctggctgcccagtatgatgatgttctccagtgaagacagtggcccgcgtgagatgcagtaagatacagtgatcgtgaatgcttttaagtggactctagtcttgtttatccaagtgtgagaaatgaggtcatgtgtgttggacttctgtggtttcaccttggaagcctgactactgttcaaagtctacaacagtcaggtacatatccattccgggtatacacgtgtaacctaggctaggatctaaagtctttacatggcctgggctggaatctgtctcagatcctagagagctgctctgggtgaacacacctggaggaaacactgagatccacaaggggagataactcaaaaatagagtcctttggtgggttgtttttggaactgttcctgttgctttggggatgacatgggggaagatgtggagaagacggtggtggtgacaacggaggtttgaggggaaaaagatcctg

SEQ ID NO: 172412 - DNA, 659 bp, Homo Sapiens
tacaacccatgatatgcttggaaatgaattcaatatcataagccccaactttttctatgtgtcactaaatttagcttaacctgaagaagggagagctcacagtcacaatgaaaagttttttctctctacctcctccttcagaagtacttcccagtatttccgaaaattcaatttgcattccacatcactacctaaaaacacaattatgctcatacctctcataagctcaacagaaataagaatgttttaggcctcgacaacctgtagcttgatgagtttttgcaaaatccagctgcttgtgggagggggagcagaaagagtagaagtcacacctgagagggaaaaatctatccttgaatacaacattaatattaggaggataaactgaaatctgagcctagtgttgtttggggaaccaccatgaaaatactttggattataagcatctccaccaaaatcacacattgtccctgacacgtaggtaccaacgtgctgaaaaggttgcataagcacataaaggaagggagagctgcctacaaaactttgcttaggtgtagcccattcttatctcacagcatagggactggcaggagtcatgtttggaaagagctggagctgtgccacattcaacaaggcccgatttgaggggaaaagacctg

SEQ ID NO: 172413 - DNA, 658 bp, Homo Sapiens
  misc_feature (195)..(209): n is a, c, g, or t
gatccctcacagcgaggagactcagacttctaagggggacctgctgtccagcggtgctaataccccagagggcctgtgatgagattgtctcacaggggagttgaaagaagctgaaggctggaaccaaaatgctggcctgccgagaccacctcggtcggggagaccctaacccagcagcgctagaggaattaaagnnnnnnnnnnnnnnngaaatatagaggtgtgaagttgaagtgggaaattaggggtctcatagccttcagagccgagagccccgaacagagatttacccacgtatttattaacagcaagccagtccttagcattgtttctatagatattaaattaactaaaagtatcccttatgggaaatgaagggatgggccgaattaaagaaataggttgggctagttaactgcagcaggagcatgtccttaaggcacagattactcatgctgttgtttgcggcttaagaatgcctttaagcggttttcccgccctgggtgggccaggtgttccttgctctcattctggtaaacccacaaccttccagcgtgggcattatggccatcatgaacatgtcacagtgctgcagagattttgtttatggccagttttggggccagtttatggccagattttgaggggaaaagacctg

SEQ ID NO: 172414 - DNA, 606 bp, Homo Sapiens
ccagggtcttcccctcaaaataccagagaaaaaatccaaagtattgatataaagtcaacaggttcacaaaacttcttacaaccacataatgtgtcatattttctccagctctaataacatcttcctcattgttctccaacctttcaccatcggtcttttcatggctctttcagcttctgcctactacccagtaccaatgtcaatgccacatatttttgctgcaaaagcactctcaacttccttgtgccaaattcatttcttgttatctactgctgcataataaacttcctcaaaactttctaatggctttaaacaacaggtttttaaatatatctcacaattccagaggtcagaaactcaaacagggctcaattggggtaatagatatattttttccacgtgatagtaacaaagcttatcctgtggtatttagatggtatctgggctggtctgggctagtcaatcacatatctggcactttgatggagaaggctgggctcagctgggagcttcaactggagtatctacacatggcctctctagcatcacagtctcaaggtagccagacttcttatgtggcagctcaaggctttcagagagtgtccc

SEQ ID NO: 172415 - DNA, 147 bp, Homo Sapiens
gtgcacttgcctggaattcttgcccttaagtagcttatgatctaatggggaaggcaaatagataaacagtgataaaatgtagtgaaacacagtcattgttccactgtaagtgattgttccagatgttttgaggggaaaagacctgga

SEQ ID NO: 172416 - DNA, 108 bp, Homo Sapiens
ggataattccttatctcctttcttaagtcaacaggtgagagaagccagaagccagacaatgtggttcacatcctcaaatggttctcctttgaggggaaaagaccactg

SEQ ID NO: 172417 - DNA, 708 bp, Homo Sapiens
gttgagagcttcgctttaagccagaggtcctcaaacttaaaggtgtataaagatgacctgggtagtgtttaaaagtagtttgtcaggctactccgcagatgtttattttcagtgggccacaggaatctgcatttttaccaggggacctatgagattgtgatgcaggtgcttgataagagcccctgatctagtgggaactggaggcagtgaacaatgaaaggtattaacttggctctgaagtgcagtcaggtatgtgaccccatactctgcaatcccaaaatcactcagctgccaatcacactagcttaggctttgaaaagtctaagggcacagtattgtttgttctcaactgccatgaagcagttggctttaagagactggtatccctccctctccactccagcctgtttgagggctgctgcacagtgttgtgtaccaggagatgtttctaggtgtgtgggggttggagatgtgagtagtgccgatgagttgcgtgagttgctgtgctgttcatagattatgtgaattcttcattgtcgtaatgattttcacggttttgaggcagccacacagtcattgtgcctgggagattcacaattggccagctgaagaagaggttgattttgtttagtatccgtgtattccagactgcatagcctcgggggaaggcaggcaggtgactctttttatttgaggggaagacctctg

SEQ ID NO: 172418 - DNA, 601 bp, Homo Sapiens
  misc_feature (26)..(26): n is a, c, g, or t
ccactgaatcagctctttttatctanatgtctatggaaagaaggctcaggaaggagaggagcttgtagaatgaagccactgaagttttcggggcaaatactgcctggctgaaaccctaccaagttataactctctcgactgtaggctgagtcatgccaggtgacttcctgaaagctgctgttgctcctgatgcttcaccgccgttgtaccatgtggcacacatcaccacatcacaaagcattttggttgctgaagtccccatagggcctaggagagctttgtggtgtccatcataatatcctcaggatctagccaagtacccatttcccagaggaatgaacaggcaccaaattctcaatctactgtgatgagtttacccttcagagtctttcttctttcagcagggaccggaaccaccttaccctctctgcatctcccacctcttatgctgaacagctctcccaggtcaagcctcaggggtctgccctggtttatttactagttctgaggatcagtgtcctaataagcaacctcttaagaggatcaacccagctttcttcactgaatcttttcatgttgtctttgagggaaaagacccctg

SEQ ID NO: 172419 - DNA, 380 bp, Homo Sapiens
  misc_feature (62)..(71): n is a, c, g, or t
  misc_feature (280)..(280): n is a, c, g, or t
ttttttcactaaggataataactctccagagattaatccaggttgttgcccttatccctagnnnnnnnnnnattaccaattagtattccatggtgtgatggaccacagtttaacctttcaccctttgaaggacatctgtgtagcttccagttttttattactataaataaagttgctgtaaacattcatgcactggttttatgggaacatggtttttcatgtctttgggataaatgctcaggaatgcaaattgctcggttgtatgctagttgcatatttngcaggtttagcttgcaacttgcagcgatccctaaagcattcattattatcattcttattatatacttttgaggggaaaagaccctagggtaccgagctcg

SEQ ID NO: 172420 - DNA, 377 bp, Homo Sapiens
cggtccaggtctttccctcaatgatcatagacaagaagcaaaggcaatacagggggaaagacagtcttgacaacaaatgatgctagaacaactggaaatctgcattacaaaaaatgaatctagacaaaggctttaaactcttcacaaaaatttactcaaatagatcacaaaactaaatttaaaacacaaaacaataaaattcctagaagactacacatacggacgaaaaactctagatgaccttgggttcggctgctgactttttacatacaaccaccacgagaccctgactccctgacacacggacaagacactgactaacgctaaacctttattaacacacttagaacatttcctgctttgacggggaacacaga

SEQ ID NO: 172421 - DNA, 778 bp, Homo Sapiens
caggttcatttcctcaaatgaaaatgttgccactcacaaccctttcagaccttagtgggaaagataccaaccagttagctataaattatgcacaagatctggaaatgaagatgaatttagaaacatggtgactagatgcaacaatgttggggttcgtatttatgtggatgctgtaattaatcatatgtgtggtaatgctgtaagtgcaggaacaagcagtacctgtggaagttacttcaaccctggaagtagggactttccagcagtcccatattctggatgggattctaatgatggtaaatgtaaaactggaagtggagatatcgagaactataatgatgctactcaggtcagagattgtcgtctgtctggtcttctcgatcttgcactggagaaggattatgtgcgttctaagattgccgaatatatgaaccatctcattgacattggtgttgcagggttcagaattgatgcttccaagcacatgtggcctggagacataaaggcaattttggacaaactgcataatctaaacagtaactggttcccggaaggtagtaaacctttcatttaccaggaggtaattgatctgggtggtgagccaattaaaagcagtgactactttggaaatggccgggtgacagaattcaagtatggtgcaaaactcggcacagttattcgcaagtggaatggagagaagatgtcttacctaaagaactggggagaaggttggggtttcatgccttctgacagagcacttgtctttgtggataaccat

SEQ ID NO: 172422 - DNA, 408 bp, Homo Sapiens
gtttgtttctttgaaatgtccttgtgccaagtacgagatctattgttggaagtctttggtatatgcaaatgaaaggagaggtgcaacaacttagtttaattataaaagttccaaagtttgttttttaaaaacattattcgaggtttctctttaatgcattttgcgtgtttgctgacttgagcatttttgattagttcgtgcatggagatttgtttgagatgagaaaccttaagtttgcacacctgttctgtagaagcttggaaacagtaaaatatataggagcttaaattgtttatttttatgtactactttaaaactaaactgaacattgcagtaatgttaaggacaggtatactttttgcaaacaaatgcataaatgcaaatgtaaagtaaagctgaaattgatct

SEQ ID NO: 172423 - DNA, 1239 bp, Homo Sapiens
gggcccgccaagcgcctcggagcgcgcaggatgcgctgggcggccgccaccctccgtggcaaggcgaggccccgggggcgggccggggtcaccacgcctgccccagggaaccgcacaggcacgtgcgctaagctgcggctacccccgcaagcaaccttccaagtccttcgtggcaatggtgcttccgtggggaccgtgctcatgttccgctgcccctccaaccaccagatggtggggtctgggctcctcacctgcacctggaaggggagcatcgctgagtggtcttcagggtccccagtgtgcaaactggtgccaccacacgagacctttggcttcaaggtggccgtgatcgcctccattgtgagctgtgccatcatcctgctcatgtccatggccttcctcacctgctgcctcctcaagtgcgtgaagaagagcaagcggcggcgctccaacaggtcagcccagctgtggtcccagctgaaagatgaggacttggagacggtgcaggccgcataccttggcctcaagcacttcaacaaacccgtgagcgggcccagccaggcgcacgacaaccacagcttcaccacagaccatggtgagagcaccagcaagctggccagtgtgacccgcagcgtggacaaggaccctgggatccccagagctctaagcctcagtggctcctccagctcaccccaagcccaggtgatggtgcacatggcaaaccccagacagcccctgcctgcctctgggctggccacaggaatgccacaacagcccgcagcatatgccctagggtgaccacgcagtgaggctggtgcccatgctccacactgggaggccaggctgaccccaccagccagtcagctacaactccacatcaactccacatgcgcccagctcgagactgatgagtggaaacagcttccaagtgtagggacccctttgaggggcccacctgacatccaaggctgaagaacccagcggggaagggttctggttccggaatatcctgggccgaaacgatttttatagttatgggaccaccccgaaaccactacttgaggggaaatttacttagctgggggccctcccctaaactaacatttccttttaaaaaaacatgggaaaagtgtttaaaccacaacccagttttggtttatcccaaatagcaaaccccgcccataatttttcctttccggcgactaaacgcaccacaagtacggccttaccaattacccc

SEQ ID NO: 172424 - DNA, 575 bp, Homo Sapiens
attgagataagcacggtgtacaacagactgtcattgctgctgaagtcccttcttgctataactagggtgacaccagcctataggctctccaggaaacaagggcatgaatatgtcatattatacaggatatattttggagaagttcagctgagtggcttaggagaaggcttccagacagttcgtgttgggacagtgggcacccctgtgggcaccatcactctttcttgtgcttacagaattaacttgggcattcatgtctaccaggcaatttgagaggaccccacctatcatggggattattattgatcactttgtggaccgtccctatcccagctcctctcccatgcacccctgcaattacagaactgctggtgaggacactgggagtaatatacccgtctgtagaagactctcaagaagtgtgtaccacctctttttccacctccccaccatcccagctgatggttcctgggaaggaaggtggggtaccccttgctcccaaccagcctgtccatggtacccagctgaccaggagagactggcaacctgcaccccttctgcaagaacccacgcgt

SEQ ID NO: 172425 - DNA, 518 bp, Homo Sapiens
  misc_feature (476)..(476): n is a, c, g, or t
  misc_feature (499)..(499): n is a, c, g, or t
ccggcagttgagatagacggttctcacttgcaagatccgatgagaaaagttccagaggtttttaagaaattggattaagctgggtccctaacttcaagacattctcattatgctccttctcacctttctttgttgctaattatggaaaatagggcccatttcatcatagcctccttcccccgtgctccactacaatcgccgcattctttctagctgtcagctggtttcttcaaggctcctgcttaaagtccacacgttattatggccgaaagcaacctggtgcttcggcctgggataagagccccttctgcatcttattcacagcttgcagcctcagcccctctgatgaggccctcaggggagaggtcattaccttgatcctgcaaacccagactcgttgagcagcaacgcaatcaccatcatcccactgcccaatctagaatatgtctgctctcctttgctctctgtcagctgtnaagccagaggggatttcaaggtnaaatagggcttttacaggc

SEQ ID NO: 172426 - DNA, 424 bp, Homo Sapiens
tcctgtactgtgaagtgtgttgaaatgtggaagttatttcacaaagttaacagggtcttcaagacagaagagatatacgtgcagagtacacacatacacctacgtacacacctgtatatgtcgatgacgacagcatggagggaatgaacttgtgcatggagaagggggctttttttaaacttgaaagaaaccagcccattctgtgtgtgtttggaggaggggagcctgtaaagcctatttaccttgaatcccctctggcttacagctgcagagagcaaaggagagcagacatattctaggattggggcagtggggatgatgggtgattgcgttgctgctcaacgagtctggggtttgcagggtccaagggtaatgaccctttcccctgaggggccctcattcaaaggggctgagggttgcaagc

SEQ ID NO: 172427 - DNA, 488 bp, Homo Sapiens
  misc_feature (131)..(131): n is a, c, g, or t
ggtatccccgccagttgactagcacggtcatgactaggcaaatacccgcggagaagtacgcggtgccagcgctcaaggcccattgccgtggagttcctgaaacaagaacctgcgaagccgacaacgccttncatgctgctcacgcaggcgcgaactcttcgatgaaccgcagctggccagcctgctgcctggagaacatcgacaaaaacactgcagacgccatcaccgcggagggcttcaccgacattgacctggacacgctggtggctgtcctggagcgcgacacactgggcatccgtgaggtgcggctgttcaatgccgttgtccgctggtccgaggccgagtgtcagcggcagcagctgcaggtgacgccagagaacaggcggaaggttctgggcaaagccctgggcctcattcgcttcccgctcatgaccatcgaggagttcgctgcaggtcccgcacagtcgggcatcctcctcgggccgaat

SEQ ID NO: 172428 - DNA, 567 bp, Homo Sapiens
acggatagcggatctgctttgtagggaagacccccagggtcctggtaccaacagtcatttgcccaagagccagtggggtgaggaagcagggtgtggggatagcaggagcagttccaagacaaggccgtggggtagatgtgtggatgtgttctcagcggctgtgaaaaggaactgggagttctcttcacaaacaggagccacagccagcctcccagcacagtgcaatagctgacccttcaagaaaatccctccgtcatgtgtgtggcaacagctgccactgctgggcctgggcgtcagcctgacacttgctggtcaccagctgggcaggctttgtctccaggcagaggccactgactgaatgctggatgaaagatccttttctcctccatttctgcttgccttctctagggttgcacatctgcagtatgactggggatccaggggaggacattaaggtggaggtggcagccaggcacttcccctgctgctggatgaggtggtcactgaacagccatgcctgggcgggctgcgggttcttggcagaccctctgcagatccgctatccgt

SEQ ID NO: 172429 - DNA, 612 bp, Homo Sapiens
atactgagctgaacggtaaccaaaagaatcagagtttgcatgtattgagagcattctatgttccacgtacattctgtaatatcaccaatccttacagtcatctgacaggataagtttccatttgacagagaaactaaaacgtggcctataccccacagactgggatttgaacctggctccgcctgcatagcctcagccctttcctttgcactttgttgtaaaggctcctcctctgagtctctgaattcaatctatactggttgaattcctgccatgtatgagatattctgagcagtgtagggggcaacagagtgcctgctcccaaggtactgcctggggaagactgatcagggaccttgagtgtaaagtaaagtagtgtgcactagttacttctgtgaagctggcactgaatgttcattttgtccacagctgggcaagtctgtggtggccaaagtgaaaattccggaaggcaccattctaacaatggacatgctcaccgtgaacgtgggtgagcccaaagctatcctctgaagaatctttatctagtgggcagaagtccggtcctgttgagagatgaaccatctggagatggggatatcccggaaaataagc

SEQ ID NO: 172430 - DNA, 709 bp, Homo Sapiens
acactgcagcaatgactagcacagtcccacaggtaccttcagatatctttctctccatttcagtcccctaaccgacagcctcactgcagcagctcttcccaggaaatgggcttggagaagacctccctttctaaccagaggtcatagttcatctgaaagtcctcagggaggtacacccgttggcccaggacactctgcaggcagttgtccactggcaggaagtcagggttgctgtgagcccggtcatagcgccgggcgtagaagcgttcaatgtgagcacgaagggcacactcactctgcctggaagtcccaaggccgggcatcaagatcattgcagtatgcccagtcgtcgttcagccgatgccgcaccttctggtagatggcagacatggtcttcatgttgctctttcgccactgccgccccaagtatttggtctgtaccttgaagcagcttcagcacatagagctgcatcatggcttgtttcacctttagggcccgcttcaagatgggggctgaattgaacaccaccagcatcattgtccttgaatgcttccactttgtcagcttgttcaagatccgaagcagattgatacaagaaaagaggttcctccagcaaaattggttactgtcacctgcttccaaactctccgccgtcagctctggcagctcatgcaccacgcagtgagggtaatccaggacagaaatgct

SEQ ID NO: 172431 - DNA, 698 bp, Homo Sapiens
  misc_feature (461)..(527): n is a, c, g, or t
  misc_feature (578)..(616): n is a, c, g, or t
atggtggacatcattctcattaactccatctgtagaagtgaaattagctacagaacttacgtgggtgttagttcattctgattgttagaacttcatataagcatctgttggacaccagccactcaggtaccatggatttagagatacattaggtacaggattgcccttttgctgctgacagtatccttctgtcttactgtattcctcaggacatctgagaccaacatcagtattgcagacttctcaggaggccatctgtgagttattctgagctattctagttaccaaagtgctcaggatgccttgatgcctgtagaacttagcctgctgctggcatcggccttggcccattatggtccttgaattgtggttgggttttgctcgtcatcaccacagggaattgttttttcatttcaatgctttgcctttattctttttggtagatgacaatgaaggagacnnnnnnnnnnnnnnnnnnnnnnnnnnnnnnnnnnnnnnnnnnnnnnnnnnnnnnnnnnnnnnnnnnngacctagcaaagccactgttaaagctatgcaagaagctctggctaagcttnnnnnnnnnnnnnnnnnnnnnnnnnnnnnnnnnnnnnnncgtataaaacggcttgaagaattagaagccaggcgtaaagaagaggaacgattggaacaagaaaaaagagaaaggaaaaagc

SEQ ID NO: 172432 - DNA, 906 bp, Homo Sapiens
  misc_feature (679)..(679): n is a, c, g, or t
tctgaagcacagtaaacgcaagaggggatttgtgtacaaaaggcaaaaaaagtatttgatatcattgtacataagagttttcagagatttcatatatatcttttacagaggctattttaatctttagtgcatggttaacagaaaaaaattatacaattttgacaatattatttttcgtatcaggttgctgtttaattttggagggggtggggaaatagttctggtgccttaacgcatggctggaatttatagaggctacaaccacatttgttcacaggagtttttggtgcggggtgggaaggatggaaggccttggatttatattgcacttcatagacccctaggctgctgtgcggtgggactccacatgcgccggaaggagcttcaggtgagcactgctcatgtgtggatgcccctgcaacaggcttccctgtctgtagagccaggggtgcaagtgccatccacacttgcagtgaatggcttttccttttaggtttaagtcctgtctgtctgtaaggcgtagaatctgtccgtctgtaaggcgtagaatgagggttgttaatccatcacaagcaaaaggtcagaacagttaaacactgcctttcctcctcctcttattttatgataaaagcaaatgtggccttctcagtatcattcgattgctatttgagacttttanattaaggtaaaggctgctggtgttggtacctgtggatttttctatactgatgttttcgttttgccaatataatgagtattacattggccttgggggacagaaaggagaaagttctgacttttcagggctaccttatttctactaaggacccagagcaggcctgtccatgccatttccttcgcacagatggaaactgtacctggggactggaaaaggacaggcccttc

SEQ ID NO: 172433 - DNA, 438 bp, Homo Sapiens
  misc_feature (363)..(363): n is a, c, g, or t
ttcctggagacccgcaagtcctggagaaagcctgagaagacagactgagcagggcagcacctccataggaagccttcctttctggccaaggtgggcggtgttagattgtgaggcacgtacatggggcctgccggaatgacttaaatatttgtctccagtctccactgttggctctccagcaaccaaagtacaacactccaagatgggttcatcttttcttcctttcccattcacctggctcaatcctcctccaccaccaggggcctcaaaaggcacatcatccgggtctccttatcttgtttgataaggctgctgcctgttctccctctgtggcaaggactgtttgttcttttgccccatttnttcaacatagcacacttgtgcactgagaggagggagcattatgggaaagtccctgccttccacacctgtttgttt

SEQ ID NO: 172434 - DNA, 783 bp, Homo Sapiens
  misc_feature (587)..(645): n is a, c, g, or t
  misc_feature (666)..(666): n is a, c, g, or t
  misc_feature (696)..(696): n is a, c, g, or t
  misc_feature (717)..(717): n is a, c, g, or t
  misc_feature (752)..(752): n is a, c, g, or t
  misc_feature (756)..(756): n is a, c, g, or t
cctggcgcctcccagacacatagtaggtcctcatggaatccaggtaccctctgggctgagccataaggacaaagaaggcctggaaggcccgagactgtgctgcctgtgatgcctgctagcttacctccccctcctcctccctactgccacccgcattgggcaacaggcccctcacctgtccaacctcttgtgttgcagatcgccctgtgccactttttcttcaacatctccggcatcttgctgtggtacccgatcccgttcactcgcctgcccatccgcatggccaaggggctgggcaacatctctgccaagtatcgctggttcgccgtcttctacctgatcatcttcttcttcctgatcccgctgacggtgtttggcctctcgctggccggctggcgggtgctggttggtgtcggggttcccgtcgtcttcatcatcatcctggtactgtgcctccgactcctgcagtctcgctgcccacgcgtcctgccgaagaaactccagaactggaacttcctgccgctgtggatgcgctcgctgaagccctgggatgccgtcgtctccaagttcaccggctgcttccagannnnnnnnnnnnnnnnnnnnnnnnnnnnnnnnnnnnnnnnnnnnnnnnnnnnnnnnnnncccaagtgctgccgctgcagnaagtgctgcgaggacttggaggaggcgcangaggggcaggatgtccctgtnaaggctcctgagacctttgataacataaccattancaanagaggctcagggttgaggtcctgcctt

SEQ ID NO: 172435 - DNA, 1152 bp, Homo Sapiens
  misc_feature (616)..(672): n is a, c, g, or t
  misc_feature (723)..(769): n is a, c, g, or t
  misc_feature (895)..(903): n is a, c, g, or t
actcatatgccagagagtaccaacattggtactcagaccacaggacccagtggggtaggatgctgtacaccaggccggccgctcctgccgtgcaaatgttcctcagcagcacatagcacctatcgggtccaggagccggctgtgcacatcccaggacaggagcccctgaccgcgtccatgctggctgcggcgcccctgcatgagcaaaagcagatgattggggagcgtctctacccccttatccatgatgtccacacccagctggctggcaagatcacgggcatgctgctggagattgacaactcagagctgttgctcatgctggagtctccagaatccctccatgccaagatagacgaggcagtggccgtgctgcaggcacaccaggctatggagcagccgaaggcgtacatgcactgaaaccagaaaaggaaatcctcgcttccatggctgccaaaaggacagtgtttctggctctcagccctaaggccctgcaaactctaacttatttcccaattactctgtatctatacctgcgctctgtatgtgaatgaaggttggtcacccatccagcctattaccttttgctttgtgtattaaaagtgctgcaaaatcnnnnnnnnnnnnnnnnnnnnnnnnnnnnnnnnnnnnnnnnnnnnnnnnnnnnnnnnnggaggcctcttatccccgggggccggaaaaaaccaggtaaacgcactatgnnnnnnnnnnnnnnnnnnnnnnnnnnnnnnnnnnnnnnnnnnnnnnntctcaccacacggggttcaaaattttgcgcggctttttcccctcacaagtgggatttccccctttaatttccccccctcagctcaaccgttaaacccccccttttaaatgccctcggttttcgctnnnnnnnnnggtaaaattcttacccgcctacttaagtggacgcggcccttttttcttttgggggatcccaacggcggtttttctcgcgggcgatatcttttccgtccctccccacaaaccacccccggtgttgtcttccccacacctaaaaaaacccttccccctctcccttaccggggggggcttgttgtttcgccccgcgcactcaaaagaatttaccacaaccccccgccttttcacaaaaaggcccgctggcct

SEQ ID NO: 172436 - DNA, 319 bp, Homo Sapiens
tggtgaataacgatggctatattgttgaccaaaggccctcctctgtaagagtgaattgcacgctcacttgaaactatcttgagggactaaggtgtacaatcctggtgcttatgcagtttggggctctaggtagacacgagctggctttgaaattgtagattcctacactccccctttctggagttctgggtctaagtgaattgactcctatttctgttgtgaatgttgtagtttcccttcccattctcttggtggccctggaagcttctaggcacagtgtgccatcgttattcaccaccgtggtgaataacgatggccc

SEQ ID NO: 172437 - DNA, 907 bp, Homo Sapiens
cagcctctaacgttatatattaaaatagccacagttcttgtgcacacaattccatcctctcacccctgcctcccccgccaggcccaggaacagccttaaaagaaagatggtggttttccttttcgagaggcgaggaaacatccgctcagtctttatggaccttgagaaatggtgaggcttcccctccccccgtctctgcctcccggccgggcgtgcaaatggcaggtgcggggccgggcgccatcactcatgtctgcgcttggagggcggcaccaggtgcgggggcaggtcggcgggcagctcgtggccctccagcttgaccttgatgaggtggttggccagcgcgaactcctcgtcgtccagcagcccgtccttgtccacgtcggccagcttccagatcttccctagcacggtgttggggagcttggacttcaccatctccttcttggcgttggcgcccgtgatcttgccgttgacaggggacagcgtgtagaagatctcgtcgtaggtgggcttgtccttgcccacaacccaatccacgtcgtcaatgccctcgccggccccctcgcacgtagcacgtgcccgaacaggcccgttcatggtgccgtcaaaggcgccgcccttgaccacctgggaaggcatcagggactcctcactgccgcaccatcaccatcagccgctgcagatgtcgttggccagcatgtcatccaccgtgtccacaatgcttgggcttctagcgcctggaacattgctgaagtccatggatctacaggagttcctgcatcttccggaggctcgggaagtgcgacaggggagatatgatgctcgcgttaaatctgtgaggtagatgctttccgagagtcgctcaccaggccatctgcacttccatgctctgggtgacaagaat

SEQ ID NO: 172438 - DNA, 963 bp, Homo Sapiens
  misc_feature (436)..(594): n is a, c, g, or t
  misc_feature (603)..(616): n is a, c, g, or t
  misc_feature (656)..(767): n is a, c, g, or t
  misc_feature (837)..(845): n is a, c, g, or t
gcacgaggggaaacaagagtgatctgaggaccagagagtagtgaaagaggaggaagccatagcactcgcagagaaatatgaatcccctactttgaaactagtgctgccaatgggacaaacataagccaagcaattgagatgcttctggacctgataatgaagcgaatggaacggtgtgtggacaagtcctggattcctgaaggagtggtgcgatcaaatggtcatgcctctacggatcagttaagtgaagaaaaggagaaaggggcatgtggctgttgagaagtcaagtaagcgacatagtagttcaggtggcccatgcctgggatcttctctatgattgatacatggcacagtgagagattaatgggcattgtgtacaaattgcttctcaccatccccattagacctacgaataaagcatccggttctaaaattnnnnnnnnnnnnnnnnnnnnnnnnnnnnnnnnnnnnnnnnnnnnnnnnnnnnnnnnnnnnnnnnnnnnnnnnnnnnnnnnnnnnnnnnnnnnnnnnnnnnnnnnnnnnnnnnnnnnnnnnnnnnnnnnnnnnnnnnnnnnnnnnnnnnnnnnnnnnnnnctttggggnnnnnnnnnnnnnnaaaaaatttttaaaaacatttttttgggcgcggggccccnnnnnnnnnnnnnnnnnnnnnnnnnnnnnnnnnnnnnnnnnnnnnnnnnnnnnnnnnnnnnnnnnnnnnnnnnnnnnnnnnnnnnnnnnnnnnnnnnnnnnnnnnnnnnnnncccaagggggttttgggggctttaatgggattaataaaagggggcccaggggagcccaataaaaaataannnnnnnnngggccatttttggagaaatgggggaattaaaaaagaaattgcgccgaaggggaacccttccaaaaggggtgtgaaaacccttaatcccccgggggaataaacaccttggcccctttgg

SEQ ID NO: 172439 - DNA, 420 bp, Homo Sapiens
  misc_feature (332)..(332): n is a, c, g, or t
  misc_feature (370)..(370): n is a, c, g, or t
  misc_feature (377)..(377): n is a, c, g, or t
  misc_feature (398)..(398): n is a, c, g, or t
aggatgatggcttgggcgtggagaatctgaggggctcaggcatgattgctggggagtcctctctggcttacgaagagatcgtcaccattagcttggtgacctgccgagccattgggattggggcctacttggtgaggctgggccagcgagtgatccaggtggagaattcccacatcatcctcacaggagcaagtgctctcaacaaggtcctgggaagagaggtctacacatccaacaaccagctgggtggcgttcagatcatgcattacaatggtgtctcccacatcaccgtgccagatgactttgagggggtttataccatcctgggagtngctgtcctatatgccaaaggataaatcacagccctttnccctatncattcacacccacttgacccnatttgacagagaaatttgaatt

SEQ ID NO: 172440 - DNA, 941 bp, Homo Sapiens
  misc_feature (14)..(14): n is a, c, g, or t
ccagcgcccccagngacctcatcgacacgtacctgctccacatggaaaaagagaaatccaacccacacagtgaattcagccaccagaacctcatcatcaacacgctctcgctcttctttgctggcactgagaccaccagcaccactctccgctacggcttcctgctcatgctcaaataccctcatgtcgcagagagagtctacaaggagattgaacaggtggttggcccacatcgccctccagcgcttgatgaccgagccaaaatgccatacacagaggcagtcatccgtgagattcagagatttgctgaccttctccccatgggtgtgccccacattgtcacccaacacaccagcttctgagggtacaccatccccaaggacacggaagtatttctcatcctgagcactgctctccgtgacccacactactttgaaaaaccagacgccttcaatcctgaccactttctggatgccaatggggcactgaaaaagaatgaagcttttatccccttctccttagggaagcggatttgtcttgctgaaggcattgcccgtgcggaattgttcctcttcttcaccaccatcctccagaacttctcccgtggccagccccgtggctcctgaagacatcgatctgacaccccaggagtgtggtctgggcaaaatacccccaacataccagatctgcttcctcccccgttgaagggcctgagggcagggggtcaaaggattccaggctcattcagtgtccccacctctgtagataatggcttctgaccccccgaaacttcctgcctctgagagacctgctgcaagccagcttccttccctctccatggcaccagttgtctgaggtcgcagtgcaaatgagtggaggagtgagattattgaaaattataatatacaaaattatatatatatattttgagactgtgtctc

SEQ ID NO: 172441 - DNA, 806 bp, Homo Sapiens
  misc_feature (174)..(402): n is a, c, g, or t
  misc_feature (406)..(687): n is a, c, g, or t
  misc_feature (728)..(730): n is a, c, g, or t
  misc_feature (732)..(735): n is a, c, g, or t
  misc_feature (739)..(740): n is a, c, g, or t
  misc_feature (743)..(744): n is a, c, g, or t
  misc_feature (746)..(746): n is a, c, g, or t
  misc_feature (752)..(753): n is a, c, g, or t
  misc_feature (755)..(755): n is a, c, g, or t
  misc_feature (757)..(760): n is a, c, g, or t
gggaggaagcggaagactaatgaccgaagcttcaagactttgacatgtgtgaaaacatgaaatgacccttggctcttattgttcttgctggtgtggtatgttcacggctgaaaagatggtcagaaggggaaaggaggaagtgagaagaaagaaacagggaaatgacagagtgtnnnnnnnnnnnnnnnnnnnnnnnnnnnnnnnnnnnnnnnnnnnnnnnnnnnnnnnnnnnnnnnnnnnnnnnnnnnnnnnnnnnnnnnnnnnnnnnnnnnnnnnnnnnnnnnnnnnnnnnnnnnnnnnnnnnnnnnnnnnnnnnnnnnnnnnnnnnnnnnnnnnnnnnnnnnnnnnnnnnnnnnnnnnnnnnnnnnnnnnnnnnnnnnnnnnnnnnnnnnnnnnnnnnnncccnnnnnnnnnnnnnnnnnnnnnnnnnnnnnnnnnnnnnnnnnnnnnnnnnnnnnnnnnnnnnnnnnnnnnnnnnnnnnnnnnnnnnnnnnnnnnnnnnnnnnnnnnnnnnnnnnnnnnnnnnnnnnnnnnnnnnnnnnnnnnnnnnnnnnnnnnnnnnnnnnnnnnnnnnnnnnnnnnnnnnnnnnnnnnnnnnnnnnnnnnnnnnnnnnnnnnnnnnnnnnnnnnnnnnnnnnnnnnnnnnnnnnnnnnnnnnnnnnnnnnnnnnnnnnnnnnnnnnnnnnngatttgagataataattaaaacccctgttcctccctaccannnannnnaaannaannanaccccnnanannnnccccttggtcgggcccgcccttccgggcccctccagaaaaaagttt

SEQ ID NO: 172442 - DNA, 722 bp, Homo Sapiens
gcgcgtgactcccccctgccggctgcggaggtggaggggggacggcgcccccgccgtgtgcgtggggcggggatggagcacgcgccctggagccccggagccagatgctctgacctttgacccctgccgttcagctctagggcccgtgcaggccacaccatgaacacctccccaggcacggtgggcagtgacccggtcatcctggccactgcaggctacgaccacaccgtgcgcttctggcaggcccacagcggcatctgcacccggacggtgcagcaccaggactcccaggtgaatgccttggaggtcacaccggaccgcagcatgattgctgctgcaggttaccagcacatccgcatgtatgatctcaactccaataaccctaaccccatcatcagctacgacggcgtcaacaagaacatcgcgtctgtgggcttccacgaagacggccgctggatgtacacgggcggcgaggactgcacagccaggatctgggacctcaggtcccggaacctgcagtgccagcggatcttccaggtgaacgcacccattaactgcgtgtgcctgcaccccaaccaggcagagctcatcgtgggtgaccagagcggggctatccacatctgggacttgaaaacagaccacaacgagcagctgatccctgagcccgaaggtctccatcacgtccgccacatcgatcccgacgccagcgacagggctattct

SEQ ID NO: 172443 - DNA, 471 bp, Homo Sapiens
  misc_feature (360)..(360): n is a, c, g, or t
  misc_feature (370)..(370): n is a, c, g, or t
  misc_feature (396)..(396): n is a, c, g, or t
  misc_feature (407)..(407): n is a, c, g, or t
  misc_feature (420)..(420): n is a, c, g, or t
  misc_feature (441)..(441): n is a, c, g, or t
  misc_feature (450)..(450): n is a, c, g, or t
aattcggcacaggcctccctccccgatttggcgtaccgaaagcgctccgtgaactcctcccagatggcaggacgcagcccgttccccaccgccaggcgcacgcggtgtcgcctctccgcctcgcgcaccggctgcttcagcaggtagcggcagatctccccgatgtactgaaccaccgtgcagttgtacttgatgcagtcgtcccagaagcggctggccgaggaatttcttgcggaggacgactgtcagcccatagatgagacactgccccacgccgatgatgtttcctgccgagtggtacaggggcaggcagttcattaggaggcacgtcagccgcctgcatgcggttagggcgtggtnggccgaagtnccattgcggttagttacctgctgttncacggacaatnggcagctttgggnaaggcccggttgttccccganttttagatnttaggaaaagacgtttcttcc

SEQ ID NO: 172444 - DNA, 484 bp, Homo Sapiens
gattctagaggttccccgcggtacgctgactggcctacctctgaagagcggactgtaatgtatcagaagcatttgtacctctcaccaccccgagttctaatcactcattccacactggaaacgactctgactcggggaccctggagaggaagcggcctgctagcatggcggtgatggaaggagacttggtgaagaaggaaagtcctcccaaaccgaaggaccctgtatctgcagctgtgccagcaccagggagaaacaacagtcagatagcatctggccaaaatcagccccaggcagctgctggctcccaccagctctccatgggccaacctcacaatgctgcagggcccagcccgcatacactgcgccgagctgttaaaaaacccgctccagcacccccgaaaccgggcaacccacctcctggccaccccgggggccagagttcttcaggaaccagtcagcattaaccacgggtaccgagctc

SEQ ID NO: 172445 - DNA, 649 bp, Homo Sapiens
  misc_feature (96)..(156): n is a, c, g, or t
  misc_feature (531)..(542): n is a, c, g, or t
cctgcctgaccttcatgagtttgctttgatgatgctttgcatgttggcctttggacgacagttttatagtatggtcgattatatgccagtgctatnnnnnnnnnnnnnnnnnnnnnnnnnnnnnnnnnnnnnnnnnnnnnnnnnnnnnnnnnnnnntatgttttaagatagtatattatgagcaaaggagaaaacgtttaaaatcatgtttattttgtaaactccaaaatgcatgttacatgtgaagtgactcactggaggaaggtgagtactttaccaagtaggcacttgggaaatgctgtgtccacatacttaggaaatggcttcagttaacactgggcttgggaagggctctcttatccaaggagcagtcttctctggagcccatgaaaccagcctggcagcactggtaataaactagtctgtgaaatctggcaaagcctctgtcctgtttggatatacgcaaaactgccttttaccatttccattgctttttattacttaatctcccaactttgtgcctggtgtccnnnnnnnnnnnnaaaatagaaaatttttgaggtaattatgtattcatataaaagtctttggtggatatgctttttcccacaagcacttggttagaatggcccattacctcatttgttta

SEQ ID NO: 172446 - DNA, 1191 bp, Homo Sapiens
agactatctacttacttccagcagcaagcagcacacagtctttcctgcgaaaggatcaagggataaaccatgtgtttcagttcctgtagtcagtttagagaaaattcctaacctagtgaagccagatggtgccaatgtcaaaatgaactccacaaccactactgcagtttctgcctcctccacctcgtcctctgccgtctccacccctcctttaattaagcctgtcctgatgtccaagtcagtgccaccttcaccagagaagatcttaaatggcaaaggaattctgccaaccaccatagacaagaaacaccaaaatggcaccaaaaacagcaacaagccttacaggagactttcagagagagaatttgacccaaataaacactgtggagtattggatcccgagacaaagaaaccttgcacaagatccctcacctgcaagacacattcgctaagccatcggagggcagtcccaggccggaaaaagcaatttgacctcctcctggcagaacacaaagcaaagtcccgggaaaaagaagttaaagataaagagcatctcctgacttccacgagggaaatacatccaagccaatccgggccggcacaggattctctgctagggtcttcagggagctctgggccagaaccaaaagttgcatcccctgcaaaatccagaccacccaactctgtacttcctagaccatcatctgcaaatagcataagcagcagcacatcttcaaatcatagcggccacactccagagcccccactcccaccggttggaggtgacctcgccagccgactgtccagtgatgaaggggagatggacggagccgacgaatccgagaagctagactgtcagttctccacgcaccagcccagacctctggcggaagatccctcctgcggcagatagccccctgccctcgccagcagcccacatcaccacccccgttccagcatccgtttatgcagcctttcagcaaccccagtgctgtgtatcttccttcagctcccatcagctcgaggctcacctcttcttacataatgacatcagccatgctctcaaacgcagctttcgtgacatcgccggaaccgagcgccctcatgtcccaaaacacagctttccctcatgtggccggcaaccctcagcatcatggactcaaccttcaaggccccatccgccgtgtcccg

SEQ ID NO: 172447 - DNA, 342 bp, Homo Sapiens
agtatcccgtggttactgcttgacgttcccgttaagacatcgcctgcaccaggggtgggggagtgcgagctgaaagctgctggagagtgagcagccctagcagggatggacatgatgctgttggtgcagggtgcttgttgctcgaaccagtggctggcggcggtgctcctcagcctgtgctgcctgctaccctcctgcctcccggctggacagagtgtggacttcccctgggcggccgtggacaacatgatggtcagaaaaggggacacggcggtgcttaggtgttatttggaagatggagcttcaaagggtgcctggctgaaccagtcagcattaaccact

SEQ ID NO: 172448 - DNA, 1031 bp, Homo Sapiens
  misc_feature (407)..(407): n is a, c, g, or t
ggaacggatttggaactggaatctcacctggccaagaaagaccaccttcttttggaacagaagaaatatctagaggatgtcaaactccaggcaagaggacagctgcaggccgcagagagcaggtatgaggctcagaaaaggataacccaggtgtttgaattggagatcttagatttatatggcaggttggagaaagatggcctcctgaaaaaacttgaagaagaaaaagcagaagcagctgaagcagcagaagaaaggcttgactgttgtaatgacgggtgctcagattccatggtagggcacaatgaagaggcatctggccacaacggtgagaccaagacccccaggcccagcagcgcccggggcagtagtggaagcagaggtggtggaggcagcagcagcagcancagcgagctttctaccccagagaaacccccacaccagagggcaggcccattcagcagtcggtgggagacgactatgggagaagcgtctgccagcatccccaccactgtgggctcacttcccagttcaaaaagcttcctgggtatgaaggctcgagagttatttcgtaataagagcgagagccagtgtgatgaggacggcatgaccagtagcctttctgagagcctaaagacagaactgggcaaagacttgggtgtggaagccaagattcccctgaacctagatggccctcacccgtctcccccgaccccggacagtggttggacagctacatatcatggactacaatgagactcatcatgaacacagctaaggaatgatggtcaatcagtgttaacttgcatattgttggcacagaacaggaggtgtgaatgcacgtttcaaagctttcctgtttccagggtctgagtgcaagttcatgtgtggaaatgggacggaggtcctctggacagctgactgaatgcagaacggtttttggatctggcattgaaatgcctcttgaccttcccctccacccgccctaaccccctctcatttacctcgcagtgtgttctaatccaatggca

SEQ ID NO: 172449 - DNA, 1359 bp, Homo Sapiens
ggggctgggcagttggctggaggggctgctgctgggaacacctggagtctccgcgggcagatctcatattttggattctggatatattataatgagtgacactttgacagcggatgtcattggtcgaagagttgaagttaatggagaacatgcaacagtacgttttgctggtgttgtccctcccgtggcaggaccctggttaggagtagaatgggacaatcccgagagaggaaagcatgatgggagccacgaagggactgtgtattttaaatgcaggcacccgacaggaggatcctttattcgtccgaacaaggtaaattttggaacagactttcttactgcaattaagaaccgctatgtgttagaagatggaccagaggaagatagaaaagagcaaattgttacaattggaaataaacctgtggagactatcggttttgactctattatgaaacagcaaagtcagctgagcaagttgcaagaagtttctctgaggaactgtgcagtaagttgtgctggtgaaaaaaggaggagttgctgaagcatgtcctaatatcagaaaggtagatttgtcaaaaaacctgttgtcatcatgggatgaagtgatacacattgctgatcagctcagacacctggaagtccttaatgtcagtgaaaataaactaaaatttccctccggttcagtattaactggaacgctttctgtactgaaggttttagtcctcaatcaaacaggaataacgtgggctgaggtgctgcggtgtgtcgcggggtgcccaggcctggaggaactctaccttgagtctaacaacattttcatttccgaaaggccaacagatgttctccagacagtcaagttattagatctttcctctaatcaattaattgatgaaaatcagctgtatctgatagcccacctgcccaggttagaacaattaatcctctctgacactggaatttcttctctacattttccggatgctggaattgggtgcaaaacgtccatgttcccatccttgaagtacctggtagtaaacgacaatcagatatcacaatggtcgtttttcaatgagctagagaagttaccaagtctacgggctttgtcctgcctaagaaagcccctgaccaaagaggacaaagaagcagagacggcgcgactactcattatcgccagcattggccagctgaagacgctgaacaaattgttgagatttctccccgagggagaggcggggaagctgagcttgactacccgaaaagcttctggaactgagtggcaaacagggctgggtggaccataaggatccggaaaaaaacagacttcagcgaaaattcctcacaggccatcccagataccag

SEQ ID NO: 172450 - DNA, 848 bp, Homo Sapiens
cggacgagggtccactgggccccggtgaatgctatgaactccatgtccattgtaagaccagctttgtgggctacttcccagccacagtgctctgggagctgctgggacctggggagtcgggttcagaaggagccggcacattctacattgcccgcttcttggctgccgtcgcccacagccccctggctgcacagctgaagcccatgactcccttcaagcggacccggatcaccggaaaccctgtggtgaccaatcggatagaggaaggagagagacctgaccgcgctaagggctatgacctggagtcaagtatggcgctggggacatactacccacctccccgcctcaggcagctgctccccatgcttcttcagggaacaagtatcttcactgcccctaaggagatcgcagagatcaaggcccagctggagacagccctgaagtggaggaactatgaggtgaagctgcggctgctgctgcacctggaggaactgcagatgtgaagcatgatatccagcaatatgacctggagtcggtgcccatgacctgggaccctgtggaccagaaccccaggctgctcacgctggaggttcctggagtgactgagagccgcccctcagtgctacggggcgaccacctgtttgcccttttgtcctcggagacacaccaggaggaccccatcacatataagggctttgtgcacaaggatggaaatggaccgtgtcaagctgagcttttccatgagcctcctgaaccgctttgtggatgggctgaccttcaaggtgaactttaacttcaaccgccagccgctgcgagtccagcaccgtgccctggagctgacagggcgc

SEQ ID NO: 172451 - DNA, 920 bp, Homo Sapiens
  misc_feature (606)..(639): n is a, c, g, or t
gggggggacggcggccgggagggcgcggcccgggttcccgttccccgcggagccatgcggtacaacgagaaggagctgcaggctctgtcccggcagccggccgagatggcggccgagctgggcatgaggggccccaagaagggcagcgtgctgaagcggcggctggtgaagctggtggtgaatttcctcttctactttcggacagacgaggccgagcccgtcggagccctgctgctggagcgctgcagagtcgtccgggaagagcccggcaccttctccatcagcttcattgaggaccctgagaggaagtatcactttgagtgcagcagcgaggagcagtgtcaggagtggatggaggctctgcgtcgggccagctacgagttcatgcggagaagcctcatcttctacaggaacgaaatccggaaggtgacgggcaagggacccccctggaaacagttcggcatatccgaggaggccaggttccacctgaatggcttgcaagcgtgagcggcagggcacgggtggtcaaccgtgcatcggggacggggactggggccctggccccaacccatgaattcgccttgggccatggccctgggatactgnnnnnnnnnnnnnnnnnnnnnnnnnnnnnnnnnnggggcccaggggttctccactggtggcttgccccaaggcttaaaaagtggccagagggaggccccccaagcttcactggtggaccctttaacccttccttgggaactcccaggggaactccctccctggccctcaagccttttcccaaggtaggggcggggaatctaccagggtcttgaaagcccgcccccacaacccggggccattcaaaacacctgggagatttttttccaggcgaggcggagggtctttttgggggcttagggggagaacactcccac

SEQ ID NO: 172452 - DNA, 377 bp, Homo Sapiens
ttgactgaccctgcgtacctgtgaccaccttaaaataacctcactctcaaaagaaattaagtttctctttcccaagcaactaactgccccactgtgtccctgctgtgtgcaagtttggccctttgggagacaaaaactcttagttgtagggaaataggtttagcgacctcagtgttacagggcacttaatagcagcccgggggcctgacagagttaatgtaacatccacgtcacctgaactatcaggagtttggtagaaaagaagagatgaattatattggcttccattcagagattgaaaatctgtggtaatttgaagtttccgaaaatgtaggagaatgggctgggcacggtgggtacaccgtgcttatctcaat

SEQ ID NO: 172453 - DNA, 359 bp, Homo Sapiens
  misc_feature (83)..(93): n is a, c, g, or t
  misc_feature (106)..(208): n is a, c, g, or t
  misc_feature (238)..(246): n is a, c, g, or t
gcgttcgagacgggaaacctgggtagaaaaatctctctcttatctgttataaggtcatcatcatcttttgcttctttatttcnnnnnnnnnnngagacagtgtctnnnnnnnnnnnnnnnnnnnnnnnnnnnnnnnnnnnnnnnnnnnnnnnnnnnnnnnnnnnnnnnnnnnnnnnnnnnnnnnnnnnnnnnnnnnnnnnnnnnnnnngtacacaccaccaggccgggcaaattacannnnnnnnnatagaaaaggggtcttgccatgtttcctaggcagatctcaccatgtttcctaggctgatctcgccatgtttcctaggctgatctccaacttctaggctcaaaggagcctcctg

SEQ ID NO: 172454 - DNA, 437 bp, Homo Sapiens
  misc_feature (12)..(12): n is a, c, g, or t
gtgtgagaggcnacttggagtggcacacactgacactcacatgcccagacgcccctgtcgaagcgagagacgcagatggggctagagcagaggtgttgcgggagcccgggagagttgaaatatgccagggagtgtgggagccaagcatgggggctcgaaggcaggggcggggacagttggccaagagtcaaagaaagggggtttgatatcaccctcccaccgaaagcagctcaaagtccaaatgacagcctgtacagtaggcagagcactggcccagagttaaggaacctgtaccccagtctccgggcaaccagtaattccgcctaactctgggcaagtccttctcaccaagcctctgtttatctgggggaaagtcagtggtttttttcaatcatctccctctgcctttttttaaagagaggatctcactctgtcat

SEQ ID NO: 172455 - DNA, 718 bp, Homo Sapiens
gaggcgtgggtgtcagtgttgcagaacagcaaggacgaagtcctgagcagcgccttcctcggggagcccagcgctggcccggggtcctgggggtctgccggccatgatggggagccgcacgacctcacaaagctgctcatcgcggaggtgaagagcaggcctgggaatagccagtgctgcgactgcggggctgcagaccccacgtggctcagcaccaacctgggcgtgctcacctgcatccagtgctcgggcgtccaccgcgaactgggcgtgcgcttttcgcgcatgcagtcactcaccttggacctgctgggcccctccgagttgttgctggccttgaacatgggaaacacgagcttcaagtgaggtcatggaggcccagctaccctcacacggcggccctaaaccctcagctgagagtgacatgggcacccgcagggactacattatggccaagtatgtggagcataggtttgcacgccggtgcacacctgagcctcagcgactctggacagccatttgcaacagggacctcctgtcggtactggaggcctttgccaatgggcaggactttggacagccgctgccagggcctgatgcacaggcacctgaagaactcgtcttgcatttggctgtcaaagtcgccaaccaggcttccctgcctctggtggatttcatcatccagaacggtggtcacctggatgccaaggctgctgac

SEQ ID NO: 172456 - DNA, 965 bp, Homo Sapiens
catgagggaaccaactgctcaatctgaaggattcttctatggcagatgccagcaaacatggtggtggaacagaatcgttattttttgataaggtccgaaaggctcttcggagtgcagaagcctacgaaaatttcctacgctgtcttgttatttttaaccaggaggtgatctctcgtgctgagcttgtgcaactagtctctcctttcctggggaaattccctgagttgtttaattggtttaaaaactttctgggctataaggagtctgtacatctggaaacttatccaaaggagcgagccacagagggcattgctatggagatagattatgcttcttgtaaacgattgggctccagctatcgagccttaccaaagagttaccagcagcccaagtgtacaggactgactcctctctgtaaagaggttttaaatgatacctgggttgccttcccttcgtggtctgaggactctacctttgtgagttccaagaagactcaatatgaagaacatatttatcgttgtgaagatgaacgctttgagcttgatgtagttttagagaccaatctggcaacaatccgggttctggaagcaatacagaagaagctttcccgcttgtctgctgaagaacaagccaaatttcgcttggacaacacccttgggggcacatcagaagtcatccatagaaaagcactccagaggatatatgctgataaagcagctgacatcattgatggtctgagaaagaatccctccattgctgttccaattgtccttaaaaggttgaagatgaaagaggaagaatggcgagaagctcagagaggctttaacaaagtatggcgagaacaaaatgagaaatactacttgaagtctctggaccaccaggggatcaactttaaacagaatgacaccaaggtcctgaggtctaagagcttactcaatgagattgagagtatctatgatgagagg

SEQ ID NO: 172457 - DNA, 554 bp, Homo Sapiens
attgggtgtaaaggctaaggatggtgaggggtggattccaaatgactctcaggtttttctgatctgggcaaacaggatgatgtttaccaaattggagtagctatttaccaaataggagtagaccattttcagcatcaacctataatgttgaggtaggtagaaaacaggtaggaaaagtagtcaggcataagcacttaaagttcaaaagtgggaatatattcatgtcttgttgaagtcatggaacaggtaagacatctaggaagagtttgtgtaatgaagagagaattgggcagaggacacagccctaagaaataccatcaagtgcagaaatcagagatgagaaacagtggacatatgatccttgaagcaagttctcaatgcacatgagctggacagagcttttattttaaaaataaagctgacatgcagcccacagggaggtaaaggtggaaaatctccctactgaccctggtagatgggattgttcttaggtatggaggcatggccttttcttccttaagagggagaaaagctgaggcaagatgaagccacgc

SEQ ID NO: 172458 - DNA, 691 bp, Homo Sapiens
gggcaccccagcatgtgagttactcaggtgttgggggctagaagggacagtgcgtttaaacaacactcagagctctggccttaaacctgtggccccccaagtctaggagcctcatctctttctggcagtcatgcgggcaggaggtcctgaaagggaaaacccattcagacaactgttccccaatctaccagccatctgcaggggtcagtgaccgtggccctctccctcctctagaatgtgccacttatgaagagtgccccatggggaaaaggagactcagctgtcccttggcagcttgtgccagtatcccagggcagaagtttccacaggagcctcttgcccttgcgcagagccactgtgagaggcggtgggagccaacacccttgggggagggggcagtactgctcggcacatcccagcatcaggtcagatcattgaaattaaaaaatgtgaattaagttcatatccaccttttggggaagcaggacaaaccaccaccccaccaagtgtgtgacttctccatatcccactgcagtttccattttttaaatgggaattttcaatcccctgtgcttgtctaacgtctgctttaaaaagtttgagaccctgttactgtttgaaaatgcatgcatgttacgatgaatctccaacctgaggaaaaaaataacactcaaaaagctctgccaggggg

SEQ ID NO: 172459 - DNA, 406 bp, Homo Sapiens
agaaaactgcagcaccccagcatgtgagttactcaggtgttgggggctagaagggacagtgcgtttaaacaacactcagagctctggccttaaacctgtggccccccaagtctaggagcctcatctcttcctggcagtcatgcgggcaggaggtcctgaaagggaaaacccattcagacaactgttccccaatctaccagccatctgcaggggtcagtgaccgtgggccctctccctcctctaggaatgtgccacttatggaaggagtgccccatggggaaaaagggagactcagctgttcccttgggcagctttgtgccagttatcccaggggcaggaagttttccacagggagcctctttgccctttgcggcagagccactgttgaggagggcgggttggggag

SEQ ID NO: 172460 - DNA, 1106 bp, Homo Sapiens
  misc_feature (97)..(141): n is a, c, g, or t
  misc_feature (753)..(753): n is a, c, g, or t
tgggcgagagcattggctcccagagggaacagtgctggctgtggctagagaacagcaggtctgtgcagtgtctgagggcaggttgggaagggtagcnnnnnnnnnnnnnnnnnnnnnnnnnnnnnnnnnnnnnnnnnnnnntcctcagagtggaaggagggggaagcagcaggacacattggcaagtcaagcaggaaggagggagatggaaaggggatatcagattggtttcccccggtggagccttaggttagtgcccagtgcagtgccagactgtctcctctgctcctcccacctcatccctaggaggacccaccagtggagcacatgcagcctcagtggagatgcttggtgtggggatctgggtgaagggggttgagtagcgactgcctgggagatggctgttagcaggtctgcgcctggtgtctgcctcgccatcctggggtaaggggcagagagaaggacttgtcttatgtagggtgtggtcagccttggggccttacctacccagttccatgatatttcttgccctgttccccctggaatgtgcagtgggccagctgagagtacgccttgaggaggggggatgaggccttaatctgggaggcctatccccctatcccaggcatcccagacgaggactggctgaggctaggcgctctcatgatccacctgccccgggagggcagcggggaagacagagaaaagcaaacacattcctcctcagctccacccacctggagacgaatgtanccagagaggaggaaggatggaaactgaaaacaccggggcccctcggccttctctctgctagagttgcccctcagagggttcagccctgactttccagcggtcctcaggaacacctactaattccctctccacttccttcctggggtgggaacagtttactggtcccctacgccacgcaaaagatgacaattttactccacacataattttatcccaggccccttttttatgtccccacggcactgggtggagcggggcctaaaggaaaatttcctcttggtttcttggagcggacttaccaccctcgtggtaggatatccccccgcaaccctctacctttctaactcaagggt

SEQ ID NO: 172461 - DNA, 871 bp, Homo Sapiens
ggaatcaacgctgaatgtggacttggatttcaagcagcctttcctagagttgaatcgaatcctggaagccctgcacgaacaagacctgggtcctgcgttggaatgggccgtctcccacaggcagcgcctgctggaactcaacagctacctggagttcaagctgcaccgactgcacttcatccgcctcttggcaggaggccccgcgaagcagctggaggccctcagctatgctcggcacttccagccctttgctcggctgcaccagcgggagatccaggtgatgatgggcagcctggtgtacctgcggctgggcttggagaagtcaccctactgccacctgctggacagcagccactgggcagagatctgtgagacctttacccgggacgcctgttccctgctggggctttctgtggagtccccccttagcgtcagctttgcctctggctgtgtggcgctgcctgtgttgatgaacatcaaggctgtgattgagcagcggcagtgcactggggtctggaatcacaaggacgagttaccgattgagattgaactaggcatgaagtgctggtaccactccgtgttcgcttgccccatcctccgccagcagacgtcagattccaaccctcccatcaagctcatctgtggccatgttatctcccgagatgcactcaataagctcattaatggaggaaagctgaagtgtccctactgtcccatggagcagaacccggcagatgggaaacgcatcatattctgattcctacctggaaagaattttgtttgaaaggggttttcacctggtgagccttggtctgtcctcgggtagggtgggccaacttcagtggggactggtgggttggccttccgaagc

SEQ ID NO: 172462 - DNA, 643 bp, Homo Sapiens
  misc_feature (59)..(160): n is a, c, g, or t
agcctctcaagtagctgggattacaggcacctgccaccacgcccagccaatttttgtannnnnnnnnnnnnnnnnnnnnnnnnnnnnnnnnnnnnnnnnnnnnnnnnnnnnnnnnnnnnnnnnnnnnnnnnnnnnnnnnnnnnnnnnnnnnnnnnnnnnnaccagccactgcgcctggctggcctctggtttttaataaaacatgactagagtgactccatcttaaagtgagtagctaggcacttacaaggttcatgcttatggcctgaaaataaccacatcccaggctgaccaccaattataattacagaatatttatggccatacagaacatgttccaccaagcctgcagaatgtccaaatgtcctaagaatgcagcccccattacttaaatataacataaatgagcaagcttaggttgcaggattaatggtcgtggataacaccaatagcccctacctttagtgagcttatctgcacactccaagtttaactatagttccttatagtttcttataagtagaaatactaacaaagggctgtgggtttctccccctgctttctgaggacactctactctgtaaaggagtagtttccaataaacttgttctttcaccgtgctatctcatccggtacgagctga

SEQ ID NO: 172463 - DNA, 497 bp, Homo Sapiens
  misc_feature (59)..(160): n is a, c, g, or t
  misc_feature (459)..(459): n is a, c, g, or t
  misc_feature (465)..(465): n is a, c, g, or t
agcctctcaagtagctgggattacaggcacctgccaccacgcccagccaatttttgtannnnnnnnnnnnnnnnnnnnnnnnnnnnnnnnnnnnnnnnnnnnnnnnnnnnnnnnnnnnnnnnnnnnnnnnnnnnnnnnnnnnnnnnnnnnnnnnnnnnnnaccagccactgcgcctggctggcctctggtttttaataaaacatgactagagtgactccatcttaaagtgagtagctaggcacttacaaggttcatgcttatggcctgaaaataaccacatcccagggctgaccaccaattataattacagaatatttatggccatacagaacatgttccaccaagcctgcagaatgtccaaatgtcctaaggaattgcagcccccatttacttaaatataacataaatgaggcaagtttgggttgcagggtttaatgggtcgtggggtaacaccattngccctnaccttagtgaggtttttttggacatttcaatt

SEQ ID NO: 172464 - DNA, 1191 bp, Homo Sapiens
ggtgccaggtccgcatggtggacatgcagaagctgacccatggcgtcctgcataccaagttctgggtggtggaccagacccacttctacctgggcagtgccaacatggactggcgttcactgacccaggtcaaggagctgggcgtggtcatgtacaactgcagctgcctggctcgagacctgaccaagatctttgaggcctactggttcctgggccaggcaggcagctccatcccatcaacttggccccggttctatgacacccgctacaaccaagagacaccaatggagatctgcctcaatggaacccctgctctggcctacctggcgagtgcgcccccacccctgtgtccaagtggccgcactccagacctgaaggctctactcaacgtggtggacaatgcccggagtttcatctacgtcgctgtcatgaactacctgcccactctggagttctcccaccctcacaggttctggcctgccattgacgatgggctgcggcgggccacctacgagcgtggcgtcaaggtgcgcctgctcatcagctgctggggacactcggagccatccatgcgggccttcctgctctctctggctgccctgcgtgacaaccatacccactctgacatccaggtgaaactctttgtggtccccgcggatgaggcccaggctcgaatcccatatgcccgtgtcaaccacaacaagtacatggtgactgaacgcgccacctacatcggaacctccaactggtctggcaactacttcacggagacggcgggcacctcgcttgctggtgacgcagaatggggaggggcggcctgcggagccagctgggaggccattttcctgagggactgggactccccttacagccatgaccttgacacctcagctgaacagcgtggccaccgcctgccgcctgctctgaggcccgatcctagctgttagccacagcctgctgggcccccgcggacccaggtgctctgggtcacggtccctgtccccgcacccccgcttctgtctgccccattgtggctcctcaggctctctcccctgctctcccacctctacctccacccccaccggcctgacgctgtggccccgggcaccagcagagctgggggagggatcagcccccacagaaatgggggtgcatgctggcctgccccctggcccacccccactttccagg

SEQ ID NO: 172465 - DNA, 1121 bp, Homo Sapiens
  misc_feature (526)..(553): n is a, c, g, or t
  misc_feature (563)..(601): n is a, c, g, or t
  misc_feature (648)..(720): n is a, c, g, or t
  misc_feature (775)..(876): n is a, c, g, or t
aaggagcgaggcctgggtggcgaattcggcacgaggctggtctggcaactacttcacggagacggcgggcacctcgccgctggtgacgcagaatgggaggggcggcctgcggagccagctggaggccattttcctgagggactgggactccccttacagccatgaccttgacacctcagctgacagcgtgggcaacgcctgccgcctgctctgaggcccgatccagtgggcaggccaaggcctgctgggcccccgcggacccaggtgctctgggtcacggtccctgtccccgcacccccgcttctgtctgccccattgtggctcctcaggctctctcccctgctctcccacctctacctccacccccaccggcctgacgctgtggccccgggacccagcagagctgggggagggatcagcccccaaagaaatgggggtgcatgctgggcctggccccctggcccacccccactttccagggcaaaaagggcccagggttataataagtaaataacttgtctgtacnnnnnnnnnnnnnnnnnnnnnnnnnnnncctcgaggcnnnnnnnnnnnnnnnnnnnnnnnnnnnnnnnnnnnnnnncatggtcatagctgtttcctgacccagctttcttgtacaaagtggtnnnnnnnnnnnnnnnnnnnnnnnnnnnnnnnnnnnnnnnnnnnnnnnnnnnnnnnnnnnnnnnnnnnnnnnnntgcagtacccggggaatttaacccgcctaatgagcggggcttttttttgtgatcnnnnnnnnnnnnnnnnnnnnnnnnnnnnnnnnnnnnnnnnnnnnnnnnnnnnnnnnnnnnnnnnnnnnnnnnnnnnnnnnnnnnnnnnnnnnnnnnnnnnnnacctacccaacttctttttcccgaagggtacttgggctttccccaaaagcgccgaataccaaaatactgttcccttctagaggaaacccgaaaatttaggcccaacccctttcaaagaaacttggtaagcacccgccctaaaataaccttccgcttctggctaaacccggggtaaccagggggcctgcctgccccatgggggcaataaaaaccggggggccttaaccgggggttggaaccctcaa

SEQ ID NO: 172466 - DNA, 403 bp, Homo Sapiens
  misc_feature (377)..(377): n is a, c, g, or t
  misc_feature (385)..(385): n is a, c, g, or t
agattcggaacgagggtggacaatgcccggagtttcatctacgtcgctgtcatgaactacctgcccactctggagttctcccaccctcacaggttctggcctgccattgacgatgggctgcggcgggccacctacgagcgtggcgttcaaggtgcgcctgctcatcagctgctggggacactcggagccatccatgcgggccttcctgctctctctggctgccctgcgtgacaaccatacccactctgacatccagggtgaaactctttgtgggtccccgcggatgagggcccagggttcgaattcccatatggcccgtgttcaaccacaacaagttacatgggtgactttaacggggccaccttacattgggaacntccaattnggttttggcaattatttt

SEQ ID NO: 172467 - DNA, 498 bp, Homo Sapiens
  misc_feature (11)..(11): n is a, c, g, or t
  misc_feature (29)..(29): n is a, c, g, or t
  misc_feature (50)..(50): n is a, c, g, or t
  misc_feature (91)..(91): n is a, c, g, or t
  misc_feature (105)..(105): n is a, c, g, or t
  misc_feature (157)..(157): n is a, c, g, or t
  misc_feature (168)..(168): n is a, c, g, or t
  misc_feature (204)..(204): n is a, c, g, or t
aaatgtctggnaaaattattcaagaaaancgggcaacctcgctgctggtnaacgcaaaaagggaagggcggcctgcggaacccaactggangccattttcctganggaactgggactccccttaaaattcatgaccttgaaaacctcagctgaacancgtgggcaaangcctgccgcctgctctgaggcccgaatccaagtggnggagccaaaggcctgctgggcccccgcggacccaggtgctctgggtcacggtccctgtccccgcgcccccgcttctgtctgccccattgtggctcctcaggctctctcccctgctctcccacctctacctccacccccaccggcctgacgctgtggccccggggaccagcagagctgggggagggatcagcccccaaagaaatgggggtgcatgctggccctgccccctggcccacccccactttccagggcaaaaagggcccagggttataataagaaaataacttgtctgta

SEQ ID NO: 172468 - DNA, 562 bp, Homo Sapiens
ggtttaaagttggggttttgggggtttttcccccccaaggtaccttttccttttttccagggaccacattatcccaggccagggtgcccaacaaaaagtcctcgctttgtccagatcggttctcttcacccgagcttgccgcatgatcctgtctctctggtcaagcaggcggtacttctccttggatgtctcagccacagtgcctatcagggtactgagggagagcacacatggcccgaggccctcggagccctcggaggctgagtcaaaagagtctccctcgaattggtgggcctttagaagacttggcttcttcactggagagcttttattcaggaggctgctagcaccagtcctccctgcggccttgccaagaggagagtgctgaaagggtgcatcctctgtgctcgggctgacttcaccgtcacctggtttcttctccttcagggaaaagggtttcttattggggcttattttcttcctgtgccaaaagatagccatgtctttatgcaaacttttccccttctttctagccagggctgcagatgcatgatcaaagaaa

SEQ ID NO: 172469 - DNA, 688 bp, Homo Sapiens
  misc_feature (11)..(11): n is a, c, g, or t
  misc_feature (28)..(28): n is a, c, g, or t
  misc_feature (47)..(47): n is a, c, g, or t
  misc_feature (49)..(49): n is a, c, g, or t
  misc_feature (71)..(71): n is a, c, g, or t
  misc_feature (78)..(78): n is a, c, g, or t
attaaagcctnaaccaattaggaaaagntagtttcatcagtcattcngntgaggataaaagctgaaaaggnccaaggnaagccttaacaaattcctcaagcgctggtagcaaattctgtcgagacttggtggactcccccgagatattctccacaatatcttctaagacgctgagtgtctggtggataatcagtttggtgtcatccagtggcatctttctctgtggggcaccagcactgggcttcaggttgcgatagtcccgggagagtgcagagatgaggctggcgtggttgatggagcgcacgggccactgctgctcattctctggaaggtttggccacggaagcagcaagatgttagagagggctcggcacaccaacacctgggccttatcgacaagtcgcagggcagaggcatcagtgattctgttgaatactttctgcactgcagggatgctgatcagaaagacgggccgcacggtggtggccagtgagaccagtaagtggcacgcagatagcagcagcttgtcttggaccttggtgctgattagaggtgtgattgcatccatggtagtagagatgagtgtcacgaactgctgcgtgttctgccggtgaacttcactgcaatactgtgctaaccagtgagagtaagcctgcagcgcagccagggactgagcatgcacatcatg

SEQ ID NO: 172470 - DNA, 1282 bp, Homo Sapiens
ggtttataggagagatttatttgaagaaatattacaacatataaaaactacataaagtcttaatttccactcatacagtggtagatttgatataatgcataataaaaaacttttaaaatccagaatgcacaaagtactgcacaatttgatcactaaatcattagttgataagcgaacctcacacaacagcttcatgtcagccaaggccacaaacaccatgtaccacacatgtgaacggacagattgacatgttaaaaacacaacatcagtgcatgttggggattcctggtgccagaaacaggggtgacgggagggcagaactagtccttagcagcttcctcctccgttattttagctgaggcactctctcgggctttggccaacatacaaagcttgatctccaagccaatggcttatggccaggggcggtggcacggcattgcccacctgccggtgcttgtccaggatgttgccgaagagccggtaggtgtcagggaagccctgggagcgggcacactcccgcacgctcaccacacggtgctgctctggctggagcacgcggccctgcttgcccatgggctcggggttggtgacggttgtgctgaagaagccgtcccactcgagccttgccatagaggccagcccagtggttgtgccggttcccggtctggggcaggcaccaggggatgagggtgttgaactgcctggctgcggggtcgcaggctttgccggcttccacgcaggagcagaccccacggagggccccagagctgctgcggccgttcttcctgtcatggtgggtataccgcagcttcctggccatggtgccgtctgagagccgcacctcgatgttgggcagatcgcgccagtctgaccctggggccaaggggatgtgccgcatgcgggcagccaccaatgcactcatgtccttacagatgtggtccctgaggatgggctggtactgtgcgccccggagctgcctctggaaccaggactgaggctccccgttgtaggagatctccagtgccgaggctccattccgcacctccggcaggtcggacatcgtgtctcgcaccgtgatggtccggaaaggacccgagctcaacctggttatgttgctcacaaacttcttgtcatccaccaccacgctcagctggcaggcccggggagcaaacacgtgcagtggctccgggaacagagggagcttctctccagggccgcggccaggatgatggcccgcctcctagtctgggccacgccgtactgaccggcctgcagcacg

SEQ ID NO: 172471 - DNA, 992 bp, Homo Sapiens
gggggattccaccaagcaggcatctctgacacgctgtgggccatcgagatgtgggaccctgcggcccaggcgttccggctgaacaaccccggctccacagtgttcacagaggactgcaacatcctgctgaagctggtcatggctggggagaccaccaactcccgcggccagcggctgccccagaagggagacgtggagatgctgtgcggcgggccgccctgccagggcttcagcggcatgaaccgcttcaattcgcgcacctactccaagttcaaaaaactctctggtggtttccttcctcagctactgcgactactaccggccccggttcttcctcctggaaaatgccaggaaactttgtctcccttcaagcgctccatggtccctgaagctcaccctccgctgcctggtccgcatgggctatcagtgcaccttcggcgtgctgcaggccggtcagtacggcgtggcccagactaggaggcgggccatcatcctggccgcggcccctggagagaagctccctctgttcccggagccactgcacgtgtatgctccccgggcctgccagctgagcgtggtggtggatgacaagaagtttgtgagcaacataaccaggttgagctcgggtcctttccggaccatcacggtgcgagacacgatgtaccgacctgccggaggtgcggaatggagcctcggacactggagatctacctacaacggggagcctcagatcctggttccagaggcagctccggggcgcacagtaccagcccatcctcagaggaccacatctgtaaggacatgagtgcataaggaaggctgcacgcatgcggcacataccacttggcccccaggggtcagactggcgcgatctgcacaacatcgaggtgcgagatctcagacggcaacatggccaggaagctgcggtataaacaccatgacaggaagaacgggacgagaagactcatggggcccaccgagaggcatgacag

SEQ ID NO: 172472 - DNA, 729 bp, Homo Sapiens
ttaatgctgactggttcagttgggatggggcagaggtggaagtgcgcgtgtgcctagaggggagagcaaaggcctggagggctccacgctctcaaccgttcagggctgatgcccctaagaaggcagggcactgtattttccagggtgacactgcccctgtgactgggcctggccaaccctgaccgagagggcaaagggctggaattggggagggtggggtgagtgaggacacctggcatgttctgcggcctctcggcctctctcgagcagcgtcccccagatagaagcaagaccttgctttgcagccctggcaggcaggatgcagtcatgtgacaactccagcaacctgaggctgggggagcctgcggtctggaggaacaatgtgagttgggagcataagcccctcatggctagactcaggtttctctgtgtgacccgttggaggcgggtggcacgctcacaggagggtgcagctctgggagcccatgccccagcgtaacagctgctggttccagtcggtatagggtgggtagcggatctcctttaatttctccaggccgcagggggcgagcaggcaggtgcggtggtggaagaaggtgtcgaaggtgaacttgccgtggtaccggcccgatcccactgtggccgactcccccgaatggcacggacagcagagatatgtaggtgaagccctcgtgtgcctccctaagctgacgccactggaaactgctg

SEQ ID NO: 172473 - DNA, 546 bp, Homo Sapiens
cttgcgggcggtgaaggagaggcagcggctgtggcagcccggcaggagacggactctatcccgctggtggacgacatctgcttccacgtggccagcacggtgcagacctacagcgccatagaggaggcgcagcagcgtctgcgggcactcgaggacctgctcgtgtccatcggtccggactgttgagcccctggctgggcagccccaggggccaggagctctcttggagacaagcatgtgtatgcgtttgtgtgcagctcttcttcctgctccctgcacattgagggcttcatggggggtgcgaggggctcagtggggcttctcttccctccatgagcctggagaccccaggggaggatccatttgggatgagccccctccccccaatgcacaagccagcccccaagaccctgggggtggacaccactcagggaaacctggggtgggggtgggctttggtcttagcactttccttctccagatcccccctacccaccccagtcccaaatccagttcctctgggccctttgcttagccctgaatttg

SEQ ID NO: 172474 - DNA, 493 bp, Homo Sapiens
  misc_feature (13)..(13): n is a, c, g, or t
  misc_feature (36)..(36): n is a, c, g, or t
  misc_feature (49)..(49): n is a, c, g, or t
  misc_feature (60)..(60): n is a, c, g, or t
  misc_feature (68)..(68): n is a, c, g, or t
  misc_feature (362)..(362): n is a, c, g, or t
  misc_feature (463)..(463): n is a, c, g, or t
accccaagacctntcgtgtcaatggtctgactgttnaccccttgctggnaaccccagggncaagaagntctcttgaaaaaaagcatgtgtaagcgtttgtgtgcaagctcttccttcctgctccctgcaaattgagggctttcatggggggtgcgaggggctcagtggggcttctcttccctccatgagcctggagaccccaggggaggatccatttgggatgagccccctccccccaatgcacaagccagcccccaagaccctgggggtggacaccactcagggaaacctggggtgggggtgggctttggtcttagcactttccttctccagatcccccctacccaccccagtcccaaatnccagtcctctggcccttgcctaaccctgaattgcttctctaagctggtgttcccatgcacagggtccatttcaggtaagggtctgggggagtgtgtgtggncaataaagcttgaaggtcaccgtgcaaaaa

SEQ ID NO: 172475 - DNA, 589 bp, Homo Sapiens
attgtggagttagcctcctgtggagttagcctcctgtggtaaaggaattgaagaaaatataacaccttacaccctttttcatcttgacattaaaagttctggcttaaccttggaatcccattgagagaaaaatccttgtcaccagattcattacaattcaaatcgaagagttgtgaactgttatcccattgaaaagaccgagccttgtatgtatgttatggatacataaaatgcacgcaagccattatctctccatgggaagctaagttataaaaataggtgcttggtgtacaaaactttttatatcaaaaggctttgcacatttctatatgagtgggtttactggtaaattatgttattttttacaactaattttgtactctcagaatgtttgtcatatgcttcttgcaatgcatattttttaatctcaaacgtttcaataaaaccatttttcagatataaagagaattacttcaaattcagtaattcagaaaaactcaagatttaagttaaaaagtggtttggacttgggaacaggactttatacctcttttactgtaacaagtactcattaaaggaaattgaatga

SEQ ID NO: 172476 - DNA, 380 bp, Homo Sapiens
ttcgccggaggcgtggatgtggtaacagagaccaagactgtggagttggtgattgtggctgatcactcggaggcccagaaataccgggacttccagcacctgctaaaccgcacactggaagtggccctcttgctggacacattcttccggcccctgaatgtacgagtggcactattgggcctggaggcctggacccagcgtgacctggtggagatcagcccaaacccagctgtcaccctcgaaaacttcctccactggcgcagggcacatttgctgcctcgattgccccatgacagtgcccagctggtgactggtacttcattctctgggcctacggtgggcaaggccattcagaactccatctgttctcctgacttctc

SEQ ID NO: 172477 - DNA, 552 bp, Homo Sapiens
  misc_feature (517)..(517): n is a, c, g, or t
gagggttgctttgctggccagtctgcaggatggagccttccagaatgctctcatgatttcccagctgctgcccgttctgaaccacaagacctacattgatctgatcttcccagactgtctggcaccacgagtcatgttggaaccagctgctgagaccattcctcagacccaagagatcatcagtgtcacgctgcaggtgcttagtctcttgccgccgtacagacagtccatctctgttctggccgggtccaccgtggaagacgtcctgaagaaggcccatgagttaggaggattcacatatgaaacacaggcctccttgtcaggcccctacttaacctccgtgatggggaaagcggccggagaaagggagttctggcagcttctccgagaccccaacaccccactgttgcaaggtattgctgactacagacccaaggatgggagaaaccattgaggctgaggctgggttagctgggtagcccctgaggttccctcatcccaggcagccttcgcacantccctagggtttttaccctccctccttgatgttcc

SEQ ID NO: 172478 - DNA, 412 bp, Homo Sapiens
  misc_feature (267)..(342): n is a, c, g, or t
attgagataagcacggtgaagatggcggccgccccgctctcatcctggctgcactcattgcccagccagtagtggaggtcatactgcagatttccgttcctcagctgcactgtcttcaggatgacgtaggcgtcgcccgtgaagaagtctccataaaggttggtgggcacgggcaccagatcgaacttctccacacgccagatctgcaggccaggctccttccctgccttgaggaactcggggtgttccaccaccatgctgttgggnnnnnnnnnnnnnnnnnnnnnnnnnnnnnnnnnnnnnnnnnnnnnnnnnnnnnnnnnnnnnnnnnnnnnnnnnnnngagctttgggaaagaggaacagctccggctgtgggtggctcatgtcaccatctggaagccagctgggcca

SEQ ID NO: 172479 - DNA, 734 bp, Homo Sapiens
  misc_feature (272)..(284): n is a, c, g, or t
ggtcgactaaaggctgaggcacggagaagaaaggaatcagcaactgccctgatgggccatgaatgctggggagatctggcgatgactgtggctcccgctctctgaccttctgactcctgtgggctcctgagcttacaaagcatggcaggccaagggcctcgaccacaggccagcattagcagaacatataatggtttcacccttttccagtctggagttggagcaaggagaaaattgcactaggcactccatgatctgcagagcatgtagcnnnnnnnnnnnnnaaaaagcaagtaaaagcgcattcctaaacagagtccggggggaaatgtactgtagggatccctcctgcacatcagtgggtgcatgtgggaactcttctttagggcttcggtggtaatcatctgggggccctgggtttcttgtctaccagataaaccaaaactgggaaggccaagtacagtctctgtggtgcgtattgacgaccccatggagattttgaaaagtgtcatttctcttgtccacaggcactttcaagaactttgggatgtaaaaatgaaatgaaacctttacccatgaccaacagtaacaatcattgttttaataatatatacaagctccataactccttttggtgctaatgattccgctatttcacagaccaaacgttttagtacattaatgtccttaaatgtgttatatagaaataaaaaaatgggggaagtccatgaatc

SEQ ID NO: 172480 - DNA, 752 bp, Homo Sapiens
ggggggaacccgggagccgaggtaacgaacagctcggtggcagggcctgactgctgcggaggcctcggcaatattgattttagacaggcagacttctgcgttatgacccggctgctgggctacgtggaccccctggatcccagctttgtggctgccgtcatcaccatcaccttcaatccgctctactggaatgtgcttcacgcaggccatgctgagccagcccaggatggagagcctgggcctcgcgctcctgggactgggcatcgtgctcgtgctctccagcttctttgcactggggttcgctggaactttcctaggtgattacttcgggatcctcaaggaggcgagagtgaccgtgttccccttcaacatcctggacaaccccatgtactggggaagcacagccaactacctgggctgggccatcatgcacgccagccccacgggcctgctcctgacggtgctggtggccctcacctacatagtggctctcctatacgaagagcccttcaccgctgagatctaccggcagaaagcctccgggtcccacaagaggagctgattgagctgcaacagctttgctgaaggcctggccagcctcctggcctgccccaagtggcaggccctgcgcagggcgagaatggtgcctgctgctcagggctcgcccccggcgtgggctgccccagtgccttggaacctgctgccttggggaacctggacgtgccgacatatggccattgagcccaaggatt

SEQ ID NO: 172481 - DNA, 1050 bp, Homo Sapiens
  misc_feature (93)..(152): n is a, c, g, or t
  misc_feature (982)..(995): n is a, c, g, or t
tttttgcaagtgaatgtattcgtaatcaacacaaacaaaggaagacagggcgcggtggctcatgcctgtaattccagcactttgggaggtcannnnnnnnnnnnnnnnnnnnnnnnnnnnnnnnnnnnnnnnnnnnnnnnnnnnnnnnnnnnggctctataggtccggttccgggggcgcgtggctgcagcggggcccgcgtggtgcctcctgaggcggcccccggatgaagagatctgggaacccgggagccgaggtaacgaacagctcggtggcagggcctgactgctgcggaggcctcgccaatattgattttagacaggcagacttctgcgttatgacccggctgctgggctacgtggaccccctggatcccagctttgtgggtgccggcatcaccatcaccttcaatccgctctactggaatgtggtgttggtggctggtgagcctggactggctgtggggacccttctcttacaagcaaggttgcacgatgggaacacaagacccgcaagctgagcagggccttcggatccccctagctggcctgctactctctaaacatcaccatcctgctcctgaaattcttgggctcgacctgcttcacgcaggacatgctgatccagcccaggaatggagaatccgggaaaccccccggcctaaagccggggccctcccccttcctggggaaggggggggtcctggctcccgggttctcccagcttaacttgggccttgggggttccccttggaaacttttccctaaggggaattaacttctcggggaacccccaaggggagggcaaaaagggaacccgggatttccccctattaaagcattccctgggaaacaacccccttttgcctttggggagaacccccaccccccaaaataacccgtgggcttggagagcttttattgggcaccaccagagcccccgcgggggacccgcctcccctgaagagtggttcttggggggnnnnnnnnnnnnnntacaaccaaagggggcacctccccccaacaagaaagaaaacccctcttctccacc

SEQ ID NO: 172482 - DNA, 857 bp, Homo Sapiens
gaattaaactcgctgaaaaacaggctggtacggtccggaattccgggatatcgccgcgtggtgcctcctgaggcggcccccgtgatgaagagatctgggaacccgggagccgaagtaacgaacagctcggtggcagggcctgactgctgcggaggcctccggcaactattgattttagcacatggcagacttctgcgttatgacccggctgctgggctacgtggaccccctggatcccagctttgtggcgtgccgtcatcaccatcaccttcaagtccgctcttactggaatgtggttgcacgatgggaacacaagacccgcaagctgagcagggccttcggatccccctacctggcctgctactctctaagctgtcaccatcctgctcctgaacttcctgcgctcgcactgcttcacgcaggccatgcttgagccagcccaggatggagagcctggacacccccgcggcctacagcctgggcctcgcgctcctgggactgggcgtcgtgctcgtgctctccagcttctttgcactggggttcgctggaactttcctaggtgattacttcgggatcctcaaggaggcgagagtgaccgtgttccccttcaacatcctggacaaccccatgtactggggaagcacagccaactacctgggctgggccatcatgcacgccagccccacgggcctgctcctgacggtgctggtggccctcacctacataatggctctcctattacgaacgagcccttcaccgctgagatctaccggcagaaagcctccgggtcccacaagaggagctgattgagctgcaacagctttgctgaaggcctggccagctcctggcctgcccaa

SEQ ID NO: 172483 - DNA, 708 bp, Homo Sapiens
acttattccagtcaatggtggagtagaagacatgccgcgtgatttcctctgccccatcagggccggagccgagccggttggcaggattccgcttgaacagggcccgcaagaggctctgggcttcagtgctcagaaactggggcatgcctagcttcgccttcagaatcagtgtcatggtctccttccggtccttcccctggaagggcagggagcccgtcagcatctcaaacatcaacaccccataggaccaccagtccgcactatgggagtggccctggcggttgacgacctcaggggccatgtactccactgtcccgcagaaagaataggccttcttctcgtgggcaatggcctctttgctcaggccaaagtcagtgagtttgatgtggccctcctcatccagaaggatgttctcaggcttgaggtctctgtaaatgatacccaggctgtgcaggtgatccaggcccagagccagctcggccaggtaaaacttcacatcctcctccgtgaacatcacctcttttgagagccgggtgaagaggtccccaccacgcaggaaggccagaatgagatagagcttgccctcggtctggaaggcatagtgcagcttcaccacgaatgggtgatttacatcagccaggatgtctctctccatcttgggccggacgccggcacgtactttcagcgttgccttcttcagcaccttca

SEQ ID NO: 172484 - DNA, 282 bp, Homo Sapiens
gtgaggacctgggtaaaaccagagtgacaggatttaataatattcattctgggtaatcgttatgcaatagtacatggtactatgatctctgcttttgaatatatttgaaatttttcataataaagttttttaagtccaatttactattgctccactgtgcaaacataactgtatcattttgaatttgttttatgtgctcacttcaacaacacatatagtaaaattgaatttgttttacctacattcctttttttccttttagtcggggtctcactgtgtctc

SEQ ID NO: 172485 - DNA, 353 bp, Homo Sapiens
ttcatgcaagtggagctgtctgtctctaaattaacctattgctagataatagggttttcagatgaaaaagaaaactaaaagaggaatggcccttcattcagtaagttctgtggttccagtaaggatttttatgtacatacgctctcgtctctcgttttgggtactttctatctcatctgtctcggctctgcatgttttccagggtgtagcctacagacatggaacagtgtaaatcccagactgacagacttagaacctgaggtctcattcatccttatggtttaggccttgccagttttccgaagtctctgattagttgacagtattaacactaaattgcagtttacagtatt

SEQ ID NO: 172486 - DNA, 970 bp, Homo Sapiens
gtagcgaggcctgggtggcgaattcggcacgagggcggcccggggccggggcggccagggccgctgcaggacgagaccctgggtgtggcgtccgtgccctcgcagtggagggccgtccagggcatccgcggggagacgaaaagttgccagacggccagcattgccactgccagtgcatccgcccaggccaggaatcatgtggacgcccaggtgcagacggaggcccccgtgcctgtcagcgtgcagcccccgtcccagtacgacatacccaggctcgcagcctttcttcggagagtggaggccatggtcatccgagagctgaacaagaattggcagagccacgcgtttgatggcttcgaggtgaactggaccgagcagcagcagatggtgtcttgtctgtataccctgggctacccgccagcccaagcgcagggtctgcatgtgaccagcatctcctggaactccactggctctgtggtggcctgtgcctacggccggctggaccatggggactggagcacgcttaagtccttcgtgtgtgcctggaacctggaccggcgagacctgcgtccccagcaaccgtcggccgtggtggaggtccccagcgctgtcctgtgtctggcctttcaccccacgcagacctcccacgtcgccaggagggctgtacagtggtgcaggcgttcgctgtcccacctgacctcgtcttgaacacccgtctgtctgtggagccacaggcctgaaggataacacccacacagaccctgtgtcccaggtgggtgtggctgcccgagcctgggcacagccaccgcttccaaggtgctgagtgtggccactggacgggaaggtggctactctgggcagggcattcgggggtaggcccagctggcaacttcacagaagggcctttcgcccccggttcatggcaacaagcctggccaccggaaaccaccaaaggctccaagaaaaccat

SEQ ID NO: 172487 - DNA, 888 bp, Homo Sapiens
agcgcagggtctgcatgtgaccagcatctcctggaactccactggctctgtggtggcctgtgcctacggccggctggaccatggggactggagcacgcttaagtccttcgtgtgtgcctggaacctggaccggcgagacctgcgtccccagcaaccgtcggccgtggtggaggtccccagcgctgtcctgtgtctggccttccaccccacgcagccctcccacgtcgcaggagggctgtacagtggtgaggtgttggtgtgggacctgagccgtcttgaggacccgctgctgtggcggcacaggcctgacaggatgacacccacacagaccctgtgtcccaggtggtgtggctgcccgagcctgggcacagccaccgcttccaggtgctgagtgtggccactgacgggaaggtgctactctggcagggcatcggggtaggccagctgcagctcacagagggcttcgccctggtcatgcagcagctgccacggagcaccaagctcaagaagcatccccgcggggagaccgaggtgggcgccacggcagtggccttctccagctttgaccctaggctgttcattctgggcacggaaggcggcttcccgctcaagtgttccctggcagctggagaggcagccctcacgcggatgcccagctccgtgcccctgcgggccccagcacagtttaccttctccccccacggcggtcccatctactctgtgagctgttcccccttccacaggaatctcttcctgagcgctgggactgacgggcattgtccacctgtactccatgctgcaggccccctccccttgaatttcgcttgcagctcctcccctcaaggtattctggttttgattgatgccccttggttcccccacgggcgg

SEQ ID NO: 172488 - DNA, 1167 bp, Homo Sapiens
cagggcagccctgtcctggtgcttgacggcatgcaggatgagtcttgtgctgcagacccttctgctctatacggtaccgcaggctcccaggttcccacctggccctccggcctcgttactcttgagctcttcccccattaaggaaccaggtaccctggatgatggtggagagatcgagggagaagacggcatcttcccccgtcgtatacctgcacatcctccagacctgccaccaggcgagctgtgggcacaaggtgagcagaaccgtggaacaccacgtggggactacggccatgtccgctgactgtgcagatgcggaagcggtagtcaccctcggagggcacacagtcgcccggcacctccacggctccggctttctcgatgctgaagcactgaatccagtcttcagagcccacttcctgccgctccagccggtagatgaatggggtctcgggagctggctcgggaggcttccaggtcaacaggaccgtgttcttgtggcccttgaacatctctgccaatatggggggtcctggggtgactgttgcttgacacattgtactctgagaagcgtagtggtacgggagttgcccatggctaaaggtgaccttctgccagcatcctctcggtgtgacaccctggaaggatccagggcatgcactgtggcctgagctgctctggcagatgaccggcagctcctccccatcacggctccagcgtccctcgaccccggcctctagagtttccactagcagcacagcattctctccttccaggacgtcgagcttccggggcaggcgcttcaggatgggccctttgactgtgacgttggccacggtgcgcacccggccccgcatctcgcacaggtagataccatcatcgtctgccttcagcctgtggatgatgaggcgccggacagtgccctcttcgatctgctcgtacttgcggcagggcagcagccgctggtcctcacggaaccaggccgtggggatgcgggagttgggtactttacattccagcacggcaatcccgtgctcacggccctccacgtcctgcaggggccgtgtgaaccggaggcggggctctttcacgtgcagctgcacggcactgagcgtctggcccgccgagttgcgcgcggcgccggacgcgtgggcgacccacgcgtcc

SEQ ID NO: 172489 - DNA, 510 bp, Homo Sapiens
gagggctggtgatggtgaaggataaccatgtggtggccgccggtggcgtggagaaggcggtgcgggcggccagacaggcggctgacttcgctctgaaggtggaagtggaatgcagcagcctgcaggaggccgtgcaggcagctgaggctggtgccgaccttgtcctgctggacaacttcaagccagaggagctgcaccccacggccaccgtgctgaaggcccagttcccgagtgtggctgtggaagccagtgggggcatcaccctggacaacctcccccagttctgcgggccgcacatagacgtcatctccatggggatgctgacccaggcggccccagcccttgatttctccctcaagctgtttgccaaagaggtggctccagtgcccaaaatccactagtcctaaaccggaagaggatgacaccggccatgggttaacgtggctcctcaggaccctctgggtcacacatctttagggtcagtggccaatggggcacattttggcacta

SEQ ID NO: 172490 - DNA, 264 bp, Homo Sapiens
  misc_feature (248)..(248): n is a, c, g, or t
  misc_feature (257)..(257): n is a, c, g, or t
ctgctcttgcaattccagctcacaggaggaaaccatgttggctcgctgcagctcctgcttcagtagatacagctgtgcggtggggaggcgacaggaagggcgatggaaacagcttctcccctgatcaggagctgggggcatttctcacccttcctcctaatgatggctttttagcactcagggggcttcctgcctcgagactgaaaaacccacgaaagggttcacctaatgaataggtcccaaatatncactggggnctgggaa

SEQ ID NO: 172491 - DNA, 593 bp, Homo Sapiens
  misc_feature (527)..(535): n is a, c, g, or t
ggacttgtgatgacatcttaatcaaacaggaccagactctggctgaactgcagaacaacatggtgctagtgaaactggaccttcggaagaaggcagcatgtattgctgagcagtatcatactgtgttgaaactccaaggccaggtttctgccaaaaagcgccttggtaccaaccaggaaaatcagcaaccaaaccaacaaccaccagggaagaaaccattccttcgaaatttacttccccgaacaccaacctgccaaagctcaacagactgcagcccttatgcccggatcctacgctcacggcgttcccctttactcaaatctgggccttttggcaaaaagtactaaggctgtggggaaagagaagagcagtcatggccctgaggtgggtcagctactctcctgaagaaataggtctcttttatgctttaccatatatcaggaattatatccaggatgcaatactcagacactagctttttttctcacttttgtattataaccacctatgtaatctcatgttgttgnnnnnnnnnatttacttatatgacttctatgcacacaaaaacagttatattaaagatattattgttc

SEQ ID NO: 172492 - DNA, 503 bp, Homo Sapiens
aatttaactcatgttatcatcattagtgatctgtgttgtagaacatgagggtgtaagccttcagcctggcaagttacatgtagaaagcccacacttgtgaaggttttgttttacaaatcacttgatttaacacactcaggtagaatatttttatttttactgttttatacccagaagttatttctacattgttctacagcaagaatattcataaaagtatccctttcaaatgcctttgagaagaatagaagaaaaaaagtttgtatatattttaaaaaattgttttaaaagtcagtttgcaacatgtctgtaccaagatggtactttgccttaaccgtttatatgcactttcatggagactgcaatacgttgctatgagcactttctttatccttggagtttaatcctttgcttcatctttctacagtatgacataatgatttgctatgttgtaaaatctttgtaaaaaatttctatataaaaatattttgaaaatcttaaaa

SEQ ID NO: 172493 - DNA, 380 bp, Homo Sapiens
  misc_feature (359)..(359): n is a, c, g, or t
  misc_feature (369)..(369): n is a, c, g, or t
atgaagcatatgtagcacttcacagcatggttatcatgtaagctgcaggtagaagcaaagctgtaaagtagatttatcacacaatgactgcatacagacttcaaatatgtcaatagtttggtcatagaacctagaagccaaaagccacacagaagggcaagaatcccaatttaactcatgttatcatcattagtgatctgtgttgtagaacatgagggtgtaagccttcagcctggcaagttacatgtagaaagcccacacttgtgaaggttttgttttacaaatcacttgatttaacacactcaggtaggaatattttttatttttactggttttataccccaggaagttattttctncatttgtttntaccagccatg

SEQ ID NO: 172494 - DNA, 370 bp, Homo Sapiens
  misc_feature (46)..(46): n is a, c, g, or t
  misc_feature (66)..(66): n is a, c, g, or t
  misc_feature (110)..(110): n is a, c, g, or t
  misc_feature (126)..(126): n is a, c, g, or t
  misc_feature (137)..(137): n is a, c, g, or t
  misc_feature (164)..(164): n is a, c, g, or t
  misc_feature (246)..(246): n is a, c, g, or t
  misc_feature (269)..(269): n is a, c, g, or t
  misc_feature (288)..(288): n is a, c, g, or t
  misc_feature (291)..(292): n is a, c, g, or t
  misc_feature (299)..(300): n is a, c, g, or t
  misc_feature (337)..(337): n is a, c, g, or t
  misc_feature (345)..(345): n is a, c, g, or t
  misc_feature (359)..(359): n is a, c, g, or t
tactcctgctgcttggctgtactgtgggaccctcccctgctgcatnttagtataaggccataggcnagtcacttaacctctggtatccgagttaaaactaacacctatanaagagtggtgcattanttaatgtttanaaagtaaacaacaatttcaggacttgnaatagtcttatatttcacttaatagttcttttatttcctcgctttatcactagtaatttaacctatttccccttttatcttntataggatatgccattacgctcnttttaatttgcgggcgcanttnnatcccannactcatcgtataaactcctcgtcaaggtcctctttcngtaacttncacttccattcgtnttcctccggaa

SEQ ID NO: 172495 - DNA, 290 bp, Homo Sapiens
ggacgagaaggcgtagaagtattcgaatggagcatcccccttcggcgacgtctcctcccgcctcaccacagaacaaattctgtacaacataaaacaagagtataaacgaatgcagaagagaagacatttagaaacgagtttccaacagacagatccgtgtagtacttctgatgcacagccacatgcatttctcctcagtggaccagcttcaccagggacttcatctgcagcatcctcaccattaaaaaaagaacagcccttatttattctacggcttcgtcggtcaggga

SEQ ID NO: 172496 - DNA, 780 bp, Homo Sapiens
tgagagctgcaatagcgataatctgaaccatgcggttttggcagtgggatatggaatccagaagggaaacaagcactggataattaaaaacagctggggagaaaactggggaaacaaaggatatatcctcatggctcgaaataagaacaacgcctgtggcattgccaacctggccagcttccccaagatgtgactccagccagccaaatccatcctgctcttccatttctttccacgatggtgcagtgtaacgatgcactttggaagggagttggtgtgctatttttgaagcagatgtggtgatactgagattgtctgttcagtttccccatttgtttgtgcttcaaatgatccttcctactttgcttctctccacccatgacctttttcactgtggccatcaggactttccctgacagctgtgtactcttaggctaagagatgtgactacagcctgcccctgactgtgttgtcccagggctgatgctgtacaggtacaggctggagattttcacataggttagattctcattcacgggactagttagctttaagcaccctagaggactagggtaatctgacttctcacttcctaagttcccttctatatcctcaaggtagaaatgtctatgttttctactccaattcataaatctattcataagtctttggtacaagtttacatgataaaaagaaatgtgatttgtcttcccttctttgcacttttgaaataaagtatttatctcctgtctacagtttaataaatagcatctagtacga

SEQ ID NO: 172497 - DNA, 372 bp, Homo Sapiens
tgacctgacgaagccgtagaagaaagcaaaaactgatagagctgaaaggtgaaatagacaagtccacaaatatagttggagaattaaaaacgtcagtctcaccaaattgatagaactaccaggataaaatatgtgagaatatcaaagaactgaataacagcatcaatcaacaggatctaattgatatttatagaatgctctattcaacaatagacaaatccacaaatacatttgggaaattcaaagacttgctcttgttagcaacaacaacaacacaaagaagtagttctttcgtatcatagattgtctcatgtccagttttattaatttctgctcttcattatttcctttcttctacggcttcgtcggtca

SEQ ID NO: 172498 - DNA, 1005 bp, Homo Sapiens
acgtaactcgatcaacaatccattcgatgaccattatcacaactatattttattctaatttataaaacaaaaaatggttagacaagcacatgatatcaagagtcttcaacacagtggattccattttattaagaaaaaaaatagaaaacaagtagtccttaaattgtcttagctctccatagcgtacgttatataaaattaaagttttgcttccaaaaatatgtttccatgtggtcgtggtgttgtccagtgctattagggccaaagcaccaaagacatgagaagtttaaccatcgacttgtcatttttcataaaaactaaacatttccttataggtctggagtaaaatcttctaggcattttagtgctaaaagtcactttaaattaaatgtgaaataaaagctacaaaaagtatgagttctttcaatacaaaaagttgtgtagctgaagttgtgggctcctttgacatacataagcagtttcaataaaatatttgctcaggtaagaaaatagaaatttgtctgctttcatttagcatacgttccagtcgatgtcctgcttatccctgccagaacttctgaagaacattagaatcgatatttctttccttcaaagagcatccgtaattcacagtacaaaacagttctacagtcttattcctaaggagaaacaaaaattattaatatgtttatttttctaaagtgtcaaatgtagccactgccagggcattaaaaactcacttatccacaacactgccgtcttcaggaaagaacccagagttgattcattcccctttcctggagctgttactagttggttgttgctttaagtgtaataaccctaagaaaattcccaataaaaatcactgttcttaagtgtcacatatttcacacctctggtaccctgtagaaacgcttgtattacatgggaaagcagcatctgaaaagatctatttcctattctagttcattccaagcctgttattgaacctctctctaattgatt

SEQ ID NO: 172499 - DNA, 235 bp, Homo Sapiens
tggatgtgcttactttttacatgcttactagtaggtagtgctttaagtgtaataaccctaagaaaattcccagataaaaatcactgttcttaagtgtcacatatttcacacctctggtaccctgtagaaacgctgtattacatgggaaagcagcatctgaaaagatctatttcctattctagttcatttccaagccctgttatcgaaaacctcttctctaggtttgatcgagcta

SEQ ID NO: 172500 - DNA, 365 bp, Homo Sapiens
ttgtatcagcacgctggagtcctaaggataatcttaggaaccctcagacccaatccgatacccctattctaaatgctcctagtgccctgtaccttcccctcataagccttcatcatcattgtaatgatatgtttatgtaatattttgattaatgtccctccttcactgacctagcagttctagcagggcactgattttgctgtgttgcatccacagcacctagtctggtatgtggcattcagcatatgttgtattgaatgaactggccatgtggttattctagatcctccttgatcactcggggtaaggattgtggcacgaagtggcacaatgagggagagtagtccctgtcccctcgtatactg

SEQ ID NO: 172501 - DNA, 493 bp, Homo Sapiens
ccaaaggcgcggcgcccccggagggggccatatctaacggggtttacgtactgccgagcgcggccaacggagacgtgaagcccgtggtgtccagcacgcctttggtggacttcttgatgcagctggaagattacacgcctacgatcccagatgcagtgactggttactacctgaaccgtgctggctttgaggcctcagacccacgcataattcggctcatctccttagctgcccagaaattcatctcagatattgccaatgatgccctacagcactgcaaaatgaagggcacggcctccggcagctcccggagcaagagcaaggaccgcaagtacactctaaccatggaggacttgacccctgccctcagcgagtatggcatcaatgtgaagaagccgcactacttcacctgagccacccaacctaaatgtacttatctgtccccatgtccccacaccagcctgttttcataataaactttattgtgacagcc

SEQ ID NO: 172502 - DNA, 1533 bp, Homo Sapiens
aaggttgcagccggatccgcccagctcaccgagagcctagttccggccagggtcgccccggcaaccacgagcccagccaatcagcgccccggactgcaccagagccatggtcggcagaagagcactgatcgtactggctcactcagagaggacgtccttcaactatgccatgaaggaggctgctgcagcggctttgaagaagaaaggatgggaggtggtggagtcggacctctatgccatgaacttcaatcccatcatttccagaaaggacatcacaggtaaactgaaggaccctgcgaactttcagtatcctgccgagtctgttctggcttataaagaaggccatctgagcccagatattgtggctgaacaaaagaagctggaagccgcagaccttgtgatattccagttccccctgcagtggtttggagtccctgccattctgaaaggctggtttgagcgagtgttcataggagagtttgcttacacttacgctgccatgtatgacaaaggacccttccggagtaagaaggcagtgctttccatcaccactggtggcagtggctccatgtactctctgcaagggatccacggggacatgaatgtcattctctggccaattcagagtggcattctgcatttctgtggcttccaagtcttagaacctcaactgacatatagcattgggcacactccagcagacgcccgaattcaaatcctggaaggatggaagaaacgcctggagaatatttgggatgagacaccactgtattttgctccaagcagcctctttgacctaaacttccaggcaggattcttaatgaaaaaagaggtacaggatgaggagaaaaacaagaaatttggcctttctgtgggccatcacttgggcaagtccatcccaactgacaaccagatcaaagctagaaaatgagattccttagcctggatttccttctaacatgttatcaaatctgggtatctttccaggcttccctgacttgctttagtttttaagatttgtgtttttctttttccacaaggaataaatgagagggaatcgactgtattcgtgcatttttggatcatttttaactgattcttatgattactatcatggcatataaccaaagaggccacttagggaaagatgtagaaagatgctagaaaaatgttctttaaaggcatctacacaatttaattcctctttttagggctaaagttttagggtacagtttggctaggtatcattcaactctccaatgttctattaatcacctctctgtagtttatggcagaagggaattgctcagagaaggaaaagactgaatctacctgccctaagggacttaacttgtttggtagttagccatctaatgcttgtttatgatatttcttgctttcaattacaaagcagttactaatatgcctagcacaagtaccactcttggtcagcttttgttgtttatatacagtacacagataccttgaaaggaagagctaataaatctcttctttgctgcagtcatctacttt

SEQ ID NO: 172503 - DNA, 874 bp, Homo Sapiens
aggagcgggcctgggtgggattccaaacgaggcccaaggttgcagccgtacccgcccagctcaccgagagcctagttccggccagggtcgccccggcaaccacgagcccagccaatcagcgccccggactgcaccagagccatggtcggcagaagagcactgatcgtactggctcactcagagaggacgtccttcaactatgccatgaaggaggctgctgcagcggctttgaagaagaaaggatgggaggtggtggagtcggacctctatgccatgaacttcaatcccatcatttccagaaaggacatcacaggtaaactgaaggaccctgcgaactttcagtatcctgccgagtctgttctggcttataaagaaggccatctgagcccagatattgtggctgaacaaaagaagctggaagccgcagaccttgtgatattccagttccccctgcagtggtttggagtccctgccattctgaaaggctggtttgagcgagtgttcataggagagtttgctaacacctacgctgccatgtatgacaaaggacccttccggagtaagaaggcagtgctttccatcaccactggtggcagtggctccatgtactctccgcaagggatacacggggacatgaatgtcactctctggccaattcagagtggcattctgcatttctgtggcttccaagtcttagaacctcaactgacatatagcattgggcaccctccagcagacgcccgaaattcaaatcctggaaaggaggaagaaaacgcctggaaaaatatttggggattgagacacccactgtaattttgcctccaagcaaccctcttttgaacctaaactttccagggcagggattctttaatgg

SEQ ID NO: 172504 - DNA, 884 bp, Homo Sapiens
gggacacacgcgactcccacaaggttgcagccggagccgcccagctcaccgagagcctagttccggccagggtcgccccggcaaccacgagcccagccaatcagcgccccggactgcaccagagccatggtcggcagaagagcactgatcgtactggctcactcagagaggacgtccttcaactatgccatgaaggaggctgctgcagcggctttgaagaagaaaggatgggaggtggtggagtcggacctctatgccatgaacttcaatcccatcatttccagaaaggacatcacaggtaaactgaaggaccctgcgaactttcagtatcctgccgagtctgttctggcttataaagaaggccatctgagcccagatattgtggctgaacaaaagaagctggaagccgcagaccttgtgatattccagttccccctgcagtggcttggagtccctgccattctgaaaggctggtttgagcgagtgttcataggagagtttgcttacacttacgctgccatgtatgacaaaggacccttccggactaagaaggcagtgctttccatcaccactggtggcagtggctccatgtactctctgcaagggatccacggggacatgaatgtcattctctggccaattcagagtggcattctgcatttctgtggcttcccagtcttagaacctcaactggactatagcattggggcacactcccgcagacgcccgaaattccaaatcctgggaaggatgggaaaaaaacgcccggggagaaattatttggggaatgagaacccccaccgggaatttttgcgcctcccagcgcagcctttcttttgaaccttaaaatctttccaagggccggggaattccttttactgggc

SEQ ID NO: 172505 - DNA, 786 bp, Homo Sapiens
gatattgatgttccagcaggttccaatgttgagattgatggatgaagctggtacagaccagagccattctcaactacattgccagcaaatacaacctctatgggaaagacataaaggagagagccctgattgatatgtatatagaaggtatagcagatttgggtgaaatgatcctccttctgcccgtatgtccacctgaggaaaaagatgccaagcttgccttgatcaaagagaaaataaaaaatcgctacttccctgcctttgaaaaagtcttaaagagccatggacaagactaccttgttggcaacaagctgagccgggctgacattcatctggtggaacttctctactacgtcgaggagcttgactccagtcttatctccagcttccctctgctgaaggccctgaaaaccagaatcagcaacctgcccacagtgaagaagtttctacagcctggcagcccaaggaagcctcccatggatgagaaatctttagaagaagcaaggaagattttcaggttttaataacgcagtcatggaggccaagaacttgcaataccaatgttctaaagttttgcaacaataaagtactttacctaagtgttgattgtgcctgttgtgaagctaatgaactctttcaaattatatgctaattaaataatacaactcctattcgctgacttagttaaaattgatttgttttcattaggatctgatgtgaattcagatttccaatcttctcctagccaaccattttcctggaattaaaaattcagtaaaaaaggaa

SEQ ID NO: 172506 - DNA, 323 bp, Homo Sapiens
cctctctgcttgggctctctcttcttcaagtgatctccttgtgtcagtcccaagtagctgggactacaggacagcagccatacccttggcttcctatggcatccaccacactagcctcctaaagcgacacatctctcatcagacgtctgtgagtgcagaccccgcctcccacgagatctggaggtcagaaactctgctccaggtttttgttgaaatgtggccgtcatcactattccttggagatgtatcaaaaaaggcagtcccctcatgccaagctggaggttctgcactaccgactcagtgactccagcgtgctgatacaa

SEQ ID NO: 172507 - DNA, 587 bp, Homo Sapiens
caaatattcaaaggacttcaagaaaggtttcagactgaaattcaaacagtgaataaacagttcccatgtgagccattcaaatttttggagccaactctaagactagaatattgtgaagcattggctatgcttagggaagctggagtcgaaatgggagatgaagacgatctgagcacaccaaatgaaaagctgttgggtcatttggtaaaggaaaagtatgatacagatttttatattcttgataaatatccattggctgtaagacctttctataccatgcctgacccaagaaatcccaaacagtccaactcttacgatatgttcatgagaggagaagaaatattgtcaggagctcaaagaatacatgatcctcaactgctaacagagagagctttacatcatggaattgatttggagaaaattaaggcttacattgattccttccgctttggagcccctcctcatgctggtggaggcattggattggaacgagttactatgctgtttctgggattgcataatgttcgtcagacctccatgttccctcgtgatcccaaacgactcactccttcatcacactctgccac

SEQ ID NO: 172508 - DNA, 379 bp, Homo Sapiens
tggccatcactgtcagtgttatggccgaggcgtcaagttcttctagcagggacctgtctcccttaacttcttacctcccacctttccagggctttcaaaagaaaaacagacccagtgtcccccaaagactggatctgtgactccaccagactcaaaaggactccagtcctgaaggctgggacctggggatgggtttctcacaccccatatgtctgtcccttggatagggtgaaggctgaagcaccagggagaaaatatgtgcttcttctcgccctacctcctttcccatcctagactgtccttgagccagggtctgtaaacctgacactttatatgtgttcacacatgtaagaacatacacacatgcgcctgcagcaca

SEQ ID NO: 172509 - DNA, 893 bp, Homo Sapiens
gggagcttccgggtttcctgggctactacgatggcgatgagtttcgagtggccgtggcagtatcgcttcccacccttctttacgttacaaccgaatgtggacactcggcagaagcagctggccgcctggtgctcgctggtcctgtccttctgccgcctgcacaaacagtccagcatgacggtgatggaagctcaggagagcccgctcttcaacaacgtcaagctacagcgaaagcttcctgtggagtcgatccagattgtattagaggaactgaggaagaaagggaacctcgagtggttggataagagcaagtccagcttcctgatcatgtggcggaggccagaagaatgggggaaactcatctatcagtgggtttccaggagtggccagaacaactccgtctttaccctgtatgaactgactaatggggaagacacagaggatgaggagttccacgggctggatgaagccactctactgcgggctctgcaggccctacagcaggagcacaaggccgagatcatcactgtcagcgatggccgaggcgtcaagttcttctagcagggacctgtctccctttacttcttacctcccacctttccagggctttcaaaaggagacagaacccagtgtcccccaaagactggatctgtgactccaccagactcaaaaaggactccagtccctgaaaggctgggaacctgggggatggggtttctccaccaccccatatggtctggcccccttggaataggggggaaggctgaacccccccaggggaagaaaatattgtgggttttcttctcggcccctaacctcccctttttccaattccttaaaaactggtccccttggaaaccccaggggtcctggtaaaaaccctgggacaacca

SEQ ID NO: 172510 - DNA, 806 bp, Homo Sapiens
  misc_feature (673)..(673): n is a, c, g, or t
cgagctcggtacccattagctgtgtcattacagttttggggagggggaggagataaacactagcttgacttgttctatttataacattgaacgctggagagagtcaacattagtatctataaaaacgaagattgcttggcaaattttcctaagtcccagatatgatgtattctggatatactgagaagtgaaaagctttttgctgaatcttaaagagtaaagtgcatatctcatcactccacagcagcagtaaataaaaggaaatatttgccagtcttcctggagggagggaaggcaccatattttcatttttaaaagaagatgaaactgggaaataaaacacactaagaaaaaacacaagtaataccaatatcagtttccaaccctagcatgggatagatgctgttatgatttgtatggataaaacagtattctatttggagggaaaacattaacaatgattatatttccaaaaccaaaaagaaggatcacatggtctaccaacagaattatctaaaattagatctgcctcagaaaatctgagatatatggccacaattatatgctaataaaatatcaatatttcattctaaaatgcacctagtaataggtacatccttcgaggacacagcttaatgcccattactaaactactgcaaaggacaagtagtantctaaattaccttttattaaataggaacacaagtgatttctagaaaatatctagaaattaacaccagttgtatatattttcctaatactcttatagtacctaaaatcaaattcttagcagacaacctgtgccg

SEQ ID NO: 172511 - DNA, 866 bp, Homo Sapiens
gagtatgattgtgaaaagctggggagaaaatgcttaaggacatgctaggggaaaaaaaagtaaaattgaagtgctattgcagacatggctgcagtactgtaccttatcattctgatgaaactgatttggagcacccttttctttatcgctacatttatttaggggacaaactccatccaggttgactctctctggaatgcggtaataagagctggcaagtaaggctcagagagaagtcaaccaactggagttaattgcccatttgggctctttgtataattatggcaaagtagacatttatgttctaattaatatgattacagagaaggctttttctcaggtcaggcttttcatgaaagtattttgagaacaatgaattgcaataaccagcttcacacaagcataactgataaacgcgagtgctattgtagtcttggcaagtgagccaagaacctaggagcagggccattcctactgaaggacgggccccctacggagatgaaatttgtttcctggtgagcacagaatcagaacaaagaacaatatcccaaagaggccctgtgtctaccaggagcttctttttccaaatgtaatggattatgtggaattgtagtgccatcggtttttacttagagcccttgacgtgcttggaccaatatttccttccttcttatgaaccaggtttttccttctgattttcccttttcaacattccttaccagtcaccaaagtttcctgttataatttcttttagcagacaagttataagtcagatttaattagcatcagagttgattttatattagtcagattttggatcatcacagagatctccacaactccttggcttaaacagctccaccggt

SEQ ID NO: 172512 - DNA, 467 bp, Homo Sapiens
cgactctagaccatccccgtgctggcggacatcactttagaccctccacctaattgctgtgctggtcccaaaggcgatgacatctatgaatggagatcaaccattctagggcctccaggatccgtgtatgagggtggtgtattctttctcgatatcacttttacaccagaatatcccttcaagcctccaaaggttacatttcggacaagaatctatcattgtaatattaacagtcaaggtgttatttgcttggacatattgaaagataattggagtccagcactaaccatttctaaagtcctcctttctatctgctcacttcttacagactgtaatcctgccgaccccttggggggaagtattgccactcagtatatgaccaacagagcagaacatgacagaatggccagacaggggaccaagagatacgctacataaattgggtttcacaattctacattatttgt

SEQ ID NO: 172513 - DNA, 644 bp, Homo Sapiens
  misc_feature (77)..(94): n is a, c, g, or t
  misc_feature (591)..(591): n is a, c, g, or t
ggaatgctgaggtgactctagacgttcccccatgctgtcttcaggactggacagaggcctaaaccacaacaacaacnnnnnnnnnnnnnnnnnntacttggatttcggtaatcatccataggaactcatagcatcagtctcttttctctgtgaataatatctttgtgtaagttgtcataaaaaatcaacgttagaagatgacaattagatttcttcttaggtattgagggtaagaagttgtaaagaaagaaaattcgtgtttcaactaaaagattggattgcatatacctttgaagtggttttgtaaaaaaagttcagttactaaactgagtgtgccctgtaatcctttttgagtgcactgaagatgctttgaaaatactttgttggtcttcacattgtgcatcatgtcctgcaacttgtaaatatgtgcatgttgtttatgtttgtctgcctgtctcttattgcactaaattctgcaaggtgaataatttttttataccatttatttggaaaaagttcctcctccaactcttcttcactgaccttttaattagttggtaaacttagaaaaccaggtaggatttttgaagncctgagtttaaaagaagaatcgtggctatttgacaccatctgaagacagcatg

SEQ ID NO: 172514 - DNA, 597 bp, Homo Sapiens
ctggatctgttaaaccatatattattgatcattgcaagtgaaattttgagagattgtttctagtatttaggtgatgaaaacatttggtaatattgctttggttcaaagaattttatgtctttatctttctagaagaaagcaattatacatatatttttgctaaatgacataaacatttaattacatcaggttctaatttaaacatgtattactcacttgaggccacttttaaatattcatactctttgacataagatgctttgtatatttctcatttcttttagttcttagtaagtcagctttaaaaagtacctgccaaccagaaccttccatattctggactaaatcttgctcttcggattatacttcagtgcagtaactgtggatttgcaattttgaaggggagatagtagctattatattttacacttgcttgatgtgataactctaaagactttttaactgataaaagcgcacatggctattttgatacacaaagttgtgtttgctactttagaagcttttgtggcagaattgtaatctaattttcataccttgtatttctgaatcacaacaaaaaaataaatggggaacaag

SEQ ID NO: 172515 - DNA, 843 bp, Homo Sapiens
  misc_feature (597)..(708): n is a, c, g, or t
  misc_feature (717)..(731): n is a, c, g, or t
ccgatatgttatatttcaggctgatgcacctaatccaggactcattccagatgcagatgcatttaggcgtaactgttgtgctaattacttgtacctatcgaggacaagaatttattagagttggctattatgtaaataatgaatatactgagacagaattaagggaaaatccaccagtaaaaccagacttttctaagcttcaaaggaatattttggcatctaatcccaggatcactagattccacattaattgggaagataacacagaaaaactggaagatgcagagagcagtaatccaaatctacagtcacttcttacaacagatgcattaccttcagcatcaaagggatggtccacatcagaaaactcactaaatgtcatgttagaatcccacatggactgcatgtgaccacctaccatccctttagtacaaattaagctattaaaaatacacagaactatttccctgaaattccgtaagtacatagtcaaaacacaatgtgaagaatttgtttaaaaacatcctgtagaaagtttataagaaaaccagtatttgaacaaattgtggaatataaatacaactatttttaagtaannnnnnnnnnnnnnnnnnnnnnnnnnnnnnnnnnnnnnnnnnnnnnnnnnnnnnnnnnnnnnnnnnnnnnnnnnnnnnnnnnnnnnnnnnnnnnnnnnnnnnnnnnnnnnnncctggcggnnnnnnnnnnnnnnnaaaaagttttaaaaacctttctttggggccggggccccaaaaggaagggaaacggggcaaatactggttcccaagagaaaaccgggcaaggaaaagggttgggattccccac

SEQ ID NO: 172516 - DNA, 391 bp, Homo Sapiens
gccacatcatccgagacatgattggaccggaaaagactctggtagatttcctctcacaccactaagaagcagtagcctttgtccagggctaaatacaactcgtttcaagattaaagaacattgggaatttaaaaagttaattgtcagaggaagtacacttctgtggtcttgcagtaggcgagcccaaacaaaaataagcaaagggactaattagtttcacgtttcttaattctgcaaaactagttaagtaagtttggggtaaaggatcctctcttactaacacagatgtacctgagcaaacagttttcccattggtgctctggtgtgtcaatcatgcaatctccaatcctagctcctcaggtaggagggtgacagggggccatcctgaaga

SEQ ID NO: 172517 - DNA, 571 bp, Homo Sapiens
gattgttagaaccagaggcgaaatgagtaccatgccggcgaagtggcccggctctctgcggccgtgaggatggcgatggcgcctcccatggagtggcccagaaggaagacaggaagcccaggctagtctttctgcatggaatccacatgctgcaacacatccctgacgaaaacgtggaagtcagacactaccatcctctccccttcgctctgtccgtggccaacatggtcgtgggcgaacaccagcaggtccagccccatcagcatccgagccagctcttcatagcggccactgtgctctccggctccatgggacacaaagatgagggccctgatatttctgggattggctgatgggatttctttcctgcatttcccttggctactgaggagcacggctggaactgctaattagtcagcatcttctgtcttcaaaaggggctgtgcttccagaagggatagctcaagtactttaaccccctttgggagcacagccactactgtcataattcaggctactgttaatgcagacagacaggtcgttgagctgaatcagatccaaatcgggtacc

SEQ ID NO: 172518 - DNA, 1399 bp, Homo Sapiens
  misc_feature (28)..(28): n is a, c, g, or t
  misc_feature (34)..(34): n is a, c, g, or t
  misc_feature (98)..(192): n is a, c, g, or t
  misc_feature (672)..(672): n is a, c, g, or t
  misc_feature (1117)..(1117): n is a, c, g, or t
  misc_feature (1159)..(1159): n is a, c, g, or t
gggcgtatacggtcctaggtagcgaggnctgggntggcgtatccggcacgaggcggcgggcggcgcccccgctcctccccgcgggccgggcacacgtnnnnnnnnnnnnnnnnnnnnnnnnnnnnnnnnnnnnnnnnnnnnnnnnnnnnnnnnnnnnnnnnnnnnnnnnnnnnnnnnnnnnnnnnnnnnnnngggataaagtggcggcgcagacgccgcaccctgtcgccgcgaagccggtcgcgcgcagctcgtcccggccctggcccgccgcaaacgaggatccgctgcgctcggggaacgcgacagcggcgctcgtggccccggacctgaagacccttccagcatgccataggaaagttcccccaggcggaccccgcagagcattccctaccaggacctccctcacctggtgaatgcagacggacagtacctcttctgcaggtactggaagcccacaggtacacccaaggccctcatctttgtgccccatgggaccgggacagcacagtgggctgctataaaagagcctggttcgcgattgttgatggggcatggcacctggtcagcgggcccgccccgtgcagagaggtcgtggttagcgggcacctcgggggggtggcgcactggattcggtgagcagcgccttcatatttaaccccgcatcctgcnagcacggtcgcacgcgcacatgccaccatattctcgggaactcgcgcctttcgtaagcaagtggaaacattagggcgcgtcgaacggacaatcagcgtgcgccctataaataccatgtatgggggatgcaccggagaatcctagtatgttgcctcacgtttccattacgttataccgggaaagtggttactgaccaaccacacatataggcgaagacgcaaattaagagacagagattccatcatcgtccgtgcagtcttatctcgccgcgcgtaataaggaaactgtacatcgacgatcacgtggatacgagggtgactgtgatagcgagagaccccgtcttcgcggctgtcaccccaccgcgctcctctattctccacgtttgcccatccgaccgaatgagccacacgtctctacctgtcgtagacagagcatctatacgacntagtgacgctgatgatgtctacgctcgtagcacggagatacnagccggaagaggtgtaagcggcgccgccgtcgcttcgcatggtgtcgcggcggactaggaagcagagccgctttcgtcttccggcgctcacagttgtatctacgtccgctcctacctctcgcgcgccgcctgtcacagacaacacgacatagtccagaccggcgccagacacgcggccctgtgtccattgggcccgccgcttctgcacgtgtcgtcgtggcgcgcactacaactagtgag

SEQ ID NO: 172519 - DNA, 1005 bp, Homo Sapiens
gggaggcaggtgccagctgggaggcgcccttggggcattttccgtggcgtcatgtgcctgtcgaggtgtgtgcccggcagctccccggagtgcgccctcacttgccttgcagtggacagcgcttgtccgtccagtgtagtaggcacctctcctgcagctcttggatactctggatgctcttgtctgtcaactagaccacatgcttcagattccctttgatgtacttgaggatttgttggattcggtggggctcatttgcggtcctggccggcagcttggcgtgatttccagcacataatcaggaccatatgctgtgaaaaactcatgatctcgggatctcagaggatagtgttttccctaggatgaccccggtcaagtatgtccagcatcgagccgtgttggcaaggttatagcctcctcctcccaaaatgagtgttgccaactgccattgaaggatgtacttaagacacttgccaattcccactggagtcatgttaaaggagcacatgggatccccagctattgtgtcagctcccagctgtaagaccactgctttgggattaaaggcttggtatacttcctttagtacactttcacagatctggtaatatttttcatcttgtatgccatcctgaatgggcacatttacactgtagtaccgtcccttccctaggccaacatcagacacgtcacctgttcctgggaaaaatcctggggagaatttgtgcagggacacggtcatgactttggaggtgaaactgaatgcgtcttctacaccatctccatggtgcagatccaaatccacgtagagaatacgctcaaatttccgtcgcaatcgtaatattcccaggacagcatcattgagataacgaaaaaccagatgcttcatctttctttgcatgatgccaccctccagaccagttaattgctaccgaacgcgtggtcgacgatatcccggattccgaccgtagcgaagggccgtgcgtttttataaaagtgccaagc

SEQ ID NO: 172520 - DNA, 751 bp, Homo Sapiens
tgctgtgccgaacccttctcttcgcggaccccacgccaagcagcgaccctgagccgacagccggagcgcccggcaaatggcggcctcgacggcctcgcaccggcccatcaaggggatcttgaagaacaagacctctacgacttcctctatggtggcgtcggccgaacagccccgcggaatgtcgacgaggagctgagcaaaaaatcccagaagtgggatgaaatgaacatcttggcgacgtatcatccagcagacaaagactatggtttaatgaaaatagatgaaccaagcactccttaccatagtatgatgggggatgatgaagatgcctgtagtgacaccgaggccactgaagccatggcgccagacatcttagccaggaaattagctgcagctgaaggcttggagccaaagtatcggattcaggaacaagaaagcagtggagaggaggatagtgacctctcacctgaagaacgagaaaaaaagcgacaatttgaaatgaaaaggaagcttcactacaatgaaggactcaatatcaaactagccagacaattaatttcaaaagacctacatgatgatgatgaagatgaagaaatgttagagactgcagatggagaaagcatgaatacggaagaatcaaatcaaggatctactccaagtgaccaacagcaaaacaaattacgaagtacatagatcgagattcgttcaacaatgcaatggatagttacgatgtaaaccctgtgactatagt

SEQ ID NO: 172521 - DNA, 476 bp, Homo Sapiens
  misc_feature (354)..(354): n is a, c, g, or t
  misc_feature (403)..(403): n is a, c, g, or t
  misc_feature (412)..(412): n is a, c, g, or t
  misc_feature (431)..(431): n is a, c, g, or t
  misc_feature (440)..(440): n is a, c, g, or t
  misc_feature (447)..(447): n is a, c, g, or t
  misc_feature (465)..(465): n is a, c, g, or t
ctccgcggaccccacgccaagcagcgaccctgagccgacagccggagcgcccggcaaatggcggcctcgacggcctcgcaccggcccatcaaggggatcttgaagaacaagacctctacgacttcctctatggtggcgtcggccgaacagccccgcggaatgtcgacgaggagctgagcaaaaaatcccagaagtgggatgaaatgaacatcttgggcgacgtatcatccagcagacaaagactatggtttaatgaaaataggatgaaccaaggcactccttaccataggtatgatgggggggatgatgaaggatgcctgtaggtgacaccgaggccactgaagccatggcgcncagacatctttaggccagggaaatttaggctggcagctgaaagggtttnggagccaanagtattcggatttcagggnaccaaggtnagcagtnggagagggagggttagtngacctttcacc

SEQ ID NO: 172522 - DNA, 578 bp, Homo Sapiens
  misc_feature (18)..(18): n is a, c, g, or t
  misc_feature (103)..(103): n is a, c, g, or t
caaagttacccatttggnacacacccatgtacccattgcactttcccaatgccacagcaacttcacattgttcaactcccttctcggggtgggacagacgagncaccagcacacaggcagccagccgtggccaaaggctcgaggggcctcagggcctcaggcaccccgtcccccaaacgagggcccccgtgggtggccctggccctgctttcctacgcccaatgttatgccagctcccatgttctccccaaataccgttgatgtgaattattttaaaggcaaaaccgtgctctttattttagaaaacactgataatcacactgcggtaggtcattcttttgccacatccctatagaccactgggtttggcaaaactcaggcagaagtggagacccttctagacatcactgtcagccttgctacttgaaggtacaccccatagggtcggaggtgctgtccccactgccccacgttgtccctgagatttaacccctccactgctgggggtgagctgtactcttctgactgccccctcctgtgtaacgactacaaaataaaacttggttctgaatattttt

SEQ ID NO: 172523 - DNA, 679 bp, Homo Sapiens
  misc_feature (484)..(484): n is a, c, g, or t
  misc_feature (661)..(661): n is a, c, g, or t
taaagtctaccaaaggaatttgcatccagcagcagcacttagacctgccagccactgtcaccgagcgggtgcaagcactcggggtccctggagggcaagccctgcccacagaaagccaggagcagccctggcccccatcagccctgctagacgcaccgcctgaaggcacagctaaccacttcgcacacacccatgtaaccactgcactttccaatgccacagacaactcacattgttcaactcccttctcggggtgggacagacgagacaacagcacacaggcagccagccgtggccagaggttcggaggggctcaggggctcaggcacccgtccccacacgagggccccgtgggtggggctgggcctgcttttctacgccaatgttatgccagctccatgttctcccaaataccgttgatgtgaattattttaaaggcaaaaccgtgctctttattttaaaaaacactgataatcacactgcnggtaggtcattcttttgccacatccctatagaccactgggtttgggcaaaacttcaggcagaagtgggagacctttcttaggacattcatttgttcaggccttgcttacttggaagggtacaccccatagggttcgggaggtgctgttccccattgccccaccttgttccctgaggntttaacccctccattggt

SEQ ID NO: 172524 - DNA, 1619 bp, Homo Sapiens
  misc_feature (1043)..(1148): n is a, c, g, or t
  misc_feature (1469)..(1477): n is a, c, g, or t
ggggcacggagagcggtgcccgcgtcagtgaccgaaggaagagaccaagatgaatacagagcccgagaggaagtttggcgtggtggtggttggtgttggccgagccggctccgtgcggatgagggacttgcggaatccacacccttcctcagcgttcctgaacctgattggcttcgtgtcgagaagggagctcgggagcattgatggagtccagcagatttctttggaggatgctctttccagccaagaggtggaggtcgcctatatctgcagtgagagctccagccatgaggactacatcaggcagttccttaatgctggcaagcacgtccttgtggaataccccatgacactgtcattggcggccgctcaggaactgtgggagctggctgagcagaaaggaaaagtcttgcacgaggagcatgttgaactcttgatggaggaattcgctttcctgaaaaaagaagtggtggggaaagacctgctgaaagggtcgctcctcttcacagctggcccgttggaagaagagcggtttggcttccctgcattcagcggcatctctcgcctgacctggctggtctccctctttggggagctttctcttgtgtctgccactttggaagagcgaaaggaagatcagtatatgaaaatgacagtgtgtctggagacagagaagaaaagtccactgtcatggattgaagaaaaaggacctggtctaaaacgaaacagatatttaagcttccatttcaagtctgggtccttggagaatgtgccaaatgtaggagtgaataagaacatatttctgaaagatcaaaatatatttgtccagaaactcttgggccagttctctgagaaggaactggctgctgaaaagaaacgcatcctgcactgcctggggcttgcagaagaaatccagaaatattgctgttcaaggaagtaagaggaggaggtgatgtagcacttccaagatggcaccagcatttggttcttctcaagagttgaccattatctctattcttaaaattaaacatgttggggaaacnnnnnnnnnnnnnnnnnnnnnnnnnnnnnnnnnnnnnnnnnnnnnnnnnnnnnnnnnnnnnnnnnnnnnnnnnnnnnnnnnnnnnnnnnnnnnnnnnnnnnnnnnncccttgtgggcccccctcggcccctcaaaaacctttttaaaaacattcctgttgggcgccggggccccagaagggaagggaacctgggcccatacctggttcccaaggaaaaccccgggcctagacatagggcttgggattctccccccaaataaaaaaacgcccggggggaaaaccagaggggtttttaaacaaattcccaaatgggagtttctggagggtccttttcggggattttttccaacggggagtccccaagcggaacccccaattattaaaattatacccccccgccccgggcccattttattggaaagaaannnnnnnnnaaattccctttaaaaaatttttttgcgccaacattgtggaaacccccttccacaaaacgcgggtagtgtgataaaacctctgagaatcccgccgacggggggaaatctcaaaaacccttgtgtcccccctcttggcggtaaa

SEQ ID NO: 172525 - DNA, 666 bp, Homo Sapiens
cagaggatgtgctttacagtgtgcaatactttccccggcatttaaagttagagaattttccgtcacagatgcagttccttttccaatatctctgatctggaaccatgattcagaagatactgaaggtgttcatgaagtctttagtcgaaaccatgctgctcctttctccaaagttctcacctttctgagaagggggccttttgagctagaagctttctattctgatccccaaggagttccatatccagaagcaaaaataggccgctttgtagttcagaatgtttctgcacagaaagatggagaaaaatctagagtaaaagtcaaagtgcgagtcaacacccatggcattttcaccatctctacggcatctatggtggagaaagtcccaactgaggagaatgaaatgtcttctgaagctgacatggagtgtctgaatcagagaccaccagaaaacccagacactgataaaaatgtccagcaagacaacagtgaagctggaacacagacccaggtacaaactgatgctcaacaaacctcacagtctcccccttcacctgaacttacctcagaagaaaacaaaatcccagatgctgacaaagcaaatgaaaaaaaagttgaccagcctccagaagctaaaaagcccaaaataaaggtggtgaatgttga

SEQ ID NO: 172526 - DNA, 361 bp, Homo Sapiens
cctaccgatcttagctcccaacaagataaaacatcatctactctatcatatactagttacttccaaattaagttacacagaatttagtcacaattcacccaaatttcaagctgtgtattaccactaaccggcaagcgctattatcattacctaaaattctgatcaaaattattcatgaaggaaaacattcattttaacccttccctacccaattctcctatagcttagaactaagtcaactctattcaaacacaaaggtttatccacaaacttacatcagtgtctggttttctggtggtctctgattcagacactccatgtcagcttcagaagacatttcattctcctcttgttggagctt

SEQ ID NO: 172527 - DNA, 621 bp, Homo Sapiens
gtccaagtccaggtgcctctcatgagctactgaattatcctgtgtcttgatagcatggctgctctgtgtgtgcatgtgtgtgtctgcattcatgccttaactcgggttactgcacaactttagttcttgacttagtctgcaccgtcatctagattgtattgtacatctcggtctgaacttcatcctggcaaaaacaaagttgcaggcacaacagtttaagaatgcattcctccagaagagtatctggtcaggttgaccctgagccttctttggacttgatttggaacttagcctggaaagcgaaagtggactgtccaacagaaagatgtcaacaaggaaaagaggagagccaagcgctagcatgccttttgcctctgcatatctgtgcacactgtatgttgttcatgatagcttgtctacaacttgactagggtggagtgctggtaatagtggcaatcttgacattcttggtcagagtttagagagatgtaagactttcaattaatgtcttatttactcctttatgctgattagtctttgatacatgtgctgaatcagaaacctaaataaagataattttttaaaatgcaaacaaaccccacaaaataaaaataaaacatg

SEQ ID NO: 172528 - DNA, 1338 bp, Homo Sapiens
  misc_feature (299)..(327): n is a, c, g, or t
caggctggtacggtccggaattccgggatatccgtcgaccacgcgtccgagctgaacaggaccagtgcaatttagaggtgcatgtttataatcaagaagaagactctttttatgtacaccatgatatactcttgtctgcatatcctctgagtgtggaatggctgaattttgatcctagcccagatgattctactggaaattacattgctgtaggaaacatgacccctgttattgaagtgtgggaccttgatatagtggactctttagagccagtcttcacactcggaagtaaactttcnnnnnnnnnnnnnnnnnnnnnnnnnnnnngttcctcagcagaagggcataccgatgctgtccttgacctttcatggaataagctaatcagaaatgttttagcaagtgcatcagctgacaacactgtaattctgtgggatatgtccttggggaaaccagcagctagcctcgctgtacacacaggacaaggtccaaacactgcagtttcatccatttgaagcacagactctgatttctggctcatatgataagtcagtggctttgtatgactgccgaagtccagatgaaagccatcgaatgtggcgattcagtgggcagatagagagagtgacttggaatcacttttcaccttgtcatttcttggccagtacagatgacggcttggtatataatttggatgcacgttcagataagccaatttttacacttaatgcacacaatgatgaaatctctggtcttgatcttagcagtcaaatcaagggctgtctcgtgactgcttcagctgacaaatacgtgaagatctgggacatcttaggagataggccaagtctagttcattctagggacatgaaaatgggagttctcttctgttcttcatgttgccctgatttgccatttatttatgcctttggaggtcaaaaagaagggcttcgggtctgggatataagcacagtctcttcagtaaatgaagcatttggaagacgagagaggcttgttcttgggagtgcaagaaattcatctattagtggcccttttggcagcaggagctcagatacacccatggagtcttaatgaagatcatctaatttcctgcttaccttaactgggaattttaaaaagttggcctaaaaatgttccatgcgtggcagcaaccatgcagagtgactgaaacacaattcatttctgactgacattcctttctgcaactgcggtggcaccacaaatatccggtctttgtgcttgctcttcagatggatggtttgtaaggctcttgttgcatttcttaaaaaagagtaataaaaacgatttttaaaaagtaaa

SEQ ID NO: 172529 - DNA, 927 bp, Homo Sapiens
gggatgcgctccgccctggcagcggccctgtgcagatccctgagcgtgtggcagcagtgcggtcgtggtccctccctatgcagcctggtttctagcgtgacacgcccttgacttgaggaccatgaaccgcagccgccaggtgacgtgcgtggcctgggtccgctgcggcgtggccaaagagacaccagacaaggtagagctgagtaaagaagaagtaaaacgcctcattgctgaggcaaaggagaaattgcaagaagaaggtggtggcagtgatgaagaggagacaggcagtccttcagaagatggcatgcagagtgcacgcacccaggcacgcccaagagagcccctggaggatggtgacccagaggatgacaggacgcttgatgatgatgagctggctgagtacgacttagataaatatgatgaggaaggtgacccagatgctgagactcttggtgaatctctcttgggtcttacggtctacgggagtaatgatcaagatccttacgttactctgaaagatacagaacaatatgaacgtgaaagatttcttgattaagcccagtgataatcttatagtttgtggccgagctgaacaggaccagtgcaatttaagaggtgcatggttataatcaagaaaaagactctttttatgtacaccatgatatacctcttggctgcatatcctctgagtgtggaatggctgaattttgaatccaagcccagatgattctactggaaattacattgctggaggaaaaatgaacccctgttatttggagtggggggacccttgaaataagggggattcctttaaaaggccagggtcttcccacctccgggaaggaaaactttttccagaaaacgaaggaaaaaacgcaagggggaaaggaaaaaatttcccccccaagaatgaaaggggggctc

SEQ ID NO: 172530 - DNA, 1196 bp, Homo Sapiens
  misc_feature (962)..(962): n is a, c, g, or t
  misc_feature (998)..(1006): n is a, c, g, or t
  misc_feature (1083)..(1083): n is a, c, g, or t
gggggcgcaggcccggcagccgagctgcgcggcggcaccatgcaggtcaccctgaagaccctccagcagcagaccttcaagatagacattgaccccgaggagacggtgaaagcactgaaagagaagattgaatctgaaaaggggaaagatgcctttccagtagcaggtcaaaaattaatttatgcaggcaaaatcctcaatgatgatactgctctcaaagaatataaaattgatgagaaaaactttgtggtggttatggtgaccaaacccaaagcagtgtccacaccagcaccagctacaactcagcagtcagctcctgccaccactacagcagttacctcctccaccaccacaactgtggctccggctcccaccccctgtccctgccttggcccccacttccacacctgcatccctcacttccagccatccccgacagcattcttcctgaatctgccacctggctagttgcaacctccaaccaaagacaaaaccctggcagcaaaaagtccagccagcaagaccacctaagtgcggccaccctagcccccaaaccagctcatacctggacccaggttaccactcccgggcgtggaaactcctctttctttctcggggcccactacccccccctctttctttcgaccaaaaaatgggccaaataccgtcaagggtcgcggtaaaaatttttgggtatgcgaacaccggggggcttttccaaatcgctccgtcttaacacggtcaaggacaaaatattttgggcgagaccacgcacccttggaacgcagaattccccccctcgcttacaaattgtgggggacccctcacaccgcctacacccctccccagaactcctctaatcgtctaactctttggcccacaccccccctatatatagacaagcactccagaattttttcacacaccgaaacgccccccttggtgtcacatcaaaatccaanacggggcggaaggtaccctcccgccttttttgaaannnnnnnnnaaaacatccacccttgcgcgacagtatatataagacaaaaaagcccccatccggctcttatccggggcattgaaaanccccccactattataaaagctcgaggacttatagtacacccgcggggcgccaatactccacctaccactgtgtttttcacgtcgcacacgaggcgcgcgctatatctctctat

SEQ ID NO: 172531 - DNA, 789 bp, Homo Sapiens
gcatggcatccatatccagcaggccaggctggggcagcaaagccttggtagcagggtttctgccaggacttgctcaacttcttcttctccccctgagagaggggagcggaggtattcctcctccatctgtgcctggacctctgcaatcgcacgtgtacttgtgctgtttcagagtcttgatgcttacgtggattggcctgggcagccccaccactgtgtacgtgtcactgcctagagtgtaacctataaatttgctgcggctggactcaaggacacactctcacacgtctttctctctgaccttgggagcccacgggagccctttggggcaaagtcagcctgtcagtctgtgggtgctgtagcgggggaggcatcacttcatcccgttccaggggaaacgtctccccctccagactgttgtcatcatcattctcctcttcctcttctcgagagtcatcagccttgtagggatcccgctcgttgaaggcatctaggttgtcctgctttatcagagccttgtgccctcggcggccccgtttctgctgctgctcaatcaagtctgaagcagatgatggtggagaggctgctctcatgttgcgaatcactttgatgctgtcctcaggaagcggggggaaggccccaggatgctgcgcttctcagccttcatgctctgcagctcctcaaagccgcctagcgtgaacaatactgtcttccagagcagcaagagaactttcttcatgggaaagtgaggggcgtgaccactgcaaaatttgtcaccatcctgaagaa

SEQ ID NO: 172532 - DNA, 406 bp, Homo Sapiens
  misc_feature (103)..(111): n is a, c, g, or t
gctgtaccagtagtaccttaaaatgcaaatgcaattggtaaagaacaaggcagcatgtagtgcttgcacttacaaatactaccagttttgtaacaatttgcannnnnnnnngtccttgaaagagtaaccacttacctaataaaacgaatatttaaaagcgcaatattccttcctttgcatggcatgcaggaatggtgaaagcaaagaaacagtcatcccttctcttccccccacttctggtctcccgaaaaaggaatgccaggtcagacaggtggaggagggaaatggggcacaggtcaaggtatgatgaatctcttaaaaagaaatccgcacaggcacagtggctcacgcctgtaatcccagcactttgggagcagagcggcgatcacgagtcaagtatcgagac

SEQ ID NO: 172533 - DNA, 445 bp, Homo Sapiens
cccccaccagttcctggcagctgcccactgagccagcccctctgcccaaggcccctccctggggctgatggcagccaagggggcaagtcacatggctgccagctggagcccaggcggccgatccacacaggagccctgtccgtgatgtcagcaccaccaaagcatcctcattaaccgccccctgggtgacgcagcccagcttttctgcgtgggatgggtgggggactcactgagacccaggtgttcgcaagaagccaggatggaaagtatgactcgctccttcccaaacatgggatggcttttccattgctaatatccgaggaatccggtgaagtagtggaaagaccgagaaggcgggagactggttctcaccctggcccatcctggctttagaccagaagcccagagcctcagtctccccttctgtccaccagaaaccacagcc

SEQ ID NO: 172534 - DNA, 460 bp, Homo Sapiens
gattggtggcacgcattcttgtcatggctgtcctggatcattgcttttcccccctcgtgtgataaccctcctctttggagcatcagccatgggtaagacacatccttttgtccaccttgtaactgtgctctgctgactttcccatcactcctactcatcattaatgacaggctcattgcttgccaccctgcttcagcttcaattagacaacccatctgtttctgtgactgcttgggttttgggtttgtattagtctgctgctaataaagacatacccaagactggataatttataaagaaaaggggtttaattgactcacagttctgcatggctggggaggcctcaggaaccttacagttatggtggaaggctcctcttcacagggcggcaggagagagaatgagtgctgagcaaagggggaagcccctcataaaaccatcagatctcgcgggaactcac

SEQ ID NO: 172535 - DNA, 446 bp, Homo Sapiens
tcatgacagagcttacagtagtgatatataggactctactaaatgacagaagcagcaaaaatactgcaaaaagacatgcgtttttactctagagaatagttcctaaaagttcaagtgtcaatttaaagctaaggtagatagacaggtgagacattgtaaattgtagctatatacttaagccctgttcaggcttttatctgctggtgacacatttcgcttgtagtgctttgttctagtctatgataataaactataatatctctaaatcctaagcttccttattcctggctgggaaaacaaagctgcttcagttccctgtgttcatcactttaactttgtaatctagtacttgtgtactgtgtaagaaatgggtgtacacccatatcagacattgtagtcataggcctatcaggcactgaacgacgtctttaaagtttactgctgta

SEQ ID NO: 172536 - DNA, 459 bp, Homo Sapiens
gagaccaggaaagctagtggtgtgattcagtctgactacaaaggcctgcgaactggtgggcatgggagtgaggggcacactggcattaagtcctggagtctgaaggcctgagaaccaggagctctgatgtctaagggtaggagaagattgatgtctcagcttaagaagagagagagaattcgcccattgtccgcctttttgttctattcaggtccttgacagattggatgatgtctgcccacgttggcgagggcggatcttctttactctgtctgctaatccaaatgctggtctcttgcagaaatattttaccaggtatctgggcatccctcagcccactcaagttgacataaaattaaccatcacaacagtacttgatattaaaacctatggaaacaacccaaaccaggctcaagaaaattcaaagctttaaatgctttatccttttagccccacaat

SEQ ID NO: 172537 - DNA, 580 bp, Homo Sapiens
ctgcccacaacactgtactcagcctgatgagctatctgacacatagctcataggcacacaacagccttttgcccttggaacagcttttgccctagcactatgcttggggccattttaaacagtgaaatcaaaacaagaacagaaatgcaaaaaccatggcattagcgtaaaaaggacacgtttatagtatgaaagctggaacatggccttggtcaaccgcagctcagaatatgtgtacagcaagtttgttgctgtaccacaaaattggaggttaggcaaattcacaaatacggaatccatgaataacgaggatcaactgtacttaactatattttaaagctgtgacatttatctacctggtttatggaatagaatttattgctgaatcatgctccagtatttgagtgatgttttaaatatcctatgtctgaaaataattcctcctaattgtgtggtaatttgcttttactgtttccgcagtatttcaggtctttgctcattcactcagtaatactgagcacttaccatgtaccagaattttactaggcacaaccatgaataaaaatacaattctcttgca

SEQ ID NO: 172538 - DNA, 728 bp, Homo Sapiens
ggtcaatacagtggaattcgctgggcaatggtttggcttatgaagactttagtttccccatctttcttcttgaagatgaaaatgaaaccaaagtcatcaagcagtgctatcaagatcacaacctgagtcagaatggctcagcaccaaccttcccactatgtgccatgcagctcttttcacacatgcatgctgtcatcagcactgccacctgcatgcggcgcagctccatccaaagcaccttcagcatcaacccagaaatcgtctgtgaccccctgtctgattacaatgtgtggagcatgctaaagcctataaatacaactgggacattaaagcctgacgacagggttgtggttgctgccacccggctggatagtcgttcctttttctggaatgtggccccaggggctgaaagcgcagtggcttcctttgtcacccagctggctgctgctgaagctttgcaaaaggcacctgatgtgaccaccctgccccgcaatgtcatgtttgtcttctttcaaggggaaacttttgactacattggcagctcgaggatggtctacgatatcgagaagggcaagtttcccgtgcagttagaagaatgttgactcatctgtggagctgggacaggtggcctttaagaacttcattagagctttggatgcacacagatcctggtttctcagaaaaaatgagtctgtacggaaccaggtggaggatctccctggccacat

SEQ ID NO: 172539 - DNA, 1052 bp, Homo Sapiens
gggggttggctctggggctgacccgggaagtcggggtctccttcgcctctgtctttctgcgtcctactagcaggtttgtgcaggggaaactcagtggagaggaagatatatatccccttaaataaagcagctccctggtgtcgcctgctcaacgccactcatcagattggctgccaggcttcaattagtggagacacaggggttatccacgtagtagagaaagaggaggacctacagggggtattgactgatggccccaaccccccttacatggttctgctggagagcaagcattttaccagggatttaatggagaagctgaaagggagaaccaaccgaattgctggtcttgcagtgtccttgaccaagcccagtcctgcctcaggcttctctcctagtgtacagtgcccaaatgatgggtttggtgtttactccaattcctatgggccagagtttgctcactgcagagaaatacagtggaattcgctgggcaatggtttggcttatgaagactttagtttccccatctttcttcttgaagatgaaaatgaaaccaaagtcatcaagcagtgctatcaagatcacaacctgagtcagaatggctcagcaccaaccttcccactatgtgccatgcagctcttttcacacatgcatgctgtcatcagcactgccacctgcatgcggcgcagctccatccaaagcaccttcagcatcaacccagaaatcgtctgtgaccccctgtctgattacaatgtgtggagcatgctaaagcctataaatacaactgggacattaaagcctgacgacagggttgtggttgctgccaccccggctggatagtcgtttcctctttctggaatgtgggccccgggggctgaaaagcggcagtggctttccttttgtcacccaacctggcctgcctggctgaaagcttttgccaaaaaggcaccttgtatggtgaaccaccccctggccccggcaaaatggcaaatgggtttgggcccttcctttttcaaaggggggaaaaaactttttttggacattaacaaatt

SEQ ID NO: 172540 - DNA, 423 bp, Homo Sapiens
gacgagccgagtgatcacacagccaatgagcgccgcctgaaggagctcattggtgcaacggcagtgaagctgcacacgtggacggagccggaatgaccaggtggtcacagacctcaggctgtggatgcggcagaactgctccacgctctcgggcctcccctgggagctcattaggaccatggtggatcgggcagaggcggaacgtgatgttctcttcccggggtacacccatttgcagagggcccagcccatccgctggagccactggattctgagccacgccgtggcactgacccgagactctgagcggctgctggaggtgcggaagcggatcaatgtcctgccgctggggagtggggccattgcaggcaatcccctaggtgtggaccgagagctgctccgagcagaactcaactttggggc

SEQ ID NO: 172541 - DNA, 618 bp, Homo Sapiens
gggagagctaccatgagcaagcggaaccaggtatcgtacgtgcggccagccgagccggcgtttctggcccgcttcaaggaacgggtcggctacagggagggacccaccgtagagactaagagaattcagcctcagcccccagatgaagatggggatcacagtgacaaagaagatgaacagcctcaagtggtggttttaaaaaagggagacctgtcagttgaagaagtcatgaaaattaaagcagaaataaaggctgccaaagcagatgaagaaccaactccagccgatggaagaatcatatatcgaaaaccagtcaagcatccctcagatgaaaaatattcaggtttaacagcaagctcaaaaaagaagaagccaaatgaagatgaagtaaatcaggactcggtcaaaaagaactcacaaaaacaaattaaaaatagtagcctcctttcttttgacaacgaagatgaaaatgagtaagtgtaaatattttgaatttagtctactttgaaagtatatggagtgttcattaaaatcacattttttcctattataaagatactaccagttcttttatagaaagtttaggaaatagagaaaaaaatttaataactacatcta

SEQ ID NO: 172542 - DNA, 830 bp, Homo Sapiens
tctcaaagtaaggctggtaagagaagtgagtggtgtgactcttactccttaggtgcccagaatttaccatcatctctgaaggagttacagggaagtggtctccccaattctcccctccctccagtattgccccctctcactttagcatatattaattagcaggttgggctagagaaatcagctgctatgcgggttgattattattattatttctaatccttttccttatttgccttctactccccttaatctaatctaaaagctctgttccatgcaactggagttccttatccctctcttccccttcccttatatattgaggctatggggtaggagaaaagtgcacaacccaccaccccctttactcgtgcattaaaatttcttatttacccttttcccccttcccatttcttcccacttttcatcttaccttttctgggcaaaaagggagccttttgctctctgtggaccctaaggagcacactgcacagggaaaattgccccatccagacctggctccactcttgatctctcttgtcctcttctgctcttttcctggtgctcttttttctcggaggggtgtgggtaatagaacagccgtgggcttttggggacctttaacttttttttctctcttttgtttataaaaaacactaaacattcaattccagagaaccaaaaatcccaccttcccaccgaacactactaaggggcttgtgttctgctccataccttttctcttttctttctgtcttgttaatgcttttaaaaacaaatgagttttttatataaataaagttttttaaagtggggataaaaacacaacaccc

SEQ ID NO: 172543 - DNA, 1284 bp, Homo Sapiens
gggacagcgcgtcgcggcagcccccaaggaagaccagcctgcctctggtcggttcctggcgctctgcgtttcgtgaccttgtccagtagaaggctatttaattttcacaactgcttgaattttgacatacaagatgaagcaagatgcctcaagaaatgctgcctacactgtggattgtgaagattatgtgcatgtggtagaatttaatccctttgagaatggggattcaggaaacctaattgcatatggtggcaataattatgtggtcattggcacgtgtacgtttcaggaagaagaagcagacgttgaaggcattcagtataaaacacttcgaacatttcaccatggagtcagggttgatggcatagcttggagcccagagactagacttgattcattgcctccagtaatcaaattttgtacttcagctgctgatatgaaaattagattatttacttcagatcttcaggataaaaatgaatataaggttttagagggccataccgatttcattaatggtttggtgtttgatcccaaagaaggccaagaaattgcaagtgtgagtgacgatcacacctgcaggatttggaacttggaaggagtgcaaacagctcattttgttcttcattctcctggcatgagtgtgtgctggcatcctgaggagacttttaagctaatggttgcagagaagaatggaacaatccggttttatgatcttttggcccaacaggctattttatctcttgaatcagaacaagtgccattaatgtcagcacactggtgcttaaaaaacaccttcaaagttggagccgttgcaggaaatgattggttaatttgggatattactcggtccagttatcctcaaaataagagacctgttcacatggatcgagcctgcttattcaggtggtccacaattagtgaaaatctgtttgcaaccactggttatcctggcaaaatggcaagccagtttcaaattcatcatttaggacaccctcaacccatcctcaatgggttctgtaagccgttggatctggactgtcctgggcatcgaactctccctctgtgtgtaattggaggagaccacaagctgttgttttgggtgactgaagtataaagtgttttctgtaccttagattcacaaactttgtatttttagtacatattttgaagaatttctatagtacatattttgaagaatttttatatcaaatataccgtatactttagaaaatgtctcagttgcttttattaaataaaatgttgatggtttgaaaaattaac

SEQ ID NO: 172544 - DNA, 878 bp, Homo Sapiens
ttaagaatcatctgcttatttattttacagagtaatgatttaaattgagtacatttgggcacagtagatatttgacacgaaaaatagttgtatcagaatgagcatcagaaaaatagcaactcatcttacacataataactagaaaatattattctgtctgatcatttaagtgttacaaatcctgagaatgttatacattgaacaaattaggtactaccttataattaaatctcgcttggaaagaatcctttaaaaaatgctctgaggtacaaatcacctatgtattaaacatgagtctctgacattatacaaagagtttaaacaaatatatcaaacaattacaggccagtggctcttaaaacagctatcagtcaggttcaaggacacactgttccacaatttcccgtaagttggggttttccattgcagctgccactcgctctttgtcatttatctgcttattgatgtcttcttctgttgagtgggttccttcagaaatgtagatttccaacaataagagtcgccaaagagcaatgaggtactgttggcgtgaacctgataataaccagatattcttcttcatttatctcctgaacttccacacaactttccgagaccacttccagttcttctaaagtattgggcttttctgggtcccggatagttctaatcaaatcataaacctctagcgctttctcttccatgatccggggctgccgggcagctcccggctcagagaggccggagagccacaggactctgctcagcgtccaggagagcagcccggacacccgctgcatcttcacgctcagccatcctggcgactgtcccaatcgcgccaccgtctctcagcagcctcgggattgatcaacttcctg

SEQ ID NO: 172545 - DNA, 921 bp, Homo Sapiens
tttccggaatgggagccttccagaaaaaaataggcaaatccattctttcccccataataaactagaaaaaatataattccggtccggaccattaaaggggttacaaatccctgaggaatggttatacatggaaaaaaattaggtactacccttataaattaaatctcgctgggaaagaatcctttaaaaaaaggctcggaagtacaaatcaccctatgtattaaacatgagtctttgacattatacaaagagtttaaacaaatatatcaaacaattacaggccagtggctcttaaaacagctatcagtcaggttcaaggacacactgttccacaatttcccgtaagttggggttttccattgcagctgccactcgctctttgtcatttatctgcttattgatgtcttcttctgttgagtgggttccttcagaaatgtagatttccaacttatgtttaaatggtaaacatcgctgaagttttactcttaagcacagcccaataagagtcgccaaagagcaatgaggtactgttggcgtgaacctgataataaccagatattcttcttcatttatctcctgaacttccacacaactttccgagaccacttccagttcttctaaagtattgggcttttctgggtcccggatagttctaatcaaatcataaacctctagcgctttctcttccatgatccggggctgccgggcagctcccggctcagagaggccggagagccacaggactctgctcagcgtccaggagagcagcccggacacccgctgcatcttcacgctcagccatccctggcgactgtcccaatcgcgccaccgtctctcagcagcctcgggattgatcaacttcctggtcttcaaatgggccgagacaagcctaaaggttcaggagagcagagaaaaggcccc

SEQ ID NO: 172546 - DNA, 847 bp, Homo Sapiens
ccatttgggggcaccagtaggatatttggccaccgaaaaaataggtggtatcagaatgagcatcagaaaaatagcaactcatcttacacataataactagaaaatattattctgtctgatcatttaagtgttacaaatcctgagaatgttatacattgaacaaattaggtactaccttataattaaatctcgcttggaaagaatcctttaaaaaatgctctgaggtacaaatcacctatgtattaaacatgagtctctgacattatacaaagagtttaaacaaatatatcaaacaattacaggccagtggctcttaaaacagctatcagtcaggttcaaggacacactgttccacaatttcccgtaagttggggttttccattgcagctgccactcgctctttgtcatttatctgcttattgatgtcttcttctgttgagtgggttccttcagaaatgtagatttccaacttatgtttaaatggtaaacatcgctgaagttttactcttaagcacagcccaataagagtcgccaaagagcaatgaggtactgttggcgtgaacctgataataaccagatattcttcttcatttatctcctgaacttccacacaactttccgagaccacttccagttcttctaaagtattgggcttttctgggtcccggatagttctaatcaaatcataaacctctagcgctttctcttccatgatccggggctgccgggcagctcccggctcagagaggccggagagccacaggactctgctcagcgtccaggagagcagcccggacacccgctgcatcttcacgctcagccatcctggcgactgtcccaatcgcgc

SEQ ID NO: 172547 - DNA, 1112 bp, Homo Sapiens
tgactagagtgtacgcccaagtagagattgatcaaaaaagatatgaaattatcaaagaagcatatatgcgatctcttaacaatttccgggctgaacagcctcaccagcatgccatgtactacctccgcttgctgatgactgaagtggcctggactaaagatgagttaaaagaagctctggatgatgtaacccttcctcgccttaaggccttcatacctcagctcctgtcacggctgcacattgaagcccttctccatggaaacataacaaagcaggctgcattaggaattatgcagatggttgaagacaccctcattgaacatgctcataccaaacctctccttccaagtcagctggttcggtatagagaagttcagctccctgacagaggatggtttgtttatcagcagagaaatgaagttcacaataactgtggcatcgagatatactaccaaacagacatgcaaagcacctcagagaatatgtttctggagctcttctgtcagattatctcggaaccttgcttcaacaccctgcgcaccaaggagcagttgggctatatcgtcttcagcgggccacgtcgagctaatggcatacagggcttgagattcatcatccagtcagaaaagccacctcactacctagaaagcagaatggaagctttcttaattaccatggaaaagtccatagagtgacatgacagaagagtgccttccaaaaacacattcaggcattagcaattcgtcgactagacaaaccaaagaagctatctgctgagtgttgctaaatactggggagaaatcatctcccagcaatataatttttgacagagataacactgaggttgcatatttaaagacacttaccaaggaagatatcatcaaattctacaaggaaattgttggcagtagattgctccaaggagacagtaagtgtatccgtccatgttcttgccagggaaatggattcttgtcctgttgttggagagttcccatgtcaaaatgacataaatttgtcacaagcaccagccttgccaccacctgaagtgattcagaacatgaccgaattcaagcgtgggtctgccactgttttcccccttgtggaacccacat

SEQ ID NO: 172548 - DNA, 783 bp, Homo Sapiens
  misc_feature (19)..(19): n is a, c, g, or t
  misc_feature (44)..(44): n is a, c, g, or t
  misc_feature (50)..(50): n is a, c, g, or t
gacgaaggaacccaagaancccaagccccagaagaagaaggaancggggntcaaagccgtttactgcccctttgtcgaagaaagatgtatgcccctggatcgagagaactttgtgccattgccattcagcaccccacagttaacattccctgaaatataggattttcgtgatgcttggtcctttgcaaaattcctgcaagctgctaatttggatcctaaagcccctactttccgtaggagatcccccacgatgtttagtgctgatatcctagcagagggagttagtggactggtaccaaaaccatttggtatagctttcggtgaaggaaaagtgttctccgttcctttgccaacaggggtagctggcaaagaaagtgatgcttggacggcggagtccatcttttcacagtctagagttggagagctaggagccgactttctagttacttcctgttgtctttcccgaactgctagttcttgccttaaatctcttgcttcatcctttaacctctgtacagagaccaacaaagattccttttcatcaagttcactttctaaaaatgcatttcgttcaatggcctggtttagcctttgttcaaagtcttccagtgaaactattgttgcccttttggctcgctccaggtcgtcgttggcctgctccagctctctcacatacttatgcaactgctccttaatggctcgagtctgacttaaatcatcttctaacactgagacctgcttatagctctgtgcatattgatgctctagcttctcctttaatgc

SEQ ID NO: 172549 - DNA, 326 bp, Homo Sapiens
gcccagaggatagatgaagaaagaactatagcagacagcctaattaatagttttcttaaaatttataatgggctatttgccatttccaaggctcatgaagaacagatgaagaaagtcaagataactgtttcttctgatcgagcaatccagtcacttactattcagactgcatgtgcttttgagcagctagtagtgctaatgaaacactggctgagtgatttactgccttgtaccaacatagcaagacttgaggatgagttgagacaagaagttaaaaaactgggaggctacttacagttatttttgcagggatgctgtttggatat

SEQ ID NO: 172550 - DNA, 566 bp, Homo Sapiens
ctagaaaaccatcttgccactcaagcaaataattcacatacaacccctcaagatttgtcaatggctatgcagaaaatttatcaaacatttgtagctttagcggcacaacttcagtctattcatgaaaatgtaaaggttctgaaagaacagtaccttggctacaggaaaatgttcttgggagatgctgttgatgtgtttgaaacaaggcgagcagaagccaagaagtggcagaacacacccagagttactactggacccactcctttcagcaccatgccaaacgcagcagccgttgccatggctgcaacacttacacagcagcaacagcctgctacagggccacagccatctctgggagttagttttggaacgccatacggctcaggtattggcactggcttgcaatcaagtggcttaggttcttcaaaccttggaggatttggaactagctctggttttggatgcagcaccacaggggcctccacatttggatttggaacaacaaataaaccctcaggaagtcttagtgcaggctttggcagctcaagtacatctgtataacttcg

SEQ ID NO: 172551 - DNA, 1086 bp, Homo Sapiens
  misc_feature (593)..(652): n is a, c, g, or t
  misc_feature (676)..(684): n is a, c, g, or t
caacgaccctattctcccgggggtgggtgtttcccccacggggttggaatttttaaaagggcggcccaaaaatggagaaaattttgtttccgcccccgcggtgttttcccccctgggggccaaaatatttattttggccaaagggcggccacaagggggggcgaaaaaacccctgtggggaaattccaaggttcattactttgcccgtttttgggaaggggtttccccaggtgggacaaagatattttaaaagggaatttcccgcccacttctttcgcaaagaaatggcacaaggaggggggcggtaaatttgaattatgagagtttttccttggaactccccgttttgatagatccccggttaattttcctccgggggtgcccttctggggttttgtttaagagaccccttgggtttttccgcgggggggtttttatttggggaggagattcacaacccgtggggccagggcccggattttccctatgtgaaaaaattatttcccaaggttcccgttcctccctggggccgcgcgcccaaaaggaaaggttttgagaaaatttttgaaggggcggagggcggccggacaagnnnnnnnnnnnnnnnnnnnnnnnnnnnnnnnnnnnnnnnnnnnnnnnnnnnnnnnnnnnntaagaaaacaactaatttatttgnnnnnnnnncaaattctgtacatacaggcttggcttgattgaccataatgcatttcagcaaaaaaaatttagatacaccacacataataaacctttctatgtacacagtaaatagtaaataactttgctaaatggccagacatttgaaaaaatgaaaacacagttgtaaaacaaagtatgtaagaatattgtgaccttatttaactgtacaaaaagcaatcattctctccagccttccatcttcacttacatttttttaaacaagattaagccccaaattgcagggattaaatcctttcttcctaatgcctcgggaatatgagattctctttcaaatctttaactttttacaaaggagcagagcacttaaagggaaatggtgggaaacaaagagatttcaattctgtgcca

SEQ ID NO: 172552 - DNA, 835 bp, Homo Sapiens
  misc_feature (113)..(156): n is a, c, g, or t
ttaaattaaaaattactttgtgtcgatcaattgatgttaatactgcttcttcttgaatttggaataactatcatagaagttacatgcagactgaggatagtcctctgttacannnnnnnnnnnnnnnnnnnnnnnnnnnnnnnnnnnnnnnnnnnnaatagtaagttccaaaggatgtgtttgagaacttcctttcattgatgagggtggtctatctgtcctttcttttgagagacctggttcgctgtgatgagcttcactaactttgtccagaaacatcagtagtgggatcagctcctccagaacctgtttgtgcacgtttgatgtaaagattcagtagcttcattttactgccagtaagttgactgagatgtggttttagttcatcaccaattaccgcatgaacagccaccaggcagaagacacaagctttccgaacactgctctctgaattatcataaccctgtattagacctggcataatctctggcaaaagcaggtttagggtttccttggacactctctctatcacttttgtttgcattttgattgcagccagattaattgggtagtctgcagtttgaatgataggacaaagcactttgatgcactgctctggactaattgaagtggccaacactgatgccgcttcctcagcagatctcaccacctccttatgaggatctttatgtgcttccaatgttttcatgacagtcaattctgcatagtttttaaatcatgctgcctgatgccttaggatttctcttaaaaccattaatgccaaagccctgattgtaggctctttatctccaagcgtttcaagcgataaagtggc

SEQ ID NO: 172553 - DNA, 375 bp, Homo Sapiens
acaactgataatctagtgaccattaactccaagttataacttggagttaatggtcactagattatcagttatgagcagtgttaaaatctcctattaatgtgtaatgtacctgtcagtgcctcctttattaaggggttctttgagaataaaagagaaaagacctactttatttgacagcaaaactgttctaattgttgataaggacttttaaaaattgtttttgatttgctaagctcagaaaaaatgtctctcagtgcatcagttctttgtaaagcttactacgaagtatttatatgctaaggaaaacaactgaggatgtgggtggcttaaatctgtaatttcatcaatctctggtgggcggggatcaactagagt

SEQ ID NO: 172554 - DNA, 360 bp, Homo Sapiens
gtcgaccccagaccaagaatgctgaactagagaaggatgctcagaacagattggcacccattgggagtgagtgtcttggaagaagagtgggctgtgtctaaaatgcaatggtactaaagtaacaggaggacaaaatgccagaaaagtggtgtctcctgtcttggggacaagagagcaacatctgtaatagtatgttgtattcaagcctagtaacaagcagtactgaccttgtgtacataataagcaggatatgtggggtttgcccaaaaccaggcatttttagacatacgggtttcaggagttgaccctaccagacctaagcaggtgctttctgggctggagcttgtcgacgcggccgcg

SEQ ID NO: 172555 - DNA, 216 bp, Homo Sapiens
  misc_feature (65)..(65): n is a, c, g, or t
actctagaggttcccagtagagaagggagttgtggagatggccagtggaggcacatcattcaggnccctgaaagtcatggtcaggagtctggaagccactgggggccttaagatcatccacttccacaatgatgatccaccatacccatttcaactgtgcacctggcatggtctttagattctcccctaccctgctctctttattttcccttagta

SEQ ID NO: 172556 - DNA, 244 bp, Homo Sapiens
cactaagctatgacttggagacaaaggccaagtcaagccccactgtgagattcaatgattccttggtggagaaagaagcatttgatgtggagcctgacacacctgaatggatgaactaataaatgattaagaatggaggctacagcctgtacacagatcagaattgtaaaaaatgagccttcgtgcttgctagagtggactagatgagatatatcttattgttatttggaagggatacctctag

SEQ ID NO: 172557 - DNA, 371 bp, Homo Sapiens
gccctgaggattccgccagtagagatgtgaaaggcaatatcattctattgaccacggaaggtggagtgaaactagtagattttggtgtgtctgcacagctcaccagtgcccggcaccgtcggaacacatccgtagaaacaccggttttggatggctcctgaggtgattgcatgtgaacagcaattggataccacttatgacgccagatgtgacacttggtccctgggtatcacggccattgagctgggtgatggagatcctccactagctgaccttcatcccatgagagcactcttcaaaataccaaggtcagatgactaacattgggtccagtatctgcagcccgatttacttcctccagccaccaagtg

SEQ ID NO: 172558 - DNA, 469 bp, Homo Sapiens
ggctaaaggaggggaacagcatggataatttagcaaatttaaacgaatgttatcacaggcctgcagtgattctttgatttgcctgtctactgaggactctctaatgtaaaagataatcaaatacttcttaaatatagtttatttttttggggtgaagatttatttgttactgttatctggattcatataaactaatttgtagggcccagtttagtcataactctcttgagatttgaaaggatgatacattttgtgtaaatctgtggactgaatttaagagttttttaaaatttgatatttggggaagcaatctaaatgtctgtataaaatccatttgaaagtttcaaatgggtacgataaaaattgaatatgatagtgctacttcattgtaaacattacgtatatatcttaaaatgatacacttgcttttcatatattcataagctttcattaatctctgtggcggggt

SEQ ID NO: 172559 - DNA, 665 bp, Homo Sapiens
cgcagtaggtcagaagaacatgcgtctcagacaccacagaaccctgcctcagttatggaccacctagctggacttttatggaaaagacaaactttttaaaaaacttaggatttttagttactcacagccaaatctcaccatgactattagagggctagcaatgccaatttagaaatacttgagagagcagtagcatcgttattaaggacccagagcttggggtccagttggaccatgcgtggaggttcaaactcttgctaatcatcctgagtggatgcaaaagtcagagcctcccggcccccaggctggtaaagtgaggcagactcataaacgactgtgataaaatgtgatcaattaataagaatcactgccccatgaaactctgccaggcagtctgttcccattcccacctactcctgaaagccgtgaaaataaaacacagtcccttttaaaaccaagaccttttgggccactctgtgcccagggaagcaggactactgcaggagtcccctggccgccgggcaggagcgtgggcagggtctgcagaggcgagagagagctcggactcagacatgacacacgccccacctgttagagcatatagctcctcatactgctgtttcaaagcatttgcaccgtgccagaagtacagaccacaatgaacg

SEQ ID NO: 172560 - DNA, 159 bp, Homo Sapiens
caggatcccgccagtagagattgatgaaatatacagctagtgtgtaaccatggaaaaattaataggtctattctaattagtaaaggaccaactgtatagttttcaagtggcctgggacccttggtcttcttgtccttactgacttttgtgcatttttgg

SEQ ID NO: 172561 - DNA, 557 bp, Homo Sapiens
cgggcttcctccctaacaaactggtcacaaaatcactttcctgctggcataaaggttactactctcatcctgaacccaggatttactaggtcaaagcagcattcagacaatgcttcaagctataatctcttcctaaaccggcaaaggcaggccagcatctggtgaactgcaacaaatggcaacagcatacccagagacatcaataatgatccctcgagactacaaagacaaactctactgatggcaattgctaaaatacaacatcactgcctgtacctaacagaactgaactatagaattttatttcaggaagagtttttctcccaattagtcctaatagaccaacaggaagcctgataaaaattatcagggaagaggcagtgaggcagggctaaattcagtggtatgccatcacagtgacatatactttcatgtgtgtggtaatatacacataaagtttaccattttagctgaatttgtgtatagttcagcagcattaaatatgtccatattgttatgcaatcaataccactatcaatctctacgggtaccgagct

SEQ ID NO: 172562 - DNA, 553 bp, Homo Sapiens
aatcaataatgtgaaggaagagaataaaaacaaaatctcttagtatgtaggtaaaagagacaggttttaaataagaaagaaaacatatttgaagaacgtatccaaaaatctaacttccatccattgcgatggagaaaacagagaaaatggtgaaaagggagaaaaacaaaagaactaatgggggaggaggggaatggtcaatggaagaaacagcattcagactaaaatagcctactgagtagataatacaataatagtaaagctgaactgtttcagagcaagacactgagctaaatggtttacatgcagtatgtattttcatctttgtagcaaccctgtgagttcccaactcataatttctcccacggtacagatgagaaaactgtttagagagactaaaatcacttgcccaagtatagacagctactaattaatggagccatatgcttgatgaaattttagtacacctaagatattctaagaactttctttcttttccagaaagaaaagagcctcatctttaagaaataagaaatacatagaaataaaactc

SEQ ID NO: 172563 - DNA, 143 bp, Homo Sapiens
ttttagattgatataatttcatttatttattgttgcttttgtagcctgaggttctggtgtgatatccaggaaacattgccaagccagtgtcaggagcttttcccttatgttttcatcatctctacgggcgggatccctgagag

SEQ ID NO: 172564 - DNA, 581 bp, Homo Sapiens
aagcgctggattacaaatgtgaccactgacccagccctctgatttttctagtagcagtttcaggtggtgatggctacctaactagtatagcattatagaatttatcatttctgagtaccttttttattcttagactttcatgtgtagcaattttatgtttaacttttcattgactatgtttgtaaaagtaaaatttctctaatttgttagaatttacttgtggggaaggagaggttggagtggaacatagtataacccatatataagatacacgtggcaaatatctttttttctaattctttttagtttatctattagttaatgatagcatgtataaaagaataaaagctaagaaccatatagattttaaagatagcaaaatttctggcaagaaacattatatctgttttaaatgggtttagcacttagttttagaagaatttgtgattgtttagtcaatgattctgagtcagaggcaaacctgtctaaaccctgagcaaagaaagaactgtactctgagcatagttctttacatgttttattctgaaaccaaagtatatcaggatatcttagccatgata

SEQ ID NO: 172565 - DNA, 950 bp, Homo Sapiens
  misc_feature (719)..(746): n is a, c, g, or t
  misc_feature (868)..(868): n is a, c, g, or t
agcgatggaggtaggattggtgctgtgggtaatgagtatgatggggtggtggttgtggtaacttaatagtgtaggaagctgactaattatgtaaggagaggtgtcagggttgattcgggaggatcctattggtgcggggctttgtatgattatgggcgttgtagttaagctcgtgtaacggcggcggtgtcggcagctgctgtagcgaagagagtttggcgcgatgtctcacaccattttgctggtacagcctaccaagaggccagaaggcagaacttatgctgactacgaatctgtgaatgaatgcatggaaggtgtttgtaaaatgtatgaagaacatctgaaaagaatgaatcccaacagtccctctatcacatatgacatcagtcagttgtttgatttcatcgatgatctggcagacctcagctgcctggtttaccgagctgatacccagacataccagccttataacaaagactggattaaagagaagatctacgtgctccttcgtcggcaggcccaacaggctgggaaataattgtgttggaagcactgggggggttggggtgggcttggaacacaggtgtgtacagcgtgctgtagtggaagttttgtatcatagtaatcctgtttccactttgttatactctagccaagattgactgtattagatgaaatgtgaggatcttgttcaatcggaaacccccgttacctcctcnnnnnnnnnnnnnnnnnnnnnnnnnnnnacttaaacatttttatgatgatttagatggaagttgttcttcgtcacttaatgttggttcccgtccttcaactgttcatatctactttatagcattcacatactaacccttcttccagaagngggtgggggggttggaaaatgcaattttagccctggccctcaggataaaggcttgggaaaaaataaaataaatggcccttta

SEQ ID NO: 172566 - DNA, 767 bp, Homo Sapiens
  misc_feature (615)..(645): n is a, c, g, or t
ttgcactttcgacgacttccggcggctcctctcgcgaggattggctgttagcggcgttgtagttaagctcgtgtaacggcggcggtgtcggcagctgctgtagcgaagagagtttggcgcgatgtctcacaccattttgctggtacagcctaccaagaggccagaaggcagaacttatgctgactacgaatctgtgaatgaatgcatggaaggtgtttgtaaaatgtatgaagaacatctgaaaagaatgaatcccaacagtccctctatcacatatgacatcagtcagttgtttgatttcatcgatgatctggcagacctcagctgcctggtttaccgagctgatacccagacataccagccttataacaaagactggattaaagagaagatctacgtgctccttcgtcggcaggcccaacaggctgggaaataattgtgttggaagcactgggggggttggggtgggcttggaacacaggtgtgtacagcgtgctgtagtggaagttttgtatcatagcaatcctggttccactttgttatactctagccaagattgactgtattagatggaatgtgaggatcttgctcaatccgaaacccccggtacctccnnnnnnnnnnnnnnnnnnnnnnnnnnnnnnnacttaaacatttttatgatgatttagatggaagttggtcttcctcacttaatggtggttccaggccttccactgggcctatcctactttataacatttcacatactaacccttcttccagat

SEQ ID NO: 172567 - DNA, 1013 bp, Homo Sapiens
  misc_feature (245)..(245): n is a, c, g, or t
  misc_feature (513)..(640): n is a, c, g, or t
  misc_feature (872)..(900): n is a, c, g, or t
cagtagtagggatatgggctagcaaggcgaagaagagtaaaagtcatgggcgataagacaagagggaagagaaaagaggcagttgtattgaagtataggaagcgaaataaatagtggtgagtgagtagaaggagactctatataatggagggaagaaacagtacatgagagcagtaggaggtaggatcgaaagaataagagagcaagaagaagataaagtaaactgcaagtacaagcagaagacnggcaaattaaagaaggaaggacagaatcaaacaaataggggcaaagaggatagggaacaaaaaggacagagaaatagtatgggggaaacgtgagagggtaaaagaagagacgaaacagctccagagcatatagatgtaaaagaatgagcgacaacaagagaaatggaagaatggaattagaagaaggtatggaagagaaggaaaaacggtggaggggatctataaaaataagataggagaaggaaaagggccggagtaaagaaggggnnnnnnnnnnnnnnnnnnnnnnnnnnnnnnnnnnnnnnnnnnnnnnnnnnnnnnnnnnnnnnnnnnnnnnnnnnnnnnnnnnnnnnnnnnnnnnnnnnnnnnnnnnnnnnnnnnnnnnnnnnnnnnnntaattaaagaagcgaaggagaggaaatggggtaaaataaaggacatttatttatttttaccaagactttatcttgaggacatggctaaactgcatttccaccccccaccccatcttgaagaagggttagtatgtgaatgttataaagtagatatgaacagttgaaggactggaaccaacattaagtgacgaagaacaacttccatctaaatcatcataaaaatgtttaagtnnnnnnnnnnnnnnnnnnnnnnnnnnnnngaggaggtaacgggggtttccgatctagaaccgacgcgtgggtcgacgatatcccgggattccggaccggtacccagcctgctttttgaaacaactgttcataggtctatgcc

SEQ ID NO: 172568 - DNA, 608 bp, Homo Sapiens
  misc_feature (363)..(391): n is a, c, g, or t
ccaacagtccctctatcacatatgacatcagtcagttgtttgatttcatcgatgatctggcagacctcagctgcctggtttaccgagctgatacccagacataccagccttataacaaagactggattaaagagaagatctacgtgctccttcgtcggcaggcccaacaggctgggaaataattgtgttggaagcactgggggggttggggtgggcttggaacacaggtgtgtacagcgtgctgtagtggaagttttgtatcatagtaatcctgtttccactttgttatactctagccaagattgactgtattagatgaaatgtgaggatcttgttcaatcggaaacccccgttacctcctcnnnnnnnnnnnnnnnnnnnnnnnnnnnnnacttaaacatttttatgatgatttagatggaagttgttcttcgtcacttaatgttggttccagtccttcaactgttcatatctactttataacattcacatactaacccttcttcaagatggggtggggggtggaaatgcagtttagccatgtcctcaagataaagtcttgggtaaaacataaataaatgtcctttagttaaacaaaacagaaaaag

SEQ ID NO: 172569 - DNA, 1714 bp, Homo Sapiens
  misc_feature (154)..(242): n is a, c, g, or t
  misc_feature (862)..(909): n is a, c, g, or t
gtcgccatccactggtctgtctgtagacatgcggctttggttttctatagtgtgtgtgtcggtttgtttgctgtgtgtggttcgtctgccatcatgttgttgctggctcgcgcgtctgtctgtgtttgtatctagatcgttttcgctgcttgtnnnnnnnnnnnnnnnnnnnnnnnnnnnnnnnnnnnnnnnnnnnnnnnnnnnnnnnnnnnnnnnnnnnnnnnnnnnnnnnnnnnnnnnnnggcctaggcgtttgtgttgtgtgggtcgggccggcgttgtggcgctgttggtggtttggtcgctgtggcttctcggtggcgccgcgggtgttgtctgcggtgttttcggtatcgacatgggtcacggtactgcggggcggttgctttgtttgacgggcgttgttctcttggtcgtctgtgcgtcacggctgtgtgggtggtagtcgtgtgcgtggcctgtggtgttttctcgtggctcgttttgttgtgtggtttgcggccgcctgctggcgtttttcgccttcgaagcggcgcggcggctctgtgtttcggggggagaggtgccgcctggggggtgcgagcggggtgacgtggggggtgggctcggcgctcggctgtatgcgggggtcggtgccagcagtggtgtggtgtgggtgtgcgattgtttggttgttgggggcgaggggtgcgcgctgtttgccacgcgttgtgtgtgtgcgtcgaactcggctgctggtggttgtcgacaagtgttttgcattctatagttatgtggtatgttttgcgtagatgcaaggtggatgataacgggcaatgggtatcttatagggctcatttttagaaggggattgtgctgaacnnnnnnnnnnnnnnnnnnnnnnnnnnnnnnnnnnnnnnnnnnnnnnnncccccgggaggttgtggggtagtcccagagggagttgccgtgttgtcagccgaggtggtgtgccaagttgccgttagtatgtgagcccagggttcgcggaggttggcgttttgggtgtcttatggaagggttaagttgagagccgagagatggctggggatggagccacgcgaatgttagtgcttagttggaggtaagcggtgggaatgcgtgttgcgtcaggcggtatccacgggcagcgtggccttggttagtcaagccagcgcgtcgggtgggtgttcgctgattggcgcgcctgtcgcgcgctgaggcgcgggcgcgcccatggttggcgttgccggagtcagccgaggtgtactgtttgcgccagggccctggtttggggtccctggtcgcgaggcgataggggagggcagcggtatgattgctgtgctgcttgtagagtgccatgttctgtctgcttagtatatggcctagtgtactgttctgcggtagtgcaggctgcgggtaagaggccatggccagcttgatggttctgggccaggagtgcagtcgagtgaagagtcaagagcaagctgagctgagtgtcagtagtgtgacttgagggacgtgtgtgggagttcattcttgttcagagtgttcgttcatagcattttagcaaagcaccgttccatgcattcagtgcacagagttcgtagtcagcataagttctgccttctggcctcttggtaggctgtaccagccaaagtggtgtgagacatcgcgccaaactctcttcgctacagcagctgccgacaccgccgcc

SEQ ID NO: 172570 - DNA, 420 bp, Homo Sapiens
agatggggtcataatcagtctatgttgcaattccaagaccaagtcagtagtattacagctggctgatggccagatatttaagtacctttgggagtcaccttctctggctattaaaccatggaagaactctggtggatttcctgttcggtttccttatccatgcacacagaccgaagtggccatgattggagaagaggaatgtgtccttggtctgactgacaggtgtcgcgttttcatcaatgacattgaggttgcgtcaaatatcacgtcatttgcagtatatgatgagtttttattgttgacaacccattcccatacctgccagtgtttttgcctgagggatgcttcatttaaaacattacaggccggcctgagcagcaatcatgtgtcccatggggaagttctgcggaaagtggagag

SEQ ID NO: 172571 - DNA, 1420 bp, Homo Sapiens
  misc_feature (75)..(76): n is a, c, g, or t
  misc_feature (78)..(80): n is a, c, g, or t
  misc_feature (121)..(220): n is a, c, g, or t
  misc_feature (586)..(637): n is a, c, g, or t
  misc_feature (1165)..(1165): n is a, c, g, or t
  misc_feature (1223)..(1223): n is a, c, g, or t
  misc_feature (1329)..(1329): n is a, c, g, or t
  misc_feature (1370)..(1370): n is a, c, g, or t
ccacacacccaccccacccgccacccgaacgcaaaccacaacagccaaagacacaccaaccaaccacaaaaaaanngnnncataggtctaagtacgagtctgggtggcgaatcggcacgannnnnnnnnnnnnnnnnnnnnnnnnnnnnnnnnnnnnnnnnnnnnnnnnnnnnnnnnnnnnnnnnnnnnnnnnnnnnnnnnnnnnnnnnnnnnnnnnnnnatgagccactgtgcccggccattcattaagtctggatgctttttcatcaatcattcttctacaatattattttttaatggctgtcggcaatttgagatgagttaatgccattgcttgttcctcagaggatgggtttataaagagagaactaatgatagggagatgtcaatgaagaatgaggagggcctacgtttgtcttcaagattggagggtgcgggtgagggccactgagtaccttcacgtcgtactcatgctctctagggacagccaagttctgattaaacccaggagtgtgaggaacgttcagagaggtttgttttttcatgaaacagagtgccaaaggtctcggggggaaggaagtggaannnnnnnnnnnnnnnnnnnnnnnnnnnnnnnnnnnnnnnnnnnnnnnnnnnncgcggccctccaaaaacatgctacggctgaaaccgaaaaagcgccccccccatccgtcaattggcaacgaccgcgcgctacaaatcaacaccacgaaagtgtaatcgtatccgtagacgcgggccagacatcccacccatgccaaccaccatcctcctctgccgcccaccctctggcaacgcggtatgccagacgtagagaaacagtctagaaccagaccaaccgtacacagaacgaagcacaatagttatagccaaccccgtgtaccaatcgcccctgctcccgcccaccaattcacaaaaagtaatccgccccacgaatacccccacgccatcataggcgacgccactgagaggcagcgtccaccgaaatacccctcctctacctcaacgctcgcgcacaccatcatatatcacaagatggatacaaaacacaacggacaccaaccccggggacaacaaaaacacaccacagctacaacacgtacctcacaagagaccgcgcgagcacacgcgccgcgcctatcgncgcgccacgcctgcactggcccgccaagtcgacccaacacgcatcctcaatcccgaanatgaaagcccgggaaaatgaagtagcgcgcatccacaaacctcgaagactccaacaacccacctccccctttcgactctcggcagtcgcgaacagtgccgctgttncaaaaattaaaggtcggctacacagaggacagaaggaattntcagaatcagaacaaaaaccgaagcccgcgcttaacccaagattccgcca

SEQ ID NO: 172572 - DNA, 152 bp, Homo Sapiens
cgccacagagattgatgaagcaggactggattgtgattacaactgagtaagtgtgcagagaactggagtgtgggcaacataaagatgatgtgaatcaaggaagaatggtcaattaagaccctaaaaaaaggacgttcaaaaatgcagaggtt

SEQ ID NO: 172573 - DNA, 744 bp, Homo Sapiens
  misc_feature (461)..(520): n is a, c, g, or t
cgtgcctcttcccacctgtcttactggtagcttacagtcactctgaggtgtcaagagacttgggtctcttcagcaaagagaggagtccaaggcgttggtggggtggcagaagtagggagtgggaacttttgatgatcagtttcctcataaaggcaggagagagggaagaatatatttcctgggtttcatctttcttccacttcaaaggcagtggtgagatactcctttggaacaatcccaacgaggctgttcagttctcccacccacccagccatacatgttatactccttgctcagaatacggatgaggtcaccccgttggaaggacagttcatctggctggtcaccatggcaatcccataggccctggtagtaaccggcatagtctactccttttcgtcgagtgacactctcatcctcttctagatcatgctcttcatctggcaagacttcataaatannnnnnnnnnnnnnnnnnnnnnnnnnnnnnnnnnnnnnnnnnnnnnnnnnnnnnnnnnnntatggaatggttaaggagctcagatcctttaacaagaaacttatttgatccacccagtctctggcttctgctggactagtagctgtaaactcatagctgcgcctatcctgggaggtcagttcaaagcaggattctttcttggaatctcttcgcaggtggggggccatccgtacactgtagcccttaatgaggaaggtccctttgggctgcttgctcttctcacc

SEQ ID NO: 172574 - DNA, 413 bp, Homo Sapiens
  misc_feature (46)..(46): n is a, c, g, or t
  misc_feature (78)..(78): n is a, c, g, or t
  misc_feature (133)..(133): n is a, c, g, or t
gccctgccccagaagatacaggctccccggccctgattgaggaganggaaaatttttggcaaaaaacaaggtgttggnggcctcccatcccagtttccttaagtgcctgatgataaaagtgaattagaccccnccttgaccctggcctacagaagtaaaggagtaaaaataaatgcctcaggcgtgctttttgattcatttgataaacaaagcatcttttatgtggaatataccattctgggtcctgaggataagagagatgagggcattagatcactgacagctgaagatagaagaacatctttggtttgattgtttaaataatatttcaatgcctattctctgcaaggtactatgtttcgtaaattaaataggtctggcccagaagacccactcaattaccctttgagatt

SEQ ID NO: 172575 - DNA, 538 bp, Homo Sapiens
accccgccacgcagagattgatgaagaggaggaggatgtgaaacgagaacctgaagtattggtagaaagttgtgaagatggatcgagacgggaccaatttaacctcatgaggttaaaacgatgaaacccgaaattgtagagtatttgtcatgctttagattttcagaacaaattaagaaaacaaaaaattagttcaagttccaacgaagaggcaaggtgagaaattgaagtcagtgccttaactgaggccattttaaagagaactagttaaagtcagtttgtcaaaatcaaaacttttagttttgacctagaaatttttttcttagctcttttaagaaagtttaataatttgaagttgaaaatagtttaatagcctaaaaatagtttgagataggtgagatagttgaaaataggtgaaaggttgctaagaaaataacagataataagaattacaaataccttattaaaaatataaaaatatacccaggctcacaaataattaaaggaaaggaataaaaacaatagtaatatatcattt

SEQ ID NO: 172576 - DNA, 570 bp, Homo Sapiens
tcgcgggatattgttcacaaaacacattcaatgtttaaacactatttatttgaagaacaaaatatattgaaaatggttgcttctaaaaagcccatttccctccaagtctaaactttgtaatttgatattaagcaatgaagttattttgtacaatctagttaaacaagcagattagcactaggcagaataaaaaattgcacagacgcatgcaattttccaagatagcattctttaaattcagttttcagcttccaaagatgggttgcccataatagacttaaacatataatgatggctaaaaaaataagtatacgaaaatgtaaaaaaggaaatgtaagtccactctcaatctcataaaaggtgagagtaaggatgctaaagcaaaataaatgtaggttctttttttctatttccgtttatcatgcaatctgcttctttgatatgccttagggttacccatttaagttagaggtcgtaatgcaatggtgggaatgaaaatcgatcaaatatacaccttgtcatttcatttcaaatcgcggctggaaacttccaaaaaaagggtaggcatga

SEQ ID NO: 172577 - DNA, 444 bp, Homo Sapiens
gtcgagagttgacataaaaattcagaattctgacttctagaagattaaattaggtaatgttgggcccgcgtcctcatggggcagcctgtcagcggccactaagaagaggctgctctgtacagaaggggtcccccatccccactcatctgtgttgcctgcccagatagccccatggccatttcagtttgcgacccccaacagaccaaggacccagagctggcagccctggacccacgtccggcaggcagtgaggctgcagaggctgtcccacgtttaccccatgcatataaacagaccaaagtcaaagcacattcacacagaaagacctggcctagtaaatgaagcttatagcctgcaaaggcccttgttccaaccttccctctccaaaacccagtactgctcctcgacctttcacagttcgctagggatcctctagacagcctc

SEQ ID NO: 172578 - DNA, 272 bp, Homo Sapiens
  misc_feature (221)..(221): n is a, c, g, or t
aaactactaccaaaaagatttcaccaatttacaactccatcattagtaagaatgcctgtttgcctatagtctgccaaccctgaatccttaaaaatttttgccaatctggtaggcaaaatttctttcttttctttgaatattaatgaggagaaacatctgttcatgtttcttggccatttgcaatatcctaatatgaattgcttttgcccattttccttttnttaattatgaaagtctaatgactaccttctcattgtataaaaaacacagtt

SEQ ID NO: 172579 - DNA, 336 bp, Homo Sapiens
cgtttctttcatggccagggataaaatgttctaggccaatgtattccagaatgcaagaactaatcctaatttaaaacagcctacaaacctagagttaaggaaaggaagcactcatggtcatgtccaatgttttcattgcccttctgttataacactgcctgagagaacacagaagttattagtgacaatgagctattaaggcaaaaagttattttaaaaaaacagtaagaatacaagaaaggactggaaaagataatgtatggttttgcttaaatgaataaggattagaaagaaaaagaaacagggactagacaatcaaacaaaatggtgtaagag

SEQ ID NO: 172580 - DNA, 832 bp, Homo Sapiens
  misc_feature (249)..(280): n is a, c, g, or t
  misc_feature (602)..(602): n is a, c, g, or t
  misc_feature (707)..(707): n is a, c, g, or t
  misc_feature (803)..(803): n is a, c, g, or t
ggagcaatttaaagcccacaggagttgttcagtttctatgaaatggagcatggggtgcctgctagcctcaatcccccgaagtgggagcctcatgatagagtatagcttgggggtgggaggtgaggaaaatatgaggtacccaggggaacccccagctaactggtctctcagaggagtcccccagggcccgccagctatcacagggactcagaaacacccatttcctaatgacgtggtgagtttcttgannnnnnnnnnnnnnnnnnnnnnnnnnnnnnnncaacttggctgaccccgggtctatgatctattcacatcgaacccctgactggtctgcctggtgccagggtgagcgtgaccgtgagtgttgctttcgacagctggctcagcacacgctgtgtgaagggatctgagcttgttcatctccagtcgtgacttcatttcccttccttctgtcctcctcctgttcttgccttggacctgcaggtgtgcagaccgctctctctgccttccttgcatgtggccaccagccatccctgatcttgtccccagaggcccaggcagcctgtgatggctgtgaggggctgtcccactgtgtggtnatcccttacccagcacttaaacttggcaggagaggcagggcaaccctcacagggagatgggagggcacccaactcccacaagcatgcaacagcagtagggaattngggggtctgccccagggtggggtgaggaccaaatgagtgggattttggggccacaggttagggcagggagagacaaggggttaggttgggagggtnccccattccttgttgaccccatttttttt

SEQ ID NO: 172581 - DNA, 500 bp, Homo Sapiens
  misc_feature (159)..(168): n is a, c, g, or t
ttgggaaacaaagggatattgctctaagattgattaggatgattgtagctagagtcttgaattctatctgtatacggcagagaaactttatagagtgtagagaggtgagcgaaaggatgcaaaagcactttgagggctttataataatatgctgcttgnnnnnnnnnntgtgtagttgatactcagtgcatctccagacatagtaaggggttgctctgaccaatcaggtgatcattttttctatcacttcccaggttttatgcaaaaattttgttaaattctataatggtgatatgcatcttttaggaaagatatacatttttaaaaatctattttatgtaagaactgacagaggaatttgctttgtataatgcaggctggctttacaaaagcactgtagcaaatttactacaagtataaaagtatacatatatgttaatagatatatgtgcaactagatatggacagcagttgtatttttttaaataaatatttttaac

SEQ ID NO: 172582 - DNA, 523 bp, Homo Sapiens
atgagcaagggctctgccggaagcacaaggtgggcatcctctattgcaaggccggccagagctccgacgaagagatgtacaacaatgaggaggccggccccgcctttgaggagttcctctccctcatcggcgagaaggtctgcctgaagggcttcaccaagtacgctgcccagctggacgtcaagaccgactccacgggaacccactccctctacacgatgtaccaggactacgagatcatgttccatgtctccaccctgctcccttacacccccaacaacaggcagcagctgctacggaagaggcacataggaaatgacatcgtgacgatcatcttccaggagcctggcgcgctaccgttcacccccaagaacatccgctcccacttccagcacgtcttcatcattgtccgagtccacaacccctgcactgataacgtctgttacagtatggctgtgacccgaaccaaagacgctcctcctttcggcccccccatccccagtggaaccacattccgcaaatc

SEQ ID NO: 172583 - DNA, 474 bp, Homo Sapiens
cccccgattcttcaaaagctttcagagaaagcattgtagaagacatgactttgtgactgtatgtttcatctcatcctacatcactaggaaggctcattcttaagaagtcatgccccatggaaaaggggatgaagacaaatcagaaaagggcaaagggaagtcacagcaaaaaaagggacagtataatcctggaaccttattaaagtcacacaactgctgcttcaattagagcaattcgtttggcaaacaccgcttgaacccttttaattgtatgttggctcacctgtaatgtctggagcagtctatagactaagttttctagagtttctgaagcatcttccaattacaacggcaatctgacacatttctgaattgcagactgaatccagtgttcatgtgaaccttttgtgtagtccacatcagcaggcacaaaagtggttatatataagttggtatgaattctccagaagttta

SEQ ID NO: 172584 - DNA, 184 bp, Homo Sapiens
ttgcgctgggatatcttggagaaacacctctcgacgcaggaagctgctgggaaatgggtgtgagggggtccagatctcagtgaggaaatgggggaccttgagtgttgatgtgcgtgggcgcgaggaggtgcgaccagagggaaggtaagaggtgtggcagctgctgagggcgaggcaaggtacg

SEQ ID NO: 172585 - DNA, 492 bp, Homo Sapiens
aggcatgcgccaccatgcccggccggcttatgatttaaaacatgaattgtttatttctggaattttccacataagatttgttggaccaaggttgcctcaggtaacaaactacagaaagtgaaattgcagataaaggggattactgctcctctgctctaaaattggtgtttgggtgatcagaagcaggtagccaatgggaagagcacttctgagtgataactaaagcagtttggtggccttttcacattctccaatgttcaaacatattttccacttcccattttctctttcacctcattttgcctctctatcccccatccctgcttatttcttaagcccattgatggcactcattaaattgtatttagggctaatgggtcattgttccttaatatcgttttcaatatgccacaatttaggacacatttaaaattttctaaaacatatcctaatcaatattgactaatttaacccataccccataacgatgtc

SEQ ID NO: 172586 - DNA, 313 bp, Homo Sapiens
ccatcttcgccccatcagtattgcacatccttagagagggatcattgcacctgataagccccagacttccttgaggacaaagctgcagttagagcctcccccatgagtttgcaccttattaaatcagaaggcgagaacatgtagcctgtgatttgcctcttctgcatgacagccagcaaatgtcggaagccctgtggtctctcaagtttcacgaaaaactaagtcagtgccctcagagtgaggagcagatatccattaggaagggcactttttataggtctgtttcttgatactgatggtagcaagactggca

SEQ ID NO: 172587 - DNA, 688 bp, Homo Sapiens
  misc_feature (72)..(92): n is a, c, g, or t
  misc_feature (106)..(242): n is a, c, g, or t
accatctcttgggaggcccagaattggcccaatccaaatcaacccgggggaaaaagggagaacttgtttttnnnnnnnnnnnnnnnnnnnnnggccaagtgcagtnnnnnnnnnnnnnnnnnnnnnnnnnnnnnnnnnnnnnnnnnnnnnnnnnnnnnnnnnnnnnnnnnnnnnnnnnnnnnnnnnnnnnnnnnnnnnnnnnnnnnnnnnnnnnnnnnnnnnnnnnnnnnnnnnnnnnnnnnaggtgcctgtagtcccagctgctcaggaggctgatgggagaagactcccatcagtaacaaaaattagaaaagcctttggtcagcccatggaggtgagttactctgaacctatgaaaatgtctctttataagagcaaattgcatcagatgacaaaacaggaatcaatttctcttagaaaaagttagtaatgtgttaagactactcttttaggttttattcaggctaatgctcattgaacctaaaatactttaggggactctgatgggagcaagatgcgtcatcttgcgtccatcaggggcccttccctttacagttactggctgggagatgtgcaggtgaggggtctggcctgaggacgcacgccaaggtttggaggaggggttctctctggaagcagaaaggaagcacgcagtcctgatgagcctaggacagatcatgctgcatgg

SEQ ID NO: 172588 - DNA, 152 bp, Homo Sapiens
tcctatactctccatcagatgacatctaagatctgaattccgcagatatgatgccaggctggcagagaaagatgatacagttttcgccagatagcgggtttctatacattgacctttgttggttataagtatactgatgggagtaagatgcg

SEQ ID NO: 172589 - DNA, 276 bp, Homo Sapiens
aacacatcagaagtgtcttcaactgcgaattcctgtgaaaacagatagttgaaatgtcaacgcaataaacttcaacttgcaaagaaagaaatcatagatgaacaatatcctttgcagagtaggaaggaatataaattatccataaagtggcagggttataaattataggatagtgacacagtatactgcatagctgaactacacctgcaaacccgtgttaacctgactgggaccgaagacctgggagggactccatctagacatcgaccctggcag

SEQ ID NO: 172590 - DNA, 237 bp, Homo Sapiens
tacttgcgtcccagtcagtttatctcaaggcacagcagagctctcgtggtgacacctcaccacatctcaggcatccgggctgtctcccgacctccccacgggccacactcatagttccttgtcttgtgcagttgtgaatctatgtcaaacaagactgtccttaaaatatgagctgtgggtcagcttgctgtttctatagactgttgatttatgatgggagaagacacggcgacggta

SEQ ID NO: 172591 - DNA, 585 bp, Homo Sapiens
gcctcatgtgatccttctgtgagttcatgtgactcttctgtgtcatctgtgtcaaaatactgagttgcttgtgtaaggcgttaaagattgttaccctagtgtttcatttcctagaccagtattttgaacaatattatattttggagactgatgggagaagactggcatcttctcccatcagacctggcgcagcctgttagcagtccatgtggcagaggcgaggagtgccactccagctgcaccgtagctgcactctgtcttggtgtggggttctggcaggtctgggagcttaccgcactggttggcagcagagcagaattggaaacagggcacgtctttctgggatgtaagtcctgatgtttccccattaagaaaaaaggccaggcatcccaacactttggaaggctgaggcggacagatcatgaggtcaggatattgagaccatcctggctaacaggtgaaaccctgtctctactaaaaatacttaaattagccaggtgtggtggcgggcacttagaattccagctatctctggaggtctgaggcagaagacttgcttgtatttgagacgcggtagcctgctat

SEQ ID NO: 172592 - DNA, 329 bp, Homo Sapiens
cgcatcttctcccatcagcagagaccagataaagaaaatttggtacatatacaccatggaatactatgcagccataaaaaagaacaagactgtgtcctttacagcaacatagatggagctgaggctcttatcctaagtgaattaatgcaggaacagaaaatgaaatatcccatgttctcacttataagtgggagctaaacattgattacacatggactcaaagaagggaacagtagacacgggcttatgggtggaggttgggaagaggatgaagattgaatactgcctgttgggtactatgctgatacctgatgacgcagttcggttct

SEQ ID NO: 172593 - DNA, 455 bp, Homo Sapiens
cgcgtcttctcccatcagatggtaagttcatttcaacaagaacctctataactaactgtacatttgtacagttttctgctatcattgcaaaagcccctctgaacaaacttatagtttagaatttaaaacaatcctgatgggagcaagactgatctgcgtcccatcagctgtggaataatggcaacagaaagactggcttgcgtttacttgatcacacagtattttgtttaacttgttctttaaaatgagaataacacctgagaagatcagcatctgaaaggttgtggaaattgtgtccatgaaaagttctaagtataactcttgaatctctaaattctaaggaggaagaacaatatacatatagcccaattcccaagagagggacaaactattctattctttaagggatggaagagttaattttcctgtggttacaaagctcttgatctatactg

SEQ ID NO: 172594 - DNA, 1055 bp, Homo Sapiens
  misc_feature (788)..(810): n is a, c, g, or t
  misc_feature (813)..(813): n is a, c, g, or t
  misc_feature (817)..(820): n is a, c, g, or t
  misc_feature (822)..(823): n is a, c, g, or t
  misc_feature (828)..(828): n is a, c, g, or t
  misc_feature (830)..(830): n is a, c, g, or t
  misc_feature (839)..(866): n is a, c, g, or t
  misc_feature (877)..(886): n is a, c, g, or t
ctccaaaatcactaaataattatctaaataatggtattggagaacttgtttcctgctatttgaaagagattgttgcttcattgctagtttgtatttctaacttctacagttatagactccactgtgctttgtgtctgaatttctcagtatagacattttgtttactgtatgcttgcatatttattttcaactttgtttgtctttaaaattgcttgaggaaaaatggttgtaattaatttctgctacagaaaagccacctggtacgttttgtctcatcaggattgttttaaattctaaactataagtttgttcagaggggcttttgcaatgatagcagaaaactgtacaaatgtacagttagttatagaggttcttgttgaaatgaacttaccatctgatgatatgtatgtacagctgtgtacttgagtcttttttagtttacttagaaagactagcagtttgacctgttaaacaggactagttcaagtcaagaaactaaggttgttgtatacacctggaggcatctgttattcagcttatcctttgagtgggtatttggcacaatgaggataaacttatgtgacccacttgaatggctgatctaataatgttgacattatgcattctgtacttagtgaaatgtcagatgaaaataactgatgaataatttttttgtattaaaggggatgggaaaagaacacatgaatttgttaataaagcactatgatctgcaaacgatggaatgtttcataaagatctaaagaaataaaggaaactttaaaacgggnnnnnnnnnnnnnnnnnnnnnnnaanaaannnnannttttnanaacgaaatnnnnnnnnnnnnnnnnnnnnnnnnnnnnttttttttggnnnnnnnnnnaaaatttggggggccccctccgggcccctaagaaaattttctaaaaacctttggtttggggcgcgggggccccgcaatggaaaggggaaaaagggggctcccacggggttctccccaagaggaatccgcgggcccaaacccaaagggggttggggtctccccccccaat

SEQ ID NO: 172595 - DNA, 209 bp, Homo Sapiens
tcttgctcccatcagcacggggtcagcggcctcaaggtgggaagggttggccaccaaggacaaggtaatgttcctgtcggtgacacgattgatcctgcggtgatacatgcccaggtggtacttcacatctccggagccctcatcagctgcctccagctttgaatcgaatgacagaagacctgttccagctccttcctgatggacgcaag

SEQ ID NO: 172596 - DNA, 330 bp, Homo Sapiens
tttgtagcaaattataatttaccgagatctatgaggatcttatttgtaaacatgaattggtcaccatcagttttccaatagcaagagacacaaatcctagaaaaacttatctcaatttccagccttcaggatttccaaattttcccgatacatttcagactagaagaaaaattaactatttcaaacccactttgacatacagaaaagccctggcatactgaaatttcagattgctggacccccatctcgagattttgattcatcacattctggatgtaacaataatttggatcaagattaaggagccatggccgggcgcagtggctcaca

SEQ ID NO: 172597 - DNA, 605 bp, Homo Sapiens
  misc_feature (17)..(17): n is a, c, g, or t
  misc_feature (32)..(32): n is a, c, g, or t
  misc_feature (37)..(37): n is a, c, g, or t
ttgaaaatgggaaaaanttaaagtgctccccnagccnaaaactataaagcaaaagccaccttcactaatgaggatataactcaaaaatgtgaaaagcaaagggttgtatgcccaacaacaggcaaaatttggctccctggccctgggctttcacggaaccccagccagagctggtactttttaaactatggccttaggacaaacccaggtgaaacagattaaccacatcctccttctttgggctagcaagtcccagggctgccctggagtctgtctctaccatcaggatatagaatcttcctgcttggataaaaggagaggacaaactgtgtttctcatactttaaaaaccatgtggccgctacctttgtggataaaaacccaggtaggatgctgtttggaatgcagaaagtgctgggcaagaatggaactactggggctgctttctcaactcagccaatttgaggtgtgtttggcccattgcagatgctgatggtaagcaaagtctggcctttcctcttctgaagtcttatccaccttcaaagagctacccagctgccaaaatatagccctatacattgatctaagcctgaggttggctgtctc

SEQ ID NO: 172598 - DNA, 357 bp, Homo Sapiens
tttgaattgttgaattataagaagcatgccttggactttgggctaatactcttaccctacatattgagtgaaatttcatcttatttccaacaccattacatcctcagcagctttttgtggttcataaatattctttgtaactttcatttcacatgtatcattctttgttcccaagtgtctttatttttcttcaaggtagaagatgttgttagcccaaataaatcgagattctcagggaatgacagagtttcctggaggagggatggaggcgcaacatgttacgctgtgcttgacagaggcagtcaccgtggcagatggtgacaacttagaaaatatggaaggcgtaagcatgcagtc

SEQ ID NO: 172599 - DNA, 165 bp, Homo Sapiens
gtaccttcatcacattccaatatgattgtcgatttccaaacatattttatttctgctagacagaaaactgcctaataattgggaatagtctgtatttcctagtttgtaccacagtgcctagcaggtaggggttattcaaaaaaagtgtgaataaactaaatgacc

SEQ ID NO: 172600 - DNA, 313 bp, Homo Sapiens
cccatcagattaataatgcctgccttgggagaggagagtcatacaggagagggcatttgagctgggctctaaagagttcaaataacgtagatgagcagagatgggcttccaagatagcaggaatagaaaacaaaagtgtcagaatgggtatgcatggtcttttgtgggaataccccaagctatttagcctgatggggagcaagactgcatcttgcgcccatcaggaaaatctgacactgcctagctcttaagggatctcacatggggaagtcacaccgtctgttagcactaagtgtcaagtataagagtgtgt

SEQ ID NO: 172601 - DNA, 147 bp, Homo Sapiens
cgcatcttcgtcccatcagaaaggtaaaggggccaggtcttcaagggccttagagtttttgtattgactttgtttatcctctgggtgagatgtagatgctggaagttttgagaaagaacatgctctgactcatgtcttagaagaacg

SEQ ID NO: 172602 - DNA, 312 bp, Homo Sapiens
ctctacaggggccgttctaatcctaccatcttggaaatgaaccctcaacagcccagttgctcaagctgtccatgatccttctcatcattgccactttcactccaccagtgaacctgctggatacccctccaaggacacgctgtattctgaattcattgcttctcatcatctcattagttagatctgatgagacggccctgccgtcctctcttggacactctcttgaacaaagcagtaacctcttagcttgttttcccgctttcactgcaccccttctagagatcatcctctgtacaggagccaagggatctt

SEQ ID NO: 172603 - DNA, 541 bp, Homo Sapiens
actctgtcccatcatagaagttcacagatggggaaaaaccatttacatgtgaagagtgtgggaagagcttcagtcggagtgcacaccttcaagcccatcaataaagtccacactggagaaaagccatacaaatgtgaggagtgtggaaagggcttcaagtggagcttgaaccttgacatgcatcagagggtgcacacaggagaaaaaccatataaatgtggggagtgtgggaagcacttcagtcaggcctcaagtctccaacttcatcagagtgtccacacaggagagaaaccatacaaatgtgatgtatgtggtaaagtcttcactcggtcttcacaactacagtatcataagcgagttcacactggggaaaaaccttacaaatgtgagatatgtggtaagagcttcagctggcgatcaaatcttacagttcatcacagaatccatgttggtgataaatcctataaaagtaataggggtggtaagaacatcagagaatccacacaggaaaaaaaatctataaaatgattctttgtgaaaa

SEQ ID NO: 172604 - DNA, 465 bp, Homo Sapiens
acacaatcaaaagtaataggaatattcaaaaatgtaaaagttctgtacaagggaaatacagatagcacacgggtaaatctcattaagcatacatgccatttgtgttttaaaaatgttttataaaaactgcaatttgaaacaaataagtgagagtccttccctgactgtggaaaatatataaattatcgcccctaccgctgggtaccgaggtgccacctgctggagctagagagagaggtccccgtgtgtttcctgacagggccctaagccgcacaaggggacccgcctcctctgtggcagtggcttttccttgtgggtgattcactagtatttcctttcacttagaaaacttctttgggatcatagaagacaactgctcacaagtgaaagcaagactagagatgatttcagattgctgcgtccaattcattgggtgtattttgtatttttggtgaccaaactctc

SEQ ID NO: 172605 - DNA, 384 bp, Homo Sapiens
gtctggaggtggtctataagcacagttgacagttgtgcattgggatgggtggagaaagacgacaagagagcagagaatctgctgatgtggctgcgcttacttttagtgactttatgtacttatattaacagctggaaataggttgttgggttttgagcaggctgttatagtgaggaatgttcatttttaaatgttcctaacagattttgcttttgaaaaatgcttgttacatgaataatttgtggaccagggattgcttttctgaaggcagtatagggaacatgaatattcaagatgaaatacaaaaattatgtttaagggtcatagtgtataagtagcttcctaggataccctttgcgtatcttttctgatgggagaagtacg

SEQ ID NO: 172606 - DNA, 515 bp, Homo Sapiens
  misc_feature (209)..(209): n is a, c, g, or t
agaggtcaacagcagaacagaggcaggtcagggttgtccgctctgattagcagaacgacagccccttcctcctcctccctccttccccaacccctactcattagctccctgctcccgggatgcttccccaagcagccccaggcctcctagcctcccatggctgatgacctcagctttcacactggtgaagtctgtgtaccccatactgncaaccccatcccatggggcccctgaagacccactgaggaattccgtagggtcttgttcccacgaccggagtgctggctctcacagtgaattttgatgcatttaaaataagattctgatgccagactgttaaaacaggcgctggttctgaagcaccgatggaaacagattgatgcagatggaaggaggaagggagatctgggcccactgatttccagccccaccatgtgtgctgttttcagatgtgattgacgggtgttatgccctgcctccactatcacagcctttaataaaagatgtgaatcttg

SEQ ID NO: 172607 - DNA, 217 bp, Homo Sapiens
gtgtctgtacccttcatcgtgttcatgagttctcatcatttagctcccactcacaactgagaacctgtggtatttggttttctgttcctgaattagtttgctaaggataatagcctccagctctatccatgttcctgagacatgatctcattgtttcttatggctgcatactattccatggtgtatgtgtaccatattttctttatccaatctgtta

SEQ ID NO: 172608 - DNA, 1313 bp, Homo Sapiens
ccaaggtcgaggagggtatgtgctacacattggaaccatctacggtgacctgaaagtgggggatcaggtctggctgtttattgatgggccccgacgaagacccatcatgagcaaccacacagctacgcacattctgaacttcgccctgcgctcagtgcttggggaagctgaccagaaaggctcattggttgctcctgaccgcctcagatttgactttactgccaagggagccatgtccacccaacagatcaagaaggctgaagagattgctaatgagatgattgaggcagccaaggccgtctatacccaggattgccccctggcagcagcgaaagccatccagggcctacgggctgtgtttgatgagacctatcctgaccctgtgcgagtcgtctccattggggtcccggtgtccgagttgctggatgacccctctgggcctgctggctccctgacttctgttgagttctgtgggggaacgcacctgcggaactcgagtcatgcaggagcttttgtgatcgtgacggaagaagccattgccaagggtatccggaggattgtggctgtcacaggtgccgaggcccagaaggccctcaggaaagcagagagcttgaagaaatgtctctctgtcatggaagccaaagtgaaggctcagactgctccaaacaaggatgtgcagagggagatcgctgaccttggagaggccctggccactgcagtcatcccccagtggcagaaggatgaattgcgggagactctcaaatccctaaagaaggtcatggatgacttggaccgagccagcaaagccgatgtccagaaacgagtgttagagaagacgaagcagttcatcgacagcaaccccaaccagcctcttgtcatcctggagatggagagcggcgcctcagccaaggccctgaatgaagccttgaagctcttcaagatgcactcccctcagacttctgccatgctcttcacggtggacaatgaggctggcaagatcacgtgcctgtgtcaagtccctcagaatgcagcccaatcggggcttaaaagccagcgagtgggtgcagcaagtgttaggccttgatggaccggaaaaggtggtggccaggaatgtgtctgcacaggccacaggcaaaaacgttggctggctgcagggagggcctgcagcttggccatatcccttcggcccacttgcgccctcgggggatggaaaaaacttgaatggggacaagaaggaggctcccccctggattccatcccggccaacccaagaacttcttcctcttgctaaaagaacatttgaaaccttgggc

SEQ ID NO: 172609 - DNA, 1599 bp, Homo Sapiens
  misc_feature (26)..(26): n is a, c, g, or t
  misc_feature (132)..(132): n is a, c, g, or t
  misc_feature (681)..(803): n is a, c, g, or t
  misc_feature (817)..(827): n is a, c, g, or t
  misc_feature (953)..(981): n is a, c, g, or t
agactctgccatgctcttcacggtgnacaatgaggctggcaagatcacgtgcctgtgtcaagtcccccagaaatgcagccaatcggggctttaaagccagcgagtgggtgcagcaggtgtcaggcttgatgnacggtaaaggtggtggcaaggatgtgtctgcacaggccacaggcaagaacgttggctgcctgcaggaggcgctgcagctggccacttccttcgcccagctgcgcctcggggatgtaaagaactgagtggggaaggaggaggctcccactggatccatccgtccagccaagagctcttcatctgctacaagaacatttgaatcttgggacctttaaagagcccctcctaacccagcagtaactggaacacacttgggagcagtcctatgtctcagtgccccttaaatttctgccctgagccctccacgtcagtgccatcggtctagaaccactaaccccgcattgctgttgatcgtcacgctcgcatctatagataacggctctccagacctgagctttccgcgtcagcaagtaggaatcgtttttgctgcagagaataaaaggaccacgtgcaatacttaatgccgcatgatctctatccctcttcccaataggggctggctcttttgacagcctttggcgtctgtagaataaatgctgtggctcctgnnnnnnnnnnnnnnnnnnnnnnnnnnnnnnnnnnnnnnnnnnnnnnnnnnnnnnnnnnnnnnnnnnnnnnnnnnnnnnnnnnnnnnnnnnnnnnnnnnnnnnnnnnnnnnnnnnnnnnnnnnnttttctgggtgggnnnnnnnnnnngagtcacaccaaaatacactctcaccttgggcccggggcgcccccggcactaaaagagaaagggaaattgggtcaattcctgttctaacaccgggcccccgcgcccatagcccttggggccttcannnnnnnnnnnnnnnnnnnnnnnnnnnnngcaggatatcctttggacacaatctcaaccaaaattgtcagttttgagcacccccaaaaagccgcgttcctccggcccctccgccccgccacgaggcgcacgacgcgcaagaatttccaatatataaaaaccctaccccccccgcggcccctttctaaccactcattaccgtggaagtgcgtcgccttcattaaacccatatttaccccgcctctcacgcgcgggaaacaacgccgcacaacacactacgcgaatacggtggcgacacctcgagaacaccccccaataccggctccattcgccggaccctttaacaaaccatctgtggccgccgctttatttatctatacacctcttaaccgccccaaacaagaggacaactcccgcacgaaccaaacaaatatctccttcccccatatcgcgcccccacttgtaaaacgcggtgagagtcaggcttctactcggcccccctggggtgtgggcacataaaataaacaacttccctttccttcccctatttacgcctagaatggggggaagatggtcactcccctaaaggcacaacccacgtttgggagtgtcgtaaagtaatagagaaacacaacagtaccgcacacc

SEQ ID NO: 172610 - DNA, 398 bp, Homo Sapiens
acgctcagcaagcagctcagagaatggaggcagcgccaaaagtctccatagttcatagggagcccaaacctcaacactgccctttcccaagcctcaaaatttctcttaccctgacccacgcacacccactcaactcttacccttgatccccctcccaggaccagaagggattgatttctggtgagtcctgccccaagctgtgcttgcctgctctgttcgtacccaatattgcatgaggaacctggccagtgtctatggtggcaagtgcttcacccattctgtcctcttccccagaaaagatctaatagggagggaagaagcgtgcgcagaagctaaggaactctcttccttctctaccaaggccacccctacatctactccctgcactccagcctggg

SEQ ID NO: 172611 - DNA, 445 bp, Homo Sapiens
gttggggggaaatgaattaaaagtttaattttgaaccattttttataaccgcattttctcttgaagcatcgtatcacagcaggttacaacaactttgggataaaaggcaactggtaaactgtccaaaacaaggttccaaataacacctcttactgatttaccctacccatacatatcccaaatagtttttgatcaaaaacatgaaatagatccacctgcttattttaagcatattaaaaaggaaactaattggaccattttctatttgtctattttatacaaaaaggctacacaattgttacactttattcagattacaattaattagagtgattatgaattaattagtgttctacaccattactcaattcttaaaaattagaaattgctgtagcagtattcactataacttaacactacgagagacttaaaaaacagttactgc

SEQ ID NO: 172612 - DNA, 469 bp, Homo Sapiens
tcgtagttaacttctgaatactaaacgcaagaaagtcttgagagacaaaaatgaaaccttacctacaggggaataaaacacataagaacacaatggatttctcatcagaaaccaggaggctagaaaaaagtggcacaatagttttcaagtaaagaaagaaaagaactgtgaacccagaatcctatacccattttctgtcatttgacaatgtcattatccctttcattatgaatgaaaaaaattttttttggctaaaaatctgatgctagcagtatggctaaaggaagttctctaaacagaaagggaatgattataacaaaaataagaaatctaaaaatgtgcgtaaatacgatagacttcccttctctttcaaagagttttctgaaatatgtttggtggttgaaagaaaagttgtaacactgtctaacgtgattctaaatatatgtagaagaaatatttaagaatgata

SEQ ID NO: 172613 - DNA, 169 bp, Homo Sapiens
cctcatcgcacccgagataccctcggcgtcgacagccgccctgtgcttttgatgtgcgaaaatacggcttcctgattgaattccttataagactcttcgtgagaccacagaccccttccttcccctgagtctggcaggttcagatgcgtctgaacgtctggttgctcgg

SEQ ID NO: 172614 - DNA, 515 bp, Homo Sapiens
tgtagtcgtacacaaattagagagcttcaaataatttgcttctgtttttaatatcttcattctacattaaattactatcataggctaatgtttaaaaatgcaaataaattggacatctgtaggacaacacttgttcacccaactgtgaaggttgatacctgtttccaaaaatcacaataaatgcagaataaagagaagtgtttgcatggaacacttttgagtgaaacagcattgattcccaccactcaaaacggctaaggaaggaaactaaaggaaataaggaaggaaggaaacaaagagggagggagtggggagacaagaggaagggaaggtaggaaaaataagcaaaggagaaagggagtgagggaagtaggagggagggactccatcttaaaatgcatcatattagacttacaactagacagatttaaaagaatcaaaatgaaagtaaagaacgattttgtgtgtgtgtttaaagatttaagaaccattatcaaaaataagacgtttttttg

SEQ ID NO: 172615 - DNA, 167 bp, Homo Sapiens
gagacttcttccatatgtatcatcatatcatcaaagcaatattattaatagtatcacttacagcctggtcctgaagaacggagtagcattgaattaggcattgtattccgggtttgttaaaaactggatgttactgaggtcctggtgctttataattgtcaaggctg

SEQ ID NO: 172616 - DNA, 188 bp, Homo Sapiens
gggagttgtctcgaggcagccaggaaggctagagcaaggagagaagcagagcaagatacagagcctggcttgcgccagggatgcagtctctagctaagaacccaagaggtactgggacctgtcccactggggacactctgaggagccatgagaaggcatctcctcatcaagggacagaagagctacga

SEQ ID NO: 172617 - DNA, 228 bp, Homo Sapiens
cagtacgtagtgaaaggggatggcgggattacagtccaggtcttttgaccatctgtgtatttcacttttgcccccagtctcctaattctaaatcttaattgttttacaatttgaatgggagtcgtgagcgacttggatgtgttctgaagaacagggtcagatagaatattcgaacttgacaagaattaacgagcttatttaggttcaacatttaaacaatattacaga

SEQ ID NO: 172618 - DNA, 158 bp, Homo Sapiens
ggacaggagcaagactctgtctcaaaacaaacaaacaaaaaataataatacgataatgctatttgacgtgttttgtggttaataatgattttaaatgcaggtaaatttcagtacactgaatatttccccagaaaagttggaaacttcatatacttggc

SEQ ID NO: 172619 - DNA, 234 bp, Homo Sapiens
tggacttatctgtataacactctgcactattatgaaatgcacctgagagaccgcgcatttctcaaacgaaaactcgtccatgcgatcattggctctctgaaggataatcgaccgcagggctggtgtctaagtgacacttacctgaaatgcgctatgaatgcacgagaggaaaatccttgggttccagatgacacctactattgcagattgattgcagactagtcatacagtacg

SEQ ID NO: 172620 - DNA, 875 bp, Homo Sapiens
cgggatggagcggagaggaggcggtggtggttcggaagggtatgagattgaggggggcgcggggatagcagcgttgttcgtagttcggctggagtccggcgggaacgttgggggatggaggtaacgtgtgcgcgtacatccggttatagtggggtgtgcgttggcgagcgagagtaagtggatgtggatgatccgtgagagagggggtgtgggcgggcggaaggtccggtaaagcgagaagtccgcatcgccggcgtgttgcgcgggggtgcatcctctgtgcataggagagggccgggtgggggggcaggaggtggtaaatgcggggggggtgtgccattggttatcctccgccctaggtgggtttatggtgtgggcggagggagtatgcggcgattgagtctgggtttttcaaaatctgcctagtttttatttaagttaagtataaaggcccagttaaattaatcaattcattagattggtcagggcatgacactttaactacacaataggatttaaaaagcagttggtttttttagtagttctctggtaatcacacgcacatacacacatacacaaaaatttatagagtactctgaatataggatttcccccataatcttgcatctgctatattttgtaaactgtataaactggacatggccaaattagagacgtctgataaactcttataaagtatttgggaacttcaactggattcccaaaggatcaattttaaactataaaaaaacaaatattcatataaaagcacaacagatttaacagacatctttggaaaaaaaatcaaattgtaactcaattttctactttttcaaatatgactaagaaaaaaagtacaagtagatgtttacctt

SEQ ID NO: 172621 - DNA, 744 bp, Homo Sapiens
aagaaatggaagaatttgaagaaggccctgtggatgtccagacttccctccaggctaacactgaagctactgaagaaaatgaacatgatgaacaggtcctacaacgtgactttaaaaagacagcagaaagcaaaaatgtcccattggaacgagaagccactagtaaaaatgaccaaaataactgtcctgtgaaaccctgttacctcaatatcttggaagatgagcaacctttaaatagtgctgcccataaggagtcacctcctactgttgactcaactcaacagcctaacccttcgccgttacgtttacctgaaatggaacccttagtgcctagagtcaaagaagttaaatctgctcaggaaactcctgaaagctctctggctggaagtcctgatactgaatctccagtgttagtgaatgactatgaagcagaatctggtaatataagtcaaaagtctgatgaagaagattttgtaaaagttgaagatttaccactgaaactgacaatatattcagaggcagatctaagaaagaaaatggtagaagaagaacagaaaaaccatttatctggtgaaatatgtgaaatgcagaccgaagaattagctggaaattctgagacactaaaagaacctgaaacggtgggagcccagagtatatgagatgtcttcagaggctcatctaactctgtccttacatactcaatgcatatatgaaaacaatactaaataaacatctgatctgtat

SEQ ID NO: 172622 - DNA, 166 bp, Homo Sapiens
accacacgcacgctcatcgtagccacaggacaaaggcagcagtgtttatgcaaatctagaaacaaaagaagctagaatccaaagctattaaaagtaacatcagcaattcaatacccagaagtgattacaggcccagtaccagcatgaaacagaaaacacccgaaag

SEQ ID NO: 172623 - DNA, 891 bp, Homo Sapiens
atcttttcacgaagaaagctgtggcttctctggccaattttactaaacatttaagaaataatgactgaaaggtcacttttacacaaactattttgcacaagccaaaaaagggaacattcctcaacttattttttaaggccaggataaccttgataacaatacttggcaaaatatgggaaaggaaaattcgaggaacatctcactcagatgcaaaatctcggaaaaataattagcaaagtggatttggcactacataaataggatgacacatcaggaacaaggtggtttcaactttacactaaaggagaacactggttattttagaaagtgcagcaaacttgataaaatccaatattccttcctgataaaaactgttagcaaactgggaaatagaaagggggaacttccttaacctgaaaaatatctacaagaaatttgtagtaaatatatttagtagtgatacactgaatgctttccttttgaaattagggacaagttagtcccgcttcagtaatttactagaaattatagcacaggaaagcaggaaaaaataaacgataggaggattgagaggaaacaaaacttattttgcacagatatgattatataaatataaaatccataagaatataaatatttagaattaataaaaggcaaagttgttggatataaagtcagtataaaaatcaattgtatttacatatgagaggaaacaaaacttacttattttgcacagatatgattatacaaatataaaatccacaagaatctagaaataaatgtttagaattaataaaaggtaggcaaggttgttggatagaaagtcagtataaaaatcaattgtatttatatatatataaacagtaaaatttagaaaaagatgccatagca

SEQ ID NO: 172624 - DNA, 372 bp, Homo Sapiens
atgctagattaccttggagcttcataactttagctttttcctaaaaatatatgtttatgctgataaaaactattacatttatgggatattttgtatccatatagagtttttcagaattgttcattaaaatgctttttataagcttatattatttgtagaatatggcaaaagcatttacagctcgtcatgtatctatctgctcctgttcacttccaaacctcttgtagttaggcaatgccatttgactacttcaagcagagggattgtaaacagaagtgattttctatttccatgttggactgtaaaaagttctgcatgaccctccagttttcttttgcctgtcatggtgacctgaaaagcaagatgttccaa

SEQ ID NO: 172625 - DNA, 393 bp, Homo Sapiens
cccaatagttagatgcatcaatatctaaaaccagctgaacaaggtttcccaatttaactacagaaggtatgccacctaccctaaagatattccatgagcattctacaattatctgtataaacagcaacaagtttgatctatgatcaacatatgaatatctaataaatattaaaactattaaactatagattaaaatgcagatctctcatagagttaagtgatgtcattttggtacattcaccattattgtactttatttaataaagaaatacatctgcccttgcaaatatagcaattgcaagtttacaaataaaaccacagacctcaaagtcataatgctaaatcttcaacttacaaccaacaaaagtaaatcaatttgtttacaaatggtcc

SEQ ID NO: 172626 - DNA, 1040 bp, Homo Sapiens
ctagaggatcccccccaatagttagatgcatgagagtaaaaaatgtattcaataacttaatattctcactgaatcatgagagaatgtgtatttgtaggtagtactctaaatagatctcattgatatgttattaaaagaaacagtaataaaaattttatcacgatccttacgttgatttgcctcttaggtccgatgaccaataggtattctgtatatagtaggggtttctttctaaacatttttctttggttttaaaaaaagttatgcaaatttgtcttatctttagtaaactatgactacatttatctgcaatttttaaaattttccatatctttgtcattcattgtgtgtttgtaaataaggccgatagaatgtttcctataaatggtttgtactagtacattagtgttaaaccagaactgaaatttaaacatatatatatatgaggatgtatatatagcatcatcagcttatttagaactgatggccataccttacaatcttgttttacccaaaattaagctattggggttgaaagctaaaaggagcacttttgtagaatagcaacttttcttttcctctttcttgattgtatggtggggtggtgacctatttttacaaattatacctaatgagtaaaattagtgtaaagtgataacatgcttctacctgtatttctagtgaccctttagcggcaggtatttatacctggtatttatgatgcagtatataagtggtgaacaataactgacagtattgtgcttgctgtacatgtctggtcttttgaaacagattttagtaagcattttccagaggtaaaactgtgtccttattctaattttattcctaggggcaagtagaccggggattatttccttgaatctattttccaaattaatattttttttctttgggatttcctacactttaaagccatttggtggcaatttaaaaaagtggtgggcctccctttccgctagccacatttcaaaattaaccttcccaaaacctcaggaaacggtacacaagaaattgaaacc

SEQ ID NO: 172627 - DNA, 583 bp, Homo Sapiens
ccctataccaaagcagacactagctaggcagctacagtttcctggaatctattcaggtaattaagcctaagcctgggtaaggggagggcacaggctaagactgacgagagaagaagacactagagagagcaacaaacaaaatgatcttgaaaaacatgctttttgagagcactggaatgatttaggggtgggtacagtgggagagtgaggtgggagaagaagagtgtctggtaggtgtgctcactgtcttcttggctgagaatgtttaattggaagagtgggcgctcagagctcctacaaaggcagagcaaagcttcttagctgacattgtttgagaaattgctggcaggctctggaatgcttgtttggctttctgtggtgcctttggtgtcttgttttcttcacattgcccttgaaatgatcacaggggcactgcttcttaggcagcccagacactgttcatgaatattcttcacggggctctacaggaaccatgcttcgcactcacagttcttgccgccatcctggagccatctcactgacctggcctcgtgcacagtggccactgccacccctcggggga

SEQ ID NO: 172628 - DNA, 2386 bp, Homo Sapiens
  misc_feature (522)..(522): n is a, c, g, or t
  misc_feature (555)..(555): n is a, c, g, or t
  misc_feature (588)..(589): n is a, c, g, or t
  misc_feature (697)..(697): n is a, c, g, or t
  misc_feature (1595)..(1609): n is a, c, g, or t
  misc_feature (1698)..(1707): n is a, c, g, or t
  misc_feature (1781)..(1781): n is a, c, g, or t
  misc_feature (1811)..(1811): n is a, c, g, or t
actatagaggatcccccccgccgtacagttgcgcgtgaggggttcgggggttctgggcaggcacaatggcgtctcgagcaggcccgcgagcggccggcaccgacggcagcgactttcagcaccgggagcgcgtcgccatgcactaccagatgagtgtgaccctcaagtatgaaatcaagaagctgatctacggacatctggtcatatggctgctgctggttgctaagatgagcgtgggacacctgaggctcttgtcacatgatcaggtggccatgccctatcagtgggaatacccgtatttgctgagcattttgccctctctcttgggccttctctcctttccccgcaacaacattagctacctagtgctctccatgatcagcatgggactcttttccatcgctccactcatttatggcagcatggagatgttccctgctgcacagcagctctaccgccatggcaagggcctaaccgtttcctctttggtttttctgccgtttccatcatgtacctggtggntggtgttggcagtgcaagtgcatgcctggcagntgtactacagcaagaagctcctagactcttggnntcacagcacacaggagaaagagcataaatgaagcctctttggggtgaagcctggacatcccatcgaatgaaaggacactagtacagcggtccaaaaatcccttctggntgattttagcacctgtgatggtgggtaccctggtgcagaccaggccaaagttctggaaagctccttttgccatctgctgaggtggcaaaactataatttattcctggttggctagaactgggtgaccaacagctatgaaacaaatttcagctgtttgaagttgaactttgaggtttttctttaagaatgagcttcgtccttgcctctactcggtcattctccccatttccatccattaccccttagccattgagactaaaggaaatagggaataaatcaaattacttcatctctaggtcacgggtcaggaaacatttgggcagctgctcccttggcaggctgtggtctcctctgcaaagcattttaattaaaaacctcaataaagatggccctgcccacactgtgccttgtgtttggggcttgatagagtgtgaaaggtgtgttgcttgaaaggtgtggccttagacactaggagatgatgggtagaagctccttgagaaacctagcagtggccatagagaagtagactgggtatggggaacctaagtcatagttgtaacctacagctgattggtaagaactatgggccagacatttaatctctccatctatgaaatagtccattctcatttatctagcttacgttatgggctcttcttttagttggatattcacatttatctttcaccgttaactgggcatcagttatgagtctactactgtataatggcatccaaaagaattttaaagtaccctcggcttataggcatttacaattcacgtagaaacttgttattcatgtgaaacagtgaacataatatctaatgatgtggagcaaggtaccttcaacaacaggaaggaacgagatccggtgatttaaactaaaaggcccgctttnnnnnnnnnnnnnnngccgaatgcgccaccccacgacatgacaccctttgtttcggcccgcccctccggcccctccgaaaaaaacgtttgtcctaaaacccaannnnnnnnnngcaaccccgtcgggccccccacccccaggcttcacggggcccaaccgtcgggcccccacatagcgctgtggttntccccctccgccgacaaataatcccgtggngcccacatctggagccttaaaggccggcctgttgcgggacacctcctctctcccccacttgaagcttcgcccgacatttcccccctctctctttcccggcggcgcggggtatatggacatctctcggtaagaccccgggttccccgcttggagtcagcccgagatctcttccccgcgaaacgcgagcccgcactttcccccgtgagacacgggcgcctctttatacgagtcggggaggtacttgtcctacgtatcgcaaacctacgcgggggcggtggccccacaatcgggggggagaacgcgctcacggaacatagcgtcggagaacttttaagagccccgccgcccccaccccccgcttgggcccacatctccaatcccacccccctatagaccacgggctgcacggtcaaataattatgtcttacccggcctcttcctccttggccggccacctatggtagaaaagccctccttcgcccctggagattcgctgctcattggccaacacccacccccccttttagttgtgtacgcggtgagcggtgacacacagcccgcttcgcttgggctgg

SEQ ID NO: 172629 - DNA, 369 bp, Homo Sapiens
agctcgggtaccccgagaggatgagaacacagagcccgtgggcaccacctaccagaagacggatgcagctgtggaaatgaagcggataaaccgagagcagttctgggagcaggccaagaaggaagaagagctgcggaaggaggaggaacgggagcagcaggaaagagtcgcatcggcctctgcgggcagctgtgatgtaccctcgcccttcaaccatcgaccaggcagccacctggacagccaccggaggatggcgcccactcccatccccacgcggagcccgtctgactccagcaccgcctccacccctgtcgctgagcagatagagcgggccctggatgaggtcacctcctcgcagcctccaccact

SEQ ID NO: 172630 - DNA, 194 bp, Homo Sapiens
cgatattcgtgctcggtaccccttccttctatagccaggtaacgggtagcacacactcctttgatagacacaactcctctctcttctgcttgaagttgtagcttgatgtgagggtcgctcttctcccggaccccgtcaactcggccgtcggggtggatgcgcaggaagaagcccccgtttttgcagtacagccg

SEQ ID NO: 172631 - DNA, 530 bp, Homo Sapiens
ggtaccccccccatacgttagggatgcccatttcaagattaatattcccaccttcaaataaaagtctgccttctgttccaaaaaattaaatcggttgccaaagaggaagttaccgagcaacccccgcacctggccttccctgcttcctctctagaatccaattagggatgtttgttactactcatattgattaaaacagttaacaaacttttttctttttaaaatgtgagatcagtgaactctggttttaagataatctgaaacaaggtccttgggagtaataaaattggtcacattctgtaaagcacattctgtttaggaatcaacttatctcaaattgtaactcggggcctaactatatgagatggctgaaaaaataccacatcgtctgttttcactaggtgatgccaaaatattttgctttatgtatattacagttctttttaaaacactggaagactcatgttaaactctaattgtgaaggcagaatctctgctaatttttcagattaaaattctctttgaaaccc

SEQ ID NO: 172632 - DNA, 1101 bp, Homo Sapiens
  misc_feature (69)..(69): n is a, c, g, or t
  misc_feature (124)..(124): n is a, c, g, or t
  misc_feature (214)..(214): n is a, c, g, or t
tgttaagacctgtattaaaactgcgtattttcccctgactacttaaatccctacccaaagcaatgaagntatcatccatgaagtagcagtccctgaggaagtccatgccagtaagaaaaggtgntagagtgctgttatgtgtaatagtcatcaaagatcacggagtaattccagtcattactagtgttcctgcagatcgccaagggagcttagntgatttttttccaggttcatcttgggagcagtttttgatcataggttcaacttttttcttgggttgcaaaactgcatctggctgcaagtctaacccaaaatattcgcagcgtatcagctgagaggatgccggcaactgttgaactacatcacagttcaaagtcccatattgtgagagcagtacttgtagtttatgtaaccagcaaatatgagttacctcgttacagtgaacaacctgcactgttagagtttaggaacttttgacattcggttatcacatatttcaaagattttcaactcacaaagaaaaaaatacatgggcttaattactcagtaacactttactatttgtcacttaatctcaagacaatacacactcagtccaactctttgggtttgattttacatagattttcacttacttctgcaaattaaaaacaagaaatgagtgctgtatttccccctctcccacagtaagaaacaagggtttaaaatggcaattacttagatgtttatttcaatatttcttaaattcactttattaatttaaaaaactaaataatcgcatgaaagttatataaagaacatcattaatgtgaaaagatgcaagaaaaaaatcattctagtagagcaacgttagagaacaaatgcttaggtaataccctaaatatgcagccaactaccctatttttgcactgttgaccatataagcacgtttgcatttgcagaaaacagaatgacagcataggaatttgtattgctctataacggtccaacatctccacataatgccaagttcaccttagacattttatttacttatccaaatgaacagcctgtgtaagcaggattgaaaatgcatcaactttaaaaagatgagaacaattt

SEQ ID NO: 172633 - DNA, 676 bp, Homo Sapiens
cataaaagcagtgtcgacttaagagcctctgcacttagtcctccggagcgctgtgtggttctctatatggatatgccgcgctcctgaaagtgtggtgaaaatgtgttagaccccatttccattcctgtaaagcctgctctcttcaatccaagaatacaagggtccgagttttgaagaatgagaagggtcaaagggccattgaatggcagattgacccttatgcctgcatacgactaagtgtggagaatgtcccctgcattgtcactctgtgcaagattggctatcggcatgtggtggatgctactcttcaggaggaggcctgctcgctggccagcttgctggtgtcggtgaccagcaagggagttgtgacgtgcatgaggaaagtggggaagggcagcctggacccagagagcatcttcgagatgatggagactggcaagcgtgtgggcaaggtactgcatgcctccttgcagagtgttctgcacaaggaagaaagcctggggcccaagagacagaaagttggattcctgggatgatttgcacatcaactgctcaactgtggattgttttttacttttccttttaaaccggttcgtatatatttttcttcgctgttacgaatttacagcagcatttgtacatgtaaaattaaaggctattttctggtcaaaaaaaa

SEQ ID NO: 172634 - DNA, 948 bp, Homo Sapiens
  misc_feature (848)..(848): n is a, c, g, or t
ggggtggggcagctcggcagcatggcgtccgtgacgctgagcgaggcggagaaggtgtacatcgtgcatggcgtccaggaagacctccgtgtggatggccgtggctgtgaggactaccgatgtgtcgaagtggaaactgatgtggtgtccaacactagtgggtccgccagggtcaagctgggtcacacagacatcttggtgggagtgaaagcagaaatggggacgccgaagctggagaaaccaaatgaaggctacttggagttctttgttgactgttcagccagtgctacccctgaatttgaaggtagaggaggtgatgaccttggcaccgagatcgctaacaccctctatcggatatttaacaataaaagcagtgtcgacttaaagaccctctgcattagtcctcgggagcactgctgggttctctatgtggatgtgctgcttctggaatgtggtggaaatttgtttgatgccatttccattgctgtaaaggctgctctcttcaatacaaggataccaagggttcgagttttggaggatgaagaggggtcgaaggacattgaattgtcagatgacccttatgactgcatacgactaagtgtggagaatgtcccctgcattgtcactctgtgcaagattggctatcggcatgtggtgggatgctactccttcaggaggaagcctgctcgctggccaaccttgcctggtgtcggtgaccagcaagggagtttgtgacgtgcctggaggaaagctggggaaagcgcacccttggaacccaaaagagcattcttctaaaatgatgggagaacctggccaagcgtggtggggccaacggtaacttgccatgncctcctttgcccaaagtggttctgtgtccaccaggggaaataaaatagccctggttgcgccccccattaaaaaccctcacaggcgtcggccttttttctg

SEQ ID NO: 172635 - DNA, 1022 bp, Homo Sapiens
gggagatgacgtgcggctcgtggggcagctcggcagcatggcgtccgtggcgctgagcgaggcggagaaggtgtacatcgtgcatggcgtccaggaagacctccgtgtggatggccgtggctgtgaggactaccgatgtgtcgaagtggaaactgatgtggtgtccaacactagtgggtccgccagggtcaagctgggtcacacagacatcttggtgggagtgaaagcagaaatggggacgccgaagctggagaaaccaaatgaaggctacttggagttctttgttgactgttcagccagtgctacccctgaatttgaaggtagaggaggtgatgaccttggcaccgagatcgctaacaccctctatcggatatttaacaataaaagcagtgtcgacttaaagaccctctgcattagtcctcgggagcactgctgggttctctatgtggatgtgctgcttctggaatgtggtggaaatttgtttgatgccatttccattgctgtaaaggctgctctcttcaatacaaggataccaagggttcgagttttggaggatgaagaggggtcgaaggacattgaattgtcagatgacccttatgactgcatacgactaagtgtggagaatgtcccctgcattgtcactctgtgcaagattggctatcggcatgtggtggatgctactcttcaggaggaggcctgctcgctggccagcttgctggtgtcggtgaccaacaagggagttgtgacgtgcatgaggaaagtggggaagggcagcctggacccagagagcatcttcgagatgatggagactggcaagcgtgtgggcaaggtactgcatgcctccttgcagagtgttctgcacaaggaagaaagcctggggcccaagagacagaaagttggattcctgggatgatttgcacatcaactgctcaactgtggaatgggttttaacttttcccttttaaaaccggttcgtatatatttttcttcgctgttacgaatttacagcagcatttgtacat

SEQ ID NO: 172636 - DNA, 899 bp, Homo Sapiens
  misc_feature (630)..(630): n is a, c, g, or t
ggggcgcgcagatgacgtgcggctcgtggggcagctcggcagcatggcgtccgtgacgctgagcgaggcggagaaggtgtacatcgtgcatggcgtccaggaagacctccgtgtggatggccgtggctgtgaggactaccgatgtgtcgaagtggaaactgatgtggtgtccaacactagtgggtccgccagggtcaagctgggtcacacagacatcttggtgggagtgaaagcagaaatggggacgccgaagctggagaaaccaaatgaaggctacttggagttctttgttgactgttcagccagtgctacccctgaatttgaaggtagaggaggtgatgaccttggcaccgagatcgctaacaccctctatcggatatttaacaataaaagcagtgtcgacttaaagaccctctgcattagtcctcgggagcactgctgggttctctatgtggatgtgctgcttctggaatgtggtggaaatttgtttgatgccatttccattgctgtaaaggctgctctcttcaatacaaggataccaaggggttccgagttttggaagatgaagaaggggtcgaaaggacattgaaattgtcagatggacccttatgactgcatacgaacttaagntgtgggaaaatgtccccctgcaatggtcactctggtgcaaaaatgggctatccgccatgtgggtgggatgcttactcttccaggaggaaggcccggctcccttggccagctttgctgggggtggtggacccaccagaggaagtttgtggacctggccctgaaggaaagaggggggaagggtccaccctggcacccacaaaaaccatcctttccagaatggatgggaaacctggggcaaacgccggtgggggccaaagggaatcttggct

SEQ ID NO: 172637 - DNA, 1270 bp, Homo Sapiens
  misc_feature (1138)..(1162): n is a, c, g, or t
ctggtaccggtcggaatcgcttgatatcgtcgaccacgcgtcgggcctgagaggtctctcgtcgctgcaggcgcctcagcccagccgcgtgccttggcccatggccgcctactcttaccgccccggccctggggccggccctgggcctgctgcaggcgcggcgctgccggaccagagcttcctgtggaacgttttccagagggtcgataaagacaggagtggagtgatatcagacaccgagcttcagcaagctctctccaacggcacgtggactccctttaatccagtgactgtcaggtcgatcatatccatgtttgaccgtgagaacaaggccggcgtgaacttcagcgagttcacgggtgtgtggaagtacatcacggactggcagaacgtcttccgcacgtacgaccgggacaactccgggatgatcgataagaacgagctgaagcaggccctctcaggtttcggctaccggctctctgaccagttccacgacatcctcattcgaaagtttgacaggcagggacgggggcagatcgccttcgacgacttcatccagggctgcatcgtcctgcagaggttgacggatatattcagacgttacgacacggatcaggacggctggattcaggtgtcgtacgaacagtacctgtccatggtcttcagtatcgtatgaccctggcctctcgtgaagagcagcacaacatggaaagagccaaaatgtcacagttcctatctgtgagggaatggagcacaggtgcagttagatgctgttcttcctttagattttgtcacgtggggacccagctgtacatatgtggataagctgattaatggttttgcaactgtaatagtagctgtatcgttctaatgcagacattggatttggtgactgtctcattgtgccatgaggtaaatgtaatgtttcaggcattctgcttgcaaaaaaatctatcatgtgcttttctagatgtctctggttctatagtgcaaatgcttttattagccaataggaattttaaaataacatggaacttacacaaaaggcttttcatgtgccttacttttttaaaaaggagtttattgtattcattggaatatgtgacgtaagcaataaagggaatgttagacgcaaaannnnnnnnnnnnnnnnnnnnnnnnncctgtcggccggcctcgggccctccaagaggcttttctagaaccaattctttgggcgcgcggggcccccagtaaggtaagtggaacatgggcccttagcttggtttcc

SEQ ID NO: 172638 - DNA, 788 bp, Homo Sapiens; identical to SEQ ID NO: 5052
  misc_feature (701)..(725): n is a, c, g, or t

SEQ ID NO: 172639 - DNA, 620 bp, Homo Sapiens
accccagcgagaaggagaaattctcccagatgctcatcgtcaacgaggaacaccgggctggggctggtggtggaggaggagtgctgttcaggctgcgggcagggctttggctgtggtgcagccggggtccggggtagggtgtcaggatgttgtagggcacatatccctcctgccccgctgggtcccgaaccttccaccacttacgactgtcatccaggacctccagtacgtcccgctgcttgaccgacagctcactgctgttgcgggcctggaagtcataattacacaggacccattttcctgctgtctctgactccagctgaggctcagattctggctccaagtctcggtgaccattgacagcgacctggggggcgctttgctgccggcgcctacgctcgtgctgtagctgtttctcaactgggtcctcccaggcgcggctctgcgggtcagtgacccgcgtcccagccgctgaagaactcgggtctgtatgggggtccctctccggggacagctccagccggggcgggtccacgagtcccccagcgaggtccagagctcgttttcacgtggagtgacgttgtccgcagcagcgcacggcatccgatgtcagatcggtc

SEQ ID NO: 172640 - DNA, 1468 bp, Homo Sapiens
  misc_feature (439)..(491): n is a, c, g, or t
  misc_feature (999)..(999): n is a, c, g, or t
cgggaggtgccgtccagggagctccccctactggatttcgcttcagagacccccttgggtgggccccccgggcggtatttttaactggggggggatccccaagccatagggcatcccccaaagggttctcctagggaaacccatttagtggtccattttgaacttacctgttggggcccgggcgccaaaacgaatggtcaaaacagtttctttgatggaccgacggcgaccccacaggaaaccagctatgcccattttccctttcatagaggtaactcatatctatgggatggtataatgattttctggacgtccatagtaggtatacagcacaattaaccaaatgtctgcccatttttgtgaagcttacatactagtacagatcatcgatgagttctctatcacctctgagtattagaagcatttgacagggtcttcnnnnnnnnnnnnnnnnnnnnnnnnnnnnnnnnnnnnnnnnnnnnnnnnnnnnntggggaggtctagacacggaaaggtatagtggctcctcacagcccgcgtggtggggcagcagagtggtgctctggccccgcgccgacgccgccttcacattcacacttcttcagtgccaccgcaacactgcatggcaggatctcacgctgaggccaagttcctgtctagtccagaatgaagccagcgtctcacctcttaaagcttcgatgtgtgactcaaagccaacttactctcccaaacttgcaaaacaaacatactgactgaatcttagttgggactatttgcagtatttaagattatttttgagagtcaatctgcttggatttgtagttgtatatgctcaaatccctttggaaaacagtttgaaatgacatgagggacaatgtaattttgagaacagaacacagaaaacaagagttctgagactggcattgaaattgagaatataagctatggtaaaatgagaatcaaatcccaaataaacggagagcagcacttctcaatgtntaaggccacgcacagggcaggcattcagtaagcacttcttggatcaaaagaaactgatgctcctttgagccgcctatcactgacaacaggagctgagacccccgggaaagccagccagggccatgatccccttggcctggggccacggtcacacaaagccactcagccaaatcgtgtagagttatctaggcttacttgctgcaggataaaagttgaactagaacaccaagcattgagctaggaatacccctttgaatgtgtactgctacttataaaaaataggtatgtagctatgattaaatagatgaagggccaaagcatcctatgaggaagtatttttaaaattgtatagatgttcatgcagtgggggacagaaataaagaggttaaagcggtctgtgtttttcggttaaatgaaaggttgtaaatgcatttttaccgctgataagaaggggtacctgctacccccc

SEQ ID NO: 172641 - DNA, 288 bp, Homo Sapiens
gcacagctgaaagaattagtttcggatttatcttctcagtttgtcatctcacctcctgctttaaggagcagacaaaaaaacacatccaataagaacaagcttgaagatgaactgaaagatgatgcacaatcagtagaaactctgggaaagccaaaagcgaaacgaatcaggacgtcaaaaacaaacaagcaagcaaaacacagaaaaagaaagtgcttggtcacctcctcccatagaaattcggctgatttcccccttggctagcccagctgacgtgtcaagagcagg

SEQ ID NO: 172642 - DNA, 656 bp, Homo Sapiens
  misc_feature (176)..(214): n is a, c, g, or t
gcacagctgaaagaattagtttcggatttatcttctcagtttgtcatctcacctcctgctttaaggagcagacaaaaaaacacatccaataagaacaagcttgaagatgaactgaaagatgatgcacaatcagtagaaactctgggaaagccaaaagcgaaacgaatcaggacgtnnnnnnnnnnnnnnnnnnnnnnnnnnnnnnnnnnnnnnngtgcttggtcacctcctcccatagaaattcggctgatttcccccttggctagcccagctgacggagtcaagagcaaaccccaagaaaaacctacagaagtgacaggaacaggtccttggaaggaacagaaagaaactgtcttccctatcccaaagcaaattttacgcagaaaaatgctgtaatttcttgggaagatttttaatgtacaccctatttgtaaagtcatcagaatagtgtggattattaaatatctagtttggaagaaaataatttatataaattattgcaaatttttatgtaaaaagaaggtcttcaataagtaaaagtaactcccatatggagtggattgttttcagtccaggccaatttttctattttatattaagaacttcatacatttatatatgtaaaaatggcttattaatggaatgttaaataaaat

SEQ ID NO: 172643 - DNA, 290 bp, Homo Sapiens
tgtggtaagaagtgggctagggagtaaagaagagggctaatgactgagccctgagactactgatatcatagagtggaatagattgtaatatatacttaaatttcttttgtattggtatcaggaccaaattgactgagcaacatgtaaatagtataacactgaataatgcctttgagatgattataatgttactaggctcttcctgttacttgaatcctcatgtttttgtcactttcctgcctgaagatttctactttctctccattgtttgaggacacctgtatagctag

SEQ ID NO: 172644 - DNA, 361 bp, Homo Sapiens
ctagctatacggtgtcctagtatggtgattaaaaagagtggaataaaaagactattagtgatttgtccaggagatagtaagagaaggctaaagggaaatataacttccttggtttattcatttagtaagtatttattagacatttatgatgttcactgaagtctacaaatgtttcagaagggtctcgtctgaacaaaatctttaaaatgaaaggaggactagccaattggagggaggaaagataccataagagtattttgcaaaggaaattaattacatgcgtaatggtacagagttaagacaagcatgcttaattattgaagaataagagaagcgtagcgtggttggaaaaggagtatga

SEQ ID NO: 172645 - DNA, 198 bp, Homo Sapiens
cgtacttattacagtgtcctaggtgaagtaagtagacaatatggtataaattggggatggtgaagggacataaagaaaagttagtttctaaactggacttgaattaatgttgacagccgtagaatgtaataagtaatgtatatatataatgtgaagcaaccactaaaaatgccatgcatatatgcaaaaactctagag

SEQ ID NO: 172646 - DNA, 208 bp, Homo Sapiens
tgttccttattaagcaagaaattttcaaaataattaattttaatcaaaataatttttctggcaaaattctacatcttggcaacaagacttatcttgctaatttttaaaagtatgtgctttgtaaaacaaagggatactaaagacaaattaagaaaattattttaaatgaatctacagttttggtactcatcttgctgtcaaaaatggg

SEQ ID NO: 172647 - DNA, 213 bp, Homo Sapiens
gggccgagtgagaactaaatgttctgttcggaagaaaggatacatcactcttcattaatctataaagttgtcttagttgggccacaacaaacactcagtgcgttcacaacgtggccacaaaaacatttcactggtctgggtgtgaacgttttttctttacacaggaaaagcagtgcttttcaccccagggggctgggggggcagaagggaatc

SEQ ID NO: 172648 - DNA, 1058 bp, Homo Sapiens
ggggctgctatggaggcgctggccatgggttcccgggcgctgcggctctggctggtcgcacccggtggcgggatcaaatggagatttatagcaacatcgccagcttctcagctgtcaccgacagaattgacagaaatgcggaatgatctctttaataaagagaaagccaggcagttatcattaactccccgaactgagaagatagaagttaagcatgttgggaaaactgaccccggtactgtcttcgtgatgaataaaaacatttcaactccctacagttgtgccatgcatttaagcgagtggtattgcaggaagtccattctggctctggtggatggacagccttgggacatgtataagcctttaacaaagtcctgtgaaattaaatttcttactttcaaagattgtgatccaggagaagtgaataaggcatattggcgttcctgtgctatgatgatgggctgtgtgatagagagggcattcaaagatgaatatatggtcaatttggtcagagctccagaagttcctgtaatttctggtgccttctgttatgacgtagttttggatagcaaacttgatgagtggatgccaacaaaagagaacttacgttccttcacaaaggatgctcatgctttaatttataaagatcttccatttgaaactctggaagttgaagcaaaagtggcattggaaatattttcaacacagcaagtacaaagtagatttcatagaagagaaggcatctcagaaccctgagagaatagtcaagctacacagaataggtgacttcattgatgtgagtgagggccctcttattccaagaacaagtatttgtttccagtatgaagtatcagcagttcacaatcttcaacccacccagccaagtctcatacgaagattccagggcgtgtctttacctgttcacttaagagcacattttacaatatgggataagctattggaaagatctcggaaaatggtaactgaagatcaaagtaaagcaacagaggaatgtacatctacctaataactttctaaaaatttaaatatgtataata

SEQ ID NO: 172649 - DNA, 576 bp, Homo Sapiens
tattacatgttcctccagaagagaaaacctgtctggtcacacgagccagtgtgagtggaggcagtggagtgaggcccacgggcagcgcccaggagcccaccttcccctctggcccagccaccactgcctctcagcttcaacaggtgacaggctgctttcgtgacttgatactggtgtcatagcatttggcctacattaaaagccacaatttcatggggaaaggacaaaatggagagtgactgaggtgctgacctcagtgcaaggctggtgaaccctgcagcgggccagctatggtgggaagcctggcatttggggtgctccttgcaacgtcttaagcaagcgacccccctgacatagcaaaaggtggcaacccatggaggcagaaagaaggacgccagcctgacccttatctgaaacgtcctaagcagagttaatcctggctgctcaggagaggcgacacatttcaaatctccacgagatattctccacacagaaaatcttcttgattctatagagacttaatcatgcctatggctttgaataatcttatgtgatttaaataaattaaatctttat

SEQ ID NO: 172650 - DNA, 968 bp, Homo Sapiens
  misc_feature (497)..(505): n is a, c, g, or t
  misc_feature (795)..(812): n is a, c, g, or t
  misc_feature (837)..(837): n is a, c, g, or t
ctagctattacgggtcctccaaggggacaagaagtttcaagtggctgtggagacaagagcaagaaagaaaatgtggctgcagatatcccaatcacagaaacagaagcctatcagttgctgaagaaggccacccttcaggataatacaaatcaaactgaaaacaggcttcaaaagacagatgcttctgtgtcacacttgtcaggctcgaatattggcagcggtgcattcgagacaaagacagctaacaaaattgcttcggaacccagctcttcatctagtgaaggaagtcctctgtcaaggcatgaaaacaaaaagaaacccgcgatcaatctaaaatctaatgccctctgggatgagtctgatgacagcaactcacaaattgaggctgctttacgccccagaaaccccaataccgatgattctgatgatctttatgactaccgcgctgtgacctctggttccccccaaagtcttctacccccaccgcccttcattannnnnnnnntgcaattttgctcggccgcctccggccactttaccatgttccctacattaattcccccctgcgcccgttggcccccacttagcgcaccgtgaacactggtttaaccctcttgtccccccccattgtaaatttctcgccccaacgccccaaggtgtttgtgacctcccccccctattatactaaactgtcccccctgggtaccccgcaccgctttttgcccaccaccccccaagaagggaggttccccgcaacgtcaattgacgcgggcaacttatccgaggcgggtagtnnnnnnnnnnnnnnnnnnatatttcaaaattaacagtgcgtgncccccgccccacgtctttttccccccccattggttgtggaaatatgcgccacccgatattttccccgcccccaccctgtcgaaattttatcccccccaccccgccgcctttattttaaacctcgcaagggt

SEQ ID NO: 172651 - DNA, 466 bp, Homo Sapiens
tggtgactgggaattgcttgtgtgcatgtgttgggtgcatgcttccgggtctcagctgccccaggcccgcacaggcaaccccttcccatccaaagccattggtggagcttctctggaatcatttgccaaaagcccaaggcagaatccaagggtccaagaccatttccatggagctcatgtttttcttttctgtaggaacttttttttaaccagcacccaccataattccgaaggccacgtttcatctttcctggatcactacagtgaagtattacagttgtacagttcccagtctggccttggcttgctcggataaaactttgtatgtattttgtatggcatagattctatattgtaatgatgtcctatgcaaaaagaaaaattaacgaaattgtaaattttattgttttaacgtgtatgcatgtttagtgacgtttacattttgaaataaaatttatgattcatt

SEQ ID NO: 172652 - DNA, 1211 bp, Homo Sapiens
tagcttattacaggtccttatacaggaggttgggggtggggcagaggcaggaaatacaaaagcccctgcctcgtgggcacagcgccaccaacactacactctgagtatctccaggcagttgttgtagcagatggcgatccagtcgggctgagttgatgcccactgcacatagttgatctctccttcagctgtgtaggccaggatagggtcctcaatggctcggggcatttgctggatgtcccagatgagagcctggtggtcatccgctgcagtgcagatgtggcaggatgaatgtggggcccaagcaatgccattgacacatgctcgatggttgtttaacctggcgacaggtgtgcagcgaacccggacatctagaatcaccacctccattccatccatggccatggtggccaggtagttagggtcctgcttgttccagcagaggcgaagcagtgggtgatgctgtgggtcttcgtaaatgatggtgctgtgttctagatggcggaggtcaaacatccgcaccgagccatcagcacccacagaggcaaacatgtccctgccacccccggcccggctaaatgcaatatcatagacctctttgtcatgggcgatcagctgggtcttcacgtggccagacacgagattcactcgccctaacacctgccctgtctccagcccccagatggtgcatgtcgtatcaatgcttgaggtacctaaaagataaggatccacctcattccagtcaaaggaggtcaggggagcacagaaatcagagttcttattattgtttagcaaacactccagcctggtctctgtttcaccaaccctccacacacggagatagtcaccgcttgttgccagtaggtctggatagacgccttttgtgtcagggatccacatgagctttgtggtggggtatgggtggtcaaaggtgtttctgcaaataaactctgaactctcctcatctaaaccaacaagctgaaccttgttgttgtactcctccacgaagctgcccagcgccaagcgaaagcgcttatcgggccgcacactccagttcatcgcgtagactgtccagggcgcttcatacttgtagatctccttccgtttgccgtgcagggacatggtggccacggggccgcagtacgggccgggtcaacagtgggctgcggcgggcggggagccgagcctgagatctatgggtccgaagggag

SEQ ID NO: 172653 - DNA, 114 bp, Homo Sapiens
cagctgtatttactttatttaaataaatgacaagttttgttggtatgttcaagagaataggaaaatattttaaaatggcactgcagaccgaaaaaggacaccgtaataggctag

SEQ ID NO: 172654 - DNA, 219 bp, Homo Sapiens
tacgggcaggaagaataaagggggaaaaatactaaatcatctgtgtgatattaatatgaattcttattttattccccagtctgccttaactagctgctttatgcatcatccaggttttctggattcagtggaaaagacaaggtagtgtgtgcttattccatctgacttggaattggaactcctggtatatggggaaatcaacaaaaatgttaaaacgta

SEQ ID NO: 172655 - DNA, 257 bp, Homo Sapiens
  misc_feature (15)..(15): n is a, c, g, or t
tgatgccgaggttanctagaggatcccaatcgacgatcaaggtagatcgagatcaagtacggcctattctgcttaccattttaacctagatgtcattctcactcagcaagttctaagtcaaattatgtcactctactgcttaaaatacctactcctcagaataaaatgctctggcgagaaattcttaaaagacccagctcccttctatctttccagactcatttatttctctctcctcttcctttatcacattctgg

SEQ ID NO: 172656 - DNA, 266 bp, Homo Sapiens
ctagctattacaggtctaacagagggaagggggaatgctacagaattcctgaaagaaaaactgtttagaaagtctcccgcctttcactctcactgccagcatgtctgtgtctggaatgctgctaggagaggtagatccagtgcttcagttctgccactccctgaagtaacttagtgtaatagaagtccatgttgtctgcaaagtcagtacaaacaggtgactccatgtcaccgaaagtgcagtataatgcagttcctccaacactg

SEQ ID NO: 172657 - DNA, 316 bp, Homo Sapiens
ctacagaatctattaaaatgttatgaaaaacctctgcaaggagaaacttggaggcattctaaacctgcagctttcacgttgatatacacattggagagaggtgtcaatagtccaaatgagacaaagaattgtaataattttcaataatttttgttctcttcatttacctatctaccccaaagtttaacaataagttatgtgtgtcattctcatgaaacctttgtgatttgtattccctgtccacaaactgttagttacctaatggtttcctttcaatcaatcctttaagattaaaatattatccataaggaacacc

SEQ ID NO: 172658 - DNA, 1333 bp, Homo Sapiens
  misc_feature (1163)..(1172): n is a, c, g, or t
ggggggaggagccgccgcgtcccctcgccgagtcccctcgccagattccctccgtcgccgccaagatgatgtgcggggcgccctccgccacgcagccggccaccgccgagacccagcacatcgccgaccaggtgaggtcccagcttgaagagaaagaaaacaagaagttccctgtgtttaaggccgtgtcattcaagagccaggtggtcgcggggacaaactacttcatcaaggtgcacgtcggcgacgaggacttcgtacacctgcgagtgttccaatctctccctcatgaaaacaagcccttgaccttatctaactaccagaccaacaaagccaagcatgatgagctgacctatttctgatcctgactttggacaaggcccttcagccagaagactgacaaagtcatcctccgtctaccagagcgtgcacttgtgatcctaaaataagcttcatctccgggctgtgccccttggggtggaaggggcaggattctgcagctgcttttgcatttctcttcctaaatttcattgtgttgatttctttccttcccaataggtgatcttaattactttcagaatattttcaaaatagatatatttttaaaatccctggcaaaactgttcccaaggaaatcctgcttgtcggtcgccttggccctcccacaaattactagacccttcggtaggcgcgctttcccaacacgtaaatgagcatgttcatagccgtttccgaggagatcttgggcatgactactggttgcattctcactaataaccaccgcccggcggtaaccgagtgctggtgacaaatcctaatggcatttcggaggcctttaacccatcctatcaccggggaggcgaacgcgaacctccatatcggatttaggcccctgggccggccctctcataaaaaaaaccgggccggtagtttcaaaaaccgcgttgcccgcccgaacttggtaaaaccttttcccccaaccggttatagaatgaaaaccctggggaatccccctcccgccccagtgaattcccctttgggcccctcttagaccttttatttccttttttcccccctcgctttaaagaacacagaggcgcaagcaacccttttcccaatgattcccgctccgcccttcaagaaccacaaatcggggggaaaannnnnnnnnngggaattttgccccgcaggacgaaacaaaccctttttctccaatacaaacgcctctcacgccaaagcccgcgcgaaccacccccccgccaaaaattggggttaaatccctttttcacaattatactccgttaccaccacccgcctttccacatgccccttg

SEQ ID NO: 172659 - DNA, 1053 bp, Homo Sapiens
  misc_feature (958)..(958): n is a, c, g, or t
gagcgaggcctgggtggcgaattcggcacgaggcaaattcccaggtatctgggctcatggcgactactgcagaatcaaccccaagaccgggggcatcgtcatgcttggccggagtgacggcaccctcaaccccaacggggtgcggttcggcagctcggaaatctataacattgtggaatccttcgaggaggtggaggacagcctgtgtgtcccccagtataacaagtacagggaggagagggtgatcctcttcctgaagatggcctccgggcacgccttccagcctgacttggttaagaggatccgtgacgccatccgcatgggcttgtctgcgcgacacgtgcccagcctcatcctggaaaccaagggcatcccgtatacgctcaacggcaagaaagtggaagttgccgtcaaacagatcatcgctggaaaagccgtggagcaaggaggtgctttctcgaaccccgagaccctggatctgtaccgggacatccctgagctgcagggcttctgagtcagactggctggcgtgtcactcagccgcacccgtgtgcactgtaacttttgtgtgctcaagaaattatacagaaacctacagctgttgtaaaaggatgctcgcaccaagtgttctgtaggcttggggagggatcgtttctctgttttgttaaatctggtgggtacctggatcttccacacgagtgggattctggccttcagagaccaggagggagtgtctgggccgcaggtgtggcactgtggtgagagtgtgtgtctttgcacacacagtgcagcggggacggtggggctggctggtgctgaagacagacacactcctgagcccaagtcttgtcttcaacctccccgtccccgttgtcccatttttgctctgtggaggtgcaaatccccttttcttcctttcccatctcagggttctcctgttttcccttcagggtccagntatggcctttggagctttaacctggtaagaaaagaaacccccctggacttgacacagcctttccccagctggctggctaggaaccggccggggtt

SEQ ID NO: 172660 - DNA, 1545 bp, Homo Sapiens
  misc_feature (119)..(130): n is a, c, g, or t
  misc_feature (162)..(180): n is a, c, g, or t
  misc_feature (271)..(271): n is a, c, g, or t
  misc_feature (300)..(300): n is a, c, g, or t
  misc_feature (320)..(343): n is a, c, g, or t
  misc_feature (345)..(345): n is a, c, g, or t
gggcggtgagggttacgaagccctctctttatttcttaccgccgagggtgtttctttggtggggagaccaacgcataggtgtccgagttcttttcttttttctcgtacacggggcccgnnnnnnnnnnnnaaaaataatgttgttacgaaaagaatttcttnnnnnnnnnnnnnnnnnnnccgcgacaattttctttcctctctttcttgttcgtcctttgttcggtgccctggcgtgcctctcttgtttttttggggtggttgttctctnttttttctgtgtcggtcgcggccttcgtntgcgtgttgttgtcccttgnnnnnnnnnnnnnnnnnnnnnnnntngcatgtgcacacatgtatacatttattgcataaaattcatcatagcactttcccccatatttttataatccaaaaggaaaatgattcaagaaaggatttcattgtgctcagtttcaaaaaatataaaaatggacatcagattagagatacaagttcatacgctgaactgaattgtacataccaactgcctggctatggaaacccgtgacttgacttaggggtgctgatgacatgatctcgacaagaaccccctagcaactctcaggtggaggcagcacagggatgcggttcctggtgaggagggtcctcactcggtgaccacactgcctgggctcacagctggagggctcacccatgagggacacgggtggacacccactgcttcacatgcctaattcacattagaaacatgtaaagccattcagtctgtgcaataaagagatcctgtatgaaatccactcattccttggagggaagctggcccggaggcacgctctggttgacgggtgacgcacagtcctccagggcctgcattgcatccatgacacagacacacgtgaacacccagcccgccggtcctagcagccagctgtgaaagctgtgtcaagtcacgggggttcctttctaacagctaaagctcaaaggcatactggaccctgagggaaaacaggagagcctgagatgggaagggaagaaagggatttgcaccttcacagagcaaaatgggacaacgggacggggaggttgaagacaagaccttggctcaggagtgtgtctgtcttcagcaccagccagccccaccgttcccgctgcactgtgtgtgcaaagacacacactctcaccacagtgccacacctgcggcccagacactccctcctggtctctgaaggccagaatcccactcgtgtggaagatccaggtacccaccagatttaacaaaacagagaaacgatccctccccaagcctacagaacacttggtgcgagcatccttttacaacagctgtaggtttctgtataatttcttgagcacacaaaagttacagtgcacacgggtgcggctgagtgacacgccagccagtctgactcagaagccctgcagctcagggatgtcccggtacagatccagggtctcggggttcgagaaagcacctccttgctccacggcttttccagcgatgatctgtttgacggcaacttc

SEQ ID NO: 172661 - DNA, 1560 bp, Homo Sapiens
gggatacccaagacatggagaatatgagtgatgatgatggttgggaatttgtgaaccttggagatcagcaaagctttggtattaaaactgcaggactagaagaaaaatcaactgcttgccagatgttggtttgctatgctaaggagttaaaggaaggctttgtggagtacaccgaacaggttgtcaaactgatggtccctttactgaaattttatttccacggtggtgttcgagtggcagcagcggaatccatgcctcttctcctggagtgtgcaagagtccgtggtcctgagtatctcacacagatgtggcattttatgtgtgatgctctaattaaggccattggtacagaaccagattcagacgtcctctcagaaataatgcattcgtttgcaaagtgcattgaagtaatgggagatggatgctcttaataatgaacactttgaagaactgggaggtatattgaaagcaaagcttgaagaacattttaaaaaatcaagaattacgaccagttaaaagacaagatgaagactatgatgaacaggtcgaagagtcactacaagatgaggatgataatgatggttatattctgaccaaagtgtcagatattttacactcaatattcagtagctacaaagaaaaggtgttaccatggtttgaacagctgcttccattaattgtcaacctcatttgtccacatagaccatggccagacagacaatggggattatgcatctttgatgatgtcatagaacactgtagtccagcctcatttaaatacgcagaatatttcttaagaccaatgctccaatatgtatgtgacaacagcccagaagtcaggcaagcagctgcatatggcctgggagtcatggcacagtacggtggagataattatcgccctttttgtacagaagcacttcccctgctggtaagagttattcagtctgcggattctaagaccaaagaaaatgtcaatgctacagagaactgcatctcagcagtagggaaaatcatgaagttcaagcctgactgtgtaaacgttgaagaggtccttccacactggttgtcttggcttccactacatgaagataaagaagaagctgttcagactttcaattatctgtgtgacctgattgaaagtaatcatccaattgttcttggcccaaacaataccaatctgcccaaaatatttagtataattgcggaaggagaaatgcacgaggcaattaaacatgaagatccttgtgccaaacgtctggccaatgtcgttcgccaagtacagacttctggaggactgtggactgagtgcatagcacagctcagtcctgagcagcaggccgccattcaggagctcctgaactctgcgtgaagggccttaatgtcacccaccagaaaactaactccaaataaacgcttaccctttcctttaggtttctttgttttgtttttgagcaaaagagatcggtagtgttgtgtgtaggccattcttctggagagccacaagcaggatgagcagcgctgtgttgcagaatggagtttccgtggatttctaccagacca

SEQ ID NO: 172662 - DNA, 352 bp, Homo Sapiens
ctacattacagtgtcctacgactgatggattatgtattcatggggatatgtaagtgggacatggacactgtatgtttaccgtactgtgagatgtggtacaggtcaagtgagtgaggtaagacagatccagaagaaaaggctaggtggatcaggtcatcttcctctcacatgggaataaggccgtccatacatcccctcttcttgactctcatcactctagaaaggggggtgggcgtcaattatctaatgggaagggaaaatcaggggacatgaactggcccctacacagaagtcaacaccagcagggatacaaatggagctcctgcaaacgtggctccacgttgtcccagta

SEQ ID NO: 172663 - DNA, 337 bp, Homo Sapiens
gctacaaaatgcatttatttccagtcagacaaaattcttgaactgtatattcgggtacatattataaggtcatctttgatatatgccctgtttacaagatccatttctaattattaaagtgaatatcaaacacacatctttgcatcttaaaacataaataaactgctaatgtttataagccacaaatctggtcactgacatgagtggcctgcaattcttcagtgatgagcacacggcgatacagacaagatcagattacccaggtaggcaggcagcaggcacctgtaattcacccgctgactgtgctgttgtggcagtgacccttcttgtgaaaaaa

SEQ ID NO: 172664 - DNA, 972 bp, Homo Sapiens
  misc_feature (407)..(429): n is a, c, g, or t
  misc_feature (797)..(797): n is a, c, g, or t
  misc_feature (803)..(803): n is a, c, g, or t
  misc_feature (805)..(864): n is a, c, g, or t
gtctaggtacgaggcctgggtggcggtaacgttgggccaggcgggcatgcacgcaacatactaccacaaagccagtgaccagctgcaggtgggtgtggagtttgaggccagcacaaggatgcaggacaccagcgtctccttcgggtaccagctggacctgcccaaggccaacctcctcttcaaaggctctgtggatagcaactggatcgtgggtgccacgctggagaagaagctcccacccctgcccctgacactggcccttggggccttcctgaatcaccgcaagaacaagtttcagtgtggctttggcctcaccatcggctgagccctcctggcccccgccttccacgcccttccgattccacctccacctccacctccccctgccacagaggggagacctgagnnnnnnnnnnnnnnnnnnnnnnntgggggtcgggggggacattggaaaggagggaccccgccaccccagcagctgaggaggggattctggaactgaatggcgcttcgggattctgagtagcaggggcagcatgcccagtgggcctggggtcccgggagggattccggaattgaggggcacgcaggattctgagcaccaggggcagaggcggccagacaacctcagggaggagtgtcctggcgtccccatcctccaaagggcctgggcccgccccgagggggcagcgagaggagcttccccatccccggtcagtccaccctgccccgtccactttcccatctcctcggtataaatcatgtttataagttatggaagaaccgggacattttancagaanannnnnnnnnnnnnnnnnnnnnnnnnnnnnnnnnnnnnnnnnnnnnnnnnnnnnnnnnnnnctccgaggcaatctattgtcgggggtgccggagaaaaagaggtaattggaaatggccacaatggggccataagcctggtttcccctggaccccagccttttctttgga

SEQ ID NO: 172665 - DNA, 717 bp, Homo Sapiens
gaagtgcaaggagctgtttcccattcagatggagggtgtcaagctcacagtcaacaaagggttgagtaaccattttcaggtcaaccacacagtagccctcagcacaatcggggagtccaactaccacttcggggtcacatatgtggggacaaagcagctgagtcccacagaggcgttccctgtactggtgggtgacatggacaacagtggcagtctcaacgctcaggtcattcaccagctgggccccggtctcaggtccaagatggccatccagacccagcagtcgaagtttgtgaactggcaggtggacggggagtatcggggctctgacttcacagcagccgtcaccctggggaacccagacgtcctcgtgggttcaggaatcctcgtagcccactacctccagagcatcacgccttgcctggccctgggtggagagctggtctaccaccggcggcctggagaggagggcactgtcatgtctctagctgggaaatacacattgaacaactggttggcaacggtaacgttgggccaggcgggcatgcacgcaacatactaccacaaagccagtgaccagctgcaggtgggtgtggagtttgaggccagacaaggatgcggacacagcgtctcttcggtacagtgactgccagcactctctcagtcggacatgactggcctgaatccgcgagtgtcgacaatagtgcggcgccccca

SEQ ID NO: 172666 - DNA, 925 bp, Homo Sapiens
ggtatgcactctatgaagaattggaggcaaaggatcctgagaggacaagacaggtgtatcaagcctctttggaactaattcctcacaaaaagttcacatttgccaaaatgtggatactgtatgcacagtttgaaatacgacagaagaatctgtcattagccagaagagcattgggaacttccataggcaaatgtccaaagaacaaattatttaaagtttacatagaattggagctacagcttcgagaatttgacagatgccggaagctttatgaaaagttcctggaatttggacctgaaaattgtacctcatggattaaattcgctgaattagagacaatccttggtgatattgacagagcacgggcaatctatgaattagccatcagtcagccacgtttagacatgccagaggtgctttggaaatcatatattgattttgaaattgagcaggaagaaacagaaagaacacgaaacctttaccggcggttgcttcaacggacgcagcatgtcaagggatggatcagctttgctccagtttgagttgtcttcaggaaaagaaggaagtttgactaaatgcagacaaatttatgaagaagctaacaaaaccatgcgaaactgtgaagaaaaggaagagagacttatgctgctggaatcttggcgaagttttgaagaagaacttggaacagcttcagataaggagagagtagacaaactcatgccagagaaagtcaagaagagaagaaaggtccagactgatgatgggtctgatgcaggctgggaagaatactttgattacatctttccagaagatgctgccaccaacctaacctcaaactcctggccatggcccaactgtggaagaaacagcgtcgaaaaggaggatgctgagcaccatcctgatgggacgagatgcggtaccggct

SEQ ID NO: 172667 - DNA, 849 bp, Homo Sapiens
  misc_feature (106)..(122): n is a, c, g, or t
ggggaggccgtgggtacgaccggaagccgcagcatgctgatcccattttcaatgaagaattgcttccagttactttgtaactgccaggtcccagcagctggctttnnnnnnnnnnnnnnnnntgggctcattttacagtcaatttccaatgatgtctatcaaaatctggctgtggaagactggatccatgaccatatgaatctagaaggcaaaccaattctattcttttggcagaattctccctctgttgtaattggtaggcatcaaaatccttggcaggaatgtaacctgaatctaatgagagaagaaggtataaaactggctcggagaagaagtggaggaggcaacagtctaccatgatatgggtaatatcaatttgactttctttacaaccaaaaaaaagtatgatagaatggaaaatctgaaattaattgtgagagctctgaatgctgtccaaccccagctggatgtgcaggctaccaaaagatgtgaccttttacttgatggacagtttaaatatctcaggaacagcttctaagatcggccggactactgcctatcaccattgcactttattatgtagtactgatggggacgttcttgtcttctttgctaaagagcccttaccaagggatcaagagcaatgccactgctagcatacccttccttagtgaaaaaatcttttgggaaaaagatcccccctctggacctgtgaaagtactaattggaatgcctggtgcctaccagagtatgcctggcttatccatccaaattggataaatccacctttccacccttaataaaaaccccaaccggggatggaagaaacacctgggttttcccctgggc

SEQ ID NO: 172668 - DNA, 1011 bp, Homo Sapiens
gcctcagggtcacagaaagcaaagggcactcagaatcatggcacctaagtctggacaccgccatcagggttgcattggctgtcgctgtgctaaaaactgtcattttgggactgctgtgcctcctcctcctgtggtggaggagaaggaaaggtagcagggcgccaagcagtgacttctgaccaacagagtgtggggagaagggatgtgtattagccccggaggacgtgatgtgagacccgcttgtgagtcctccacactcgttccccattggcaagatacatgcgagagcacccctgacgacctttaaaaggcaaagcccgcaaggccagaagggaggctgggttcccgtgaatccccggactgggaggaagaagttaccctaacaaggagccctttccatcccagggaaagcactcccaccgcttgcccaatggataatcaggcaaaacggaggggtccctggaaccttcccccccttggaacatttaaaaacccgaccctggccgccagtctttgtgggagggggggccgtaggcgcttttaactcttgagatagcagcccaaacgccctgagcccaagaagaactaagcggctgtcgcccccccgctttttcttaaagtatcccctccgtgtcccctcgccccatatagagggggaatatttggggggcgcgactagagaacccaggtgcccggcgcaacacgggctgtcaactactctcgtgtcttcgcgctctcgttgcatacccgcttgaggcatgcgcgcggcgtctgggcgagtcactcgcggcccggcgtggacctaggagcgcagcgtgggtgcccgcctacacgtacgaggagagctctgggggtgagggcggcgcagcggagatccggggccccccagcgcagctctgcgccactgtggtgcgcggagaatcccgccggcccgagcgccgcgatcgcgcacaacgatggacagaccgcccccagagagcgctccatctgacttctctatcccacagaaca

SEQ ID NO: 172669 - DNA, 529 bp, Homo Sapiens
cagcgtaagtacgtaactctccgacatgagcttctggatgagggtgctaagttgctgcacacaactttgagacaccccaagtgctttctgcagaggttgtcgttggaaaactgtcaccttacagaagccaattgcaaggaccttgctgctgtgttggttgtcagccgggagctgacacacctgtgcttggccaagaaccccattgggaatacaggggtgaagtttctgtgtgagggcttgaggtaccccgagtgtaaactgcagaccttggtgctttggaactgcgacataactagcgatggctgctgcgatctcacaaagcttctccaagaaaaatcaagcctgttgtgtttggatctggggctgaatcacataggacgttaagggaatgaagttcctgtgtgaggctcttgaggaaaccactgtgcaacttgagatgtctgtggttgtggggatgttccatccctccgttcagttgtgaagacctctgctctggcctcagctgccaccagaagctcgtcactctgga

SEQ ID NO: 172670 - DNA, 495 bp, Homo Sapiens
ggggaacactgcccggggagtttcttcctctgcaaaataagggagtgtgtactgaattaccgtttccagctccaacatccaggatttcagcactacctgcagagtagtgggaggagagatagaggaagaagtgaagataagaaaccactcgaagccggtgtctggtgctgggaccgtggtggctgggacggcagcagtcgtgctgtccatctgctcttccgaggggtggcacatcctagcctctatcttttccccagagaagatccccctcgtctgctcttcccccgtctcagccttttagtgtgtgaacagttctggtgttactcagcaacgcttttgttagcgcctttaccagcaagtacttgttaaacacttaaatcttacaagtggaaagaaaattccgtggtaaatttaagtacaaaagtcaaccaaaattctgagtctcggacaagactggttaaaaatcgttctacaatgaaactaataaattaaatc

SEQ ID NO: 172671 - DNA, 334 bp, Homo Sapiens
  misc_feature (111)..(137): n is a, c, g, or t
ctgagtttgagatgcctttgagaaatgaaagaagtagagagagaattaaaaactgagccaccgtgcccggcccaaaggggaaactcttgtgggaggagcagaggggctcannnnnnnnnnnnnnnnnnnnnnnnnnnattgccttatctctccccatctagccaggaatctattgtgtttttcttctgccaatttactatgattgtgtatgtgccgcttaccaccacaccccccatgggggaatgcagaggggtgcaaggccctgcctgctccactttttctaccttggaactgtattagataaaatcacttctgtttgttcagttaaaaaaaa

SEQ ID NO: 172672 - DNA, 833 bp, Homo Sapiens
  misc_feature (471)..(709): n is a, c, g, or t
ctcattcaagagagccccaccctgagcaagctggccgccattactgtcctccagcccttctactatttggtgcaacagaccatccactggctcttcatgggttactccatgactgccttctgcctcttcacgtgggacaaatggcttaaggtgtataaatccatctatttcctcggccacatcttcttcctgagcctactattcatattgccttatattcacaaagcaatggtgccaaggaaagagaagttaaagaagatggaataatccatttccctggtggcctgtgcgggactggtgcagaaactactcgtctcccttttcacagcactcctttgccccagagcagagaatggaaaagccagggaggtggaagatcgatgcttccagctgtgcctctgctgccagccaagtcttcatttggggccaaaggggaaacttttttttggagaaggcgtcttgctttgtcannnnnnnnnnnnnnnnnnnnnnnnnnnnnnnnnnnnnnnnnnnnnnnnnnnnnnnnnnnnnnnnnnnnnnnnnnnnnnnnnnnnnnnnnnnnnnnnnnnnnnnnnnnnnnnnnnnnnnnnnnnnnnnnnnnnnnnnnnnnnnnnnnnnnnnnnnnnnnnnnnnnnnnnnnnnnnnnnnnnnnnnnnnnnnnnnnnnnnnnnnnnnnnnnnnnnnnnnnnnnnnnnnnnnnnnnnnnnnntgagccaccgtgcccggcccaaaggggaaactcttgtgggaagagcagaagggctcacatctccccctctgattcccccatgcacattggccttatctctccccatctagccagggaatctatt

SEQ ID NO: 172673 - DNA, 453 bp, Homo Sapiens
  misc_feature (364)..(364): n is a, c, g, or t
  misc_feature (369)..(369): n is a, c, g, or t
  misc_feature (400)..(400): n is a, c, g, or t
  misc_feature (408)..(408): n is a, c, g, or t
  misc_feature (413)..(413): n is a, c, g, or t
  misc_feature (428)..(428): n is a, c, g, or t
  misc_feature (442)..(442): n is a, c, g, or t
acggcctgcactcaggatacctggtctgcttccagatggaattcctcattgttattgtggaaagacaggctgccaggctcattcaagagagccccaccctgagcaagctggccgccattactgtcctccagcccttctactatttggtgcaacagaccatccactggctcttcatgggttactccatgactgccttctgcctcttcacgtggggacaaatggcttaaggtgtataaatccatctatttccttggccacatcttcttcctgagcctactattcatattgccttatattcacaaaggcaatggtgccaagggaaagaggaagtttaaaggaaggtgggaattattccattttcccngggtnggcctgtggcggggattgggtggcaggaaantattcgtnttccnttttcacagcattcntttgccccggggcngagatgggaaa

SEQ ID NO: 172674 - DNA, 934 bp, Homo Sapiens
  misc_feature (138)..(376): n is a, c, g, or t
ggcagaagaaaaacacaatagattcctggctagatggggagagataaggcaatgtgcatgggggaatcagaggggagatgtgagcccctctgctcctcccacaagagtttcccctttgggccgggcacggtggctcannnnnnnnnnnnnnnnnnnnnnnnnnnnnnnnnnnnnnnnnnnnnnnnnnnnnnnnnnnnnnnnnnnnnnnnnnnnnnnnnnnnnnnnnnnnnnnnnnnnnnnnnnnnnnnnnnnnnnnnnnnnnnnnnnnnnnnnnnnnnnnnnnnnnnnnnnnnnnnnnnnnnnnnnnnnnnnnnnnnnnnnnnnnnnnnnnnnnnnnnnnnnnnnnnnnnnnnnnnnnnnnnnnnnnnnnnnnnnntgacaaagcaagacgccttctccaaaaaaaagtttcccctttggccccaaatgaagacttggctggcagcagaggcacagctggaagcatcgatcttccacctccctggcttttccattctctgctctggggcaaaggagtgctgtgaaaagggagacgagtagtttctgcaccagtcccgcacaggccaccagggaaatggattattccatcttctttaacttctctttccttggcaccattgctttgtgaatataaggcaatatgaatagtaggctcaggaagaagatgtggccaaggaaatagatggatttatacaccttaagccatttgtcccacgtgaagaggcagaaggcagtcatggagtaacccatgaagagccagtggatggtctgttgcaccaaatagtagaagggctggaggacagtaatggcggccagcttgctcagggtggggctctcttgaatgagcctggcagcctgtctttccacaataacaatgaggaattccatctggaagcagaccaggtatcctgagtgcaggccgtcctgtgccgaa

SEQ ID NO: 172675 - DNA, 243 bp, Homo Sapiens
gtccaacacaaatactgtagacctctataattcaaacagcaaatagcttaatatggacaacatccatgtgctacagctaattttagacacaaactgatggtttcaaacatgctattttaaaacaagaacatcccacatctccaaatcttaatttggttaattttgtcaataaattaaaatgtatgtaatgtgcatatgtatatacaactttagaagagtgtatttatgtatatacacttatct

SEQ ID NO: 172676 - DNA, 1029 bp, Homo Sapiens
  misc_feature (956)..(956): n is a, c, g, or t
  misc_feature (965)..(965): n is a, c, g, or t
  misc_feature (983)..(983): n is a, c, g, or t
  misc_feature (988)..(988): n is a, c, g, or t
  misc_feature (1015)..(1015): n is a, c, g, or t
aggacgaggcctttgcttgtgcaaccagacaggtcagggctgatgatgttcaagcgcatgaagacagtcctatggcttcctggtcttgagacccggtcttgggacgcagggctaccgtgcagctgagggtgccggttttgggtatgggtactgtgtagaagtggaggaggaagctgaagcgcgggtcaccctcggggcttggggacagcaggctcacacagttgcccttggccgcccggccctgggatgagttccacggtgcctccctcaggccccaagtccaggtggcagctgtctaactggagcaggaactcggagacggatggggacactctgacctgcacaaagctctgctgccccggctcgattggtgttggaggcctggaggaagtgtgggctgaggtagaggcccagctggaaagagaggctgtccatgttgaggcaagtgcacctttttccgctgtggtgatgagctcgacaggatattgaccaccgcctcattgctgatcatacttgctgacacctgcatgccacagctggagtaagcactgtcgcaagacaaacttgtcacccctgtcctctgcctcacagctggggtcccagaaggtcaggcccgtgatggtgcacttcaaatgcgcaacaagctctttctttagtaccagggtcatggcgtcgtcggcacactttgtctggatcaaggacatgagcagctccgggtctacaagtgtccttgggaggagtggtctggatcggtgcgggtgaggtctgcagcctaccatccgcagctggaggcatgaagtgagacaatgctggccagcggtagctccacgaaggatgccacaatgctggcattgagcatccgggcctcccccaggaagcctttgaggtgtgtctggggagcttgaagccacgaatgtttttctctgggaaagatcttgaaggagtattctccagtngtccagatntgcatgttgtggttggcntcgangagccaggacactagggggggaccttncaggatgaggacgg

SEQ ID NO: 172677 - DNA, 454 bp, Homo Sapiens
  misc_feature (39)..(39): n is a, c, g, or t
  misc_feature (320)..(320): n is a, c, g, or t
  misc_feature (437)..(437): n is a, c, g, or t
gttactccagccttggaccggggctgccacttggagagncgtggcgaccacaaggaggcgcacatcctgagggtcctgccgggccactcggcgggccccggacgggtgacggtgaaggtggaactgagctgcgcacccggggatctcgatgccgtcctcatcctgcagggtcccccctacgtgtcctggctcatcgacgccaaccacaacatgcagatctggaccactggagaatactccttcaagatctttccagagaaaaacattcgtgggcttcaagctcccagacacacctcaaggcctcctgggggaacccgggnatgcttcaatgccagcattgtgggcatccttcgtgggagcttaccgctgggccagcattgtcttcactttcattgccttccagcttgcggttggtagggttgcagaccttaacccgnaccgtttccagaccatt

SEQ ID NO: 172678 - DNA, 210 bp, Homo Sapiens
tgttctgggggaataattatgttccctgtcttgggagcctttcttcagggagcttgatggttccaacccacccaggagcctgggacatctgtgcccctgggcaatcccctgcagtttcctgattccaagatgagggggtagaatccgaagattctccaaggccttgatgagtgctaccagtctgctaatccccaggagcagtactaccgg

SEQ ID NO: 172679 - DNA, 966 bp, Homo Sapiens
  misc_feature (124)..(124): n is a, c, g, or t
  misc_feature (265)..(265): n is a, c, g, or t
  misc_feature (580)..(580): n is a, c, g, or t
  misc_feature (781)..(917): n is a, c, g, or t
aaaggaagagagcaaagcagatcggacgtccaacatcatccggagcaggtcctgggaccagtggacgcgaagcgttcgcgtgaagtgcccaccacgctggcgaagtatgcgtgaagacaaggcnccggcgcccacaagggttcagcttcttctacgacgactactacagggcggcgaggtggaagaaggagcctgcagcttgctcggggtacgatgagtatgattctgcacggaagaagtcttgacccaccagaataaacttgcngagtttacctcactagggccggacccgtggctccttagacgacagactacctcacggaggttttgtgctggtccccgtctcctctggttgtttcgttttggctttttctccctccccatgtctgttctgggttttcacgtgcttcagagaagaggggctgccccaccgccactcacgtcactcggggctcggtggacgggcccagggtgggagcggccggcccacctgtcccctcgggaggggagctgagcccgacttctaccggggtcccccagcttccggactggccgcaccccggaggagccacgggggcgntgttgggaacgtgggcggggggccgtttcctgacactaccagcctgggaggcccaggtgtagcggtccgaggggcccggtcctgcctgtcagctccaggtcctggagccacgtccagcacagagtggacggattcaccgtggccgactcttttccctgctttggtttgtttgaaatctaaataaaactactttatgagagnnnnnnnnnnnnnnnnnnnnnnnnnnnnnnnnnnnnnnnnnnnnnnnnnnnnnnnnnnnnnnnnnnnnnnnnnnnnnnnnnnnnnnnnnnnnnnnnnnnnnnnnnnnnnnnnnnnnnnnnnnnnnnnnnnnnnnnnngaactgtggggcccccccgccccccaaaaattttttaaaaccttttttt

SEQ ID NO: 172680 - DNA, 1082 bp, Homo Sapiens
ggcctgggtggcgattcggacgaggtgatctcctcctcccccgccggtggacgacccccagagcggggagctgccctcagagaggtggaaccccacgcagaacgtcaggaccattctcctgagtgtgatctccctcctgaacgagcccaacaccttctcgcccgcaaacgtggacgcctccgtgatgtacaggaagtggaaagagagcaaggggaaggatcgggagtacacagacatcatccggaagcaggtcctggggaccaaggtggacgcggagcgtgacggcgtgaaggtgcacaccacgctcggccgagtactgcgtgaagaccaaggcgccggcgcccgacgagggctcagacctcttctacgacgactactacgaggacggcgaggtggaggaggaggccgacagctgcttcggggacgatgaggatgactctggcacggaggagtcctgacaccaccagaataaacttgccgagtttacctcactagggccggacccgtggctccttagacgacagactacctcacggaggttttgtgctggtccccgtctcctctggttgtttcgttttggctttttctccttccccatgtctgttctgggttttcacgtgcttcagagaagaggggctgccccaccgccactcacgtcactcggggctcggtggacgggcccagggtgggagcggccggcccacctgtcccctcgggaggggagctgagccccgacttctaccggggtcccccagcttccggactggccgcacccccggagagccacgggggcgctgctgggaacgtgggcggggggccgtttcctgacactaccagccttgggaggcccaggtgtaagcggttccgaggggcccgggtcctgcctgtcaacctccagggtccctggagccacgttccgcacaaaatgggacgggattcccccgggcccaactccttttccctggcttggggttggtttgaaatcttaaataaaactacttttatggggagaatgaacggaaatcttcgaggctttctattccggggggcggaaaaagaaggtatggaaatgggcacctggg

SEQ ID NO: 172681 - DNA, 661 bp, Homo Sapiens
  misc_feature (592)..(592): n is a, c, g, or t
  misc_feature (597)..(597): n is a, c, g, or t
  misc_feature (605)..(605): n is a, c, g, or t
agaccagttgagggctgagaggtttcagacatgacgcccccgtgccccaagttcatccgtgtacagtgcccaagggcagagacatgttcctctagaaccatcgttcattcgtcagctctcggaaacaaagcactggtactgtgctgagcactgtggcaccggctctgctgggctcctggatgctccaaggccctgctccctggctgactgcccattttctgtcctcctcccggcttcaggtgcgagacaagaagcttctcaatgacctgaatggagccgtggaggatgcaaagacggcccggctgttcaacatcaccagttctgccctggcagcctcctgcatcatcctcgtcttcatcttcctgcggtaccccctcaccgactactaaggcccgccaggcacggctgctggcggagacaagcactgagacatgtttattctcatggtccctgaaacgcaggatcccatgaggttggggcagggcagggcttcttgtcctggggcccccttgagctgtgaactgggcagcaaggccatcagaagctgagtacagcaagggggcagtgagcttggccctcagtccaccccctncgctnctggcctncgcctgctgtgtctggggcctgggggcttctccctcgctgctgaccctggctttca

SEQ ID NO: 172682 - DNA, 307 bp, Homo Sapiens
gcagaaaacacaagtgagaaaccctagatgggcactgccacctgacccagctatacagcaggacctgaaaggatcacactgcatcctaggacaaagctcaaaagtacctctgggactacaaaaatattcagtgcccaagaaggtaaaatgtacaatgtctagcatccagtagagaggcatgaaaagcaggaaaatacattgcataacacacacaaaaattaatcacaactgacctggatctcagatgctagaaatagtagacaaagatgttatttcccacgtgaagtcctacggggatactctaggg

SEQ ID NO: 172683 - DNA, 449 bp, Homo Sapiens
tgtcatatgacactcattaggtggcaaaaatttttttagaagtggtaagttagtcccaaaacagtttataggaaatacggatgtagcctcagtctagatgaacagattagcctcagtctagatgaacaggctggctggaatactaactaaattcatgtgaataaaatatgtataggccacggaagcagatccaacaatttaagcagttcccaaagtagtgacaatctgggtcagacttagaaatgaattatttttccatcttccttgggctacctacacaaaagcctctagacttgacaaatttgactattatagaagctatttgttttggcccagttatattgtttaaggttttatctgttctggtcaagattaactgtaatgcagggttaaaaccagctactcgagagtcatgtattcttttgcgaaccaggggataactctagagt

SEQ ID NO: 172684 - DNA, 469 bp, Homo Sapiens
  misc_feature (186)..(196): n is a, c, g, or t
ctggtagggtatgctctgatggggctttttaagcagcaaacccctttctttcatgcagcttcccatatgaagtaagcatgtcccacaagtggggacctggccatgggactctggtttgccattattaggacaaataggatcttagcgtgacaagagcagacactgttcaagcacctcaaaacattnnnnnnnnnnnttatccccacaaatgacttattaatgacagagaagaaaatgtacctgcaatggggcgatctggcagacacttcccaatcaagtcatcaaattcagcagcctccaaagtggggccaccaaacatgatgtcctcggctcctgaagggaggcactggaagacacagcatcacttgagccatgtgctcccccaacatgcttcagctggatgtgctcctctctaggaacacctacgaggaatccagtgaattccctggtcgtcgttggatactctgga

SEQ ID NO: 172685 - DNA, 433 bp, Homo Sapiens
  misc_feature (11)..(11): n is a, c, g, or t
  misc_feature (420)..(420): n is a, c, g, or t
aatgaaaaacnagcagtttgtggctgaaggccctggaaaaaggggacccttcctctgttgaaggacccaggtgaaatctgtcatggagcagaactgggatgagctggccagcagtcctcctgacatggactatgaccctgaggcacgaattctctgtgcgctgtatgttgttgtctctatcctgctggagctggctgaggggcctacctctgtctcttcctaactacaaaagccctttctccccacaagcctctgggttttccctttaccagtctgtcctcactgccatcgccactaccatcctgtcaccagtgggacctctttaaaacaagcagccaaccattctttgatgtatcccattcgctccatgttaacatccaaaaccagcctggatttcatacatggacttctgattaaaanaagcaggttgtgc

SEQ ID NO: 172686 - DNA, 496 bp, Homo Sapiens
tcctgtcttctcactggctctgatcatgcagcttgggaaccacagagacatgagactgcaccaaacagggctgatgatttagccagaaactcaggaaggtctagcacagccctccacacacttcccaggaagtgtttggtctggccctgcagttgggactaaacttatatgcacctgcaggtcttgttgggtgcaccgtgagcaagttctcaccccaaccacctgacccaccctctgaaacaaggacgaaagggctggcagctttcattataaggggcttctcatacccatggcatggctgaggggtgggagtcagcctgctcgatgacacgtctgcaggggatgacctaactgaaccaactcagtgtttctattcccagtggcatctcttttgcacatcttcattttggagcctgggatgactgcctaggccacttatgctagacctgttaatgccagtgtgaaatttccaactaaatacttaataaaataatta

SEQ ID NO: 172687 - DNA, 606 bp, Homo Sapiens
  misc_feature (149)..(149): n is a, c, g, or t
tttatgttaactgaacagaagttgttattgttcctgatgacctggtgttctgctccctggaactgttcagtaatagttgaactgtgttcatgcccaatatggtatgaccgacatggcttagaagatttcctgctgatacgacacgcacnaaagcaggaagtttagtcagctcatgtagctgcaacttccactttttgtcatcagataggtcaatattggtcccaaactttatggttttaaagggtcctttcctcctcctcccagaattatctgacgatgtagattcactatctgagtggtctttatgatgacttcttttttcattttcttctctcaatgattcctggaatgaggaggcctggtactgtgcatatttagcaattgtagtatgagatctattactttcacaatgccagattttctttgttccagtgggatcccagttttcatctgctggctgcaacaactgtgtcctcacttctaccatatgttcattgttagcttccaccaaagttttagtagagaaaagtcccaggtctaacttaagagctccagcaaggccacgtattactgtaacagggttgttcggatttgtacaaaattgat

SEQ ID NO: 172688 - DNA, 370 bp, Homo Sapiens
ggatttcactggaatgtatccacattgactgatatggtggtgttgacctgcaggtaatccagcaagaattgagagagattctggtatacgtgtttcgtttgcattccagactcacacactgtcaccagggcctgttttttgatatgcctgttgatgagaagctccaacttcagatcgacagaattatttgggcattgtacaagaaactgcagttggcaaatgatgaagtacaaaccagggaattggatcaccagattcccatcctgatatctgactccatggagaatgccatctttgttccaagacaacttggttttgtttagatgctttgccacttggaggtagcccatgacttcttgttggagcttga

SEQ ID NO: 172689 - DNA, 820 bp, Homo Sapiens
  misc_feature (785)..(785): n is a, c, g, or t
gggacggtggggggagcgcggccatggcgctcctgctttcggtgctgcgtgtactgctgggcggcttcttcgcgctcgtggggttggccaagctctcggaggagatctcggctccagtttcggagcggatgaatgccctgttcgtgcagtttgctgaggtgttcccgctgaaggtatttggctaccagccagatcccctgaactaccaaatagctgtgggctttctggaactgctggctgggttgctgctggtcatgggcccaccgatgctgcaagagatcagtaacttgttcttgattctgctcatgatgggggctatcttcaccttggcagctctgaaagagtcactaagcacctgtatcccagccattgtctgcctggggttcctgctgctgctgaatgtcggccagctcttagcccagactaagaaggtggtcagacccactaggaagaagactctaagtacattcaaggaatcctggaagtagagcatctctgtctctttatgccatgcagctgtcacagcaggaacatggtagaacacagagtctatcatcttgttaccagtataatatccagggtcagccagtgttgaaagagacattttgtctacctggcactgctttctctttttagctttactactcttttgtgaggagtacatgttatgcatattaacattcctcatgtcatatgaaaataccaaataagccgaaaagaaatttaaatcaaccaaaattctgatgccccaaataaccacttttaattgccttggtgtaagtatncctctgaacttttttctgtgcctttaaacagatat

SEQ ID NO: 172690 - DNA, 1860 bp, Homo Sapiens
  misc_feature (1606)..(1786): n is a, c, g, or t
  misc_feature (1790)..(1791): n is a, c, g, or t
  misc_feature (1793)..(1809): n is a, c, g, or t
gggagagcggcagccttttcccgcgcgtgctgccttcgccgctcgggccgcccgggggaaaacatggcgtctgccctggagcagttcgtgaacagtgtccgacagctctcagctcaagggcaaatgacacagctttgtgaactgatcaacaagagtggggaactccttgcgaagaacttatcccatctggacactgtgctcggggctctggatgtacaagaacactccttgggcgtccttgctgttttgtttgtgaagttttctatgcccagtgttcctgacttcgaaacgctattctcacaggttcagctcttcatcagcacttgtaatggggagcacattcgatatgcaacagacacttttgctgggctttgccatcagctaacaaatgcacttgtggaaagaaaacagcccctgcgaggaattggcatccttaagcaagccatagacaagatgcagatgaatacaaaccagctgacctcaatacatgctgatctctgccagctttgtttgctagcaaaatgctttaagcctgcccttccatatcttgacgtggatatgatggatatctgtaaagagaatggagcctatgatgcaaaacactttttatgttactattattatgggagggatgatctatactggggctgaagaactttgaaagagctctctacttttatgaacaggctataactactcctgccatggcggtcagtcatatcatgttggaatcatataaaaagtatattttagtgtctttgatattacttggcaaagtacaacagctaccaaaatatacatctcaaattgtgggtagattcattaagcctcttagcaatgcataccacgagttagcacaagtgtattcaaccaacaacccctcagaactccgaaacctggtgaataagcacagtgaaaccttcactcgcgataacaacatggggctggtgaagcaatgcttgtcatctctttataagaagaatattcagaggctaacaaggacctttttaactctatcattacaagatatggcaagtcgtgtgcagttgtctggacctcaggaggcagagaaatacgttctgcacatgatagaagatggtgagatttttgcaagtattaaccagaaggacggtatggtcagtttccatgataaccctgaaaaatataataacccagccatgcttcataacattgatcaggagatgctgaagtgcatttgagctggatgagccggctgaaagccatggaccaggagatcacagtgaaccctcagtttgtacaaaagagtatgggctcacaagaagatgattcaggaaacaaaccatccagttattcttgaaactaacatccatcctgagctaaacaagagaaactaccatcttggccagtgacaagtgttcggagggcagcagagaggaccaagcctgtgtcacctggagactaagaaattaagttttgttttgacatcttcagtcctgtgtgctttcagaaaaccattttctctgcaaagaaaggaaacagatttgcaaactttaaagtctgtcgtggatttatttatcctcagattattgttactgcattaaatctacctttttgttttaaaaannnnnnnnnnnnnnnnnnnnnnnnnnnnnnnnnnnnnnnnnnnnnnnnnnnnnnnnnnnnnnnnnnnnnnnnnnnnnnnnnnnnnnnnnnnnnnnnnnnnnnnnnnnnnnnnnnnnnnnnnnnnnnnnnnnnnnnnnnnnnnnnnnnnnnnnnnnnnnnnnnnnnnnnnnnnnnnnnnnnntggnngnnnnnnnnnnnnnnnnnaaaaaaatttctaacaaactcttccttggggcgcgcgcgccgccccccaag

SEQ ID NO: 172691 - DNA, 633 bp, Homo Sapiens
atcaacgtgagatctgaacattgcaggaaaacactgaacaagtacagggagcatttggatcacagtgcatcataaggcggcctcaggagggatcctggcgaatactttcatcaaacaagtaatttactgagcactcaaccatctatcgggcctggtaagagacacaggatctaaagaacgtggtaatgctcattactttatatgaagtattgaaatcagcacttgctgatttcttcaaataggaaacatggctttgtgaccttaatgaggtcctccctggaggaaaaagtggagactaagtgattttctctggtttcggcgcttggtgatggatacgtgcagtcggttctgggccagctcgtgagcgctgggaggaagaatcgactccatcccacttcttagtcgggccatgaagtcataaccgggcgttactgccccgaaagactgccttctgatttcttcggcaaacttgtaggtaaattggttacattcctctattttttctggtgctgttagcagaacagaagcaaccaacgatcccgcagacgccccagcgaaggctttgacatccttcacaagttttttgccatgtctgcaaagtgcagatgctgcccccaagtggtaaatgcccag

SEQ ID NO: 172692 - DNA, 930 bp, Homo Sapiens
  misc_feature (764)..(764): n is a, c, g, or t
ccagcccaggcatctccagcccgggcatctccggctctggcatcactttccaggtcctcatccggcaggtcatcatccgccaggtcagcctcggtgacaacctccccaaccagagtgtaccttgttagagcaacaccagtgggggctgtacccatccgatcatctcctgccaggtcagcaccagcaaccagggccaccagggagagcccaggtacgagcctgcccaagttcacctggcgggagggccagaagcagctaccgctcatcgggtgcgtgctcctcctcattgccctggtggtttcgctcatcatcctcttccagttctggcagggccacacagggatcaggtacaaggagcagagggagagctgtcccaagcacgctgttcgctgtgacggggtggtggactgcaagctgaagagtgacgagctgggctgcgtgaggtttgactgggacaagtctctgcttaaaatctactctgggtcctcccatcagtggcttcccatctgtagcagcaactggaatgactcctactcagagaagacctgccagcagctgggtttcgagagtgctcaccggacaaccgaggttgcccacagggattttgccaacagcttctcaatcttgagatacaactcaaccatccaggaaagcctccacaggtctgaatgcccttcccagcggtatatctcccctccagtgttcccactggcggactgagggccatgaccggggcggatccctggggagggggcgcctggccnttcggataagcaaggtgggcctttggcaaagttgaggttctgcaccttccgggcaccaaccccaccattctgttgggaagggcaccgctccatttggacacgccccaagtgggggtggccttccactggcccggccccaacctggtctttctttccttggaaaacc

SEQ ID NO: 172693 - DNA, 336 bp, Homo Sapiens
ccaatccgaaccgtcatcagatggggcgggctaaacgcaatgtggaccaccgccctaagagcaacagtatggtggatgtctgctcagtggaccgccgctcagtgctgcagaggatcatggagacggaccccctgcaacagggccaggctctggcatctgccctgaaaaataagaagaagatgcagaaacgtgcagataaaatcgccagcaagctgtctgattccatgatgtctgctctcgacctctctggcaatgctgatgatggtgttggtgactaatcgactgatctcacttcccttccgctccaagcaccagttccggtggtacgggggaata

SEQ ID NO: 172694 - DNA, 243 bp, Homo Sapiens
aaataagcccagtgccttcactgtggtcatggggctgggctgcatttagtgtccatgtccttagattcagatggcaacatggtccagtaacagaagactttttatggaacctttcccaggagacccgattccgtaaggggagcaggtggccctggtcgctggaaggaaaggtgaccacagacccagcgcctcaggaacatcccccgcactcacggctaagcctgtccccagtgaaatcccgcg

SEQ ID NO: 172695 - DNA, 464 bp, Homo Sapiens
  misc_feature (390)..(390): n is a, c, g, or t
  misc_feature (436)..(436): n is a, c, g, or t
  misc_feature (445)..(445): n is a, c, g, or t
tttcactgggtaactgagaaggtcgctgtcaagatggagtttccaacccagtaaatccaagggccagaccgtgacctcataaagcatgatctccttctgtccagactgtggcaaaagtatccaagcggcattcaaattctgcccctactgtggaaattctttgcctgtagaggagcatgtagggtcccagacctttgtcaatccacatgtgtcatccttccaaggctcaaagagagggctgaactccagttttgaaacctctcctaagaaagtgaaatggtccagcaccgtcacctctccccgattatccctcttcttcagatgggtgacagttcttgagtctgaaggatactcttgagttcctctgaggagatccaaagggttccgggngcaggacccccaacccccaaaaggcagccttcagaaggacccgggnggagccttnagggttgaccgggggtagg

SEQ ID NO: 172696 - DNA, 708 bp, Homo Sapiens
ttttctccactgaaaacctacttgaggtttctggtctgaaggcttaagagtcacttcttagcacttgcgctctcaggcctcctcctccatcacagatgtctggatgcttttggaaatggccttggctaaagtaaaagggaaaagtagatccgataacttaaaaacgtagctcatcccttaccatccaaggggcactcccttggttggattttctatgacagcacaggggacaggtggcacaccatgagaggtctgcccagggtgggagcagtgtcactgtgctagcaatagttggcttctcccctgtcagtggaaaccccacttctgcccggcccttgagcttcttgcccactgtctccccatccttccacctacttgtggcgatctgagtacttctactcttgctcaagaagtaatacgacaatcagaatacaaaccagtaaggcaacacgaataaactaagaaaaaggtaagaactgtctcaaaaacgaaagcacaccacccaagacacagtacccagtcatggtttccccatccaactattagcttcatactttgaaaacttactttcagattattctcaaagaacacagtagcacctaaatctgttttcaattgggcttaaaaattgacatgcaatctcttaagttttttgttcagctacttcacactgagtacctcaaatctgctctggagtcgattatgcca

SEQ ID NO: 172697 - DNA, 1292 bp, Homo Sapiens
  misc_feature (1140)..(1140): n is a, c, g, or t
  misc_feature (1159)..(1159): n is a, c, g, or t
  misc_feature (1176)..(1176): n is a, c, g, or t
agccccctccgagaggggagaccagcgggccatgacaagctccaggctttggttttcgctgctgctggcggcagcgttcgcaggacgggcgacggccctctggccctggcctcagaacttccaaacctccgaccagcgctacgtcctttacccgaacaactttcaattccagtacgatgtcagctcggccgcgcagcccggctgctcagtcctcgacgaggccttccagcgctatcgtgacctgcttttcggttccgggtcttggccccgtccttacctcacagggaaacggcatacactggagaagaatgtgttggttgtctctgtagtcacacctggatgtaaccagcttcctactttggagtcagtggagaattataccctgaccataaatgatgaccagtgtttactcctctctgagactgtctggggagctctccgaggtctggagacttttagccagcttgtttggaaatctgctgagggcacattctttatcaacaagactgagattgaggactttccccgctttcctcaccggggcttgctgttggatacatctcgccattacctgccactctctagcatcctggacactctggatgtcatggcgtacaataaattgaacgtgttccactggcatctggtagatgatccttccttcccatatgagagcttcacttttccagagctcatgagaaaggggtcctacaaccctgtcacccacatctacacagcacaggatgtgaaggaggtcattgaatacgcacggctccggggtatccgtgtgcttgcagagtttgacactcctggccacactttgtcctggggaccaggtatccctggattactgactccttgctactctgggtctgagccctctggcacctttggaccagtgaatcccagtctcaataatacctatgagttcatgagcacattcttcttagaagtcagctctgtcttcccagattttaatccttcatcttggaggagatgaggttgatttcacctgctggaagtccaaaccagagatccaggactttatgaggaagaaaggcttcggtgaggacttcaagcagcctggagtccttcaacatccagacgctgctggacatcgtctcttcttatggcaagggnctatgtgggtgtggcaagngaggttggtttgataantaaaaggtaaagaattcaggccagaaccacaattcataccaggtggtgggcgaagaaggattattccccagctggaaactaattatgaaaggggagcttggggaaacttggctcac

SEQ ID NO: 172698 - DNA, 729 bp, Homo Sapiens
  misc_feature (13)..(13): n is a, c, g, or t
agattcggcacgnggagaaactcccaggagacagcagcctagttttcgagtgtgagcttgtgcttgtgaaagctaaccatgctaaccaccaaggcaaagcagcacagtgtgaatagaacagagcgggatcaagaatttcacagaagacaggtcagctgaggggcctgcacacacagggtgttgaggaaccacagatgggcgccgagaggcctgccttttgcctggcccaggctcacccccaccttgggcctcacctcctccaggaagccttcccagctacccgaagctcaggtggccttcttgcaggtccccgtagcaccctgagcctgtaccttgggtggcacttgttatgctatcctgtgctagccgtttgtgcctcgtctcgctgttagattgtgagttcccatgggcagagacccactgtcgttccccgtgtgtccccagcccggtccctgtcacatttgttaaatgaaagaacaatgaagcccagtgtaacgtcagtccacagaaatagccacagcttccagtggtggccgtagacttggctcggaacttagtggcaccagagtaactctagtcagttacagtaaaatccactgtgtgtggaaggcagaagctagcggttgtatcccaagcatcttttgtatttgtctttatactttgctgaattctctgaaatacctattactgtatgttgcttttctaaataaatgtattgtgaaacctaag

SEQ ID NO: 172699 - DNA, 489 bp, Homo Sapiens
gtgaggacagaccagccctcccgagcacctggcactcatgggctgaggctgacttctcctgggggagggttccagagtggaaggaagaggcagagggtagaggtggtggctgggggctcctctgcagagtggggtggccaatggagaggactgcacctcacaccgcaacataggactctctctcccttaagaaggcccccttagggtctgggctgccgcccccatcaccctaaaaccagccaaggtagctgaggccccagggcagataatttcaccagcaggaggaggaggagtccagtgagcttggttgctcacagacagcaagggagctgtcacagaggaagctgatgaatggaccgctgtggggagactttaaagtagaacagtgataagggagggcaggatggtggggatgcagaagcagcagccagagagagacggactggggtgcagacggagtgtggaaaacgcatacctcgaaatgaagca

SEQ ID NO: 172700 - DNA, 140 bp, Homo Sapiens
atgatagcttttaactaatctctgcttctattcttgtactcttcagttcttattctcacaaagcaaccaaaatgatctttggataacattcgatcttttcacactcctgcttttaaaacttccagtgaaatcccccagtg

SEQ ID NO: 172701 - DNA, 502 bp, Homo Sapiens
ggggctgctagtcgcggacgcaatggcttcaaggttacttcgcggagctggaaacgctggccgcgcaggccctgagggctcgcggccccagtggcgcggccccgatgcgctccatggcatctggaggtggtgttcccactgatgaagagcaggcgactgggttggagagggagatcatgctggctgcaaagaagggactggacccatacaatgtactggccccaaagggagcttcaggcaccagggaagaccctaatttagtcccctccatctccaacaagagaatagtaggctgcatctgtgaagaggacaataccagcgtcgtctggttttggctgcacaaaggcgaggcccagcgatgcccccgctgtggagcccattacaagctggtgccccagcagctggcacactgagcacctgcactaaattactcaaaatgtgctgtaaagtttcttctttccagtaaagactagccattgcattggctccttctcccatagaa

SEQ ID NO: 172702 - DNA, 379 bp, Homo Sapiens
  misc_feature (37)..(37): n is a, c, g, or t
  misc_feature (47)..(47): n is a, c, g, or t
  misc_feature (64)..(64): n is a, c, g, or t
  misc_feature (348)..(348): n is a, c, g, or t
cagtcatttcagtcagcgtcataattcacgttatctncctttaggtngtgttcccactgatgangagcaggcgactgggttggagagggagatcatgctggctgcaaagaagggactggacccatacaatgtactggccccaaagggagcttcaggcaccagggaagaccctaatttagtcccctccatctccaacaagagaatagtaggctgcatctgtgaagaggacaataccagcgtcgtctggttttggctgcacaaaggcgaggcccagcgatgcccccgctgtggagcccattacaagctggtgccccagcagctggcacactgagcacctgcactaaattncttaaaatgttgctttaaagttttctttctt

SEQ ID NO: 172703 - DNA, 872 bp, Homo Sapiens
gcctggtttggctgacgtgctcagcaaaaccccatgtgccctgctcctgtgtgcagttggggtaggggcagctggcatggtcaggtaacactagtggcccagccccgcagacccacaagccctacccgtgctggggcttgcttcccgaggtatttcacctcttaagagggaatcttccacaagcccagcacaagctgccaggcctgagctacttgaagggggccatctaggtccccaacccatggactttgcctccattttcagctccgccttttttctcctattttctctctgggtttcttcagccatgactcacaactaaaaacattaaaacactgggaggttagttggaggccccttcccaaggcagggagcctggggatgggcaggggagtgatagccaaactccttggtcacctgctccaagaaggaagcagtagctgagcacctgccctcacatactgctcttttcccctctccctccataccagagatgtggtgagctctgttcttctaccaacccagtctcaacacacaaagtgccaccaccttccctgactcagaacccacatccactcaatgtgaactctactaccacgacctccccatattcctcacttctccatcacctccagcctgactccctgtctgccctttcacccccaagattttgcacaggttaaggccagttatggcctttttgaaatctgtaatagctcccctttccccaactctaaagcctagaccttaaacctgttcctagagctatgcacacccctgccccagtttaccgttcctccctcagggcctccgtgacactccatgaaaagaagttcttgcataccggaaagttgaataaatggatgaattca

SEQ ID NO: 172704 - DNA, 1072 bp, Homo Sapiens
gcaaagggcattcagatttgggagaagtagccccagaaataaaagcatcagagagacgaacagctgtggccattgcagatttggaatggagagaaatggaaggagatgattgcgagttccgttatggagatggtacaaatgaggctcaggacaatgattttccaacagtggagagaagcaggcttcaagaaatgctgtcacttttgggcctagagacgtaccaggtccagaaactcagcctccaggactctctgcagatcagttttgacagtatgaagaactgggcccctcaggttcccaaagacttgccctggaatttcctcaggaagttgcaggccctcaatgctgatgccaggaataccactatggtgctggacgtgctcccagacgccaggcctgtggagaaggagagccagatggaagaggagatcatctactgggacccagctgatgaccttgctgccgacatttattccttttctgagctgcccacccctgatacgccagtgaaccccttagaccttctctgtgccctgctgctctcctcagacagtttcctgcaacaagaaatagcgttgaaaatggccctctgccagtttgcactcccactcgtgttgcctgactcggagaaccactaccatacatttctgctgtgggccatgcggggcattgtgaggacatggtggtcccagcccccaaggggcatggggagcttccgggaagacagcgtggtcttgtccagggcgcccgccttcgccttcgtgcgcatggacgtcagtagcaactccaagtcccagcttctcaacgccgtcctcagcccgggccacaggcagtgggactgcttctggcatcgggacctcaacttgggcaccaatgcccgggagatttcggatgggttggtagaaatttcctggttttttcccagcggaagggaggacttggacattttcccagaacctgtggcctttctgaacctgagaggtgacatcgggtctcactgggctgcagtttaagctcttgacagaaatctcctccgctgtgtttatattgactggacatatcagtaagaagg

SEQ ID NO: 172705 - DNA, 643 bp, Homo Sapiens
cgatttcctgggaaagagaaagcatcggagccattcattcggagaaaacgttttgatcaaaatggagacttttgtagtcgtttcaaaagagcacctgagtcatgtgtattcccggccttctttataaatgacccggtcaagttggtttcaaagtccgacaggcttgtctgtttactagctgcgtggccttgcacgggtggctcacatctgtaaagaatcctcctgtgatgaaactgaggaatcgggtggccgggcaagctgggaagagcaaagccagagctgcgctgcctcaatacccacaaaagaccattcccagtatacataagcacaggatgtttttctcaagagggatgtatttatcacttggacatctgtttataatataaacagacatgtgactgggaacatcttgctgccaaaagaatcctaggcagtggctcattgtatgtgaggttgaaccacgtgaaattgccaatattaggctggcttttatctacaaagaaggagtttcatggggttcagcctaacagttatggaaactacagtccttataaaccattggcatggtaataaacagatcttaagtataaaaattttgtaattgggcctttactctctccataataaagtattttgtttatat

SEQ ID NO: 172706 - DNA, 910 bp, Homo Sapiens
  misc_feature (704)..(704): n is a, c, g, or t
  misc_feature (738)..(738): n is a, c, g, or t
  misc_feature (832)..(841): n is a, c, g, or t
cctcgcttagtgctccctggttatacgagggacaagtcgttcctggccatggtggtggacattgtgcaggagctgaagcagcagaaccccaggctggtgtacgtgtgtgatccagtcttgggtgacaagtgggacggcgaaggctcgatgtacgtcccggaggacctccttcccgtctacaaagaaaaagtggtgccgcttgcagacattatcacgcccaaccagtttgaggccgagttactgagtggccggaagatccacagccaggaggaagccttgcgggtgatggacatgctgcactctatgggccccgacaccgtggtcatcaccagctccgacctgccctccccgcagggcagcaactacctgattgtgctggggagtcagaggaggaggaatcccgctggctccgtggtgatggaacgcatccggatggacattcgcaaagtggacgccgtctttgtgggcactggggacctgtttgctgccatgctcctggcgtggacacacaagcaccccaataacctcaaggtggcctgtgagaagaccgtgtctaccttgcaccacgttctgcagaggaccatccagtgtgcaaaagcccaggccggggaaggagtgaggcccagccccatgcagctggagctgcggatggtgcagagcaaaagggacatcgaggacccagagatcgtcgtccaggccacggntgctgtgagggccccgccgctcgcccgtgacacngcagcgcgtttggtgtcctccgtgttttgtcccctgtgaaaaacatgtaaacgtcctgccctttagagcccatggaccgaaaaactttggatannnnnnnnnnccttttcatgggagtgttcccgggccattctggcctgggtcctttccaattgggggaaaaaccgtggcc

SEQ ID NO: 172707 - DNA, 824 bp, Homo Sapiens
accgtgcccccgcctcggccccgcgccgccacggccaggcccggcatggaggaggagtgccgggtgctctccatacagagccacgtcatccgcggctacgtgggcaaccgggcggccacgttcccgctgcaggttttgggatttgagattgacgcggtgaactctgtccagttttcaaaccacacaggctatgcccactggaagggccaagtgctgaattcagatgagctccaggagttgtacgaaggcctgaggctgaacaacatgaataaatatgactacgtgctcacaggttatacgagggacaagtcgttcctggccatggtggtggacattgtgcaggagctgaagcagcagaaccccaggctggtgtacgtgtgtgatccagtcttgggtgacaagtgggacggcgaaggctcgatgtacgtcccggaggacctccttcccgtctacaaagaaaaagtggtgccgctttgcagacattatcacgcccaaccagtttgaggccgagttactgagtggccggaagatccacagccaggaggaagccttgcgggtgatggacatgctgcactctatgggccccgacaccgtggtcatcaccagctccgacctgccctccccgcaagggcaacaaactacctgaattgtgcttggggatccaaaaggaggaagaaatccccgctggggttccggggggtgaatggaaaacgccatcccgggatgggaaccttttccccaaagggggggacccccccgcccttttggtgggggcaacctgggggggaacccgtgttttggcttggccaaggggtctccccggt

SEQ ID NO: 172708 - DNA, 876 bp, Homo Sapiens
tcgttcctggccatggtggtggacattgtgcaggagctgaagcagcagaaccccaggctggtgtacgtgtgtgatccagtcttgggtgacaagtgggacggcgaaggctcgatgtacgtcccggaggacctccttcccgtctacaaagaaaaagtggtgccgcttgcagacattatcacgcccaaccagtttgaggccgagttactgagtggccggaagatccacagccaggaggaagccttgcgggtgatggacatgctgcactctatgggccccgacaccgtggtcatcaccagctccgacctgccctccccgcagggcagcaactacctgattgtgctggggagtcagaggaggaggaatcccgctggctccgtggtgatggaacgcatccggatggacattcgcaaagtggacgccgtctttgtgggcactggggacctgtttgctgccatgctcctggcgtggacacacaagcaccccaataacctcaaggtggcctgtgagaagaccgtgtctaccttgcaccacgttctgcagaggaccatccagtgtgcaaaagcccaggccggggaaggagtgaggcccagccccatgcagctggagctgcggatggtgcagagcaaaagggacatcgaggacccagagatcgtcgtccaggccacggtgctgtgagggccccgccgctcgcccgtgacacgcagcgcgttggtgtctccgtgtttgtccctgtgaaaacatgtaacgtctgccttagagccatgaccgaaacttgatattttttttctttcatgaatgtccgggcatctgctgggtcctcattgtgaaacgtggccagtcgttgccttggtgaaaaataaacaaaatgggtcacag

SEQ ID NO: 172709 - DNA, 731 bp, Homo Sapiens
gggatccagagcaaggccctgtttagcaaggctgaggagcagctgctgagcaaagtgggatcgaccagccagcccaccttggagaccttccaggacctgctgcacagacaccctgatgccttctacctggcccgtaccgcgaaggccctgcaggcccactggcagctcatgaagcagtattacctgctggaggaccagacagtgcagccgctgcccaaaggggaccaagtgctgaacttctctgatgcagaggacctgattgatgacagtaagctcaaggacatgcgagatgaggtcctggaacatgagctgatggtggctgaccggcgccagaagcgagagattcggcagctggaacaggaactgcataagtggcaggtgctagtggacagcatcacaggcatgagctctccggacttcgacaaccagacactggcagtgctgcggggccgcatggtgcggtacctgatgcgctcgcgtgagatcaccctgggcagagcaaccaaagataaccagattgatgtggacctgtctctggagggtccggcctggaagatatcccggaaacaaggtgtcatcaagctgaagaacaacggtgatttcttcattgccaatgagggtcgacggcccatctacatcgatggacggccggtgctctgtggctccaaatggcgcctcagcaacaactctgtggtggagatcgccagcctgcgattcgtcttccttatcaa

SEQ ID NO: 172710 - DNA, 955 bp, Homo Sapiens
  misc_feature (784)..(819): n is a, c, g, or t
gcggttgaggtcactggaaaggcttagaatgaagctgctcttgcctgttcctcctgagaacccagagcagcagtggtccagggcgcaaagcatggtgatctctcatgaggattcctatctgaacacatcagaagtcgtatgaacatagataggtctgttttagaatataaatggtagtgacttcctgcgctcctgaggcggggcaaaataatccataaacacataatccttctgggcaataatgtttctggactcgccagcagagggctctaggaacagaggtgggggtagagtcggggagaaaaaaggttctagagatggcatgtcttcaggggaactttgagaaatgtcctttgttccagcattcctaagtgacggcaccggtgagcctggtctgaattgtcatcagtgtcactgccgaggccaagggccaagggtcaagatgccactttaggttgagaagaaagtgcatctcaaggccagtgagggctgcaaaatggtttgcggctggcccagaaggagcaaatgtagaaaggctcccctttttagatgccgatggtctgtagaactcgcctctcattgtcattaaggtggcctgaaaacattatgtagcagggctgctgagcaaactggcagaggaaatctgtgagatatgcctgcagatcaatctgatagagaggatccttcagggcatcagggtcatcttcctcatcatcctcgtagtaatcctcctcatatttacttgtagcaagaatgtcagataaaagttggccagctaaaccannnnnnnnnnnnnnnnnnnnnnnnnnnnnnnnnnnncacatatcattggagtcatcttgactccactctgcaggagtggcctggcgagcggcattagcctccatgacgttggagagctcgttgatgatcagctttaggatcttgaccagcaaaggaatgtttgtccagcgcc

SEQ ID NO: 172711 - DNA, 996 bp, Homo Sapiens
gactgagcctttggatcccagcatagaagcagagatcatagagactggattggctgcattcacaaaaccctatgaaagccttttaccctttgctactggagaacatggatctatggagagtatctggaccttcttcattgagaacaatgtttcccatagtacactggtggcattgttctatcattttgttcaaatagttcataagaagaatgtcagtgtacagtatcgagaatatggccttcatgccgctgggctttactttttgctactagaagtaccaggcagtgtagccaatcaagtattccacccagtgatgtttgacaaatgcattcagactctaaagaagagctggccccaggaatctaacttgaatcggaaaagaaagaaagaacagcctaagagctctcaggctaaccccgggaggcatagaaaaaggggaaagccacccaggagagaagatattgagatggatgaaattatagaagaacaagaagatgagaatatttgtttttctgcccgggacctttctcaaattcgaaatgccatctttcaccttttaaagaattttttaaggcttctgccaaagttttccttgaaagaaaagccacaatgtgtacagaattgtatagaggtctttgtttcattaactaattttgagccagttcttcatgaatgtcatgttacacaagccagagctcttaaccaagcaaaatacataccagaactggcttattatggattgtatttgctgtgctctcccattcatggagaaggagataaggtcatcagttgtgttttccatcaaatgctcagtgtaatattaatgttagaagttggtgaaggatcccatcgtgccccccttgctgttacctcccaagtcatcaactggagaaaccaggcgggtccagtttatcagcgccccttgtggatgaattaaaggagagtatattccccaagtcgtccgtatctttactggcagcacatcctgtggccaag

SEQ ID NO: 172712 - DNA, 1374 bp, Homo Sapiens
agaggtttgggctttaatggcagctggggtaaaaggaaacaaaaacagtaattctgaagagcacagggaacaggcagccaggaccagcctggcccattccaggccagctgagctgaaatgctgattctgtccagggggctgccggtatgtgtagactggtggcagtcttggggactggaggcctcttggagagaagggaaggactgtcgggctcagaagtccatgaagctgtgggccaggtagtccttgcgaccgatgttgctgacctgcttggtctgcatagcctcgagtttggggcagtcagtgatccgatgacccaggcccccgcagaaggcacagccgcgctctcctccaatgtccagcatggactcatccccgcaatgcagcacctgcagcacgggcggcaccttctgcttggcttctagcagcagcgctttgaggtccatcagcactgactcatcacacgctttgttgatgaaggtagtggcgatgcctgtgtttcccgagcgcccggtgcggccaatccggtgtacatagttctcaatctcctctggcatgtcataattgatgacgtgctggatggcagggaagtccaggcccttggaggcaacgtctgtggctactaggacatccttcttgccctcccggaatgcctcgatggccttagtccgttcctcctggtctttgcccccatggatggctacggcctcaacccccttgagcagcaggtactcgtggatggcgtccacgtctgccttcttctctgcaaagatgagtacaggcgggggtgtcttctgcaggcactcgagcaggtacaccatcttggcctcctccttcacatattctacctcctggatgacatccaggctggcagccccagcacgccccacattgatggtcacaggctttacaagggcactcttagcaaagttctgaatcttcttcggcatggtggcactgaagagcagggtctgtcgctggcccttgaagtaggagaagatggtacggatgtcaccctcgaagcccatgtcgatcatgcggtcagcctcgtccagggccaggtagcgacagatgtctaggctgaccatcttcttctgcagcaaatccatgaggcgccccggggtggccaccatcatgtgtacaccgtgtcggatggtctccatctgctctttcacggacatgcccccaatgcagagggcgcagcgcaggagtggtgagctgtcctcctgcagcaggcggcagtagtactccaggatgccatgggtctgccgggccagctcccgcgaggggcagatgatgagtccatagggcccctcgcgctttgagaagggtaacctcttctcttgttccaggcagaacatgatgacgggcaac

SEQ ID NO: 172713 - DNA, 602 bp, Homo Sapiens
  misc_feature (415)..(456): n is a, c, g, or t
agggcctggacttccctgccatccagcacgtcatcaattatgacatgccagaggagattgagaactatgtacaccggattggccgcaccgggcgctcgggaaacacaggcatcgccactaccttcatcaacaaagcgtgtgatgagtcagtgctgatggacctcaaagcgctgctgctagaagccaagcagaaggtgccgcccgtgctgcaggtgctgcattgcggggatgagtccatgctggacattggaggagagcgcggctgtgccttctgcgggggcctgggtcatcggatcactgactgccccaaactcgaggctatgcagaccaagcaggtcagcaacatcggtcgcaaggactacctggcccacagctccacggacttctgagccgacagtcttcccttctctccaannnnnnnnnnnnnnnnnnnnnnnnnnnnnnnnnnnnnnnnnncagccccctggacagaatcagcatttcagctcagctggcctggaatgggccaggctggtcctggctgcctgttccctgtgctcttcagaattactgtttttgtttccttttaccccagctgccattaaagcccaaacctctagccc

SEQ ID NO: 172714 - DNA, 1128 bp, Homo Sapiens
  misc_feature (1034)..(1047): n is a, c, g, or t
gggcatcttgagccccgccttttacttcggcccgcttcttctggtcactccgccaccgtagaatcgcctaccatttggtgcaagcaaaaagcaatcagcaattggacaggaaaagaatggcattgaagcagatttccagcaacaagtgctttgggggattgcagaaagtttttgaacatgacagtgttgaactaaactgcaaaatgaaatttgctgtctacttaccaccaaaggcagaaacaggaaagtgccctgcactgtattggctctcaggtttaacttgcacagagcaaaattttatatcaaaatctggttatcatcagtctgcttcagaacatggtcttgttgtcattgctccagataccagccctcgtggctgcaatattaaaggtgaagatgagagctgggactttggcactggtgctggattttatgttgatgccactgaagatccttggaaaaccaactacagaatgtactcttatgtcacagaggagcttccccaactcataaatgccaattttccagtggatccccaaaggatgtctatttttggccactccatgggaggtcatggagctctgatctgtgctttgaaaaatcctggaaaatacaaatctgtgtcagcatttgctccaatttgcaaccctgtactctgtccctggggcaaaaaaagcctttagtggatatttgggaacagatcaaagtaaatggaaggcttatgatgctacccaccttgtgaaatcctatccaggatctcagctggacatactaattgatcaagggaaagatgaccagtttcttttagatggacagttactccctgataacttcatagctgcctgtacagaaaagaaaatccccgttgtttttcgattgcaagagggttatgatcatagctactacttcattgcaacctttattactgaccacatcagacatcatgctaaatacctgaatgcatgaaaaaactccaaataagagaatctcttcaggattataaaagttgtaaaatgcaactgtattgctgagcnnnnnnnnnnnnnnttcaaaacattggattttatagtgctaaaagggctttattctatagttgaatcacctctgaataaagatataaaacctaaa

SEQ ID NO: 172715 - DNA, 1004 bp, Homo Sapiens
gtcggcacgtcttatcatcggcacccgttatgcagtgagcggtgaaggggccaagactcgagagtacaaaaccagcttccatgccctcaccagttatcctgaaggcagaaggcctgaggggcatttacactgggctgtcggctggcctgctgcgtcaggccacctacaccactacccgccttggcatctataccgtgctgtttgagcgcctgactggggctgatggtactccccctggctttctgctgaaggctgtgattggcatgaccgcaggtgccactggtgcctttgtgggaacaccagccgaagtggctcttatccgcatgactgccgatggccggcttccagctgaccagcgccgtggctacaaaaatgtgtttaacgccctgattcgaatcacccgggaagagggtgtcctcacactatggcggggctgcatccctaccatggctcgggccgtcatcgtcaatgctgcccagctcgcctcctactcccaatccaagcagttcttactggactcaggctacttctctgacaacatcttgtgccacttctgtgccagcatgatcagcggtcttgtcaccactgctgcctccatgcctgtggacattgccaagacccgaatccaaaacatgcggatgattgatgggaagccggaatacaacaacgggctggacgtgctggtcaaagttgtccgctacgagggcttcttcaacctgtggaaaggcttcacgccgtactatgcccgcctgggcccccacaccgacctcaccttcatctttcttggaacagatgaaaccaggccctacaagcgttctcttcctccatgggcctgaaacgggccggggggctcccaaatccccctgcttgcgccctataagcccaccttgctcccctgtgggggccctggggtttcttgtttgacccttgaaaacgccctcctaatttaattttccccctttccccaagaagggggggattttcttacccatctctccgggaaa

SEQ ID NO: 172716 - DNA, 1175 bp, Homo Sapiens
tccaaatcaaagcagttcttactggactcaggctacttctctgacaacatcttgtgccacttctgtgccagcatgatcagcggtcttgtcaccactgctgcctccatgcctgtggacattgccaagacccgaatccagaacatgcggatgattgatgggaagccggaatacaagaacgggctggacgtgctgttcaaagttgtccgctacgagggcttcttcagcctgtggaaggcttcacgccgtactagtcccgcctgggcccccacaccgtcctcaccttcatcttcttggagcagatgaacaaggcctacaagcgtctcttcctcagtggctgaagcggccgggggctcccactcgcctgctgcgcctatagccactgccccctgggggcctgggctctgctgccctggacccctctatttatttcccttccacagtgtggtttcttcctctgcggtaaaggacttggtctgttctaccccctgctccagcttgccctgctcgtcctgatcctgtgatttctctgtccttggctattcttgcagggagctggaaaacttcctgaggatttctggcctccccctgggttttagtttcagggcacacaggacagcagaagatcccctttgtcagtgcggaaaccaaggtagagctgaggggacagggaggagcagaagccatcaagatggtccaagggcctgcagagcgagatgtggcccttcctccccctcattgaggactttaataaattggattgatggaccccaccccccaatctgggagagtctgggggggtgggctaggagagggggagggaaactggacaaagaaactggacaaatagggaaatgggagtttttttaataaaaaatttggccccaacaataagccagccagggcaaggacataacacatggtcggcccgccctcgggcccttcgaagaaattttctttaaaccaattcctttgggcgcccgggggcccccttaagggtaagtgaaccgtgggcccatcccttgttttcctaagggaaaccccgggtcatgagactaagacggcctgggaattcttccccccatgtaaaaataacccccccgggggccaaccgccaaggtgttcctgacccaaattcccagaagagagaggttccctggcgcgcgccccctaaccgg

SEQ ID NO: 172717 - DNA, 296 bp, Homo Sapiens
ccgtatgttcactcaaggacccttaggctctacaatcagcaagtggtgaagccagccaggcttgtgtccttcccctaagggcaatgagttcccccaggctccacgcaggtccagagaggctgtccaggtgcctgggcctagaatcagaaaccttagaaatctacctggtactctattctactgtggctgagctagtgccgaaaccaccaaagtccttcccactcttccctccactttccccagggtgaggagtctccctacgtctaccacatgcccatacggcacaagcaacaagc

SEQ ID NO: 172718 - DNA, 819 bp, Homo Sapiens
gaaacacttacttggccccctaccctgctcctcctcctccacagccgtctttctctttgcctcagccacttccttccttcgcctcaccctccccagtgcactgaagaaggtaaccgggtccagacccacgcggcgccagttctccggcgggaaggaaaaccgcgcagagaggcagcaatgaatgtggatcacgaggttaacctcttagtggaggaaattcatcgtttgggttcaaaaaatgctgatggaaagttaagcgtgaaatttggggtcctcttccgtgatgataaatgtgccaacctctttgaagcattggtaggaactcttaaagctgcaaaacgaaggaagattgtaacatatccaggagagctgcttctgcaaggtgttcatgatgatgttgacattatattactgcaagattaatgtggtttacatatctttatgtactgccattttttgtttctggtaaactggaatataaagtgaaagaacaaacatttgaacatacttaatgtatttttatagaactttgtaaacgaaaggagattcatgttttagaagtctgtccttttttatatcttgaaagaaaatctatgtatgatgctataaaataaatcctattatttttctcaggaatctggttaggaattgcaggcaatgagattttttgcggggcagggatgggaatgtttgttcataaataattagacattttctatagatatttgacattctgcgaaagcaacaagcaaactgaagaccaactcctatgagaaatattatgatgtttatgtaataaagacatgttaactgtccaaa

SEQ ID NO: 172719 - DNA, 944 bp, Homo Sapiens
gtgctgggtccaacaaagagaggaagcgccataacccactctgccaacctcaaggccagccagtgaggaggccaggcccaggtggctgttgtgcaggctggctcccaagcttggtgcagcagagtagccaaatgggcactggaaaaaaggccccggagagctggcttgggccgtgagtccttggccgagggagggaaagggccggcgctgagctctgcgctgtcacagagcgtagctgttgagccctggcagctactcctttgctggggcccacctgccttcctttcttggttgcgtttcctccagatgcctctgcggctgcaggaaccccgctccagaagcccgaggatgaccgtgttccctcctggagggggcttcccaggtcctctcagcccaagggtggggctgtgtggcaaatccctccagcctgctctgaagtgcagctgacaccttcagggctggtgcagcttcccccgctcggtcagcagtgtcatggcagaggcgtagaggacatagcccaggctgagcagcagcgtgcatgggaggggcccgacgcagaacagagaggccacaaagaagaccagcagcagcgagaccagcgtccggtaactgcccaggaagcgcaggctgagcctggggccgcgggtgtggccggccacctgcctccgccccacagggctcagcaggtgcctgctggccagcccaggttctgtgaggtggtagcgacagaagctgccgaggaagtcatcccgggaacacagagccgccatctgtcctgcaaatctgtggttgatggcagacgacagcctaaagagtgtgcggaccaagctggcgatctcatagctccggatgggctgcagctccgggtccccctggtactcaatttcaaaccttcgcagcccattgatgatctggtaccgccccaggggcgtaaggatgagtcc

SEQ ID NO: 172720 - DNA, 186 bp, Homo Sapiens
gatgctggcatctgtgtagtcctcatactgtttactgataacccacaaattcattttcatggcagacctaagctcagaccctgccttgtcctggcaagcataggttttcccagaccacaatgctgatatatcttatttaatgcagactgtattcttgcagcgtgttgtttcctgttgacaaaggtg

SEQ ID NO: 172721 - DNA, 562 bp, Homo Sapiens
ttttttccgggccacctgggtcctcagccagtgcctttgaaacatttctgcctgtaatgtcagggccaaattgcgttactgagcatgttctgaccggcccgtttgggcatcacctgccattctcctgccatcctctcaacagctctgtggggtgggtcctcccccatacctgatgcaccgaccacacagtggaaagtgacaaagccagcgccttgccccaggccccgcagggtggagcccgtctgctcagggttgcaggcccagattctccactgctaccgagatcgcccgcatgaggtgctgctgtgctcggacctggtcaaggcataccagcgctgcgtgagcgccgcccacaagggctgaggagcagacatcattccctgccctggcagtgacttggagccctgaagaagggaccaatcatgggaccacagccactgtgccctgccgtttcctgctgggcccctgcatatgcccctgagcctggggctgccacgtgtttaggaaacaaagtatgcgctactgtctgaaaacaaataaagcagatgcctttgttttcagc

SEQ ID NO: 172722 - DNA, 547 bp, Homo Sapiens
cattcccatcaccaaccaccgccatttcctgaatacctactctgtgctgggctctgccctggacattgtgaggggattcaaaagagataaaaagcacaatccttgccttcaagcaccttgtaatttaattttggaaactgaaacccactcaaacgaagcgacgtaagaatggtaacaagcagcatttcactagaatgggtactaggaaaaaagttcatgcatttgtccgtgtcaaacccaccgatgactttgctcatgaaatgatcagatacggagatgacaaaagaagcattgatattcacttaaaaaaagacattcggagaggagttgtcaataaccaacagacagactggtcgtttaagttggatggagttcttcacgatgcctcccaggacttggtttatgagacagttgcaaaggatgtggtttctcaggccctcgatggctataatggtaacttaattaattaaatgttgtcttatgtaagaacctgaggagtaagagatgcaaatattttatggtgaataaaataaaagctcacttacta

SEQ ID NO: 172723 - DNA, 490 bp, Homo Sapiens
gatggccgctcaccaggcaatttgctaggctcgggggcgggtagtatccatacactatgcactactgctctgaagcttctggaatcagaaatgaacccattttcatcgacgattgctgttagttgacaagtgacatcttgaaaatgccacattccctcatgtcacaggaagttctgggatcaccaaggattgttggagagtccagtgagatggaaccacacaaccagttccctaccagtgtcttgtcagctctgggtgtttgttccctgccactaagtggttcagtcacacctttgctgaaacacagtagtcttatgaaaagcactggacacatactttgaatacctttcatattttaggtgctgaaaatggtgagggagtgagtgctctgcacccttgggcttttcaactcttgcacctggagttctgctggttaagtctgtaacttacttgaaactggaacctgctgactacacgtgcttgggcgccg

SEQ ID NO: 172724 - DNA, 669 bp, Homo Sapiens
gatcctaagcgctacacagctaagcgtatttggggacaaatgcaaattgtttcccaggccataaataacttttaaaaatttgatttgtcttagtgtttccaaagactcaattctcaatgaacctccaattacccacaggctgcccagtccacgcttctccccacccccttcagctaagggcacccgcagtcctaggaccacccccagctccacccaaggcaaatgtagggtggggggttctgtgggcctggggcgtgctgttttcaggacaggactgggcagcgtctggacatgaggacctgcgggttttgggggggactttgtccccgagcccagcctgcaaggctgtcggcgaatcacagaccaactccaggatacagctttgctcctccagagccaaaatacataggatgtggctgagaccactgcagactccccataagacaagatcaccaagacccacccccagaaccctcgctagcacgaagcccagccagtcgggtccgggtgattcctgctatgaaggtgggaaagaggacacagtctgtcgccagcattcccacttccagcggctggcagagggtatccccggggcaggcaaagctccctaccagccgcctgactgggagcacaccggcgtagcctccaggaggaatgcttatgaacatc

SEQ ID NO: 172725 - DNA, 461 bp, Homo Sapiens
tgaagtatgaaaggctttccaatggggtaactgaaatacttcagaaggatgcagctagctgcatgacagtccatgacaagtttttggcattgggcacacattatggcaaggtttatttacttgatgtccaggggaacatcactcagaagtttgatgtaagtcctgtgaagataaatcagattagcttggatgaaagtggagagcacatgggtgtgtgttcagaggatggcaaggtgcaggtatttggactgtattctggagaagaatttcacgagacttttgactgtccaattaaaattattgctgtgcacccacatttcgtgagatccagttgcaagcagtttgtgaccggagggaagaagctgctactgtttgaacggtcttggatgtacagatggaagtctgctgttctgcatgaaggcgaagggacataaggagtgctgaagtggagtgccatctgt

SEQ ID NO: 172726 - DNA, 484 bp, Homo Sapiens
gagcggaaggcccccgcacttctctgagcagagatctggggcccctcccacggaccccagcctgagcagagggcaaggctctgcctgctggtaccctagggggtgggggagaagcgatcagctccaaaccatgcaagaaaaacaagccaaacccataaagcaaaagaaaaaatcaacagaggataaacgggaaaagacacgaaaggtgaatgacaccgataacggtggcgggcaggactgggtgagccagtgtgctccgcagaggccctgtttgccagtgccaggggaaggccttgggcggctcatggcatctccctcatgggagtcttggggtattcacacaactcatcccctcttgtgtaccccgcaccaaagccgggatagaggtgtggccaccctgggccaaagtgtgcaaagtccattcagtcgagagattacaaaaaatatacaacttggatggcatccaggctgggcgtgcaggtgg

SEQ ID NO: 172727 - DNA, 571 bp, Homo Sapiens
agagggcagaaggctacgcagggctgaggatgacgatgcagcccctggatggtcccagactctcaggacatgcccagctcaggggcttcgagccacaggcctggcctcatatggcatgagggggagctggcataggagccccctccctgctgtggtcctgccctctgtcctgcagactgctcttagccccctggctttgtgccaggcctggaggagggcagtcccccatggggtgccgagccaacgcctcaggaatcaggaggccagcctggtaccaaaaggagtacccagagcctggtacccagggcccactccagaatggcctctggactcaccttgagaagggggacctgctggcctaaagcccactcctgggggtctcctgctgcttaggtccttttgggacccccacccatccaggccctttctttgcacacttcttcccccacctctatgcatcttccccccactgcggtgttcggcctgaaggtggtgggggtgagggggggtttggccattagcatttcatgtctttccccaaatgaagatgccctgcaaagggcagtaacca

SEQ ID NO: 172728 - DNA, 721 bp, Homo Sapiens
cgtcctggagcaatgatctaagcagcaggagaccccaggagtgggctttaggcccagcagctcccccttctcaaggtgagtccagaggccattctggagtgggcctgggtaccaggccctgggtactccttttggtaccaggctggcctcctgattcctgaggcgttggctcggcaccccatgggggactgccctcctccaggcctggcacaaagccagggggctaagagcagtctgcaggacagagggcaggaccacagcagggagggggctcctatgccagctccccctcatgccatatgaggccaggcctgtggctcgaagcccctgagctgggcatgtcctgagagtctgggaccatccaggggctgcatcttcatcctcagccctgcgtagccttctgccctcctcccagggctcgtccattccttcagctccagcgcctcctccacacgtccatgccttccaccttgccacatggagcacagccgtgcccccacaagccagagggaacaacaaagctgccttgtcctcagcactgaggtggtgggtagcatgaaggaaagatggtgcgcccggtggtttaggacacgagggtcccggtcccgaggctctgccgggcccgcactgtctggatggcctgctggttcttgaactgaccaggttaggatcatctgggcggggatctctaagtcgactgagctgcagtggctgcggtgtt

SEQ ID NO: 172729 - DNA, 262 bp, Homo Sapiens
cggcgcagagaagggaagcagtccccagtctgcactatagatgcagcccaatgataacattacctattctcagttttcttgcttttatttccaggactggaggatcgggatcgccggccccggcttctactccttgagcgtctcctgtctctacttcgagatcttcttcgctctcggcttctgtctctctctctacttctggaacgtctgaaagggggacacttttcacttattcttttgacaaagtgcatggggaccggca

SEQ ID NO: 172730 - DNA, 664 bp, Homo Sapiens
aacaagtatataggcaagtcatggtagacagtgcatagattctgactgcagggaggaggaatggctggttttccagagatagatcagaacaacagaagctccctgtgctccagcctcggctgtggtgcactgacctctcaccccaggcaggctgaagaggaaacccctgcaggggtggccttggacacctggttcctggaagcagctggctgccgtcatctgcagggcctgcagttccaccgcaccctatggccccctggggtcacagcctcccacatccgctaaccagcctcatcacttgtttccgccagcaaaccacaggtccccagaacacacccaggggaagggggctgcaggaccttctcccccagtcagtcactgtcagtgggcccaagtgctgacctcagtttaggtttccctgacataaggtgctaagaaaaatcacaaggattctagggtccctgccagcccctacctccctgagtctgtttcattaaaaatccagcctggaaggtgtgccagggagagtgacctgctgaaactccatggcagaaagtaaggggatggattggggctgggcctgagccgggtattgcctggaagatttgggcatcttgggtacaccgtcactcgcaccttggctgattagatctctgcgcgggga

SEQ ID NO: 172731 - DNA, 956 bp, Homo Sapiens
cagaatatctgtgcgctcggtccagggatggaatgcatgttaaagtacttgcagaggaagatcgatgagttctgagtgtcggcctgcccactggtgacaccgggatcgggctgagcaggagaacatcaccggctccagttcccctgatccattctcacagcctgaaacaagctcacccgtagcttacgcttggaagcaggactgggaacatccacgctatttattatcgaggagttttaaagtactgtaactttaaaataaataactacaaagcttctttgtccaaacgtcattattttatacttatatacacgcaggtgtaaaagtataaaggtgagcactagactgctcttagaagctctaatttttgttttctttggctagtactgtataaaaaacagaattgtgttttattggttttggatgacagaaaagtctggaataatgtttgttttcctcatttcttccttctagaacacagaatctaaaggggtattagccagcctcgcctccctgccccacgtagagacacagagtgatgtgaggcgttggctttttctccaagaaggtacagatacctcagattcgggaaactcaaaatcaaaagacgtagcttctaggataaatacttctgatgaaaaatccgctgaggagcataccccaaaccagacatatgcttaggattcatgctgagatatcaattggtttccccttctttttaaatacgtccagttcttacccagttaacatgaagaaaccactgtctctagaagaaaagcttgttttggcagtattagtgaatcactgaatagcttaagtatgactatctaagttataagtaagccctttaggggggttttaaataattttttctgaccctttctgaaaaataactacctaagtgcctcctgggtgcctggggggaaaaatactactttataaaaaagggttttggg

SEQ ID NO: 172732 - DNA, 633 bp, Homo Sapiens
gcagatgatccttagcctgacgtgatcatgaatgtcatgagaattggagaattggtcaggctcggtggctcacacctgtaatccctgcacgttgggagtccgagttggatagatcacttgaggtcaggagttcaagaccaacctgggctacatgtgtgaaaccccgtctcaaaagtataaaaagaaaagaaaattggagaatttataacgtctgatgtgacctgttctttaggtgttgaaattagaacggcctcactcacctgggacattcttcagctcatgccctgtacctggcttacagttgctcagtgaaatgctttcttgattgtagcatggtgggatttttataaatccaaatgacttagaggtaggtgtcacatttttagcagctaaaatcatactaatcgtaaagctcagattcctgtaagtagggcgctgagcacaggctgcatcctggatatatgaatagatgaaccagatcgtgtacatgtgggacacgttctttgtcctttgggactttcttttgcttggatgttggtagtaaccatgtaagttcgggcagctttctagaaactttccttgttgtgcaacattatgcaataaatgcactgattaggcatcatctgcgcaggg

SEQ ID NO: 172733 - DNA, 229 bp, Homo Sapiens
ctagacggatccaccccccccaggcacacgttggcgggcggctccacaggtctcacatgagtacggcgccgtcgggggctccacacacacaggccactgcagccatgtgggcctgtcagcactgcacgttcatgaaccagccaggcacaggccactgcgagatgtgcagcctccccagacctaggcgcctgccctctgctggctagaccggccagccacggaccggcta

SEQ ID NO: 172734 - DNA, 296 bp, Homo Sapiens
agctaagattgtgtgtgaggcaaagaaaaaaagaaaggaggaaggggtgttggagcagattgtagttgatccacagcaaagagcatcaccaaagccattccaggaggaactagatccaccacttcctctgctgggcatgctccaaaaatggttgtggcctccagagaggactccaaaagaaagcacaaaaactagacagtgggagggcatacccaaaagccctgagtttctgaaaaaatattgaaagtttctatggtgaaataggaagttaatgtgcttaggatcatcgctccgcg

SEQ ID NO: 172735 - DNA, 585 bp, Homo Sapiens
cacacgttcacctcctggtaggacagcgtccactgcaatggcccagctcttcccagcatccccttacacaggatgtgtgttcccttcatggtgtggcactgcatgtccttcaacttgggacgtgccactctcactcagttctgtcctcattgtgccctacgtgtgtacttcgggtactctccttcaccactcacctcacacccttcctccaggaagccctccactgactttctaggcagagttggagccctcaccctgggcagttccacagcagaaactgtcccaccacagccgttgctggtggtcatgtttgtgtttgccagcagcccacaagaggtcgaggcgcaacctctagtcctcagctgctggggccgggcagtggtgtgctttcagcctggagggggcgctcaggaagaggttgtccacttgtgtgcagcttttatgtgtcctgtgcatatggttacagcaccgcttcctgtgaaggagttgagctaggggttctgctgaatgcagagaacaagatacaaacttaaagaggcctagcgtgtggcgggaaacacacaccccttcccccacctatatatg

SEQ ID NO: 172736 - DNA, 367 bp, Homo Sapiens
cggctcagatgatcagaggagtcagagcaaaccagagagtgaggaggaaagcaggagagcatgatgtggaagccacgggaagaggtgtttccggaagggtggagtggtcaacagagtcagatgatgctgagagctctggaactggggtcagcaaactttttctgcaagaggccagagagtaaatattttcaggtttgtggcccatgtggtttctatctcagctcttcagttctgccactgtagcatgaaggcagccacagagtgcatgtaattgaatggtgtagctgtgctccaataaaactttatttacaaaacaggctgtgggccagatttgcccatgggctgtagtttgtgatcctgtactaac

SEQ ID NO: 172737 - DNA, 246 bp, Homo Sapiens
agaagaaagagcgcaatgacataagacgatcactgcctggctccacagtgctgggattacaggcgtgagccactgacccaggctattttacctttttcaatgactcttgtatcctcagacctgaaagtgattcacagaccatggggcccagaaacccgatcaaagtaacgtgtgcattgagtagacatgaggacatgaggatctccactttcttcctcttgctaaaaatgcccatgacagcttaga

SEQ ID NO: 172738 - DNA, 442 bp, Homo Sapiens
aggttggagccatccatccctacactccttgcagctgctacccagaccagacttcatatttctcttcaagaacagaacacacagagtgacttcaggaaatcttgagagaatcagacttgagaagcctaggaaagacaagtatctatttacagtataatcagcaccctacccggccctgcagacagttctgacaactggagccaggaagaatcaaccacaggctctgactggggcccacctgaggctaggagccagttggacccccagatgagtactgactctgatccccacccagactggctgcactgccatagggagccccttcctcggagacacactcaggcactgggatccaaagttcatggaaagtttcactttctcttatagctcaacccccaaaactgcctgataatcttatcatcttatctaaatatcttcccca

SEQ ID NO: 172739 - DNA, 612 bp, Homo Sapiens
cgtcgcggagcgatgatcctaagctcggttgccaaagtatcggcattacaggtgtgagccactgctcactaactagcgagctagttttcactgctagaaaaactagcctggttttgcttggtagagaatctctcactctcttcactgatggcttcagagggagatgaatgtgaagataataaagtctaaagtttcttcagagctcagtctgtctctctggggtcccattgcctatttcagattctgaatggtatttcaggctaccccaaaagtgtcagatctggtcaagagtgttgttcttatgtactatagagtgtgccactttttgagcaagcagtcaagtatggtagttaagagcatgcactgtgaatctttgctataagatggtggcgtcttgtactttccagacatgttattttccactttcaaccccttgctctttatagccttcattgagaagaggggtctctatcctttcctcttgaatttgcactggctcacgactagccacaactagattatgaccaatagaatatggtgaaagtaatgcacgatgactgaggctaagtcagaaaaggcagtgcagccttcaccttgttttctgggacactt

SEQ ID NO: 172740 - DNA, 697 bp, Homo Sapiens
tgatcctaagcaggggcgaactgacaagctgaggatgcgcaggaagtcaccgtcagcgtcaattgctcgacagccgatcacctttggcaaagcgccaggtgcgaatgatttccagacggtcgatgtcgttcaagtccccggtaaacggcgcaaaaggcgccgccaggcgcacgatgcgttgcgccgcctggtccagcagcggttggccggaggactccagcacctgcacttcgtacaaggtgccgtcgcggttgatcgacaccagcagtcgcaaattgccgtagatctgctggcggcgggcttcgtccgggtagttcaggttgccgatgcgctcgaccttcttgcgccactcgtccttataccaggcgcctttgtcgcgcatggtggaggcagcattcaggcggtagatccgcgggcgcttggcgtacagctgttgttcgtgggccagttcggcttccaggctggaaatttcactggagagttgcgagctatcaaacgtcggggccggcggggcaggcgtgggttcggtcttggccttttcccgttgagtgggcgctttttgcggtttgggtgcgacggtagtgacagcggccttgggtgcagcctgtttcacctccggcttgggcgctggcggtggcgtgaccttattgaccttgttgtcttgaacggcgccacttcggtgtgcttagatcatccg

SEQ ID NO: 172741 - DNA, 315 bp, Homo Sapiens
  misc_feature (68)..(159): n is a, c, g, or t
gcaggtcaaaatgattttcctgcatcagcctcctgagtagctgggactacaggtgcgtgccaccatgnnnnnnnnnnnnnnnnnnnnnnnnnnnnnnnnnnnnnnnnnnnnnnnnnnnnnnnnnnnnnnnnnnnnnnnnnnnnnnnnnnnnnnnnnnnnagcctccctagttttttaacagataatttctatctctttatcattatcttctatatggtaagacattgttcttctactttcttttatttctttagacatgctttcttttagtattttgaacatatttaaaatagctgatttaaagtctctgtttag

SEQ ID NO: 172742 - DNA, 193 bp, Homo Sapiens
tgtatctgctttaggggggacctcaagcccagcaggactgtgtttcttgcagactcttaagaggtaccaccttgacgctcttggacaaaatccaagagttctctggattactagataaagactcttgtttttttcctgtactttctcccaaacaaatagatctctttctctctctctcgcgccggaccactag

SEQ ID NO: 172743 - DNA, 573 bp, Homo Sapiens
ccgtctccgtgggctttccctggatgtgactggggcttctgggaagctgaggtaaaaaaaagggagcccttagagaggcttctatccaaccaagagtaggccaagagatagacactggtaagtcagaccagttgtctgaacccagtccgggtccctgccttcagcactacccaaatggagagtggatgaggccaccatctatggcacagggatacgaaagcccatttcctgacattaaccccacccagccagtgaaactactggtgagaggaaaggagagtccagaggacagggctttccagactcttactactttcccccacttctggttctctcaccagtgtctcattggaaaccctaaagacctgtcacagagacgggctcggatgaggagataaggaccccaagtccccagcaactattttacacttgatccctccacccagaagataaggtttagtcctaattcagtcccattcttatgagagagcccagccatcccccaatcttcagtctcagctgcattccaggctttcctctccctagctgcctagaggccaaaagggaggagaa

SEQ ID NO: 172744 - DNA, 417 bp, Homo Sapiens
  misc_feature (305)..(325): n is a, c, g, or t
gtctgatcctaagcagctgttgtcgtaggactgttgctagatgctgacgaggaaacatttcaggaccatttatcaagggaagtggtagcagtaatatggatgggcttgactcaaacaagaaaatatactgcagacaacaaggaacatagctcataagtgagatgagccctagtacagcaataaccatttcagtgtatttgctatactttccttagggcagaagagaaggaaagatactaaattggaggagggaagaatgtgtgccccacacactagtcctctggagcttatctggctccatagannnnnnnnnnnnnnnnnnnnnggggaattagagtctcattgtgtccccggggtggagattacgggggccggatcggggctcaagggcacccctcggctctcccgggtccaggc

SEQ ID NO: 172745 - DNA, 200 bp, Homo Sapiens
gagtccaattaattatcatttcatcacattcctaaaggtcaaggatcaagtgccagaaggtggcgccaatagcattatttaactcttcaacaggccttttgcatgcagaatgtcgatgaacattgtttcaatccagaaaggttctttgagaacatcgagctctaatgtctcaaagtcacacatagataaaggtgcatggg

SEQ ID NO: 172746 - DNA, 324 bp, Homo Sapiens
atcgcttgtgtggcttttcctaatatatgtgaaattaatacataactagtaatatgaaacatggcatatatatgaccatgggttctcctgcaccacatttcaaaaaattcagttttataggaatataagaacagggataatgtgtttaatttagcttctgtcttcccttgggaggtacaaaaggagaaagataaatgacatcagacttcctggaaaaatatacctcattctttgagtgctttttaggtgagaagttagttgaatcccccatttgagtagactttaaagtccctttcctaaaatataatctccttgctggtatgt

SEQ ID NO: 172747 - DNA, 126 bp, Homo Sapiens
tggggaccatgcactttgtcacagaaacacagtaagccctacttgacagacaaagagcaacgtaataatgctatagtttaaaaacaccctccctggtcatctagtgttgaggaaaaacattaagta

SEQ ID NO: 172748 - DNA, 276 bp, Homo Sapiens
aacaaggggagtagtaaccctggttgtatacatacatacaatggtcgtgtccacgaggtctaatgtaagcacataaggcatcactcctctcctctctcttgagaggatttcttgtgcacagagtatgaagcagttgtggagcgctgtgcctttgtcaagataccatcttgttagatgatttctattctttgctgttttctcttcaaaatgttagtcaagctctgtcatgcttctagcaacattgtaagactaattatttgtttccacctctataac

SEQ ID NO: 172749 - DNA, 1041 bp, Homo Sapiens
  misc_feature (439)..(447): n is a, c, g, or t
gtacccccgatgaaccgttgtatacagcaaagagcataatcctactcagtatgaagagcggatgaggatacagaaggctggaggaaacgtcagctgaatttgcttggcctgtgaggggctcttcaagctctttaccccagatagaagccgtgaactgcatcttgtcctgtctcgaggatgaaaagatccagacccgggaagggaagtccgcagccgacgcccgctacgaagcagcctgcaacaggctggccaacaaggcggtgcagcggggctcggccgacaacgtcactgtgatggtggtgcggatagggcactgaggggtggcgcgcggccaggagcacgcatggtattgacttaaaaggttcattttgtgtgtgtgcacattgtgtgttttgtgtactcctgtgggactcccatggttgtaaataaaggtttctcnnnnnnnnnctaggacctcgttatattccaatatttatattcttgtcggccgccctcggcccccgtaaaaactttctaaaacgattcctttggagccgcggccccagtagggaacgggaaccctgggccctatgctgtttccctacggaaatcccgggccatggactagtggtttggaattcctcacccacataaaaaaacggtccgggcgggaaaactggagcgatcctgtaaaataatccccgaaggggaccttcgtgcgggtccgtcactgggcattctactccgacaaggaagctccgattcccgagccccaaatatccaggaattagcgcccccgggcccgtgggccacttcctttcatccaataacttgggctacgacattcgactttaaggcacattttctgtcccaaaactggcggaaagcccctgtcaatatatattggcttgttggaattgtactcccttggtaaatccgtacccggtgggggcagttctcgtgcgaatatatttggattattctctttcgcgctccccttaccaatacacttattgcgcaccctgctggcgcccacataaaactggtgtccgatctcggtac

SEQ ID NO: 172750 - DNA, 437 bp, Homo Sapiens
tggtgacaagtctcagaaatgtgacatgtctctgtagcagcgcataaagcttgggttgaggattaatttggattctctggaatatcagcctcccagaatggcaaatcttgacctcatctagtccagcccaaccttcccttttgtacatataagaaaactcagggttgagggcaacatatcttgcctaagtccaggtctagacccaagccctgcctctcacaatccttccccatttctgctgcctctatcgtcgcctctggaggatgaagagggctttttcgcttgccctcaaatgctcatttctgaggtaccccccccagaaaaaggtcaggtagcagcacagcagcaatagtatccacactaatctaaaagcatatttaaatatgaattactgtggtaggaaacgaaagacaactgtgtgatccaaccactgcccc

SEQ ID NO: 172751 - DNA, 1468 bp, Homo Sapiens
  misc_feature (100)..(100): n is a, c, g, or t
  misc_feature (1056)..(1070): n is a, c, g, or t
  misc_feature (1356)..(1356): n is a, c, g, or t
  misc_feature (1390)..(1390): n is a, c, g, or t
  misc_feature (1427)..(1427): n is a, c, g, or t
tgcgaagaagacagcagccccgcccttgagttcctggccagcagcccccctgacaacaagtcccctgatgaagccaccgcggctgaccaggagtcagagnatgacctgagcgcctcgcgcacatcgctggagcgccaggccccgcaccgcggcaacacaatggtgcacgtgtgctggcaccgcaacaccagcgtctccatggtggactttcagcatcgcagtggagaatcagttgtctggaaacctgctgaggaaattcaaaaacagcaacgggtggcagaagctgtgggtggtgttcacaaacttctgcctgttcttctacaaatcacaccaggacaatcatccccttgccagcctgcctctgctcggctactcgctcaccatcccctctgagtccgagaacatccagaaagactacgtgttcaagctgcacttcaagtcccacgtctactacttcagggcggaaagcgagtacacgttcgaaaggtggatggaagtgatccgcagtgccaccagctctgcctcgcgaccccacgtgttgagccacaaagagtctcttgtgtattgatggccggacacactcgtttccgcagtggctgctttcctggaagacgtttcctttcttctgtattaatgaagcctggtaaaattaacacctgtctgaaaatcaaaaacatggcttcccagcagctctcctgtctccacagccgcgttttttaaccccgacctctcagcgtctgaatgaacagcgctcccacctccagtcctggcatccgctgggggcgctgttctttagctagtgccagtattaaaacattgtcattacgagagtgccaaatgacatcttccctccaccctgcccctgaaaaacagtacacacacatccgttcaacacaagacagggcaagtgtttttcttcctaaaaaaagttctttcttttattattttcacctattggctgctgcattttacgaagtggacttcccggtgtttgtttgtttgtttgcaatacactcagtgcagccttaagcaaatgagatcattttcagatttcannnnnnnnnnnnnnncagtctttctactttggtaataataggaagttagtaggactcacttctcggattaataagcaattggcagcacacagcgttccacggcggggtctcacgctcacctgaaaacaccggttcccaacctacttcttggtgcaagttgaccaaatcgttttaagtggtaactctttccaaccgtagcagggttgttttctgttaagcaaagccgagatccagtgcaatacctgggactgtcaccgtcctggtgagtggtgtacacaatggggaagataataagcccgtnggtgtttttgctgtctgtctgtgtcacaagcatngaaaacccgtgtgttcattgatcagcacccatttgtnggtatgttcccttgatgaggcgtttagtgaggcctggctgg

SEQ ID NO: 172752 - DNA, 480 bp, Homo Sapiens
ggtggaatatgtatctgtgtgagtgtccactccgattcggcgggaagaactgtgagcaagccatgcctcacccccagctcttcagcggtgagagcgtcgtgtcctggagtgacctgaacatcatcatctctgtgccctggtacctggggctcatgttccggacccggaaggaggacagcgttctgatggaggccaccagtggtgggcccaccagctttcgcctccagatcctgaacaactacctccagtttgaggtgtcccacggcccctccgatgtggagtccgtgatgctgtccgggttgcgggtgaccgacggggagtggcaccacctgctgatcgagctgaagaatgttaaggaggacagtgagatgaagcacctggtcaccatgaccttggactatgggatggaccagaacaaggcagatatcgggggcatgcttcccgggctgacggtaaggagcgtggtggtcggaggcgcct

SEQ ID NO: 172753 - DNA, 809 bp, Homo Sapiens
ggcctgggtggcgaattcggcacgaggcggcacgagggctccccgagccctgccaaccatggtgaacttgggtctgtcccgggtggacgacgccgtggctgccaagcacccgggactcggggagtatgccgcatgccagtcacacgccttcatgaagggcgttttcaccttcgtcacaggcaccggcatggcctttggcttgcagatgttcattcagaggaagtttccataccctttgcagtggagcctcctagtggccgtggttgcaggctctgtggtcagctacggggtgacgagagtggagtcggagaaatgcaacaacctctggctcttcctggagaccgggcagctccccaaagacaggagcacagatcagagaagctaggagagctccagcaggggcacagaggattgggggcaggaggagtctggaacacagccttcatgccccctgaccccaggccgaccctccccacaccctagggtaccccagtcgtatcctctgtccgcatgtgtggccaggcctgacaaacacctgcagatggctgctgccccaacctgggacctgcccaggaggttggagcagaaagggctctccctggggtggtgtttctcctctagggtattgggatgcatgttctgcactgccagcagagagggtgtgtctgggggccaccacctatgggacacggggtcgaaggggcctgtacactctgtcatttcctttctagcccctgcatctccaacaagtccaaggtgacagctggtgctaggggcgtggggttaataaatgccttatccttctcttc

SEQ ID NO: 172754 - DNA, 1372 bp, Homo Sapiens
  misc_feature (1163)..(1163): n is a, c, g, or t
cagacgttagagcgcacccgttgggcgatgaaggcggacagcgtcgaaaaaacaaaagaataagaagaaaacgcggaacagggcctctgtggcaaatggaggcgagaaggcctcagagaaactcgccccagaagaagttcccctaagcgctgaggcccaggcacaacagttggcccaggaattggcttggtgtgtggagcaactggagctgggcctcaagaggcagaaacccaccccgaaacagaaagagcaggctattggagcaatccgaaccctgcgcagcaaaagaacgcccttgccccggaagaggcagctgatgcactccttgtttggagactatagggctcagatggaagccgaatggcgtgaggccctgcgggctctcagagctgctgcttattcagcccaggtgcaacctgtagatggagccaccagaaagaagagccaaacgggtctgcaggcctcgctctatatggagagccaaagccactctggacatgcctgatgaagagtttaggttcaatttcttttagcgtctccccgaacctgaaacaatccccctcccttggggtggtgtaggggtttgttttgagtgcagagcctttccaggacttctgttgtcagagaaccttggagttggtctgtccctggctggtccaaggatttgtagctgttgtgaaggtgtgagaccatcagataggcaaaagaccccgttcgttttctgatgatatgttctctctttcagaagagagagagaggtgcatttataagatatgcaataaattgaagtgagtgttcaaagcattgtagaaggaatattgtactcagtctttaggattagattaagtggctgttggtaacaaagattagtggagaagctgtataatcgtacactggtttttcacttgtgaaaaggaatcccctgtcaaatggtgcaatgcttaatgctggtatggacatattgcccctaatcctctattttttggataaacttgggataatgaagtgaaaagagtaatgcttgaccaccttatggttaggagggaagtaacagaaaacaatgcatggggctgcggggtttacccctgcggtcctattacaccttacgttgggagaaccctttgcgggggggttagcaaattcatttttcctggacggagggnaaaaattccccccggggcaaaaccttgaacgggggaacccctaccatagcctaaagggccccagggccctttttagtccgccaactgaaacttattttttgcccccaaaaacagaatgtgggggggctcggttaaactccggaacttatagttaccctgagggcatgaaaaaaccgccttggcgttgcaagggcgggagagaaagccgg

SEQ ID NO: 172755 - DNA, 877 bp, Homo Sapiens
  misc_feature (612)..(696): n is a, c, g, or t
  misc_feature (713)..(714): n is a, c, g, or t
  misc_feature (717)..(717): n is a, c, g, or t
  misc_feature (719)..(721): n is a, c, g, or t
  misc_feature (723)..(723): n is a, c, g, or t
  misc_feature (725)..(727): n is a, c, g, or t
  misc_feature (779)..(795): n is a, c, g, or t
ctcagactctgcttattcagcccagtgcaacctgtagatggagccaccagaaagaagagccaaagggtctgcagcctcgctctatatggagagccaaagccactctggacatgcctgatgaagagtttaggttcaatttcttttagcgtctccccgaacctgaaacgatccccctcccttggggtggtgtaggggtttgttttgagtgcagagcctttccaggacttctgttgtcagagaaccttggagttggtctgtccctggctggtccaaggatttgtagctgttgtgaaggtgtgagaccatcagataggcaaaagaccccgttcgttttctgatgaaatgttctctctttcagaagagagagagaggtgcatttagaaaatatgcaataaattgaagtgagtgttcaaagtattgtagaaggaatattgtactcagtctttaggattagattaagtggctgttggtaacaaagattagtggagaagctgtataatcgtacactggttttcacttttgaaaggaatccctgtcaaatggtttagtgcttaatgctgttatgtcatattgccctaatctctatttttgataaaattggataaggagtgnnnnnnnnnnnnnnnnnnnnnnnnnnnnnnnnnnnnnnnnnnnnnnnnnnnnnnnnnnnnnnnnnnnnnnnnnnnnnnnnnnnnnctccaaaacaccaaacnnttnannncncnnncccccgtgggggcgcccctccggccccaaaaaaattttcttaaagacatttnnnnnnnnnnnnnnnnncccccgaggaggaaaggggaaccgggtggctttccggttgtttccaagggaaaccccgggaccaaagactaggggcgtgggg

SEQ ID NO: 172756 - DNA, 963 bp, Homo Sapiens
ggatttgtagctgttgtgaaggtgtgagaccatcagataggcaaaagaccccgttcgttttctgatgaaatgttctctctttcagaagagagagagaggtgcatttagaaaatatgcaataaattgaagtgagtgttcaaagtattgtagaaggaatatggttttcacttttgaaaggaatccctgtcaaatggtttagtgcttaatgctgttatgtcatattgccctaatctctatttttgataaaattggataaggagtgaaagagtatgctgaccacctatgttagaggaagtacagaagatgcaggggtgtggtatccctgggtccagtccctcacctggtacctttgtgcatgttgccttcattcctgagcaggtatcatcctcagggaaccagcatggcacctaccaggccaggctctgttcttaggagcaaggagcttcttgcgctaacagttctggcctgagacctggattgagccttggcagacttcttgtctaaatgttggccattcagtctcaggccctctgttccatggaattgggaatctccaggtgacctaatcctcattggtggcttgatgtttgctggtatcttccaaactcagttcccagactagattgatacctggagcccagctgcctactcagcatttccacttgggtgcttcataggcatttcaaacctgatgtgtttaaaacacttgattaggctccggttttcctttggcttctgcttttcagtgaatggctgctgccccaatggtggggtgccaaggcaacccagtggccgagggaaagagactgaggggcaacgagctggttccggtataataaaattatattaaaataaggaggaggttattactaaaattctaagatccatagaaccttggattaatattgggggaggtatccactttaatccctttaggttttaataggccaaatttacctcctt

SEQ ID NO: 172757 - DNA, 574 bp, Homo Sapiens
  misc_feature (540)..(540): n is a, c, g, or t
  misc_feature (546)..(546): n is a, c, g, or t
  misc_feature (561)..(561): n is a, c, g, or t
catggtacaaatgataaattatatttatacagtaaataagtatcaacagtcaacacaagttcaaaaccagccaccggcctctgggactgagaaacagctgggtgacttcctccaccacggtgcccatcaggagggagcacgatggcacaggtgcaacatgcgtggcagtggccggtggcttcatgatcagtgcagtgggcaacagggacatgcactcgggatggcctgtgccagaagatggggcagggggctgtcttcttgggtcccggtggcccagtggctgtcatgttggggcctcaaagtcacatcatgaaagactcgttacaaaagaatcactgaccccaagtagtcgagtctagtctactgacctgtaaggctggcccaggccctgcaccgtctgaaggaaagcacctttctgggcaagcatcctgcctcccatcccattgcacctccccacccttcccccggcaaacgaagaccagccaccggcttacccaaatggcaaccgggagcctaagacccagccgcagcctgcaattntggcanaaggtggctggtcangaacttttaaaac

SEQ ID NO: 172758 - DNA, 433 bp, Homo Sapiens
agacactacagcgtgtgaaaagcacttgttcaaacaaatagaagatcattggtagagagagaaaatgaaagccaagaccaacagtacttcaagtgatttgggaacaacagagaaggactgattgtcagctgatcaaagaaatggaactttttaaagtgtaaaagaaatcggagtactaagatatctaccaaagagtaatagcacagaacatcacaatcagagacagaggaggatcaccatgccgagaccagtgatcacatgacatccaaattccaaggcaagtatgatcgccatggaccatactacagggcaagtgtgcagagtgatgctgaggttccaatcattaagacaaagagagctgatttgtcactcttttacctctacccttccagtggctgggatggtaggagctggattttttttggaggcgccg

SEQ ID NO: 172759 - DNA, 526 bp, Homo Sapiens
  misc_feature (505)..(505): n is a, c, g, or t
ctcccttctctcctttgccctcacaacacggcgagaggaagccaatcacatttttcagtttattaacctggctggcagtccaatcacactgcagagtgaaaaaggcttctggcagcccagctctgcccagctcactgtgccttggaggcggtggtggtggtggacgcagccccgctggcagaggccactgtgaagagagagttctggatggactcagcagaggtggaggtggcgtgaaggctggctacaggtgcagagttccctgcagatgctgcggcggcagagaccaagctaacagggttgctggtgagcagagagaggttctgagggttcaggaacagaggggcagtcacgatgttgggggctcctcccgcattggcaaataccaggttcccagttgcatcaagtgatgttattggaagagagccaccagaagcaagagcttgaatagttgccagtgtactggtgctcattaaagctgggcttaaaagcacccgttcaaggnccctggattcaaactgggtaa

SEQ ID NO: 172760 - DNA, 783 bp, Homo Sapiens
actcgataaggccaaatggtggtgtgtaggtacttatggtggcctgccaggtcgatgaaggtgatcatcttggagctgctctcacagatctcttctgctgtccgtgagtcgctgtaattcaccacctctcccttgctgttaaagcccaggatctcgaagctgatgctggaggttcggccagactgaatctcatgcaggtggcggaaaaggttgagccgagcccggccccgcccattgtccagctctccctgggtcaggactccaagcagagttgacttcccagagcccacattccccaggacggctacacggaggtctaggaactgttggttgtcagggacctttcgtactagcacctcggtgatcttccggggcacgtcgctatcataatccacttctcgctctcgaagaacggttatgtctgccccaaccttctctgccatccggtgcagggtcttgagcgaagctcgcatttcctcctcagccagccccaccagcagcccattgtcctctaccccaatctggtagacggcctcaccacgtccctcctggagccgccacttcatttgtgtcaccaggtgctcaaagcggtactgggatggattcaccagcttcaatttatattcaatgtttccatcttcagcctgaaaagaaacagtgagcagttaccatacactgtacagacccaatccctacttcccctcaattcccaccggaacgcgtgggtcgacgatatcccgggattccggccgtacagcctgaaaaaaaccccttatgacagcg

SEQ ID NO: 172761 - DNA, 533 bp, Homo Sapiens
ccttgagcagtgctacttaaacagttttcacagtttcattgattgactctacctccttgccccacaccacttttgcaatccttaaactttcagtggctgtgcagagtcgagggaggaaccagctctctggtttactggaacatagtcttccatctataccactagggttttgtcttatgtttacttttggtaactctcttccttctttttctccctaccccccaacccctagcccaaccaatgctagaatttcttgctctgaaggaggagcaggtgaaacaggtggtaatttaccttctcggcccctattctggttcattcagcacttttaggtgggaactgttggaaattccagggtaaggaggaagatgcctgttctccctgtctgaagagggagatgagacagctctctggaccaggaattaacaaacgctggagcagcccacgaggaaattcgtgtcaaagaggagggaatgagattattcggaggaagggaatgggggagacagcctgagtaaaaggcttggaaattg

SEQ ID NO: 172762 - DNA, 177 bp, Homo Sapiens
tttcctcacttcatatccaatccatcagtgatttttattttccttttgtctccaagattcccttttatctccaagacatattccatttccttcttccatctaaataaccatcatcctagtcaaacacatcatttcctctcccctaatctactaaaatatagctttctcatggatttc

SEQ ID NO: 172763 - DNA, 476 bp, Homo Sapiens
tgtcacctcatgtcaaatggagttaagcacaaactgagagttacgcacagtagttttcttaagttaggcaaataatttaattaatcgccatgaataaatattctctttatttcattgagtttctcttctgaaccatctatcaatgccattcagaggaacgttaatatatccagtcaaaaagacactgcaaattgaaatgtgtcaatatcctagatgatcagaaattttcatttttaagagtaagtgctgtgtttaatgacctaccatagcaaaaagcagttcactgaaaacaaatttatgaaattcttggtacactttatgaaagtctgaaattataaatagaaaagaaccatcaagatactttttaaaaacctaacattgtatattctgaaccacatgctaattaaaattcgttgttcattacacagcaccaatacccatgatacatcttacaagaacaaaactaacatatttgg

SEQ ID NO: 172764 - DNA, 146 bp, Homo Sapiens
cctctcaaccacaggaagcaatcatgacttcctaatcatctcccatgtatgaaagttccattgtgttgaaaacatttttctccatattcctccctctaattcagcactacggactttaactccggaagccaacacctccccacatc

SEQ ID NO: 172765 - DNA, 591 bp, Homo Sapiens
tcttccggacggagctcagagcaaagggtagtagcaggctttgagctgcagggagatactgtcatatcctagactgaaggaagttaagctgagcagaaaaatgctctgaagaatgactcagaagaggctcttgtaagaaagcttccttggagtacgcgtgtttggatttggggaggtgaaggtcgtccccatgccaggctggccgtggctgtttgtgacatcgtggagctgagtgttcagagcatgggcttcagggcaggtagtcgtgggttcgaattttggttctgcagctcagtagctgtgtgaccttagccagttattccacttctctgagcctcggtgtctccattgttagtgatggagatggatttagtttggaaccttgccacctcccagggtggttgtgagggtccagtgaggtcacatgtgagaacaccagactaagatgttagtgtcagttccaatattcagggccgtgcggcagggggaaccccgatgaggagacacagaagtgtgtgggcagcatagactgtggaagtcgcatgcatgcataggcctgaggtctctgctcctagttgtaccctctagagt

SEQ ID NO: 172766 - DNA, 374 bp, Homo Sapiens
atcctaacccttccccctcttaggcccctcccggtcacattccccttcctgtcaactgcctagcacagaccctccctcctccacccactacccccaaagcataggcacacacactaagagagacaaatgatggggcctcagctgagcggggtgcgtgtccggcccataaaccatggggatgggtcacgtctggagatgccatggtcgccactacccacccatctgtctatacgctgttctgcctcagaccagcccgtatggcttcctgagtccctgggggaaggtgtcacctctctgtgtccacatccactgcaggtgcgtccatcctgatctctgcgacacaggaagccatacgggctggtctgaggcagtgt

SEQ ID NO: 172767 - DNA, 316 bp, Homo Sapiens
ttccacctcaaatacctcacagaaatcccacctccttcacatcctagctttaagcaacttcttcagaaaaagcatgcccatattatctaccatctctgaatccccacaatattttgcaccattcatgtgccctgtagtatagtttctaatgtaggtatttattatggaagtatttattaatctcatcctgtgagccgtgtcttatctgaaggacagtaatcacaaaaagagaaataaaactcatccctgaactgtgtgggacaaagccagtcttttgatatataaatacttccataataaatacctacattagaaa

SEQ ID NO: 172768 - DNA, 279 bp, Homo Sapiens
cgagctcggtaccccgctcatattctctccctcttgggtcctttttcttttgaaccacacaggtgttctaccttcattctttttcttctctatttttttctggggcatctcatcctctttcacaacttgaattacaccttctggggttaaactatttctgtttggttctaatcccaacttctatgctataatcaggttacctgctaccaatttcctccaaatcccaccaactctctttgtataaaatagaattgataatcttacatacacatatacttg

SEQ ID NO: 172769 - DNA, 107 bp, Homo Sapiens
  misc_feature (1)..(1): n is a, c, g, or t
nacaagctactgcactgggccatggccaggatttttatgacttgtaaaaccactggcttcaaggaggctataagttattatgggagaaaagtaaagggctttgtaaa

SEQ ID NO: 172770 - DNA, 240 bp, Homo Sapiens
tcttcgctcatattctccccacagtctgcaaccagttataagtaccttttgtgaatacacatagaaataaaaatcactgattcccaaatggtccaaaaaatcaaatgagtagtaaacatttgtgaaaatatttatccttatcaacattgtaaaatacaaacattttagagccacatataaaataagccaggtgtttcaaagggagtcctcattgctggagagaaatatgagcataggggg

SEQ ID NO: 172771 - DNA, 156 bp, Homo Sapiens
aatcagccttggagaccctgaacagtcctgcagagaacagccccaatcaccgtccttacacggcctctgatttcatagaagggagctaccgaacagaaagggacaaagggacattgtatgagctcaccttcaaaggggaccacaaacacgaattca

SEQ ID NO: 172772 - DNA, 189 bp, Homo Sapiens
ccgactctagcaggatcccacacacacacacgacagagaacatgccataaacatccttgaacccatgcaggaaagcccatcccatattctgaaaaaatgccaaattaggtttttctttctttttggaaatcagtcattacaggaaccgaaaccattgggttcaaggatgtttatggcatgttctctgtc

SEQ ID NO: 172773 - DNA, 269 bp, Homo Sapiens
catacggtatgccaagagtgaacaacagcagccaccaaatagatctggctttgtgctggcttgagccacgtgggctcccagaggagacgctcactgaggtctgtgaaggccttgctgcacacctgcctgagagagccaaagagctgtgtgtgttggactgtggctttttgaaatatgtttggctgggagatgggaagacctgggatcctgtagaccagtgaaggggaggtgtgcagcaaggccttcacagacctcagtgagcgtctgtt

SEQ ID NO: 172774 - DNA, 299 bp, Homo Sapiens
  misc_feature (120)..(129): n is a, c, g, or t
ccctgtttttccccctctttctctcctctactttatctcctagagatctaggtagttcccaaaggaataatgctttacggagtctaatgttgatttattaggtaaaaacagaaaatgacnnnnnnnnnnacccacaagttccataccaaaaaatgaatgtaaacttcttatgcagtttcacacattgaaaatgcaggttattttaattccattgcatttttcagaattctcagtcgcaatcctctgacaactgttgaagatccgtatctctttagattactggcattaaaatatctgta

SEQ ID NO: 172775 - DNA, 1192 bp, Homo Sapiens
tgggcagtgtcttcctggatggctagcaaaacgtcaagcttggagactttgggctagctagaatattaaaccatgacacgagttttgcaagaaacatttgttggcacaccttattacatgtctcctgaacaaatgaatcgcatgtcctacaatgagaaatcagatatctggtcattgggctgcttgctgtatgagttatgtgcattaatgcctccatttacagcttttagccagaaagaactcgctgggaaaatcagagaaggcaaattcaggcgaattccataccgttactctgatgaattgaatgaaattattacgaggatgttaaacttaaaggattaccatcgaccttctgttgaagaaattcttgagaaccctttaatagcagatttggttgcagacgagcaaagaagaaatcttgagagaagagggcgacaattaggagagccagaaaaatcgcaggattccagccctgtattgagtgagctgaaactgaaggaaattcagttacaggagcgagagcgagctctcaaagcaagagaagaaagattggagcagaaagaacaggagctttgtgttcgtgagagactagcagaggacaaactggctagagcagaaaatctgtggaagaactacagcttgctaaaggaacggaagttcctgtctctggcaagtaatccagaacttcttaatcttccatcctcagtaattaagaagaaagttcatttcagtgggggaaagtaaagagaacatcatgaggagtgagaattctgagagccagctcacatctaagtcccagtgcaaggacctgaagaaaaggctttccgctgcccagctgcgggcttcagccctgtcagatattgaggaaaattaccccacggaaaagcaggcagatccttggcatgcggctagccaggtaaagaaacacagagctgtgtacaggatggcaatatttcccaacctttcaagaacggatattccaatgccggagcgggtgaaaaccttggttccctgaacacaggccctctccggaatagtaaccatggatatttccggaaatgggttttactggttctttacgaaactttggaccaaaaggggcccccttgaagttggccttccccccctcgaaggagatttttgtctaaagaaaatactttcttgggatggggatttttaaacccgcgggggg

SEQ ID NO: 172776 - DNA, 852 bp, Homo Sapiens
ggttaaacggggcccaaggcagggtggcgggtcagtgctgctcgggggcttctccatccaggtccctggagttcctggtccctggagctccgcacttggcggcgcaacctgcgtgaggcagcgcgactctggcgactggccggccatgccttcccgggctgaggactatgaagtgttgtacaccattggcacaggctcctacggccgctgccagaagatccggaggaagagtgatggcaagatattagtttggaaagaacttgactatggctccatgacagaagctgagaaacagatgcttgtttctgaagtgaatttgcttcgtgaactgaaacatccaaacatcgttcgttactatgatcggattattgaccggaccaatacaacactgtacattgtaatggaatattgtgaaggaggggatctggctagtgtaattacaaagggaaccaaggaaaggcaatacttagatgaagagttcgttcttcgagtgatgactcagttgactctggccctgaaggaatgccacagacgaagtgatggtggtcataccgtattgcatcgggatctgaaaccagccaatgttttcctggatggcaagcaaaacgtcaagcttggagactttgggctagctagaatactaaaccaggacacgagtttggcaaaaacatctgttggcacaccttattacatgtctcctgaacaaatgacatcgcatgtcctacactgaggaaatcagaatatcgggatccttggggcctgcttggtgaaatgagttcatgtggcgtttagtggcctccaattaacagagtggtagaccagaaggaactccggtgggaaacatcagaagaa

SEQ ID NO: 172777 - DNA, 574 bp, Homo Sapiens
  misc_feature (557)..(557): n is a, c, g, or t
ccgctctagagtatccccgccactgaagagttttagcactgatcaacactgtatttcctagggcagaataaaaggtatctggtttgccttaggaaatacagtgttgatcagtgctaaaactcttcagtggcagtcactgtggttcttttaactggggatttcctttcagggtttcatttggtaccaaaacagaacatttaccttacatttcagatactctgttttctcagcattgttcagatactttcctttaccgctcttcacgtacccttttggcattgagtaattctataaatgtttctatccttggtttttaaaccaagttattcatactcttaaaatatctaccaaatctcattgtattttcacatattttgagcatcaagatactggtcattttaaaaaatccttcagtaaatagcacagtttattttcctaatgacatttttagggtttcttcattgatcaaccagggttgggggtacacaaatcaattgtggggggaaaaatcaaataaaacaattggcttattatattttccccaagggcttgagccntttattctttttatttc

SEQ ID NO: 172778 - DNA, 115 bp, Homo Sapiens
caaccgataccgacaagttctcgggcaccgtcggcttgccgattccgggcaccgaaatcgccatccgcgacgacgaaggccgcgatctgccgatcggccaggcgggtgaaatctg

SEQ ID NO: 172779 - DNA, 744 bp, Homo Sapiens
  misc_feature (131)..(131): n is a, c, g, or t
ctctggttttagaaaaaattcttcagatggacgcattattttaagactttaccattttccaaaaccaactgaatcttatcccctccatttatccccctccagacacttctaatcaaggtcaccatctccancttcccccatagacaataaaaatatggctggagaattctactgtaatagaaaaccaaggagatatagtaatttgacagtgtgtttcctttccatccactagacaagaataccccctcccattctttcctcccctcagtcaccagaatgaaggggctggaaaacgttggtctggttccttttagagctgattccccattggatactgcctggaggccttggggatgaatgagaagttctgcagtttggatcagtagcagaagcaggtaacacatcagggaaccggtcagcctaagataggaggggacagaaaatgatgaaagagtttctgatacatttatcagctaaattgctatggtcacccccatgtctcctgtaatgtccaaacctaaggaattaactaagtaaactaaaacctttgtgttcttgctctgaccttggacaatggaattcttcttattttcattcagtggatagcaaatctgcttcttccctgccttaactcactcaaggtctctgtgatgcactccagagttttcctccttccctgcatagtcttctcctccctagctgcctttcaaattggtgaaaatgaagcttcaggattatgaaaac

SEQ ID NO: 172780 - DNA, 618 bp, Homo Sapiens
  misc_feature (65)..(65): n is a, c, g, or t
  misc_feature (97)..(97): n is a, c, g, or t
  misc_feature (130)..(130): n is a, c, g, or t
ttagtcctttagtacagtctgtttcctccttcacccccagaacaaaaatcgaacttctggttggnacagcgtcagatgtcactgaggtgaccccagncctgtttgcagttccaagttcttccgtgtaggncgtcactgctactggaactttgtagatgaggagcctgtatgatgatgtcctgaacatttctatcctttcctcacacagagggaagcagaatgaaggggctggaaaacgttggtctggttccttttagagctgattccccattggatactgcctggaggccttggggatgaatgagaagttctgcagtttggatcagtagcagaagcaggtaacacatcagggaaccggtcagccttttagggtctcagcttcctcatctggaaaattagaacaaaatatctacctcacaatggtcacctgtggatttaatgagaaatatgtgtaagatgcttagaacattttccagatatataacagatgtgaaataaatatttttattggtgttatcgagtggttctagattaactttggggcttggaactctgcacataagctctgagccagttaattatcccttttactttcgcaaagtgacaggttttctcccc

SEQ ID NO: 172781 - DNA, 176 bp, Homo Sapiens
ataggggggagagaatatgagcacggctctcacctccactgcgcccatcccaggccaggctaccattgtctcctgcccggaccctggccgagctctccgcatctacttctccacttgttcacccctcctgctcccccacctagtctccatatgaggatcaaagagatctcattaaa

SEQ ID NO: 172782 - DNA, 340 bp, Homo Sapiens
tgtctagctttgcctcagatgtgtccatctcccatttgcttttcggaatgtaacccagttcgctttcctcttcctctgcatctttcttttcttcttcctgttcttcgatatttgcatcaaaatcttccatctctacctcttcaatagcagcatcttgcagcaaagaacgaatatctagacgcatcatgtgacgaggtgcagtttcccagtgatcagccatcttatttatttctttaagctttcttccatgaatacttctcttgccacaagtctggttatctgcactcatttcagccaaatatacctcaaatcccttggtttttgctgcactccaaaacgt

SEQ ID NO: 172783 - DNA, 513 bp, Homo Sapiens
  misc_feature (503)..(503): n is a, c, g, or t
agctcggtaccccctgcacttgtgctcgctggaggctgcttatttctgctctcagtttctggatctctctctccaagtgggagatgtgcccccgctgtaagactgcctcgctctgaagacactccttggtaggagagttagccacattctgggggctggaagcagggtctgagtgatgcaaaatgaacctcaacaggtttggaagggtgatggggacgtcttcggggtatttcacacttaggtcctttctgttgcagggaaaaaacaaagacagtaggaagacgatcgaccataaattcccaaggaaggtcattctgagacacgtcaatccttgccacagtgaatgtgtccatgggcaggttccgagctagctggatgaagatgtgattgagggatggacagaagccgcaccacggagcgtaatagagcaggagaacgtcctgtttttgaaggactacttcccaaaaggtatcagttgtcacttcagtgattaaatgctgagncgggaactgg

SEQ ID NO: 172784 - DNA, 405 bp, Homo Sapiens
gtgttctgcaaggaagaatactgcagaagagtggactggtgtggccattatttcagcatcttcaccatgtacgggccttgtaatctgtagccgatctttctataataattcctggtgccgacccctgatatcacagcgattttcccagacccatgttcttctctagctattctttctgcttcctccatcagcagcatgccaaatccctgatgctgaaatttagtaggatcccggctgctcacagggacctcactcccatacacatgcagctctcgtactatggagacacctccacccaattcgaaacggaaagtttcttctgaacacttgcgtaatcgtaggaggccaatcaaaatgtcttgatctgggtcttcgtatgacaagaatgtttcccagccaccattt

SEQ ID NO: 172785 - DNA, 321 bp, Homo Sapiens
tgtctagtagggaccaagcagggaaaggccacgaattggaagaggcaagtacagccccgcacagggaactcacagaagggtcttaaccctccccaccttctgtgtcctgtacccaagcagcttcaatagctcaagagccctggggcagacacttgattcacacagcctggctgaggactggggattagccagagaggtccctgctctgtatagggtggcatcaaacccagccttcacgggcctcaaccgtagtccctgtgctgccctcccttgtagaaagtaaagaaaatcagttctgaaacactggggactaaccagcca

SEQ ID NO: 172786 - DNA, 433 bp, Homo Sapiens
ccactcgtatagtcaatgtgactggatttcaaaagccctttcagttatagagccaatgactgggcaacagaaatgcctttcatttatatcattcttctgttttcttggggcaaagggctgtagttaagaggaacagttagattttagtggcttaccaagttgctttagaggaagtctatgaaaggactgttgagccaaacaatgtccagattaaaaaccagtctgttagcaggacagaatcctcttgcagatactttgtttaacctttaacttagtgcaagaagagttcaagctatgacttttgagattaaatcttaaattatgtaagcatgtttctgataaggattgttttatcatctgcatcagaaccatttggactgctttaaaatacagatttttggactcctacccagatttactaaatcaaattctg

SEQ ID NO: 172787 - DNA, 1071 bp, Homo Sapiens
tctcttctgctggacagggccttggggtgcttgaacaattcatacctttgcagctggacgaatgtggttgtcccagagccaccactgtccgcagaagagacctggaactgctaaagcaagcttcaaaagcacattagagactaactgtaacttaagtgctgggggaaaaaaaatgtgaactaacttatttaatttatggcattttaaaatgacactgttaacccaacggaaccattttccagtttgatacagaatggggagaaaagaaagcgtttgaaattattgcttggataccagcttcatgcaccttctacttgtacaaaatgttaaagacgttgtttgtatttgtaaggctggtgtattcagagagcatatctcttattcctcactttccacccccgtattttgtaatgaccatgagcaatgtctttactttttgtataatggggcggggtggacgtgcgggcttctgacagtcagcctgaggtcctttagaggaccagcttacggaccacctttggataccttgcaagtctaatggctcaggctggggtccgggcgggcaattttgactttggccggcctggcaatggttccagtcaccggcctctgggggcccccgggttttcctggccgccagacccttttgaagggaccttctccttgatgaaaaaatccggaactggccacggagttttcttaagataggtaggcaaaccgttcaaggggcccccaaaacatccctcgggcctcttattttattttggccccctagggcaacattcgtcgcccctaattatttttcactcaccccctttccataaataatcctaagccctaatatcgcccgtcacggggggcttagaatacttgtacccaacccacaggggaaaagacatctacccggcggacatctaataagagggccctcctctggcggggtatcttattattttctcccccccttgaaatcttgccggaaccaaccccgcgggtgtcaatcaatttgttttccctcgtcgatccactatacagcctccagaaggggttcactatgggacaaccatccca

SEQ ID NO: 172788 - DNA, 448 bp, Homo Sapiens
  misc_feature (293)..(352): n is a, c, g, or t
tctgtcattctgatgaggtaaatgcctgtatgcatgtatttcttgcaatctgccttctgggtgcatatgtagctgtgatgaatatctatatctagcacaattgcagcacaatgctggattattcgcctgcctgcacctagggcggcggcctccagcttgccctcgaaggtgaagtccagcaagtcgggcttgaggcaaaggctgcagttgatgggggagacatcggcaggcagccgctcgaagggcctcttctccggcatcgcggcgaggcccaggctgtggaggcggcggcnnnnnnnnnnnnnnnnnnnnnnnnnnnnnnnnnnnnnnnnnnnnnnnnnnnnnnnnnnnnaagaaacaagttcacgttgtccagttttgaggtaatggaagaagttgcaccagtatgagaatagtgggtcggttttccattacctcaaaactggac

SEQ ID NO: 172789 - DNA, 842 bp, Homo Sapiens
  misc_feature (735)..(735): n is a, c, g, or t
aagccattccgccgatacttagactcgcatctggactatggaaatcatgtactatgtctacatagggctgctggcagctgttctgtaaccaatgccatcaatatcctggcaggaattaacggcctagaggctggcccagtcactagtcatttactagcttccatcatagtctatcaacctggtagagttggaaggtgattgtcgggatgatcatgtctttaccctctacttacatgataccctttttatacaccactttggcattgctctaccacaactggtacccatcacgggtgtttgtgggagataccttctgttactttgctggcatgacctttgccgtggtgggcatcttgggacacttcagcaagaccatgcaactattcttacatgccccaggtgttcaacttcctctactcactgcctcagctcctgcatatcatcccctgccctcgccaccgcatacccagactcaatatcaagacaggcaaactggagatgagctattccaagttcaagaccaagagcctctcgtttcttgcggcacctttattttaaaggtggcagagagcctccagctggtgacagctacaccagagtgagactgaagatggtgaattcactgaatgtaacaacatgaccctcatcaacttgctacttaaagtccttgggcccatacatgagagaaacctcacattgctcctgctgctgctgcagatcctgggcagtgccgtncaccttctccattcgatatcagctcgttcgactcttctatgatgtctgagtcccttgatcattgtcctttacctcacagtctctagggttcctgactcaggctgacc

SEQ ID NO: 172790 - DNA, 1595 bp, Homo Sapiens
  misc_feature (357)..(357): n is a, c, g, or t
  misc_feature (1381)..(1381): n is a, c, g, or t
acacaaagggaagaaccttccaaggaagattgcttcggatccaggagctcctcagaaacttccagccaagttctatataaccacagctatccaaagaccagcaaaggaaccaaacaagaggaaacctttgctaagggcacctgcaggccaagtgccaaagggaagaggaacaagggagccagaaagaaacggggcaagccctcctccagcgaggaagatgagggcccaggagacaagcaggagaagtcaacccagcgacgtccgcatggccgggagcgccggggtggcctccagggtgtcttataaagaggagagtgggagtgatgaggctgtcagcggctctgattttgagctctncagtggagaagcctctgatccctctgatgaggattccgaacctggccctccaaagcagaggaaagcccccgctcctcagaggacaaaggctgggtccaagagtgcctccaggagccatcgtgggagccatgcataaggacccaagccttgccagtggcatcctcaagctcttcaagcagtaaaagaggcaagaaaatgtgcagcgatggtgagaaggcagaaaaaagaagcatagctggtatagaccagtggctagaggtgttctgtgagcaggaggaaaagtgggtatgtgtagactgtgtgcacggtgtggtgggccagcctctgacctgttacaagtacgccaccaagcccatgacctatgtggtgggcattgacagtgacggctgggtccgagatgtcacacagaggtacgacccagtctggatgacagtgacccgcaagtgccgggttgatgctgagtggtgggccgagaccttgagaccataccagagcccatttatggacagggagaagaaagaagacttggagtttcaggcaaaacacatggaccagcctttgcccactgccattggcttatataagaaccaccctctgtatgccctgaagcggcatctcctgaaatatgaggccatctatcccgagacagctgccatccttgggtattgtcgtggagaagcggtctactccagggattgtgtgcacactctgcattccagggacacgtggctgaagaaagcaagagtggtgaggcttggagaagtaccctacaagatggtgaaaggcttttctaaccgtgctcggaaagcccgacttgctgagccccagctgcggggaagaaaatgaccctgggcctgttttggctactgggcagacagaaggagtatcagcccccggtggccgtggacgggaaggtgccccggaacgagtttgggaatgtgtacctcttcctgcccagcatgatgcctattggctgtgtccagctgaacctgcccaatctacaccgcgtggcccgcaaagctgnacaatcgactgtgtccaaggccatcactggctttgatttccatggcggctactcccatcccgtgactgatggatacatcgtctgcgaggaattcaaagacgtgctcctgactgcctgggaaaatgagcaggcagtcattgaaaggaaggagaaggagaaaaaggagaagcgggctctagggaactggaagtttgctggcaaaggtctgctcatc

SEQ ID NO: 172791 - DNA, 460 bp, Homo Sapiens
  misc_feature (13)..(13): n is a, c, g, or t
gggcaagggattnatctgtctgtcccttagttttctcacctgtaaaaggaggataagtatatatatatttcccagtgttgtgaagattaaaggagtttatcgatgtaggtcttaggatgagtcctggcatttaccaagggttggatatatgttattatcactattaagtgttgagggtccaggcatgctgggcaacagggaccccatctcaaaaaaaataataaagatgtggggcctgtgggaggtggttaggtcatgagggtggagatcatgaatggggttagcaccttataaaacaggcttgagggagcccttctgtcccttctaccatgtgtggatgcagtgagaaggcaccgtatctctgaagcagagagcccgccctggacactggatctgctggcaccttgatcttggacttcccagcctctagaactgtgagaaataattttttgttgtttac

SEQ ID NO: 172792 - DNA, 718 bp, Homo Sapiens
cgaacttgcatggctggttagtcccgaacttgcaattgctggttagtctcatactgcttgtgagcctggtcgaatggcataaacaggtactcctgcaccggaagggaagccctgcatgatgctgttgaggcggggctggaggctgctcaggtactccttcttcacctcaatctccttgagaatcttctccttgttagataggcactctcggtacttctctgccagccttttccgctgctccagctcccagtccagacgtgccagtgtttgctggtgagggtctcccatggtgacttcggccttgctgatatctggtggagcctccttataaaactcctctaaactgaccagatcaatttcttcatgctttgacttaaactccaaacatttggtgatctccttctgtaggtgcatcacctcatacaacaggttctggagctgcagatgataggcatctactttctgcttagcctcgtgggtctgatctcttcctttcttcaacctgatgtgggctaatcggttaagcttctttagagtcatgaaatgcacacagctctggatcctccgttcttctatttctattgccacatccttgccacccctgctcttcaggtcttggatctcagccatcagcctctgtagctcctggcaggtgtacttgtataactcatagtctctgccagggtcccgcagatccacctcggcctcctcactgtcc

SEQ ID NO: 172793 - DNA, 1477 bp, Homo Sapiens
  misc_feature (1117)..(1199): n is a, c, g, or t
  misc_feature (1434)..(1434): n is a, c, g, or t
cgacgaggagtcctacgaagtgttcaaggatctcttcgaccccatcatcgaggaccggcacggcggctacaagcccagcgatgagcacaagaccgacctaaaccccgacaacctgcagggcggcgacgacctggaccccaactacgtgctgagctcgcgggtgcgcacgggccgcagcatccgtggcttctgcctccccccgcactgcagccgcgggagagcgccgcgccatcgagaagctcgcggtggaacgcctgtccagcctggacggcgacctggcgggccgatactacgcgctcaagagcatgacggaggcggagcagcagcagctcatcgacgaccacttcctcttcgacaagcccgtgtcgcccctgctgctggcctcgggcatggcccgcgactggcccgacgcccgcggtatctggcacaatgacaataagaccttcctggtgtgggtcaacgaggaggaccacctgcgggtcatctccatgcagaaggggggcaacatgaaggaggtgttcacccgcttctgcaccggcctcacccagattgaaactctcttcaagtctaaggactatgagttcatgtggaaccctcacctgggctacatcctcacctgcccatccaacctgggcaccgggctgcgggcaggtgtgcatatcaagctgcccaacctgggcaagcatgagaagttctcggaggtgcttaagcggctgcgacttcagaagcgaggcacaggcggtgtggacacggctgcggtgggcggggtcttcgacgtctccaacgctgaccgcctgggcttctcagaggtggagctggtgcagatggtggtggacggagtgaagctgctcatcgagatggagcagcggctggagcagggccaggccatcgacgacctcatgcctgcccagaaatgaagcccggcccacacccgacaccagccctgctgcttcctaacttattgcctgggcagtgcccaccatgcacccctgatgttcgccgtctggcgagcccttagccttgctgtagagacttccgtcacccttggtagagtttatttttttgatggctaagatactgctgatgctgaaataaactagggttttggcctgcctgnnnnnnnnnnnnnnnnnnnnnnnnnnnnnnnnnnnnnnnnnnnnnnnnnnnnnnnnnnnnnnnnnnnnnnnnnnnnnnnnnnntaccacccgacacctacgccaaaaacccaccaccagtaccaaccactaaaccaacccccaaacactatataataaaaaatgccggcccggcccgccctccgccccctacataaaaatttttctcaaaaaacaacccctcttacggcgcgccccggggtcctccttgcggggcacgcccgccccgcgcgtctccacaaccggtcctcctccacaccagcagagacccccgcgcgtnagccacaaccgacagggggtggggttcttccacccccaagaac

SEQ ID NO: 172794 - DNA, 1046 bp, Homo Sapiens
  misc_feature (873)..(883): n is a, c, g, or t
gcaccattttgctgtctgtttatttcaactgtacagagaagcttaaacacctgtggaaaaacacgaaaggcttagttgtctcttaagttcatgtactttttagtgataaatacacagtatttaactttatacacctgataaaaggaaaatgcatagtagaaagggtcgggaatgaaacagaagcatcgggcattgaatcgatcacagagtagaaaaatctgcagtccccagaaactcggcctccagctggagaggggaaccagcgtaccctgaaacttccctagcaccttggaagcaagtggaggtcatggttcttccactcggcaacgtgaagctccccgctggaagacaagtgagagcgaacaggccaggcctgtgtgtccacctgcacaggcattctccttgttccagaaaggctctgaggacggaagacctgcctctcaggaaaggccagaccagtagggagaggcctccgcagccccaagtgtcaacaaggggctcaataaggctttctgggagccactggcagctggtgggatggaagggggaggtggaaaagggcagaggaaatgggaagtggatggagggtttgtgcttccttcgaggccacaagtgcaggccacaggttgcttacaccaaaatggtccccacagatgagctagcaatggaagaaatttatgggcgtcctctttgccccactggaagagctgctcataacagcacctcctttcctgacagagctggcttttgaaaaatcaatgtgctccaagagtggcagctcaaatgctctgtgtttacagccatcttggcttatccttttcatgtggggcaggtcctttccacagctttctttggtgtttcttcattaaaagnnnnnnnnnnngtcatcaatgtgggtctcccccaccccactgcccccacagctgggtgctgcctgattgctggcattcccctggaagaaatcttagatggaaggttccgtggtggggagaaatggcattgtctgatgcagctgtgtaaacaagagaagccctgcagaagctccc

SEQ ID NO: 172795 - DNA, 370 bp, Homo Sapiens
  misc_feature (62)..(62): n is a, c, g, or t
  misc_feature (305)..(305): n is a, c, g, or t
  misc_feature (307)..(307): n is a, c, g, or t
cctggccctgtcgctcctcacttgtccttcccagcggggagcttccacgttgcccgagtggnagaacccatgaccctcccacttgccttcccaaggtgcctagggaagtttcagggtacgctggttcccctctccagctggaggccgagtttctggggactgcagatttttctactctgtgatcgattcaatgcccgatgcttctgtttcattcccgaccctttctactatgcattttccttttatcaggtgtataaagttaaatactgtgtatttatcactaaaaagtacatgaacttaagagncnactaagcctttcgtgtttttccacaggtgtttaagcttctctgtacagttgaaataaacagac

SEQ ID NO: 172796 - DNA, 818 bp, Homo Sapiens
ggcacattcagcccccctaacccaccttgaacattgaccaccacacactccctggcacgctcttctcaccctcaacttctgccacctctccctgggcaatactgccagcctttccctaatctcagagctgcagccctgccctgtcactcacctcaaacctgccatgtccctggggctactgaaattccaggcagtgggtgaagaggacgaggaggatgaggagggggagagcctggactctgtgaaggcactgacagccaagctgcagctgcagactcggcggccctcatatctggagtggacagcccaggtccagagccaggcctggcgcagggcccaagccaaacctggaccagggggacctggggacatctgtggtttcgactcaatggactccgcccttgagtggctccgacgggagctgcgggagatgcaggcgcaggacaggcagctggcagggcagctgctgcggctgcgggcccagctgcaccgactgaagatggaccaagcctgtcacctgcaccaggagctgctggatgaggccgagctggagctggagctggagcccggggccggcctagccctggccccgctgctgcggcacctgggcctcacgcgcatgaacatcagcgcccggcgcttcaccctctgctgaggaacacctgtgccccccgaatccccgccccatctcccaatgccgcttcacctggctgcctgggaagaggacaggggaggggtgccccagaaggcccaggtcctagggggatcaggaggaccatcaggttgcagagagctgaattccaagagtgcaaaaccca

SEQ ID NO: 172797 - DNA, 744 bp, Homo Sapiens
tggacacagcagcggtgtccacgctgcccttctttgaccctgacaccaacatcgtctacctctgtggcaagggtgacagctcaatccggtactttgagatcacttccgaggcccctattccatgcactatctctccatgttcagttccaaggagtcccagcggggcatgggctacatgcccaaacgtggcctggaggtgaacaagtgtgagatcgccaggttctacaagctgcacgagcggaggtgtgagcccattgccatgacagtgcctcgaaagtcggacctgttccaggaggacctgtacccacccaccgcagggcccgaccctgccctcacggctgaggagtggctggggggtcgggatgctgggcccctcctcatctccctcaaggatggctacgtacccccaaagagccgggagctgagggtcaaccggggcctggacaccgggcgcaggagggcagcaccagaggccagtggcactcccagctcggatgccgtgtctcggctggaggaggagatgcggaagctccaggccacggtgcaggagctccagaagcgcttggacaggctggaggagacagtccaggccaagtagagccccgcagggcctccagcagggtcagccattcacacccatccactcacctcccattcccagccacatggcagagaaaaaaatcataataaaatggctttattttctggcaaaagggagaacaagaaaaaccaacacaagcgtgt

SEQ ID NO: 172798 - DNA, 298 bp, Homo Sapiens
gaaaggctggaaggaaaggaagagaaacgggcgggtggactgacacccagcgagccaggtgtctataggttttctgtcctgggagggggctgtcagggtgatgcccgcctgcagagagggggtcattctgcgaggttgggctgcagacccctgtgccagcgggcctggtgattcggaaatgatggggcactgtggagagaccccaggaaaacacccagcgctgcttttgacattctctctccatctccccttacagcggctgctctgcctaggataaacacatttcaagagtctcagt

SEQ ID NO: 172799 - DNA, 583 bp, Homo Sapiens
agtcgggtaccgagtgggtcagtgtcttccagtccccgccaattgtggagctgagggagaagatccagcccgagatccttgagctgatcaagcagcagcgcctgaaccggctctgtgagggcagcagcttccgaaagattgggaaccgccgaaggcaagaacggttctggtactgccggttggcactgaaccacaaggtccttcactatggtgacttggatgacaacccacaaggggaggtgacatttgaatccctgcaggagaaaattcctgttgcagacattaaggccattgtcactgggaaagattgtccccacatgaaagagaaaagtgctctgaaacagaacaaggaggtgttggaattggccttctccatcctgtatgaccctgatgagaccttaaacttcatcgcacctaataaatatgagtactgcatctggattgacggcctcagtgcccttctggggaaggacatgtccagtgagctgaccaagagtgacctggacaccctgctgagcatggagatgaagctgcggctcctggacctggagaacatccagattcccgaagacactgacccact

SEQ ID NO: 172800 - DNA, 455 bp, Homo Sapiens
  misc_feature (22)..(22): n is a, c, g, or t
  misc_feature (89)..(89): n is a, c, g, or t
caataggatgaaaaccgaggcnccagcctttgatgaggaatggccaagtgaggttttgaaagtacaaaccccgggacgacacaatcctnggaaacacctagaatgaagaagtgttggccccatgagaatactggctccccgagaacttaaaagaagggagaaacctcaacaaagtccagccattgaacatggaaggagatcaaatgttttgggggacaaactccacatcaaaggctcatctgtgaaaagcaacaaaaaataaatagccatgcatttgatttgtttagttttgattgttttaacagttagtaatggtgctgggtaataagcataagaccaatctcttgctgttaaatcagttctgtccttggcaactttcttctgatatctgaatgttcatgaaggtcctagctttatattgtccctcttttaggaataaaattttgattttcaac

SEQ ID NO: 172801 - DNA, 1150 bp, Homo Sapiens
tgtgtaaagtgttaagtgttgaagaatttgatgccctgactcctgtgattgaatccagcctccatcaagtggaaagcatgcacggagcaggacaaaatcatacatggaagctcagtatcaagcaagtgacgtggatggggtgagggagcggtgcaggacccagtgtctgtgaagcccccacggtggttcccatgtctgcctctctttccccgcacctgtcacggtgcagaagcaggctgcagtgtcataagcatctccaggaatgccaagaagaattggcaacgcattcaggagcatttcttttttgcaacatttcacccactcaaggattattgtctagagaccatattttacatccttccacgcctttcaggccttattgaagatgaatggatcaccattgataaatttaccagattcactgatgttcctttagctgcgggatttcagtggtacctttctcaaactcaacttagtaaactaaaaccaggtgactggtctcagcaagacataggtactaatttggtcgaagcagataaccaagcagagtggaccgacgttcagaagaagattatcccgtggaacagtcgtgtttccgacttagacctggagctcctgtttcaggatcgtgctgccagacttggaaagtcaattagtagactcatcgttgtggcctcgctcatcgacaaaccgaccaatttaggaggtaaaaccacctcagctaattgattatctgcagcacaacaaaacagaaaggtataccatcattggagtggaacaaactgccaaaagtttacaccctacccccatattgctttcctgagaaatctctgctctttgtgggaaatgaacgtgaaggaattccagcaaatctgatccaaccgttggacgtttgtgtggaaattcctcaacagggcattatccgcttccctgaatgtccatgtgatcggacccctgcttgatccggcgagtacccccaggcacccaccttgttctcgccccggaagataaccagcccatgcatggcccccttccttaccggaatcgcccgccggcttggtccaaacttttttttaacaaacaccctatctgggacttaaaccaaacacgaatttctgaaattttaattgggcaacaattttcactttcg

SEQ ID NO: 172802 - DNA, 680 bp, Homo Sapiens
ggtgggtctgagagcccccacccactaggcttgattgcatccctgttgtgccctttaagagacatgtttccaccccacccccaaccttgtcccaagtgccctgtgactaaattgtcctgatgccagtagactgcagttggccaagggacaatgtggaaaacccagtgtccatcttaccaccgctccctgatctccagaaccttcgactgacccccttgtctttatgctgatgttgagttttgggattgttactggttgaagtgggggcagatgcctgtcaccaaggtgttgactgtgtgagaaaagcagtttgggtgacaaatcctgtgtggcacaagttggatcgcttcctagaaataagcaacacctctcccaaaaagcagcccacaaggcaggggcccagcagcccagccatcactcatctttgaggaaatgagttggtagcctctgtgcactgtttggtggccacatcacaggtgatgtcctgttcacatacctgcttgtatttaaagccctcagtctgtcctgttgtgtggggcgaagtgatggactctgccaggtggacatgctgtgggtggatgttcccggcgtgtgccgggcctgaatggacaggggccacttcacagcatgtcagggaaaatcactgtcacacaattccaatgggatttgtgctctttttg

SEQ ID NO: 172803 - DNA, 292 bp, Homo Sapiens
gcagcccggaatgagtgggcctgagcaggcgggggcttatggcagtgatgctgtgttggtttcctagggatgctctaacgaattaccacaaacctggtggattgaaacagcagaacttgattcccttacagttctggaggctggaaatctgggatggaggtgttggcagggctgtggtccctttgaaggctctggggaagaatccttccttggctctttttagcttgtggcggcagtgggcagtccgtggcattccccagcttattgctgcatcactccagtcccaagtcgg

SEQ ID NO: 172804 - DNA, 286 bp, Homo Sapiens
ggggttctccaaatgtccccatatcactgagtcacgtgcccaatacctgctggactctggcctgtggagggggtggaggacgagctggtgcctccagagtcgcagtggctggtgctcccgctgccgctggggctcccgctggcggagggtggcagactgtgagaacagggacggggagctgtgctggtttatgcactgggccacggcgaagcctggcaccttgtccaccagatgcaaacacaggagcgctgcactgtggggcgctgcgtaatcctctgatacgccc

SEQ ID NO: 172805 - DNA, 771 bp, Homo Sapiens
  misc_feature (157)..(166): n is a, c, g, or t
gctaccagctccccgctgccctgagctcggcgggctggcattcggcccggggaaaagcggagcaggtctgcgaggctaagtgtctccgcggcgcacctcgcggcgagaatccggaggagaaggagactgcaaggataggcccagaaaaacaaccagnnnnnnnnnntctcatcatggcaaatattcaccaggaaaacgaagagatggagcagcctatgcagaatggagaggaagaccgccctttgggaggaggtgaaggccaccagcctgcaggaaatcgacggggacaggctcgccgacttgcccctaattttcgatgggccatacccaataggcagatcaatgatgggatgggtggagatggagatgatatggaaatattcatggaggagatgagagaaatcagaagaaaacttagggagctgcagttgaggaattgtctgcgtatccttatgggggagctctctaatcaccatgaccatcatgatgaattttgccttatgccttgactcctgccatttatcatgagattaatactgtgattcccgctgttttctttttccttgcattttcctaatatgcctttactgatccgtttgctgtgaaccctatgttatttccatgtgtcaagtgggtcttgtgttgccagcttctatttgaagattgcctttgcactcagtgtaagtttctgtcagcagtagtttcacccatttgcatggaaaaatctaaagctaataaagcaattttaaaagcaaaaaaacacaaatacaa

SEQ ID NO: 172806 - DNA, 1029 bp, Homo Sapiens
  misc_feature (750)..(918): n is a, c, g, or t
  misc_feature (926)..(943): n is a, c, g, or t
gggagagcgacgcagccttcggtgcagtcgtcactcgcgtctggctaccagctccccgctgccctgagctcggcgggctggcattcggcccggggaaaagcggagcaggtctgcgaggctaagtgtctccgcggcgcacctcgcggcgagaatccggaggagaaggagactgcaaggataggcccaggaaaacgaagagatggagcagcctatgcagaatggagaggaagaccgccctttgggaggaggtgaaggccaccagcctgcaggaaatcgacggggacaggctcgccgacttgcccctaattttcgatgggccatacccaataggcagatcaatgatgggatgggtggagatggagatgatatggaaatattcatggaggagatgagagaaatcagaagaaaacttagggagctgcagttgaggaattgtctgcgtatccttatgggggagctctctaatcaccatgaccatcatgatgaattttgccttatgccttgactcctgccatttatcatgagattaatactgtgattcccgctgttttctttttccttgcattttcctaatatgcctttactgatccgtttgctgtgaaccctatgttatttccatgtgtcaagtgggtcttgtgttgccagcttctatttgaagattgcctttgcactcagtgtaagtttctgtcagcagtagtttcacccatttgcatggaaaaatttaaagctaataaagcaatttaaaaagcnnnnnnnnnnnnnnnnnnnnnnnnnnnnnnnnnnnnnnnnnnnnnnnnnnnnnnnnnnnnnnnnnnnnnnnnnnnnnnnnnnnnnnnnnnnnnnnnnnnnnnnnnnnnnnnnnnnnnnnnnnnnnnnnnnnnnnnnnnnnnnnnnnnnnnnnnnnnnnnnnnnnnnnnngttggcgnnnnnnnnnnnnnnnnnnaaaaaaatttttttaaacacatttggtggggggccgggcgccccccaaaagcgaaaggaaaaaggggcactatggtgtttttcccc

SEQ ID NO: 172807 - DNA, 786 bp, Homo Sapiens
ctcttcagcgagcgaggaccgagggaggacgccgagctggacccgagtccaagctctgtcctccagccttggaaataaatcccctacattgtctggcccacacaaatccccgttcagccaggcctctcctgtggggttattctggtaacaaaatgcttgagaccagcaattcttttctactcttacccgctctcagagaggagccaactgggctattccttaggctccactttctgtgtctgaaatgtggttgaaaactaatattccagatgtttcctcatattttaagtagaaccgcagattaagcttcctataggaaggtagtagggcatggtggagggaagacagtctttggagtagaatcatggtggtgtaatcgtggccacaccctttaccagttatatggcattgagaaagtattggttctttgaaccttagtttcctcttagagcaaaataacagcattcgctttctctacctggcagtaattgccatgaatccaaagactgttttggtcatcactatgtagtctaagcctaacacggagtagatctctcaatcaatgctactgagtcagtgattaaaaacctcacgggattttgaggcgatcaacgaggtgaaagatgggaagtgtctaactttgtacctggcacttgggaagtgcttattcacagcctggcagtgcttaggagacacatttcttctaactgagtgaggtggatgctcaaaggggaatgcaaatcttcggtcgattttccaaaaaacagggaacctcagagtcaccga

SEQ ID NO: 172808 - DNA, 828 bp, Homo Sapiens
gattgaaatgtttgcctaccatctccctgatgcaacactgtccaatctcattgatatttttgtagacttttcacaagttgatgggcagtattttgtctgcaatatggatgattttaaattttctgcagagttgatccagcatattccactaagtctgcgagtgaggtatgttttctgcacagctcctatcaacaagaagcagccttttgtgtgttcttcactgttacagtttgccaggcagtatagcaggaatgagcccctgacctttgcatggttacgccgatacatcaaatggcctttacttccacctaagaatattaaagacctcatggatcttgaagctgtccacgatgtcttggatctttacttgtggctaagctaccgatttatggatatgtttccagatgccagccttattcgagatctccagaaagaactagatggtattatccaagatggtgtgcacaatatcactaaattgattaaaatgtctgagacgcataagctgttgaatttggagggctttccatcagggagccagtcacgattgtcaggaaccttaaagagccaagctagaaggacacgcggcaccaaagctctagggagtaaagctactgagccacccagccccgatgcaggagagctgtcccttgcttccagattggtacaagcaaggactcctcactccagacatgctgaaacagctagaaaaagagtggatgacacaacaaactgaacacaacaaagaaaaaacagagtctgggactcatccaaaagggacgagaagaaagaagaaggaacctgattcggactagttttctgttcctg

SEQ ID NO: 172809 - DNA, 1005 bp, Homo Sapiens
  misc_feature (887)..(888): n is a, c, g, or t
  misc_feature (896)..(898): n is a, c, g, or t
  misc_feature (900)..(902): n is a, c, g, or t
  misc_feature (904)..(904): n is a, c, g, or t
  misc_feature (906)..(912): n is a, c, g, or t
ggggcagtcgctcttcctcaggcggcggccatggcgggacaggaggatccggtgcagcgggagattcaccaggactgggctaaccgggagtacattgagataatcaccagcagcatcaagaaaatcgcagactttctcaactcgttcgatatgtcttgtcgttcaagacttgcaacactaaacgagaaattgacagcccttgaacggagaatagagtacattgaagctcgggtgacaaaaggtgagacactcacctagaacagtgccgtgctgctgctgggaagttgctttacacaacacaggccacatgggaaaggccccagcagccttcagctccttcctttctccttaaagagcaacagggcttattcttgtttttcttttttcaaaagtgtggcctttgggctctgccatctggggtgtggtgtggtatgtgggaagaagttcagaggaaccgttggaaacgacgttaggcattttaccttttcagtaacattttatacatctacttgtcaatgtatttgagacattcacagccaaaagcctgggactctttgtgaaggtcctcctcacctctatctttctttctctctctctcaaactttccttaaagttctcattgcctttgcactgcttctgtgaacagtctttgtctcctccccacctttggtgggaagtgcggggcagtcctggtcaagacactcatgccctggcaatgtggctgccagagaatgttgttgctaacccaccagtttcttgttgatttggagaggtcaaggccaggcccccacttggcttgaagggacattttcagacttttctttctgtcacttggagtgtctatgcctctcatatttccctaataaactcctcaacttgttaaaaanncaaatacnnnannnancnnnnnnnaaactccaaggcatttctatggtcggggtggcggaacaaaaaaggcaaatggaaatggggcaccatggggcccactaggctgtggcttctccc

SEQ ID NO: 172810 - DNA, 807 bp, Homo Sapiens
ggtcttcctcaggcggcggccatggcgggacaggaggatccggtgcagcgggagattcaccaggactgggctaaccgggagtacattgagataatcaccagcagcatcaagaaaatcgcagactttctcaactcgttcgatatgtcttgtcgttcaagacttgcaacactaaacgagaaattgacagcccttgaacggagaatagagtacattgaagctcgggtgacaaaaggtgagacactcacctagaacagtgccgtgctgctgctgggaagttgctttacacaacacaggccacatgggaaaggccccagcagccttcagctccttcctttctccttaaagagcaacagggcttattcttgtttttcttttttcaaaagtgtggcctttgggctctgccatctggggtgtggtgtggtatgtgggaagaagttcagagggaaccgttggaaacgacgttaggcattttaccttttcagtaacattttatacatcctacttgtcaatgtatttgagacattcacagccaaaagcctgggactcttttgtgaaaggccctcctcacctctatctttctttctctctctcccaaactttcccttaaaggtctcattgccctttgcactgcttctgtgaacagtctttgtctcctccccacctttggtgggaaatgccggggcagtccctggtcaagacactcatgcccctggcaatgggggctgcccaaagaatggttggttgccaaacccaccagtttccctgttggatttggaagagggccaaggccaggcccccccctttggg

SEQ ID NO: 172811 - DNA, 426 bp, Homo Sapiens
ggggcgctgggggaaggaaaacgccgctttgactgtgccttgttctcacagctggcgggaagcaagcgccttttcgaaagccagaggctcgagttacccctcttaccaccgtcatggcagtcccagttgttgaaattacctccaacattcatgtcagtgattcaccactctccatgaagagctgaactggcacaagtggcaacgttgcaacaaggacagtgtcagagcaggctgtaaaaaatgtggctaccctggtcacctgacttttgaatgccgcaattttctccgagtagaccctaaaagggacatagttttggatgtcagcagtacaagtagtgaagatagcgatgaagagaatgaagaactgaataaattgcaggcattacaggaaaaaagaataaatgaagaagaggaatctaacttcaa

SEQ ID NO: 172812 - DNA, 979 bp, Homo Sapiens
  misc_feature (199)..(220): n is a, c, g, or t
gatgtaaacgtcgcgtatgaaatgggggttgaaaggggaacgcgcaaagatattagggggtcaagcgtttaataacgtgtatgcgcgctcttgtagagagagagtggaaaagcggaggctggaagattgttagtgggggaaaaaaagacgtctggttaaaggttaaggaaggatttgcaaccccagaggttaatgaccnnnnnnnnnnnnnnnnnnnnnnctacagaaggggacgctgtaggctgtcccttatcttaacgtaaccaggggccaggatctgaggcacaagaaagtgggggtggcaggggaccgggacagcccctgctgggctggagccctttcatagttgccatgtgggaatgtaggccctgtgtggctggaccatgccttcaaagtctgattgagtttaaatgatggcaaccaattcaagatgcttttaaatagaacatggaccgaacagaacatggttgtgggccagattaggctggtgggtcatcagttggtgacttcctggcatacaggttgtacagcttttttccaaacagcacttctttcccctctgtaggacctgggtgcagccgcaggctccaagcgccccacctgtgtgataatggtcaagccccatgaggagtaccaggaggcttacgatgagtgcctggaggaggtgcagtccctgcccctacccctatgaggggctccggtagcacctgggcacctgccgctggaagctattgggctggcagcaggacgactggctgtcctcctgcccacccacactgacggcatcttcccagttccccaaggcacgccttcttcccaggcagctctaacagccctttcatgaaggtaatgctagtcttctgtccatcagtgccatttcctgtagaactaaaggctgttccaagaatgtggggtggggaaagtaaatgctaagactaaaatgtggtgagtctgtgggtgttttcttaagcagcagctg

SEQ ID NO: 172813 - DNA, 384 bp, Homo Sapiens
aaagctgtggaccgcgtgggctcgcctccctgggactaggtttcagcggccgctgcgatgaccaaaataaaggcagatcccgacgggcccgaggctcaggcggaggcgtgttccggggagcgcacctaccaggagctgctggtcaaccagaaccccatcgcgcagcccctgggcttctcgccgcctcacgcggaagctctacaaatgcatcaagaaagcggtgaagcagaagcagattcggcgcggggtgaaagagttcagaatttgtcacaaaggagaaaaggatcatggttttggcagaagacccactgcccattgagggatactgccatctcccaagtcatgtggggggggacccaaaattttgcccctagggcttaaatt

SEQ ID NO: 172814 - DNA, 1182 bp, Homo Sapiens
  misc_feature (766)..(778): n is a, c, g, or t
gggggtccctgggactaggtttcagcggccgctgcgatgaccaaaataaaggcagatcccgacgggcccgaggctcaggcggaggcgtgttccggggagcgcacctaccaggagctgctggtcaaccagaaccccatcgcgcagcccctggcttctcgccgcctcacgcggaagctctacaaatgcatcaagaaagcggtgaagcagaagcagattcggcgcggggtgaaagaggttcagaaatttgtcaacaaaggagaacaaagggatcatggttttggcaggagacacactgcccattgaggtatactgccatctcccagtcatgtgtgaggaccgaaatttgccctatgtctatatcccctctaagacggacctgggtgcagccgcaggctccaagcgccccacctgtgtgataatggtcaagccccatgaggagtaccaggaggcttacgatgagtgcctggaggaggtgcagtccctgcccctaaccctatgaggggctccggtagcacctgggcaactgccgctggaagctattgggctggcagcaggaccgactggctggcctcctgtccaaccacactggacggcatcttcccagttccccaaaggcaagccttcttcccaggcaactctaaccagcccttttcatgcaagggtaatgcctagtctaccggtccatcagctgccattttcctggtagaacttaagggctgttcccaagaattgtgggcgtggggcacaggtaatggcttaagacttnnnnnnnnnnnnncatcaaaggggggcgagcgaaaaagtttcacccatggaagggcccaaaaatatacggagatacccaagcatagtatggtacaaaaggtggggcccctaaagcaggaagcaaaaataataagaacagacacagagcaccggtcgtatttaacaaacggtgtcgtgaatagaggaacaaactgttgtagactagtaggcacctctggaggagagagaacaccctatattacctggtggtgggagccaaatagatggatgaaaaatagccctagagagattgtagacgactaagagggataacagatacaactattaaggcggtaataatggttgttaaacaacaaccgtaaattgtgtgctgatgaaaaaatgtgacaaaggaaatattatattataacattttag

SEQ ID NO: 172815 - DNA, 869 bp, Homo Sapiens
  misc_feature (788)..(788): n is a, c, g, or t
  misc_feature (791)..(821): n is a, c, g, or t
ggggacctggaagtgatgcctaaagctgtggaccgcgtgggctcgcctccctgggactaggtttcagcggccgctgcgatgaccaaaataaaggcagatcccgacgggcccgaggctcaggcggaggcgtgttccggggagcgcacctaccaggagctgctggtcaaccagaaccccatcgcgcagcccctggcttctcgccgcctcacgcggaagctctacaaatgcatcaagaaagcggtgaagcagaagcagattcggcgcggggtgaaagaggttcagaaatttgtcaacaaaggagaaaaagggatcatggttttggcaggagacacactgcccattgaggtatactgccatctcccagtcatgtgtgaggaccgaaatttgccctatgtctatatcccctctaagacggacctgggtgcagccgcaggctccaagcgccccacctgtgtgataatggtcaagccccatgaggagtaccaggaggcttacgatgagtgcctggaggaggtgcagtccctgcccctacccctatgaggggctccggtagcacctgggcacctgccgctggaagctattgggctggcagcaggacgactggctgtcctcctgcccacccacactgacggcatcttcccagttccccaaggcacgccttctttcccaggcagctctaacagccctttcatgaaggtaatgctagtcttctgtccatcagtgccattttcctgtagaactaaaggctgttcccagaatgtgggggtgggggaagtaaatgcctaggnccnnnnnnnnnnnnnnnnnnnnnnnnnnnnnnncttggtcgggccgccctcggcccctcaagaaggctttcctagaaccat

SEQ ID NO: 172816 - DNA, 364 bp, Homo Sapiens
cgtaggtgtacagaggacatgtaaatacacagcggtggtgcccaggcagctcctgcccccgccttccctcactgaggcagggctagcaggggtgggaggcagtggggttaacagatcccacaagtcctaacttttcaattgtaaatgttattttctaagcagagagaaatgcatatattttaaatggaatttattctatcaactgcctgagaggacacaatgggggaggggcttcggaccacagcaggagccccgactgcccacctgagggcagggagagcctgaccccattggcccaggccctggctctgtaaccattaacctcttcccccaactaacaccaatgaaaacaccattccacgtg

SEQ ID NO: 172817 - DNA, 943 bp, Homo Sapiens
aagccaggggtcccccaggttctggggagattcctgtctcggtactggtggtgaagggtagcaggtccctcaggggttcccatcagctctggctcggctacctttccgagaggacttctcctttggctcctcagctggcaaacctgggtcggaggctcgatggattcggggcggcagatggaagcggccatcaggaagcccctgggatgccaacgcggggtctttcaggtgtcgtggtcatctcactagtggcaggggctgagggtgggagctgaggaacagccccctgtggccacttccgtacatcctgtccatagcccgggggtaccagaacctgcccatcgatataggcaacctcccctcgcaggaccacacggcggacggtgcccttcactttctgcccttcaaaaggtgtccagtgggccttggagaagggcatgtggctgggaattgtccactcatgctccagatccacctccacataggtgtcctcctgcgggggcaggtgaaagatgcgccgaggattgtggtgcaatcgctgcagcaggtcgtccaggctgagccggccctcgcttacagccgtcaggagtagtggcagcatggtctctaaccctgggaacccaggtgggggcctggacccacacttctcctccaaggtatggggagcatggtctgaggcaaagcagtcgatgacagccatgttctcccacagggcttccacatcctggcgggagccaagctcaggccggacctcccccttcccaggccccaggcgctccaggtcatcatggcttaggaacaggtggtggggagccacctcgcaggtcactggcaagccccgtgcctttgcagctttaattagcaggatctcctccttccgtgccacgtgacatatgtgcactgagcgctgagtgagctggagcatctggacggggatcctcta

SEQ ID NO: 172818 - DNA, 415 bp, Homo Sapiens
tccatgatagcctcgaggttgtggctatggcgagcctacatcatgccatctgcacttcagcctggagtgcagagcaagactctgtctctataaaaacaaacaaagaaaacaacacaaaatgagttggggggcggggagaaggagttctccaagatttatataggaagaagtacagtggtatatagtatactgctacttgagttacaaaggtttaaaagcaaaagatgaagatgaacggagctatgcagatatcttaggaagatttacatgttcactgtacactctgtcacagcttgaattgcgttaatctttgcatagacatacacatgtatatatgcgctacagttcaggctgttttcccatatatgggctttacatctgtgttattccgattacccgtattagctgtttcatc

SEQ ID NO: 172819 - DNA, 1680 bp, Homo Sapiens
gatccgacaaacggcctctgcatagtgcagaacattctgctgctcttaaagaccctcatccctcccgtgggagccccctttggacactctatgaccctggaccctcgggggacctgaacttgatgcgatgggaggctgtgcaggctcgcggcggcgcttttcggattccgagggggaggagaccgtcccggagccccggctccctctgttggaccatcagggcgcgcattggaagaacgcggtgggcttctggctgctgggcctttgcaacaacttctcttatgtggtgatgctgagtgccgcccacgacatccttagccacaagaggacatcgggaaaccagagccatgtggacccaggcccaacgccgatcccccacaacagctcatcacgatttgactgcaactctgtctctacggctgctgtgctcctggcggacatcctccccacactcgtcatcaaattgttggctcctcttggccttcacctgctgccctacagcccccgggttctcgtcagtgggatttgtgctgctggaagcttcgtcctggttgccttttctcattctgtggggaccagcctgtgtggtgtggtcttcgctagcatctcatcaggccttggggaggtcaccttcctctccctcactgccttctaccccagggccgtgatctcctggtggtcctcagggactgggggagctgggctgctgggggccctgtcctacctgggcctcacccaggccggcctctcccctcaacagaccctgctgtccatgctgggtatccctgccctgctgctggccagctatttcttgttgctcacatctcctgaggcccaggaccctggaggggaagaagaagcagagagcgcagcccggcagcccctcataagaaccgaggccccggagtcgaagccaggctccagctccagcctctcccttcgggaaaggtggacagtgttcaagggtctgctgtggtacattgttcccttggtcgtagtttactttgccgagtatttcattaaccagggactttttgaactcctctttttctggaacacttccctgagtcacgctcagcaataccgctggtaccagatgctgtaccaggctggcgtctttgcctcccgctcttctctccgctgctgtcgcatccgtttcacctgggccctggccctgctgcagtgcctcaacctggtgttcctgctggcaaacgtgtggttcggctttctgccaagcatctacctcgtcttcctgatcattctgtatgaggggctcctgggaggcgcagcctacgtgaacaccttccacaacatcgccctggagaccagtgatgagcaccgggagtttgcaatggcggccacctgcatctctgacacactggggatctccctgtcggggctcctggctttgcctctgcatgacttcctctgccagctctcctgatactcgggatcctcaggacgcaggtcacattcacctgtgggcagagggacaggtcagacacccaggcccaccccagagaccctccatgaactgtgctcccagccttcccggcaggtctgggagtagggaagggctgaagccttgtttcccttgcaggggggccagccattgtctcccacttggggagtttcttcctggcatcatgccttctgaataaatgccgattttatccatgg

SEQ ID NO: 172820 - DNA, 762 bp, Homo Sapiens
  misc_feature (59)..(59): n is a, c, g, or t
gtacaggcctcagggtccctgctgtagacggggcgggggagagtacgatgggtggggcngtggtgggtcgtagggcgctcgagatggagcccccagcttccttgatggatcgcggggcgcgagtgccctagacaagccggagctgggaccggcaatcgggcgttgatccttgtcacctgtcgcagaccctcatccctcccgtgggagccccctttggacactctatgaccctggaccctcgggggacctgaacttgatgcgatgggaggctgtgcaggctcgcggcggcgcttttcggattccgagggggaggagaccgtcccggagccccggctccctctgttggaccatcagggcgcgcattggaagaacgcggtgggcttctggctgctgggcctttgcaacaacttctcttatgtggtgatgctgagtgccgcccacgacatccttagccacaagaggacatcgggaaaccagagccatgtggacccaggcccaacgccgatcccccacaacagctcatcacgatttgactgcaactctgtctctacggctgcttgtgctcctggcggacatcctccccacactcgtcatcaaattgttggctcctcttggcctttcactgctgccctacagcccccgggttctcgtcagtgggatttgtgctgctgggagcttcgtcctggttgccttttctcatttctgtgggaccagcctgtgtggggggggtcttccctagcatctcatcaggcctttggggaa

SEQ ID NO: 172821 - DNA, 526 bp, Homo Sapiens
cattacaaagtcatgaatcctttctataaacctcaggatttacagtgtcacaaattatgaatcattgtctcctttaaaaaacaaacattcaacacctgaatggataaagaagtcaacatatttaaatatttaatgcatataactttaaagttgataaaatgtccctttcaactaaaaataaatgcccttatccacttagctggactgaaacagggacactgaaaacttgaattaatggccaacccagagcagcggcagcagcaatattcccctccttcaataaagtatggcctgtaagttagccctaatgagaaagaaggccattcaggtatgagaagaacctaggctgggcacagactacacagacgcctaacacaaaagctctgctgccactcaatctttgtttatatataatcacaaattttcttttctttagtaagagacaaagtcttgttctgttgcccaggctggaaaaaaagccactataaaattacacagagcaagagataagaaacagaatcaacat

SEQ ID NO: 172822 - DNA, 196 bp, Homo Sapiens
ggtctacatgtctctgatccctagatcaggagatgagtgacctctgtccctctctgccactatgggctatggggacagttcacaaggaaaagaagagccttagcacacttctgttttccaccttgaagaggggatggacctttgaatcctgtgccttttaatcacggaagcctttaagtggacccttgggagtgat

SEQ ID NO: 172823 - DNA, 229 bp, Homo Sapiens
ttatggatggaatttaataaatggatattttgtgatcagacaatccccatgagatacagagaaccagctcagccaggaaacaagatccaaaagctccttgaagatactacctcatgaaacagcaaagagcccctctagactcagatccgggggcctgcaccacctgcatcaccgtgtggctctgaacaccaccacgaaagcccctggagctgctggatccaggacctgg

SEQ ID NO: 172824 - DNA, 367 bp, Homo Sapiens
cccaaatggggtagctggaaagccatactgctgtggtgggcacatagacttggtgaagtgacctagagaggtagctgatgctgcagagatgggggcagagccacccaggttcgaggtcatggagatgcacagttgcccaggtgcagagaactgccttgccattccagggccctcgataattcatgtgccctttgcttcctctcctgcctgagagattcatggcatctcgggcccaattgtctaccaacttgtgcaagtcatccgtgaatgtgcccttcctgctggacgtcatggcaggaggctgagcttgggcggcttggctgttcactgttgccccaacagtgttttcgcatgctgaaaatgctga

SEQ ID NO: 172825 - DNA, 751 bp, Homo Sapiens
tagtgcacatattccaggaaagtgtctttaaaaacaaaaacaaaccctgaaatgtatatttgggattatgataaggcaactaaagacatgaaacctcaggtatcctgctttaagttgataactccctctgggagctggagaatcgctctggtggatgggtgtacagatttgtatataatgtcatttttacggaaaccctttcggcgtgcataaggaatcactgtgtacaaactggccaagtgcttctgtagataacgtcagtggagtaaatattcgacaggccataacttgagtctattgccttgcctttattacatgtacattttgaattctgtgaccagtgatttgggttttattttgtatttgcagggtttgtcattaataattaatgcccctctcttacagaacactcctatttgtacctcaacaaatgcaaattttccccgtttgccctacgccccttttggtacacctagaggttgatttcctttttcatcgatggtactatttcttagtgttttaaattggaacatatcttgcctcatgaagctttaaattataattttcagtttctccccatgaagcgctctcgtctgacatttgtttggaatcgtgccactgctggtctgcgccagatgtaccgtcctttccaatacgattttctgttgcaccttgtagtggattctgcatatcatctttcccacctaaaaatgtctgaatgcttacacaaataaattttataacacgcctt

SEQ ID NO: 172826 - DNA, 914 bp, Homo Sapiens
ggcgcccggccctgggctctccagacaaagccgaccccgtggcccagataaggacgtccggcagaggatccagtttgtgtgttctctgtgcaaataccggaccttctatgaggacgagatggccagccatcttgacagcaagttccacaaggaacactttaagtacgtaggcaccaagctccctaagcagacggctgactttctgcaggagtacgtcactaacaagaccaagaagacagaggagctccgaaaaaccgtggaggaccttgatggcctcatccagcaaatctacagagaccaggatctgacccaggaaattgccatggagcattttgtgaagaaggtggaggcagcccattgtgcagcctgcgacctcttcattcccatgcagtttgggatcatccagaagcatctgaagaccatggatcacaaccggaaccgcaggctcatgatggagcagtccaagaagtcctccctcatggtggcccgcagtattctcaacaacaagctcatcagcaagaagctggagcgctacctgaagggcgagaaccctttcaccgacagccccgaggaggagaaggagcaggaggaggctgaaggcgtgccctggacgagggggcgcagggcgaagcggcagggatctcggagggcgcagagggcgtgccgcgcagcctcccgtgcccccagagccagcccccggggccgtgtcgccgccaccgccgccgcccccagaggaggaggaggagggcgccgtgcccttgctgggaggggcgctgcaacgccagatccgcggcatcccgggcctcgacgtggaggacgacgaggagggcggcggggcgccccgtgacccgagctcgggcgcggagcccgcgtggccgaagctggaaaccaaacctaataaagttttcccatcc

SEQ ID NO: 172827 - DNA, 875 bp, Homo Sapiens
cacctcagccctcctgattggtggaagaaagcccctgcaggaccctctctggaagaaacgtcagttagctcacctaaggggtcttcagagccctgctggctcattcgactctgcatttccattgtcgtactgcccaaggaggattcctgttcaggtagcgatgctggctctgcagcaggaagcacctacgaaccatcccccatgcgactggaggccttacaggtattgactcttctggcaaggggctacttttcaatgactcaagcctacttgatggagcttggagaggtgatttgcaagtgcatgggggaagcagatccatccattcagcttcatggagcaaagcttctggaagaactgggcacaggcttaatacagcagtataaaccagactccactgcagcacctgatcagagagcaccagtcttcttggtggtgatgttctggactatgatgctgaacggtcctttacccagagccctgcacaattcagaacacccaactctccaggcgagcgcctgtgatgccctgtcttccatcttgccagaggccttcagcaatctgccgaatgacaggcagatgctgtgcatcacagtgctgctcgggctgaatgacagcaagaatcgcttaatgaaagctgcaacttcacgggccctgggagtctatgtgctttttccctgtctcagacaggatgtcatatttgttgcagacgcaacaaatgcaatattgatgtcacttgaagacaagtctctgaatgttcgaagccaagcaccctggtccctgggcaacctgacagacactctggattgtcaacatggaaacaccagaacccaagttttccaggaaaaagttctctgggcctcctggctcctgaa

SEQ ID NO: 172828 - DNA, 1071 bp, Homo Sapiens
ggggatcttcgggctgtcagagttggtctgttactcggtggtggcggagtctacggaagccgttttcgcttcacttttcctggctgtagagcgctttccccctggcgggtgagagtgcagagacgaaggtgcgagatgagcactatgttcgcggacactctcctcatcgtttttatctctgtgtgcacggctctgctcgcagagggcataacctgggtcctggtttacaggacagacaagtacaagagactgaaggcagaagtggaaaaacagagtaaaaaattggaaaagaagaaggaaacaataacagagtcagctggtcgacaacagaaaaagaaaatagagagacaagaagagaaactgaagaataacaacagagatctatcaatggttcgaatgaaatccatgtttgctattggcttttgttttactgccctaatgggaatgttcaattccatatttgatggtagagtggtggcaaagcttccttttacccctctttcttacatccaaggactgtctcatcgaaatctgctgggagatgacaccacagactgttccttcattttcctgtatattctctgtactatgtcgattcgacagaacattcagaagattctcggccttgccccttcacgagccgccaccaagcaggcaggtggatttcttggcccacaacctccttctgggaagttctcttgaactcaagaactctttattttctatcattctttctagacacacacacatcagactggcaactgttttgtagcaagagccataggtagccttactacttgggcctctttctagttttgaattatttctaagccttttgggtatgattagagtgaaaatggcagccagcaaacttgatagtgcttttggtcctagatgatttttatcaaataagtggattgattagttaagttcaggtaatgtttatgtaatgaaaaacaaatagcatccttcttgtttcatttacataagtaattttctgagggaaccgactcttcagggacttgtgtatgcccctgcaagttggctgtctattgacatttacaagattag

SEQ ID NO: 172829 - DNA, 356 bp, Homo Sapiens
cattcaggccgcggagggacgtgatgctgggctgtgtttactaaacccacgggttttcagcctcttaagcccagctccgatctccaattagttgagagcgctgggttgactaacctctggtatctgagcacagacagagggtgctgtgggtctgctgggtggcagaaatggttccttccggcttggcgttctctcctggccactcttcctgctgcctctgactactcagccttgttttcggtgtgtaggccccagctgcccactggaactgccggctaatgcttgctctcccaagatctttaactcctcctggctgcacctgggtagggatggtggcatcgatgcccctctgtctg

SEQ ID NO: 172830 - DNA, 602 bp, Homo Sapiens
tgtgcagcatccatcagagaacctttatataaatgatggcttcttatttcatattattagctagtatcatggttccattacaggcctattaacatcatacattgtcattagtctttgaagaaaaaatatgtaaatatatatgtgtaacatgagaatttctctctaaagcagggcttaaaattttttggaaaagtttgacaaagcataccacatgaattcagatttacctcaatgctaagaattatgtttagttaggaaaaaggaaagtcattttgacctcaggtagaaaaatagattgctttgagttttatgtagctttagactttaaaaagttagaatttatcctgtaactaaaaattatttgaaaaaattatgcctctggtttaattattggtgattacacactctttctcttacccttgtgtattgaactatgtccataatcaagttgatgtggatcctgaaaagtgttatgaacatctgattggtatttgtcacatttattttaaaattagcatctgaacacttcaaagctgtcagtgtgtattggtttcaccaataaccactgcttgatccttacaattaaattttttaactaacta

SEQ ID NO: 172831 - DNA, 1048 bp, Homo Sapiens
ggggggggaagaggcgtggcggcgctgtgcgcgtgcacaaaagagagctgaggggcgggggcgctgcggcacagctggtttgagcaactgaactggaaacaagatgcaggaccccaacgcagacactgaatggaatgacatcttacgcaaaaagggtatcttaccccccaaggaaagtctgaaagaattggaagaggaggcagaagaggagcagcgcatcctccagcagtcagtggtgaaaacatatgaagatatgactttggaagagctggaggatcatgaagacgagtttaatgaggaggatgaacgtgctattgaaatgtacagacggcggagactggctgagtggaaagcaactaaactgaagaataaatttggagaagttttggagatctcagggaaggattatgttcaagaagttaccaaagctggcgagggcttgtgggtcatcttgcacctttacaaacaaggaattcccctctgtgccctgataaatcagcacctcagtggacttgccaggaagtttcctgatgtcaaatttatcaaagccatttcaacaacctgcatacccaattatcctgataggaatctgcccacgatatttgtttacctggaaggagatatcaaggctcagtttattggtcctctggtgtttggcggcatgaacctgacaagagatgagttggaatggaaactgtctgaatctggagcaattatgacagacctggaggaaaaccctaagaagccgattgaagacgtgttgctgtcctcagtgcggcgctctgtcctcatgaagagggacagcgattccgagggtgactgaggctacagctgctatcacatgccgaactttcttgtgacaaattgtctggattttttaaaaaaggaaaaagcaagaatgaatccttctggtttttagttttgtataaattatgtttcaaatctttacattttggaaataatcattgctggaaattctgttaaatattttggaacttttttttaaattatagtatttcctctaaaaaaattaaaaccagccattagt

SEQ ID NO: 172832 - DNA, 1113 bp, Homo Sapiens
  misc_feature (935)..(935): n is a, c, g, or t
cagcatccatcagagatccgatgaggggctggtgactcctggatgaggacggaggatgaggacaccggatggagtggggcctacctgccgtccgccatcgagcagactcaccccgagagggtcccttgccggcacgtcgccctgcagcacatacctttcctttcttctccaccccgtcggagctggcagggcctgagtctctgccctcgtgggcgttgagtgacactgattctcgcgtgtctccggcctctccggcagggagtcctagcgcagactttgcggttcatggagagtctctgggagacaggcacctgcggacgctgcagataagttacgacgcactgaaagatgaaaattctaagctgagaagaaagctgaatgaggttcagagcttctctgaagctcaaacagaaatggtgaggacgcttgagcagaagttagaagcaaaaatgatcaaggaggaaagcgactaccacgacctggagtcggtggttcagcaggtggagcagaacctggagctgatgaccaaacgggctgtaaaggcagaaaaccacgtcgtgaaactaaaacaggaaatcagtttgctccaggcgcaggtctccaacttccagcgagagaatgaagccctgcggtgcggccagggcgccagcctgaccatggtgaagcagaacgccgacgtggccctgcagaacctccgggtggtcatgaacagtgcacaggcttcgatcaagcaactggtttccggagctgagacactgaatcttgttgccgaaatccttggatctatagacagaatttctgaagttaaagacgaggaggaagactcttgaggacccctgggtgttctcagcatgaagctccgtgtataccctgaggtcaccaccgctcgatctaaatgtgcagttgtgtccttaaatatgcagtcttcggccccnagtaaagtgttgatcgccaaagtccagtgtcgtgcccctcacccgttccttggcccccacaatgggaaccgcccctgggccgaactggtccctgtgggtttctatgccagcccttcgtgggggaaaatcccgggcgattcttatagatttctagtggacgctcttgggaaggacatta

SEQ ID NO: 172833 - DNA, 1925 bp, Homo Sapiens
  misc_feature (1252)..(1297): n is a, c, g, or t
  misc_feature (1347)..(1432): n is a, c, g, or t
  misc_feature (1444)..(1454): n is a, c, g, or t
  misc_feature (1463)..(1463): n is a, c, g, or t
  misc_feature (1468)..(1468): n is a, c, g, or t
  misc_feature (1481)..(1482): n is a, c, g, or t
gatgaaaattctaagctgagaagaaagctgaatgaggttcagagcttctctgaagctcaaagcagaaatggtgaggacgcttgagcggaagttagaagcaaaaatgatcaaggaggaaagcgactaccacgacctggagtcggtggttcagcaggtggagcagaacctggagctgatgaccaaacgggctgtaaaggcagaaaaccacgtcgtgaaactaaaacaggaaatcagtttgctccaggcgcaggtctccaacttccagcgagagaatgaagccctgcggtgcggccaggtgccagcctgaccgtggtgaagcagaacgccgacgtggccctgcagaacctccgggtggtcatgaacagtgcacaggcttccatcaagcaactggtttccggagctgagacactgaatcttgttgccgaaatccttaaatctatagacagaatttctgaagttaaagacgaggaggaagactcttgaggacccctgggtgttctcagcatgaagctccgtgtataccctgaggtcaccaccgctcgatctaaatgtgcagttgtgtccttaaatatgcagtcttcacccagagtaaagtgttgatcgcaagagtccagtgtcgtgccctcagccagttcttggccaccacaatgggagcagccctggccgagttgtctctgtggtttctatgcagcccttcttggcgaaattcctgcgatcttatagattctaatgagctcttggaaagacattgtcataaaagccagtgattttaagaaaaagagtggttctggaatcaatgttttccagtcccatcccagaacatcagttgtaagataagtacaattggttgtccttgatttcataagtagaacaaacactaaatgtgcctctgagatggccaccccgggcagggacctgtgccttccgccgatgctcagggctccctctggctcccgggtcactcttgtggccccagtgggtggtccctgcagtcatggcctgagtgcgcaggggccaccgcgtggctgctgctgtcctcctccgggacccacggggaccaaggtcacacgttccgtgctgtgaagctgtccagatgtgcctctttggctgggggttctggtggacgtttcaagtggcattttgtacaatgcaggttagaattcaggaatttcaagtatgtgcccgggtctgtcacgtcccagttgcctttctgacggcccccctcagagggacggcgacgagcactaaatgnnnnnnnnnnnnnnnnnnnnnnnnnnnnnnnnnnnnnnnnnnnnnncctcctgttccaattgatagctttcttatttaataaattctgtagttcannnnnnnnnnnnnnnnnnnnnnnnnnnnnnnnnnnnnnnnnnnnnnnnnnnnnnnnnnnnnnnnnnnnnnnnnnnnnnnnnnnnnnaaacctagaacnnnnnnnnnnnttaataaanatttntttttgaaacccnnccccaaaaaggaaagggaacttggctatttctgttgccaccagaacctgggacaggactagggtttgaattctaacaataaaaaaacccccggcggaacccgtggtttttaaacaatgcaaatatgaagccggagggggtatcctggatctataaaccggaggcccattgcaagctccaattttggattgcccccgccccttgccgctaaacgggggggcggtttgatatacatttacggccttccgcgaacgggaaacccattcccaatgggggaatgttgaaatcgtgaaacgggcaaggggaactccgcaccccgtgggccccttggcaaataaacttttggcccatggcgaaaaaccggggggggaaaaaacatgtgctgtttccggccccggtttaaaatcgcgcccgggggaacaccccccccggggtatgggctct

SEQ ID NO: 172834 - DNA, 758 bp, Homo Sapiens
atgcagcatccatgcagatggaccgagggagggatgggggggtatacagtactgcatgtggggacaccccgggtggggaggagatgcctggcaccccagtctgcacagccccgcacgccctgggggagtgtaggatgggggtggaggcagggcacaggcggccatgacaggtcaaccaggttgatggtgggtgcacccagccagctagtggtgccgggcggtcaactggggacatggatggacggaccgatggatgaatggacggatgggcggatggattctacaagggcaaggtggctattcccagtgtggggtggttttccaacccaaaagcgccccagatgtggggaacagcgatcggtggggaggagacggccaagtggacccaggagaggagggatgctagagcgaatccagctttgaggcttcaggtgcttgggtaccaactggatggcagccaacggtgggtcctggtgggcagggggagctgggactgcccaggaagtgtctgcaccatctttagaggagccccaggtagggggttccccgaggggccacccttccctcctccctccccccaggaagataagagcaccagcgtgtagcaccaagttcccctggagatggaggctgtgtggagggggagctcctaggtgggaagggatggggtggggggccaggaccacatggcccttgcctctgaagtagcggggcctcctggtcggggcacttggccgctcccctcttgtttccttgcc

SEQ ID NO: 172835 - DNA, 651 bp, Homo Sapiens
gggagagcaatagtatggtgagccccttagagatgagcgcctactccttcttggcgaatgctgccttcagatgcttaccaagtggtcactgcatctagtaagattatatttccagtacacttccttagggcagaaacaccatcctatcaggtttggtcagtcccttcttcatgaagggagtcatggggaattcctgaaaattttcttccttctgcagacagttggatgagtcccttagagaaggcatccagagacataactaaactgaatatcatcccatattgattttaggaattgactctaaaactctgtgcagaatcttgtgttgggattgtatcttgacattcctgttgtgttatttttcttaactggagtgtgtgctgcctttcaggtacaatttttgtgtaataaaagccagtgcattaagtttatatagactactttctatgcaagactgagatatggaatagataggaagagatatgtaccgctgggtacatggacagtaagtgtgttttcagatggagtaccagcaccgaaaatgggttgagggaggatgggttgtatgtatgtttctgcccactaattttgaacagccatattatgaattaatcgtcacaccaagccagggtccgagctcgaatcgtatct

SEQ ID NO: 172836 - DNA, 923 bp, Homo Sapiens
tctccccgttgggagaaagagcctgtcttgctggagctaggggtatagctgagcatttcacacagggttggcgcatcaactgaacttgggtgtcaggccagcgcgaactgtgtcgtctgaacacgccatgcactccacgcagtctcctttcaggtaggcatggggtacggttggcctccagaaacatggcctccccgaggcttcagggtaagcaggttcaggaagtagatggcaaagcagccgatatcacctgggtactgctggtgcagctgtagcaaaagctccccaaagatgtcctccatgttgtttccggcagccgcttgctgggagatccgcttcaccaacaggttgagctgttccaccaccaccttcttctcactcttcatcaggtgggagaaacagctctgcagagaggaggccacagcctgggagtcatggctcatggtctgcttcaggtgtgttgctgcctcatctccaatcaggaactgaaactcaggcaccttctttagaaaggttacaatctcctcaactggccggaagccacacaagccctggaagggggtgagggcaatggccatctctggcttgtggttggcatcggggtagtgctgcggagcctggaggtgcagcttctctgccagctccttgttagggtgtgcctggatggacaggggtgtttcaactgagagcactttgaagaggaagggcaggttgccattaaacgctgtccttgacctttgagcccaagctgtcctggttctcagcaatccactggcttagggtcttctgtgagatgcggttgtcaaggatcttggcatccccctcgggggtgagtccccatccacaactctgcataaggcttgtcctctgcgatctgggccagtgcatcactgctggcccacacccgcgcgacgcgtgggtcg

SEQ ID NO: 172837 - DNA, 786 bp, Homo Sapiens
  misc_feature (703)..(703): n is a, c, g, or t
ggggacgcatgtgctacgccatcattcaggcagagagtaaacaagcaggccagagtgtcttccgacgtggactcctcaaccggctgcagcaggagtaccaggctcgggagcagctgcgagcacgctccctgcagggctgggtctgctatgtcacctttatctgcaacatctttgactacctgagggtgaacaacatgcccatgatggccctggtgaaccctgtctatgactgcctcttccggctggcccagccagacagtttgagcaaggaggaggaggtggactgtttggtgctgcagctgcaccgggttggggagcagctggagaaaatgaatgggcagcgcatggatgagctctttgtgctgatccgggatggcttcctgctcccaactggcctcagctccctggcccagctgctgctgctggagatcattgagttccgggcggccggctggaagacaacgccagctgcccacaagtattactacagcgaagtctccgactaggcctccagatcagggcttcctcaccagcactggcctttcttctacccacctctaaagctggcagtggagtctctgcctcacccaaagacttttcccctccagactttgagtgtcttcccttctagactttcccatctcctggtgagatgtttcccacttatgccgtggtccttgcctgagccccttttccccaccanaaccaccacgggccaggcagagaaggggcaactcccaaaagccactgcactggggtaaacattaatggcaactactaccttgg

SEQ ID NO: 172838 - DNA, 461 bp, Homo Sapiens
  misc_feature (18)..(18): n is a, c, g, or t
  misc_feature (33)..(33): n is a, c, g, or t
  misc_feature (52)..(52): n is a, c, g, or t
  misc_feature (84)..(85): n is a, c, g, or t
  misc_feature (89)..(89): n is a, c, g, or t
  misc_feature (95)..(96): n is a, c, g, or t
  misc_feature (415)..(415): n is a, c, g, or t
  misc_feature (427)..(427): n is a, c, g, or t
  misc_feature (443)..(443): n is a, c, g, or t
gcaaaaatttaactacancccctccatgtgcanttcatacactaaaggccantttgtggtggtgtggtgggttttcccagggcnncccnccaaanntttcaggtacatttcatgccccgccccctgcaggtctgtacaggatgcaaagccagtgtgctcactcttctcaaagtgaggtgccagaccaccgagcgtagggtccttcagcagtgcacaggatgtggggctctggcttcttcaagtaccgtggaccacgggcccttgggtcaacagcaccggcggactggcttgcatgggttggcttctcaactttgattgttccattgtttccattttcatggggggtccaagggtggggatctgggcggctgatttccttgaaagagctctttcgatattaataggcatttttttngcatttgttttnaaccacggatgggganctattgggtttcagcgta

SEQ ID NO: 172839 - DNA, 763 bp, Homo Sapiens
gagtcagggttcaatattccacgacatattacagataatcagtatcgggtgtgttcgactccttctccatgtacgtcttatagctcgctgagcagctgagctcatagtatctgcttcatccagaatcaccatcttaaaaggcggacacggcttcccatctgagcgacttcctgacacagttaattgagcaaaatttttcactttctctcgaactacttgtattccacgttcatcagatgcatttaactcaagaactcttaatcggaaaagttcaggcccaaagagttctctagctgctgccaaaatagtggatgtttttccagttccaggtggtccgtaaaacaagagattaggaagatctgctccttctaaagattttttcagcactgcaaccacttcttcctggaaagcaacttcatccacacattttgggcgatatttttccacccagggaacgggtttggctttcttgttctctccgctacttcccgcactggcagctactcctcgatccttggtcagcgggggtttagtactgatggatgtacctttaagaaatgcttgcatggtacttcacccagttagcctggcttctcgtgcaggtcaccgccgccggctcgttcctcaggtttccgcgatacaaaaaggacgagatggtctcgaagtcttagctccgtcacctaatctgagaataacgggcccaggagacttacgatcactgatgtccccacagtcgcctcagttcccgccacggaacggcccc

SEQ ID NO: 172840 - DNA, 460 bp, Homo Sapiens
tcatcagatgcatttaactcaagaactcttaatcggaaaagttcaggcccaaagagttctctagctgctgccaaaatagtggatgtttttccagttccaggtggtccgtaaaacaagagaataggaagatctgctccttctaaagatttttttcagcactgcaaccacttcttcctggaaagcaacttcatccacacattttaggcgatatttgtccacccagggaacgggtttggctttcttgttctctccgctacgtcccgcactggcagctactcctcgatccttggtcagcgggggtttagtactgatggatgtacctgtaagaaatgcttgcatggtacttcacccagttagcctggcttctcgtgcaggatcacacccccccggctcgttcctcaggtttccgcgatacaaaaagacgagatatctcgaaggtgatcgtggtataagggccgag

SEQ ID NO: 172841 - DNA, 1142 bp, Homo Sapiens
  misc_feature (765)..(765): n is a, c, g, or t
ggtgcttgcggtgcatagcttgttctagaggtatccccggtggacccggaccgtcaggtttggaatgttcgagttcctcagcaaccacatgcgggatgcccagtggacggctggacagcacgcgtgggctgctgtgcggcctgggcgctggcgtgcccgaggccgtggtggtcgtgtgccccatggagaccatcaaggtgaagttcatccacgaccagacctccccaaaccccaagtacagaggattcttccacggggttagggagattgtgcgggaacaagggctgaaggggacgtaccagggcctcacagccactgtcctgaagcagggctcgaaccaggccatccgcttcttcgtcatgacctccctgcgcaactggtaccgaggggacaaccccaacaagcccatgaaccctctgatcactggggtcttcggagctattgcaggcgcagcagtgtcctttggaaacactcctctggatgtgattaagacccggatgcagggcctggaggcgcacaaataccggaacacgtgggactgcggcttgcagatcctgaagaaggaggggctcaaggcattctacaagggcactgtcccccgcctgggccgggtctgcctgggatgtggccatagtgtttgtcatctatgatgaagtggtgaagctgctcaacaaagtgtggaagacggactaagcctagagaggccgcaaggggaccgccccaggcaccgccagagtgtcctgctacctttgtctcacatgattnccagtgcagtagtgccaaaaggccccttcccacgtccctcgagctctggtagcctggtctgtgcattgtggctgtcaaatccatgtgtcccccctgtgggctgtgtgtgacaccaccactgtgtccccagggtctggcccagcccatgggctggatggtgcatcttggcctaaggaaccctgtggcccacttggcccatggggccttactggggaaccccgggggcctgggggtttcagggttctgggggaacacgaggacccctgtggcccccgcccccctcgcgggggggcaccgatggtgggacacgtggtctccttcgggcgcattcgacaacccccggcgcccttgttctcccaagctgcgtcgagggcccg

SEQ ID NO: 172842 - DNA, 1582 bp, Homo Sapiens
gcctgggtggcgaattcggcacgagggactcgcccgcctcccgtctgtcaccccctgcgcctcgccgggacaacggggcggcctggcgggtggcatcgagatctgcatcaccttccccaccgagtacgtgaagacgcagctgcagctggacgagcgctcgcacccgccgcggtaccggggcatcggggactgcgtgcggcagacggttcgcagccatggcgtcctgggcctgtaccgcggccttagctccctgctctacggttccatccccaaggcggccgtcaggtgaggcccggccggtggctgctgcgggaggggggctcggccgcggcagcccctctcacccgcctcccgcctccaggtttggaatgttcgagttcctcagcaaccacatgcgggatgcccagggacggctggacagcacgcgtgggctgctgtgcggcctgggcgctggcgtggccgaggccgtggtggtcgtgtgccccatggagaccatcaaggtgaagttcatccacgaccagacctccccaaaccccaagtacagaggattcttccacggggttagggagattgtgcgggaaccaaggctgaaggggacgtaccagggcctcacagccactgtcctgaagcagggctcgaaccaggccatccgcttcttcgccatgacctccctgcgcaactggtaccgaggggacaaccccaacaagcccatgaaccctctgatcactggggtcttcggagctatagcacgcgcacccagtgtctttggaaacactcctctggatgtgattaagacccggatgcagggcctggaggcgcacaaataccggaacacgtgggactgcggcttgcagatactgaagaaggaggggctcaaggcattctacaagggcactgtcccccgcctgggccgggtctgcctggatgtggccatagtgtttgtcatctatgatgaagtggtgaagctgctcaacaaagtgtggaagacggactaagcctagagaggccgcaaggggaccgccccaggcaccgccagagtgtcctgctacctttgtctcacatgattccagtgcagtagtgccaaaaggccccttcccacgtccctcgagctctgtagcctggtctgtgcattgtggctgtcaaatccatgtgtcccccctgtggtctgtgtgtgacaccaccactgtgtcccagtgtctggcccagccatggctggatgtgcatctggcctatgaccctgtgcccacttgtccatgtgcttactgtgaaccctgtgcctgtgtttcatgttctgtgtcacgtgaccctgtgccccgcctcccggggtgcccgtgtggcctgggtcctcggccctgtagccctggcccggtcccagtccggtgccttccaccctgccctggcctaccacagctgcctccgggcctcggcctggcttcaccgcattccaggggctgcagccccctgcttctcccgccattggccttaactggccctcgggccctctctccccccccgacagggtggcacccaccactctcaggaccaccctgccaaggcagaataaaccggatcctgttgcaaa

SEQ ID NO: 172843 - DNA, 944 bp, Homo Sapiens
  misc_feature (621)..(647): n is a, c, g, or t
gcgtccgccgcgcccgcgtccgggaaggccaagctgacgcacccggggaaggcgatcctggcaggcggcctggcgggtggcatcgagatctgcatcaccttccccaccgagtacgtgaagacgcagctgcagctggacgagcgctcgcacccgccgcggtaccggggcatcggggactgcgtgcggcagacggttcgcagccatggcgtcctgggcctgtaccgcggccttagctccctgctctacggttccatccccaaggcggccgtcaggtttggaatgttcgagttcctcagcaaccacatgcgggatgcccagggacggctggacagcacgcgtgggctgctgtgcggcatgggcgctggcgtggccgaggccgtaggtggtcgtgtgccccatggagaccatcaaggtgaagttcatccacgacccagactccccaaaccccaagtaccgaagattcttccacggggttaaggagattgggcgggaaccagggcttgaaagggacgtacccgggcctcccaggcccctggcctgaaaacagggcctccaaccaagcccacccgcttcttcgataagggccctcctggcccaactgggtcacggaaggggaacaannnnnnnnnnnnnnnnnnnnnnnnnnnacgcacaaacggtgggtgccttcgtaggcccctcgggtgaacccaagaccgggggccgctttccacccaacgtacttggggctagcggacaccaaaaccccccatcccacatgagaccccggctgcggcgaaaatagacccggcggcctcccgccgccaatccgcgcccgcctcccccatattgcgaacacgcacggtggccacccacactcgcgagcaacacaaggtaggagaagagttgccccactccgatatcagagcgaacacgccgattcgtatctctgcccccgccatgcc

SEQ ID NO: 172844 - DNA, 941 bp, Homo Sapiens
  misc_feature (854)..(862): n is a, c, g, or t
gctggggagtcgtggaggcgcggtcctggtccccacccggcgcgctgggactcgcccgcctcccgtctgtcaccccctgcgcctcgccgggacaacggggcggcctggcgggtggcatcgagatctgcatcaccttccccaccgagtacgtgaagacgcagctgcagctggacgagcgctcgcacccgccgcggtaccggggcatcggggactgcgtgcggcagacggttcgcagccatggcgtcctgggcctgtaccgcggccttagctccctgctctaaggttccatccccaaggcggccgttcaggtttggaatgttcgagttcctcagcaaccacatgcgggatgcccagggacggctggacagcacgcgtgggctgctgtgcggcctgggcgctggcgtggccgaggccgtggtggtcgtgtgccccatggagaccatcaaggtgaagttcatccacgaccagacctccccaaaccccaagtacagaggattcttccacggggttagggagattgtgcgggaacaagggctgaaggggacgtaccagggcctcacagccactgtcctgaagcagggctcgaaccaggccatccgcttcttcgtcatgacctccctgcgcaactggtaccgaggggacaaccccaacaagcccatgaaccctctgatcactgggggtcttcggagctattgcaggggcagccagtgtctttggaaacactcccctgggagtgattaagacccggatgcagggcctggaaggcgcacaaattacgggaacacctggggacggcggctttgcaaaatcctgaaaaggggggggctcaagggcttttctacaagggccctgtnnnnnnnnntgggcgcggggcctggcctggaactggggcccacgtggttggccctcctattaatgaactgggtggcaacctgcctaac

SEQ ID NO: 172845 - DNA, 400 bp, Homo Sapiens
  misc_feature (122)..(122): n is a, c, g, or t
  misc_feature (221)..(222): n is a, c, g, or t
  misc_feature (330)..(330): n is a, c, g, or t
  misc_feature (349)..(349): n is a, c, g, or t
  misc_feature (355)..(355): n is a, c, g, or t
  misc_feature (363)..(363): n is a, c, g, or t
ccacgtccctcgagctctgtagcctggtctgtgcattgtggctgtcaaatccatgtgtcccccctgtggtctgtgtgtgacaccaccactgtgtcccagtgtctggcccagccatggctgantgtgcatctggcctatgaccctgtgcccacttgtccatgtgcttactgtgaaccctgtgcctgtgtttcatgttctgtgtcacgtgaccctgtgccccnnctcccggggtgcccgtgtggcctgggtcctcggccctgtagccctggcccggtcccagtccggtgccttccaccctgccctggcctaccacagctgcctccgggcctnggctggcttcaccgcattncagggnctgcagcncgtggttcttgcgggccattggccttgaacttgccct

SEQ ID NO: 172846 - DNA, 982 bp, Homo Sapiens
  misc_feature (16)..(16): n is a, c, g, or t
  misc_feature (42)..(42): n is a, c, g, or t
  misc_feature (45)..(45): n is a, c, g, or t
  misc_feature (49)..(49): n is a, c, g, or t
  misc_feature (68)..(68): n is a, c, g, or t
ccccaaactttggaangggacccggggcaaaaggttaagaanggnccancaccgttcgaaaaaagaantgctttccaagctcgctgactgccagccggggtcccatcgctgccccccaagtgcccttggatggagcgggacacatcagtcttccccaacaatgttgtcttcgtcacgggtaattatgtgctggatcgagatgacctggtggaggcccaaacacctgagtatgatgtggtgctctgcctcagcctcaccaagtgggtgcatctgaactggggagacgagggcctgaagcgcatgtttcgccggatctaccggcacctacgccctgggggcatcctggtcctagagccccaaccctggtcgtcgtatggcaagagaaagactcttacagaaacgatctacaagaactactaccgaatccaattgaagccagagcagttcagttcctacctgacatccccagacgtgggcttctccagctatgagcttgtggccacaccccacaacacctctaaaggcttccagcgtcctgtgtacctgttccacaaggcccgatcccccagccactaagtggccccctaaacagaaagtgtgaagaggctgccctcgctgctcataaggacctgggggaagaggaaagtgtcccaaggtctttcctttctgactccaaaaatagtttcctttcttggatctgcaaagaaagcttttcttccgtcgctgcctcagcctcctccctatgcctctggcacctgcgcagcaaggctggctgtgctggagtcaccatcatcttcctctcccccagcctcccaggctggatggcatggactgtttgctgacctctgttctcttaaggcatggggagtggggaggatatcaaatttctctagcccttttcctcctattctcccaaaggaaagaagattccccatttctccctccggccattgtaccctaaccttcttgtccccctaactgc

SEQ ID NO: 172847 - DNA, 624 bp, Homo Sapiens
  misc_feature (540)..(540): n is a, c, g, or t
acctcgcttagtgctccttggtcccgcccccgccccatgggatgcttgcaaggtcaccaggcctcaggtccagggggtccgaagcgccgcaggagctgctcctggtcttccaggtccttccgcaccttcttgcgcatgtagaagatggggcagtcccggctggtgcagatgacgtcctcgtgcaggctgccctggcagcgctggcactgcgtccagaggcgcgagaggcgctcctccagggcattcagatgggatacctccttctgatacagctcagactcccggggctggcagaactcacacacggctccctggctgcacacagccgccatccacgaggcattcattccaaactggacatcagctggcttcagccaatttgtcgacgcgtgcaaagccattgtcgatgagatcgccaacgctcagacgactggcaacggggccaaagagctcaataactccgtggaggtgtttgcacaggtgttgtggttttggaagcagatctggccggacgttacggtgatgggggaggataatggngctgcagagaatggggagagcgagaatccgatcgagattcaggatgaagattctccggatgtggaattctcgtccagggagcac

SEQ ID NO: 172848 - DNA, 1091 bp, Homo Sapiens
ggaggcctggtcctggacacaatgaatgacagcctcagcaagatcctgctggacatcagctttcctggcctggacgaggacccactgggccctgacaacatcaactggtcccagtttattcctgagctacagtagagccctgcccttgcccctgtgctcaagctgtccaccatcccgggcactccaaggctcagtgcaccccaagcctctgagtgaggacagcaggcagggactgttctgctcctcatagctccctgctgcctgattatgcaaaagtagcagtcacaccctagccactgctgggaccttgtgttccccaagagtatctgattcctctgctgtccctgccaggagctgaagggtgggaacaacaaaggcaatggtgaaaagagattaggaaccccccagcctgtttccattctctgcccagcagtctcttaccttccctgatctttgcagggtggtccgtgtaaatagtataaattctccaaattatcctctaattataaatgtaagcttatttccttagatcattatccagagactgccagaaggtgggtaggatgacctggggtttcaattgacttctgttccttgcttttagttttgatagaaggggaagacctgcagtgcacgggtttcttccagggctgaggtacctggatcttgggttcttcactgcagggacccagacaagtggatctgcttgccagagtcctttttgcccctccctgccacctccccgtgtttccaagtcagctttcctgcaagaagaaatcctggttaaaaaagtcttttgtattgggtcaggagttgaatttggggtgggaggatggatgcaactgaagcagagtgtgggtgcccagatgcgcgctattagatgtttctctgataatgtccccaatcataccagggagactggcattgacgagaactcaggtggaggcttgagaaggccgaaagggcccctgacctgcctggcttccttagcttgcccctcagctttgcaaagagccaccctaggccccagctgaccgcatgggtgtgtgccagcttgagaacactaactactcaataaaagcgaaggtgga

SEQ ID NO: 172849 - DNA, 759 bp, Homo Sapiens
aggctggtaccggtccggagttcccgggatatcgtcgaccacgcgtcggaggaagagaagacaggtctgcagtaaccgtgggacaggcaaagtctgtggggaaaggcctccaggtgaaagcagcctcagtgcctgtcaaggggtccttggggcaagggactgctccagtactccctgggaagacggggcctacagtcacccaggtgaaagctgaaaagcaggaagactctgagagcagtgaggaggaatcagacagtgaggaaacagctgcatctccagcacaggtgaaaacctcagtaaagaaaacccaggccaaagccaacccagctgccgccagagcaccttcagcaaaagggacaatttcagcccctggaaaagttgtcactgcagctgctcaagccaagcagaggtctccatccaaggtgaagccaccagtgagaaacccccagaacagtaccgtcttggcgaggggcccagcatctgtgccatctgtggggaaggccgtggctacagcagctcaggcccagacagggccagaggaggactcagggagcagtgaggaggagtcagacagtgaggaggaggcggagacgctggctcaggtgaagccttcagggaagacccaccagatcagagctgccttggctcctgccaaggagtcccccaggaaagggggctgccccaagactcctgggaagacaggccttcggctgcccaggcagggaagcaggatgactcagggagcagcagcgaggaatc

SEQ ID NO: 172850 - DNA, 524 bp, Homo Sapiens
  misc_feature (429)..(429): n is a, c, g, or t
  misc_feature (450)..(450): n is a, c, g, or t
  misc_feature (470)..(470): n is a, c, g, or t
cttacacccctgtctccagtgatgatgacagaggctttgtggacctaattataaagatctacttcaaaaatgtacacccccaatatcctgaaggtgggaagatgactcagtatttggagaacatgaaaatcggggagaccatcttttttcgagggccaaggggacgcttgttttaccatgggccagggaatcttggaatcagaccagaccagacgagtgagcctaaaaaaacactggccgatcacctgggaatgattgctgggggcacaggcatcacacccatgttgcagctcattcgccacatcaccaaggaccccagtgacaggaccaggatgtccctcatctttgccaaccagacagaggaggatatcttggtcagaaaagagcttgaagaaattgccaggactcacccagaccagttcgacctgnggtacaccctggacaggcctnccattggctggaagtacagntcaggcttcgttactgccgacatgatcaaggagcaccttcctcctccagcgaag

SEQ ID NO: 172851 - DNA, 378 bp, Homo Sapiens
ctccctggtaatacgaaggggctagcgttgctcggaatcactgggcgtaaagggcgcgtaggcggccattcaagtcaggggtgaaagcctggagctcaaccacagaactgccttcgatactgaggagcttgagtccggaagaggtgagtggaactgcgagtgtagaggtgaaattcgtagatattcgcaagaacaccagtggcgaaggcggccaactggaccaacactgacgctgaggcacgaaagcgtggggagcaaacaggattagataccctggtcgtccacgctgtaaacgatgaatgccagccgttggggagtttactcttcagtggcgcagttactatttaacgtacccgatgcggggggataatctaggtc

SEQ ID NO: 172852 - DNA, 603 bp, Homo Sapiens
tcttcgggctgtcgctcgtctacttcctcagcagcaccttcaagcagagcgtgcagcatgagaacacctaccgggaccccatagcaaagtattgctatggagaaagcccgcccgagctcttccccgcttgacgggtgcagcggacttgctccagcctgggtgaggaggccccgctgaagaactcgcctcctgggacccagcttcagccatcgggccaggctgcaggaagaagacaaaggcagcgtgaggaaaccttggctttgaccccttctcgtgttgtcatctttggcttcgctcaccacccgggcttaccagatggaactcttctgtaaagcagcttggcccctccagccagtcccattcgggaaagatgaaaccggaggccgggctcacggtggtggtggagttcttggatgactcagccctgggacctgcacagggacctgtgacttgtgttcatcgggggccggtgtcacttccagttttgatccaggctctttcactgtaaaattatttattggattcctttggagtaatgggaacattctaatgttttatgtaggaaaatgccttgccattctagttgaatatgttcaaggaaat

SEQ ID NO: 172853 - DNA, 881 bp, Homo Sapiens
  misc_feature (720)..(720): n is a, c, g, or t
gcactgatgcagaactacttgcgccagcagatcctcttctaccagcgggtgggccagcagctggagaagaccctgcgcatgtatgacaacctctgaccgcgtgtgcctgggccccctccttcccctgggcctggtcactgcagtgtaccccactttcccgacctccctataccagcagtgactgggggaggggtcagcggtgggggagataagcggcctgtcctgcctcctgggagaaggagctttcaaggagtcatgggtgcccctgggaaattccccactccttagaagtggggcacagcaggggtgagaatagagtcaggagccctcgaggccaaggcctgggctgccggtcagtcagtgaaggtcaggccagggtctcagcctcccctagagcctattttgcttgctcacctggccactgctgccttatccattcagcagacaccgaggcctgctgcacccttgggtcggatgctgggcacccagggctgtgacatgcctgctcttcaggagtcctcagtgaaggtcggggtcagacacagacagagtcaatgcagtatgactgatgtttaagtgagggatttctggaagctcatagaagggaccacagcattccactggtcagggaagactccatagagtaggcaacatttgggcagtgttttgaagaatgacaagggcctgccagacagtacatggggggagaaggactttcangggagaggaacagcatggggcaaattatggaggcatgcaaacatcctccctcttctctccccttacttttccaagcaagtttaaggtacgcttttcccatgggggaattctgggccctgtgttgggtagggaaagggaattctccccctttgctctccaac

SEQ ID NO: 172854 - DNA, 336 bp, Homo Sapiens
ggacccagaaggactggagactgcaaaggacgattcccaggcagcagctatagcagagaataataattccatcatgagtttctttaaaactctggtttcacctaacaaagctgaaacaaaaaaggacccagaagacacggcaccgaaagcagaaagtgtctgtgatggacaagctggtcagaagacatccgagatccaggctagaggcaccaagaaaaagcacctggatagccccaggctaggactcgcctttagaaaattctttaggcataagggtgctgaaaagtcacccaccacttcagctgaccttaagtcagacaaagccaactttacatc

SEQ ID NO: 172855 - DNA, 1293 bp, Homo Sapiens
  misc_feature (64)..(64): n is a, c, g, or t
gtagtgccttactgctccacccacctgagcccggttccaagtccaaaggagcttcccaaatccntagaggaatgactgtacttagaaagttttgttttgtttaagagaaaatggctttacatgaatttatgttcctcatggcagatatgttacacttccctctaaacagaaagacaagcccaggtggggcccgggcatcctcgaggaatgaagcagccattcccaccacctctcagggactaacaggtgcatgtggacacttgaaccacgactgtgtccacagctcctcctggaccaggcctggtgcctgagtgtgaagactcctggcctgcgtggcaggggcagctatctgggagggctaaacagcctggaggctgagtctgcagaggaagggggacctgaaagagcccaggtacaggtgcccatcgtgttcgtgcacctcgctgatgtaggtggccaccagcccatcgggatcatgcaggcttctccggaaggcaccgctgtcgctgagttctaggacgaggctgtaccgcggcacaaacttcatcaccgtctcttgactaaagagcttaaaaatcatccttttaatccagggtctctcagataagaaatccagcatggaaaacccagggttagggcggatggtcgacatgcccacccagtaccccccagagctgctgggccggatgttgtctggaaatccaggcatgttctccacaaacagatcagccccgcccttcatcaggccagaaacgtagactcttcgtatcctggccatggttgtttctgccaccaggacaaagtcttctgcaggagacagctggactccattcgggaaccgcagctggtccaataaaacttttacttccctggtcacagtatcatactccagcaggcgcccgtcatctgtgccctccatcaccagaagcaggtagtctcgtctttgccatttgctgctagaatcggtgaaataaatcttcctcccatcctgagtgactgtaagatcattcacaaaggacatgttcttcccctcaatgggtgtctcggaggacagcagcagtttcacttcacgtttccagggatttacttcaaatagtcccttgtatgcatcggccacaaagagagtcccattgggccctgcacggatacccagggggtctcccacacacaggctcatcatcttcgggtttttgcaagggcccgaaccaaaccgggcaatgggtctctattttcaccatttttcaagttttacggaccccggccatcttgctgttcccagttaaacattcacat

SEQ ID NO: 172856 - DNA, 823 bp, Homo Sapiens
  misc_feature (34)..(34): n is a, c, g, or t
  misc_feature (43)..(43): n is a, c, g, or t
  misc_feature (53)..(53): n is a, c, g, or t
  misc_feature (61)..(61): n is a, c, g, or t
  misc_feature (112)..(112): n is a, c, g, or t
  misc_feature (117)..(117): n is a, c, g, or t
  misc_feature (139)..(139): n is a, c, g, or t
gtattcagaccccgaccctttcatcaggaccagnaaacgtagnactcttcgtnatcctggnccatggcttgtttctgccaccagggacaaagtctttctgcaggagaccagnctggnactcccattcgggaaccgcagnctggtcccaataaaacttttacttccctgggtcacagtatcatactccagtcaggcgcccgtcatctgtgtccctccatcaccagaagtcaggtagtctcgtctttgccatttgctgctagaatcggtgaaataaatcttccttcccatcctgagtgactgtaagatcattcacaaaggacatgttcttcccctcaatgggtgtctcggaggacagcagcagtttcacttcacgtttccagggatttacttcaaatagtcccttgtatgcatcggccacaaagagagtcccattgggccctgcacggatacccaggggtctcccacacacaggctcatcatctcgggttttgcaagggcccgaaccaaaccgggcaatggtctctatttcaccattttcaagttttacgacccggccatctgctgtcccagtaaacatcacatccccaatatgtgctatggactccggtccaacaagttgattttcaaacagcctttctgcctgtcgcagcttcgtatttggatgcagaacaccaagcaagagcgggggttctttgaagctgagaggctgtggatctataggagattccagcagcatcatggctccaagcaggggaacggtgagagaaacagccagcatcaagaaggtcactcggaaaactctgccgctaaaggagctgccgcc

SEQ ID NO: 172857 - DNA, 813 bp, Homo Sapiens
  misc_feature (724)..(724): n is a, c, g, or t
  misc_feature (760)..(760): n is a, c, g, or t
  misc_feature (778)..(778): n is a, c, g, or t
acagatagaacccaaagaaaggcaaagagtcctgcccggcaccggcgccgcgtgggccaaacctgcgcccgtggaggggcgcgcagagggcaccgggcgccgggagcaggcggcgcagcaccagcattgtgttagtgccgggaggccactgtgtcagcaagctgagagggaaactgaagcaagatgtcgggccggagtgggaagaagaaaatgtccaatctgtcccgttcagctagggcaggtgtcatctttccagtggggaggcatggatgcgttatctcgaagaaagggaacgttcaagtaccggatcagcgtgggcgcccctgtctacatggcggcagtcattgagtacctggcagcggaaattctagaattggccggcaatgccgcgagggacaacaagaaggcccggatagccccgagacacatcttgctggcagttgccaatgacgaggagctcaaccagctgctaaaaggagtgaccatcgccagtggaggcgtcctgcccagaattcaccccgaactgctggccaaaaagcgagggaccaaaggcaagtcggaaacgatcctctccccacccccagagaaaagaggcaggaaggccacgtcaggcaagaagggggggaagaaatccaaggctgccaaaccacggacgtccaaaaagtccaaaccaaaggacagcgataaagaaggaacttcaaattccacctctgaagatggccangggatggattcaccattctgtcttctaaaaccttgntctgggacagaactgtcntaacccagatgacatagccatattgcttcatgaga

SEQ ID NO: 172858 - DNA, 884 bp, Homo Sapiens
tttgtgatatgacagtgtagaaaaagcaggctgggtacggtccggaatcccgggatatcgtcgaccacgcgtcggcacaactaaggctttcctgagcaggaagggggtgaagaccaatcccttcctttggtcctttggtacgcaccccctcagagctgagatggtgaagaccaatcccttccttggtccttggtacgcaccccctcagagctgagatggaagacatggctagttcttttcagccttgtggagcctgtcagtcgccatcatacctcgagtgaggcccagctagataatgacttgtccaagatggcacacgtggaaagttgatctgcaccagaacccggatgaccgtcaccttgaagcgtcctgttctccttctgtgctgtcccaggaagtgtctggcgggcgtgggcagcacagctctacactgtacgattcactagggcatcctgcgagcctcactagccttctggttcatgcctttgacaagcatttttgtgccccctctgcttactgtgacagtcgatgatgaatcttgcgttgccattttctgctgtgggtaactgcgtgcagtgtcttgccttgctttctcttcttactgtcccacagcttggtttcatgttacaaacagaaaagctcgaggctcccaccccgccacatcccaacttcatttccccctcactgtagcccatttccaccccaccacaaagttgccacaggttttctttgtatagaatatttattttgaagctctattttaatagtatttattcttagaaagtctactattgtaagagttcttctgtttgtgaagaaaaaaacaagttaaaaactgaatgtactgatttagaaaatatatataaatatatattgttaaatat

SEQ ID NO: 172859 - DNA, 763 bp, Homo Sapiens
attctggatctcttttcttcagtactctatgaatgtgttacccaggagaccccagagatgttgcctgcatacatagcaatggatcagcctataagaagacttgggagaagagaaatgtctgagacttctgaactttggcagataaagttggtgttagagtttttcagctcccgaagccatcaggagcggctgcagaaccaccctaagcgggggctctttatgaacccggaattcctccctgttgtgaagtgcaccattgataataccctggaccagtggctacaagtcgggggtgatatgtgtgtgcacgcctacctcagcgggcagcccttggaggaatcacagctgagcatgctggcctgcttcctcgtctaccactctgtgccagctccacagcacctgccacctataggactagaagggagcacaagctttgctgaactgctcttcaaatttaagcagctaaaaatgccagtgcgagctttgctgagattggctcctttgcttcttggaaatccacagccaatggtgatgtgaccgtgtctggcggtgaacctaccctgaaacgtgacttctgcacaacaaacgtgaccaaacatcaaagctaaagcaatgtttataaagttttatggtataactagggggaaatgagctgcacaaacctcaatgtattttaaatctgttgctgtcatcattaacggtatatgacatataaaagcaagttaaaatttacttttgtaaataaagtttttggtttgtttcc

SEQ ID NO: 172860 - DNA, 664 bp, Homo Sapiens
caggggcctttaaaccacttagtcaggacaaactgtttaactctttcgaagaagcccatcgtcccttcgacacccaatgtgcttacatcatcgtgttccactgggaatcctcctcagagaggggcccccgaatgtgccgctgtctgcgtgaagaggacaggtctctgaaccagtatcctgcattgtactacccagagctatatatccttaaaggcggctacagagacttctttccagaatatatggaactgtgtgaaccacagagctactgccctatgcatcatcaggaccacaagactgagttgctgaggtgtcgaagccagagcaaagtgcaggaaggggagcggcagctgcgggagcagattgcccttctggtgaaggacatgagcccatgataacattccagccactggctgctaacaagtcaccaaaagacactgcagaaaccctgagcagaaagaggccttctggatggccaaacccaagattattaaaagatgtctctgcaaaccaacaggctaccaacttgtatccaggcctgggaatggattaggtttcagcagagctgaaagctggtggcagagtcctggagctggctctataaggcagccttgagttgcatagagatttgtattggttcagggaactctggcatccttttcgc

SEQ ID NO: 172861 - DNA, 296 bp, Homo Sapiens
gtgggttatgaccactgtgtttgtggttccagagtgtcccatgcttgcttctctcacagccctttccacacatgctattggcatcatttgcttatttgcctgatcccccaccccaactgagaccttatgcagaaccctgttttgttcattttgatacactagaatctagcctagaagttcaagcgggtggatagtacagggtgggtgagtagaggtcatgctcattgtatgataccagtgcatgactgactttttcccgcaggtgtttccaagtcagagccggctagtcgcaggcg

SEQ ID NO: 172862 - DNA, 1229 bp, Homo Sapiens
  misc_feature (947)..(963): n is a, c, g, or t
gggaccctgctacatttcctaatcaagaagttggcgtgcagctgggagagctagactaagttggtcatgatgcagaagctactcaaatgcagtcggcttgtcctggctcttgccctcatcctggttctggaatcctcagttgcaaggttatcctacgcagagagccaggtaccaatgggtgcgctgcaatccagacagtaattctgcaaactgccttgaagaaaaaggaccaatgttcgaactacttccaggtgaatccaacaagatcccccgtctgaggactgacctttttccaaagacgagaatccaggacttgaatcgtatcttcccactttctgaggactactctggatcaggcttcggctccggctccggctctggatcaggatctgggagtggcttcctaacggaaatggaacaggattaccaactagtagacgaaagtgatgctttccatgacaaccttaggtctcttgacaggaatctgccctcagacagccaggacttgggtcaacatggattagaagaggattttatgttataaaagaggattttcccaccttgacaccaggcaatgtagttagcatattttatgtaccatggttatatgattaatcttgggacaaagaattttatagaaatttttaaacatctgaaaaagaagcttaagttttatcatccttttttttctcatgaattcttaaaggattatgctttaatgctggtatctatcttattgttcttgaaaatacctgcattttttggtatcatggttcaaccaacatcattatgaaattaattagattcccatggccataaaatggctttaaagaatatatatatatttttaaagtagcttgagaagcaaattggcaggtaatatttcatacctaaattaagactctgacttggattgtgaattataatgatatgccccttttcttatnnnnnnnnnnnnnnnnntaatgaaacacagtgaatttgtagagtgggggtatttgacatattttacagggtggagtgtactatatactattacctttgaatgtgtttgcagagctagtggatgtgtttgtctacaagtatgattgctgttacataacaccccaaattaactcccaaattaaaacacagttgtgctgtcaatacctcatactgctttacctttttttcctggatatctgtgtattttcaaatgttactatatattaaagcagaaatataaccaa

SEQ ID NO: 172863 - DNA, 1229 bp, Homo Sapiens
cggacgcgtgggtccgctcgcgatctagaactagtcccacttgtgtcaatattaaagatagctgagaagcacctttcaaatggcacagtccctcttcaagatgtctaaaagaatggttatgtctgtccagtaagggatttcacatccacatgtaatcatgtctgctgctgttgctacccaaattttcatttctccacattttgggtacttaagctaaaacgtaatggccacagtctgtaatccattcacattcctcagtttcaccacctccctcttccagactgcactctctgtcatcagtcccctcctttctaacagaaatggggttatgattttgaaggctgtgggttcagggagtctttgccaatcctgttggccctaaactatcaaggaggctccatttcaccatttgattttttgcatttcaggaggcaactgattgtttcgatatgtacatattactcacgtataccccatttccttccagtcagcccaacattttccaccagtctgtccccatctctgaaatccttccttctctttccccctaagtcttttgagtgtcatcatgtactggtggtttctcggttccatctcatccatttccttttcaatggagactacagcgtcagccagctcagccttggcttttaactcaatattccagtccataggggtggttaaaagttgctgcaaggctgcaggcactggcagtgggaagaggcagacgactagatgacttctgcacttttagctggttgaaaagtaccactcccactctgaacatctggccgtccctgcaaagagtgtactgtgcttgaagcagagcactcacacataaatggctgtgtgtggaattgcttgccaaagaagtttctagcctttccctttcccctaactgcatcagggaagaattcttatctctagcttggtttccacatgaggtttttctgagaaggggcttgggacaagaagtctgtcatgttagttaagcaggcaagaaatcctactaatcccgttttgtttgaaagttggttggtccgtatgaattttttaaaagtcaagtttaatttcaaaaaaccttttttttctgagattacttttggggtaatatttaaaatgagagacattttgtaaccctgtaaaatacatagggaatataacattccagtgtatacaaagaaggcaaattctttaatcaaataaagcgcattataaaatgaaaaaaa

SEQ ID NO: 172864 - DNA, 541 bp, Homo Sapiens
ttatgttactaaatcaaagtgaccagttccacattatactacaagtttcactgtgtaatgcataagaattacacagagggaagggcctcaaaaaatgcacttctgaagtattttaatgtaaaattatttaagaccataaagtttcatgaaagcctaatctttctggaacctacacatactctgcatgtgaaccagagttaaactagtcaagtattttaatactgaactaatctggaaaaacatcatttaaaaaattactgtatttatgaaggaagaatataaaatctgttaaaaacttaaaacatctaaaataggtatgaagagaggcttatggtgctcattttaacagcattcttgagtaagttaccttgcagtcaaagcatctgctccagaccagtgttttaaactgtggattatggtaccactatgggtcatgaaattaattattgcattatgactagcattttttatttaaatagagaaaagaatagaataaagcgccgtaagggttttccaagtcagagaccggcaagtggcaggc

SEQ ID NO: 172865 - DNA, 1226 bp, Homo Sapiens
  misc_feature (994)..(1114): n is a, c, g, or t
  misc_feature (1116)..(1149): n is a, c, g, or t
  misc_feature (1152)..(1152): n is a, c, g, or t
  misc_feature (1158)..(1172): n is a, c, g, or t
ggtactacaagagcttcccgctgggctactggatatgccaggttgctattgatgccacctatgttgaaattagatgcccctgcgctgacactgtgttcgttaaagggcggaacctatctgctgagtcgatgatacatgaagatgcaaaggaccgttgtcttccgcagatattatctgtactatgtctacaagatccaccttttttacaaccttcttcagaacatgtatggacgcgtgtccccatgctttcagtactttgagatgagaggcatcgtcactgagatggagtgactcccatctgaacaatacagagttcttgaggtgctaagggtttggcacgctgtctgcaaactaaaatctttctacattctctgaggctggacatattattggctccctacactgaggtaccgttgttctgctcggtacgtttttgatgataaagcaaagcttgcgccgggcacaatagttgaagtatggaaagacagcgcatatcctgaggaactcagtagagtcacagcatctggcttccctgtaatcctttctgctccttggtacttagatttgattagctatggacaagattggaggaaatactataaagtggaacctcttgattttggcggtactcagaaacagaaacaacttttcattggtggagaagcttgtctatggggagaatatgtggatgcaactaacctcactccaagattatggcctcgggcaagtgctgttggtgagagactctggagttccaaagatgtcagagatatggatgacgcctatgacagactgacaaggcaccgctgcaggatggtcgaacgtggaatagctgcacaacctctttatgctggatattgtaaccatgagaacatgtaaaaaatggaggggaaaaaggccacagcaatctgtactacaatcaactttattttgaaatcatgtaaaataagatattagactgttttttgaataaaatatttttattgattgaaannnnnnnnnnnnnnnnnnnnnnnnnnnnnnnnnnnnnnnnnnnnnnnnnnnnnnnnnnnnnnnnnnnnnnnnnnnnnnnnnnnnnnnnnnnnnnnnnnnnnnnnnnnnnnnnnnnnnnnnngnnnnnnnnnnnnnnnnnnnnnnnnnnnnnnnnnnttngcccgnnnnnnnnnnnnnnnaaaaaattttttcaccccccctcttggtgggggcgggggcccaccccaagaaag

SEQ ID NO: 172866 - DNA, 130 bp, Homo Sapiens
tcagcaggtcgtcgataatcctcagcacaaaacccagctgcaaaccctcatctgaagaggacgaatgaggaggaccactgtggtgcatgctgattggttcccagtgtgccccacccccctattcactggt

SEQ ID NO: 172867 - DNA, 439 bp, Homo Sapiens
gggccccagccccccaggaacttggggctgccaaccagcagggtgatctttgcgaggtgagcctcgccggcagtgtggagcctgcccaaggagaggccagggagggttctccccgtgacaaccccactgcacagcagatcatgcagctgcttcgtgagatgcagaacccccgggagcgcccaggcttgggcagcaacccctgcattccttttttttaccgggctgacgagaatgatgaggtgaagatcactgtcatctaaaagccggctactgtcagcaaagcctgaagaagtggggctggataccctgcccccaccatatccctaccatcccttctcagtcaaccctttacccttacagtagcaagcatagacccctgtctaacgggggtagacaggtgcagatgaggtgaagatcactgtcatctaaaagctggcca

SEQ ID NO: 172868 - DNA, 504 bp, Homo Sapiens
agtcctttgcctatccttatgcctccgcactgtattgaggttttgataataaattggtagaaaaaaaagtacctcctagaaggaagccttccccaccatttccaggtgccaactgctaagcagatatattccaaaaatggtaactgtcatgtgcacactgttggttatttttaataagcctcttcctactagaacattttattttccttgttcaccatacaatcatgtactctttaacagaaattgcttttaaaaaatatctggaactatctttaaaaaaactttattaataatcatgtatttttactgatcacattttgaaatgcctaaaagactttattgttctaattatccagatgtacctttgtaaaatagctcttttatgaattagctgataaggctgtatgtttctggaacaaaatattggtcatctaaaaactttctgttttctggggtctgggaaaatagaaaataagatttcaaatattaaataagcttaaagga

SEQ ID NO: 172869 - DNA, 430 bp, Homo Sapiens
  misc_feature (184)..(184): n is a, c, g, or t
cttcctggcctggccagagctggagcccccacagggtaaggaagagagagtgggaggcagagtgtgatggggaggagggacaggaagacccttttaatgatgagggtaactatttcagttgtgagccttctagggccccaggctgggaggctcagaggactgaatctggtacctgtgttccccncggcaggcagggacaaagatggcatggcaagcatgggggcggggtgggtggggagggatgctgcatttctcagctgggcagtaatcaatttaatggtcctttaaaatgtctgtgtattaaaaatttaagaataccacactttaatattaaatattcataaggtctagtatcttgataataatgtagatgttttaataacaatttttgtccttcttaaaataaaatgagactagcttccccggtttg

SEQ ID NO: 172870 - DNA, 278 bp, Homo Sapiens
tgttgctgcgtaccaggtgaataaggcttccacgtaaccgtcgcgctccacgtccaccacgacgcttcgagcgatcccaatcggatcgatgccgggatcggaccagaagcgccggtcctcggtggcgattacggccttgcgaaatatcgctggaatttcgtcgtagctcagcggatgcacgtgcttctcgcgcatgcgcagggccgccgcctgcctcacgcgcgcggcgacgggattcaacgtgtggaagtacacgtcctgcccacccatgccaggcc

SEQ ID NO: 172871 - DNA, 172 bp, Homo Sapiens
tggtccatggtgctgcgtacagtgataggtggagtcgtaaacatctgttgatctgtgttctggaaggactaaggagaattgggaaaaagcccatgaattattcaatgatatccaccataacccagggaaaggaagaaaatccttctgccttcctcgacgctatcagagcgcc

SEQ ID NO: 172872 - DNA, 246 bp, Homo Sapiens
ggcgccggtaacgtcgttagggccagtagtggaaaaagatgctcgttttccggaaggagtcaatgtcgaatttgtcgaagtcgtcaatgatcgggaacttcattttcgcgtatgggagcgcggctcaggggtgacgcaagcatgcggtacaggggcatgcgctgccgtcgttgcgtccgtcttaaacggcaaaacggcccgcacagagacacgcacctatcactggcacgcagcaccatggaccgc

SEQ ID NO: 172873 - DNA, 226 bp, Homo Sapiens
ggcattagtaaagatgccggtcattagtaaagatgccgctcattagtaaagatgccgctcattagtaaagatgccgctcattagtaaagatgccggtcattagtaaagatgccggtcattagtaaagatgccggtcattagtaaagatgccgctcattagtaaagatgccgctcattagtaaagatgccggtcattagtaaagatgccgctcattagtaaagatgc

SEQ ID NO: 172874 - DNA, 675 bp, Homo Sapiens
  misc_feature (490)..(491): n is a, c, g, or t
ggatgccacaacagaaaaagtcagaagaagcatctacagttgtttagatgcacagttttatgatgatgaaactgtaacagtagttcttaaagacactgtaggacgtgaaggaagagatagactcttggtccagctgcctttgtctttagtatataacagtgaagattctgcagaatatcagttcactgggacttattctacaaggctagatgaacagtgtagtgctattcccacccgtaccatgcatttcgagaagcactggagattactggaaagtatgaaagcacagtatgttgctgggaatggttttcgaaaagtgtcctgtgtgttaagctcaaatcttcgtcatgtgagagtatttgaaatggacatagatgatgaatgggagctcgatgagtcttcagatgaagaggaggaggccagtaataagcctgtaaaaataaaggaagaagtgttgtcggagtcagaggcagagaaccaacaagctggnntgctgccgctttagctccagagatagtcattaaagtggaaaaacttgaccctgagctagactcctaatctagcttgccattattgtgtgtgtaattatggccaaaaggacataggagatggactaagatgtcttggaccaccttttgtgtaacaaagaaataaacaggtaaattttattttttc

SEQ ID NO: 172875 - DNA, 458 bp, Homo Sapiens
  misc_feature (430)..(430): n is a, c, g, or t
gagtgccactattaatgtaaaaaggggggggctctacagcagtcgtgatgaaacttaaatatatattctttgtcctcgagattttaggaagggtgtagggtgagtaggccatttttaatttctgaagtgctaagtgtttttatacagcaaacaaaaagtcaattttgctttccaccagtgcgagagaggatgtatacttttcaagagagatgattgcctatttaccgtttgacagagtcccgtagatgagcaatggggaactggttgccagggtctaaatttggattgatttatgcactgttatccgttttgacacagatttccttgtaaaatgtgcctagtttaccaaaattaacaaaggggggggaaaggaccttagaacttttttaagggtaaaatcaaatataggctaccagcattaggagatcgnggaattttgatagggggtacctgtttta

SEQ ID NO: 172876 - DNA, 242 bp, Homo Sapiens
ccgttccagttactcacgcattctctgagaaaccttgtcatctctgccatctgtctctgtgtaggaactgccaaagtccttcggttccccatctcaaataagcagtgcatgggttacttccctcattctaatccttcagtccctccttgtgtccgtttggatcttccaggaagcagctttcaagatggagttagaagtacgagtaatgagaggtgattaccgtgaaagataaaggggagagg

SEQ ID NO: 172877 - DNA, 1132 bp, Homo Sapiens
  misc_feature (479)..(479): n is a, c, g, or t
attggtggtgctcgcagcttaggagctgaagatcgcggacttagcgttgccgcgtccgagttcccggccatcagtggctgcagatccggaggccaggagctcaaccacccttcttcggaacagggccggcctgctgctgtgccctcgacgctcggtgcctgtatctactccggggcctaggtcggctccgggggcggcttaggagaaggccgccggcgagatgttcaaaaacacgttccagagcggcttcctctccatcctctacagcatcggcagcaagcctctgcaaatctgggacaaaaaggtacggaatggccacatcaaaagaatcactgataatgacatccagtccctggtgctagagattgaagggacaaatgtaagcaccacatatatcacatgccctgcagaccccaagaagacgctgggaattaaacttcctttccttgtcatgattatcaaaaacctgaagaagtatnttaccttcgaagtgcaggtactagatgacaagaatgtgcgtcgtcgctttcgggcaagtaactaccagagcaccacccgggtcaaacccttcatctgcaccatgcccatgcggctggatgacggctggaaccagattcagttcaacttgctagacttcacacggcgagcatacggcaccaattacatcgagaccctcagagtgcagatccatgcaaattgtcgcatccgacgggtttacttctcagacagactctactcagaagatgagctgccggcagagttcaaactgtatctcccagttcagaacaaggcaaagcaataactggaattgtgactcgagggatagacccctggatgtgactcttctttttaaaaggaaactatgtggaggacgatgcaaaaacatatttatcttagtttgctctgctgtagttctgttatttatacttggtgttgcttgtcatggacaccggtgaacatgccgtaactctgtgactgcattgtaagtgcagtgggggtaagcagtcctgtgagtggcgcatgaacgctggagcttattccgccgcctgccccagtgtggggggagatacctttaccatgaacttacagaattaaagatggcccataaggaatgtcgacgcggccgcgaatt

SEQ ID NO: 172878 - DNA, 949 bp, Homo Sapiens
gggggagctgggagaaagatggcggcagccgtgcgacaggatttggcccagctcatgaattcgagcggctctcataaagatctggctggcaagtatcgtcagatcctggaaaaagccattcagttatctggagcagaacaactagaagctttgaaagcttttgtggaagcaatggtaaatgagaatgtcagtctcgtgatctcgcggcagttgctgactgatttttgcacacatcttcctaacttgcctgatagcacagccaaagaaatctatcacttcaccttggaaaagatccagcctagagtcatttcatttgaggagcaggttgcttccataagacagcatcttgcatctatatatgagaaagaagaagattggagaaatgcagcccaagtgttggtgggaattcctttggaaacaggacaaaaacagtacaatgtagattataaactggagacttacttgaagattgctaggctatatctggaggatgatgatccagtccaggcagaggcttacataaatcgagcatcgttgcttcagaatgaatcaaccaatgaacaattacagatacattataaggtatgctatgcacgtgttcttgattatagaagaaaattcattgaagctgcacaaaggtacaatgagctctcttacaagacaatagtccaacgaaagtgaaagactagaggccttaaaacatgctttgcactgtacgatcttagcatcagcagggcagcagccgttctcggatgctagctactcctttttaagggatgaaaggtgccagcaacttgctgcctatgggatcctagagaaaatgtatctagataggatcatcagaggaaatcaattcaagaattgctggcatgctgatgcctcaccaaaagcaactacagatgatggttccagcatcttggacagagctgttattgaacacaaatagaga

SEQ ID NO: 172879 - DNA, 635 bp, Homo Sapiens
  misc_feature (415)..(415): n is a, c, g, or t
  misc_feature (463)..(463): n is a, c, g, or t
  misc_feature (537)..(537): n is a, c, g, or t
  misc_feature (547)..(547): n is a, c, g, or t
  misc_feature (608)..(608): n is a, c, g, or t
tgtattggtggtaagactcgctgtctaggccgtagcaaaggccggaggtatccagatatggacactgaggtaagtaaagccaggggcaggggaatccctctccacttccaggatctgattctgtgtcccacttcttaccatttctgccttcattttctcctgtcagtcccgtcttttccttacggattttctccggaaccataatttggagttgtcgaagctgctgagccggcttggacagccagtgccctcgtggcttcgggaagaactgcagcattccagtctgggctgatgtcccagcctcccataccagcaaaatgccccctgcttccctaaggggcaggtccagagcagggcccacaagggggattagagtggcctggcccctccccctctacctcagtagcccccaggnctgagatggctgagaagggaagggtatccttttcccacagttctgggncaaataaatgggcttcctttggtaccccacataatagtgctaggtacctttgacccattcatcttggggaggtngggaggattnagagggtccagggcagggttttagggggaatgttatttagttccagttgaggttttccctntttcatcccgcagcagtgttttctatt

SEQ ID NO: 172880 - DNA, 351 bp, Homo Sapiens
tgtattgggggtgctcggggatgaagaggggcacactatcagatctgctgattctttgaagagagctgcaagtggcaatggggagaagtccatttttgtccaagtcggctacacagtgatgctggagagcctgggccatgtggccttttggctgccaagaggccaggagagggtgacagtaggtaggactagtcttgggtgtctttcaccatttaacagagaaatggggaggtgtctaattatttttgagggtgcttgtgtgaagcgttcctttcaaaagatagttcttaaagcactgggtcatttaatagggcctaagctatgtaccgaatcgctggatttacttttaag

SEQ ID NO: 172881 - DNA, 997 bp, Homo Sapiens
ctttactggccactcagctgttgtagaggatgtggcctggcacctgctgcacgagtcattgtttggatctgttgctgatgatcagaaacttatgatatgggacaccaggtccaataccacctccaagccgagtcacttggtggatgcgcacactgccgaagtcaactgcctctcattcaatccctacagcgaatttattctagccaccggctctgcggataagaccgtagctttatgggatctgcgtaacttaaaattaaaactccataccttcgaatctcataaagatgaaattttccaggtccactggtctccacataatgaaactattctggcttcaagtggtactgaccgccgcctgaatgtgtgggatttaagtaaaattggggaagaacaatcagcagaagatgcagaagatgggcctccagaactcctgtttattcatggaggacacactgctaagatttcagattttagctggaaccccaatgagccttgggtcatttgctcagtgtctgaggataacatcatgcagatatggcaaatggctgaaaatatttacaatgatgaagagtcagatgtcacgacatccgaactggagggacaaggatcttaaacccaaagtacgagaaatgtttctgttgaatgtaatgctacatgaatgcttgatttatcaagcgccaaaaaggcattgtatagtaggaaatgtaagtggggtggcttatggcttctttatcctctgattctagcactttcaagtgagctgttgcgtactgtatcatattgtagctattagggaagagaagaatgttgcttaagaaagaacatcaccattgattttaaatacaagtagcagggtattgcctttgattcaactgttttaagtcctcattttctcaaactaagtgcttgctgttcccaaatatgcaagaataacttttacactttttccttccaacacttcttgattggctttgcagaaataaagttttaaaat

SEQ ID NO: 172882 - DNA, 1888 bp, Homo Sapiens
  misc_feature (82)..(82): n is a, c, g, or t
gggaaaacacggttgaattcaaaagggccatttgcccttcttacgtggtattgtaagaatccaatggggggatgtttttttnttaaagcaccatttgttctgtttgcctaataggctaccaataggatacagtacgcaaacaggtcacttgaaaagtgctagaatcagaggataaaagaggccataagccaccccgccttacatttcctactatccaatgcctttttggcgcttgataaatcaagcattcatgtagcattacattcaacagaaacatttctcgtactttgggtttaagatccttgtcccctccagttcggatgtcgtgacatgctgactcttcatcattgtaaatattttcagcccatttgccatatctgcatgatgttatcctcagacactgagcaaatgacccaaggctcattggggttccagctaaaaatctgaaatcttagcagtgtgtcctccatgaataaacaggagttctggaggcccatcttctgcatcttctgctgattgttcttccccaattttacttaaatcccacacattcaggcggcggtcagtaccacttgaagccagaatagtttcattatgtggagaccagtggacctggaaaatttcatctttatgagattcgaaggtatggagttttaattttaagttacgcagatcccataaagctacggtcttatccgcagagccggtggctagaataaattcgctgtagggattgaatgagaggcagttgacttcggcagtgtgcgcatccaccaagtgactcggcttggaggtggtattggacctggtgtcccatatcataagtttctgatcatcagcaacagatccaaacaatgactcgtgcagcaggtgccaggccacatcctctacaacagctgagtggccagtaaagatggctttagcatccacaattttgccttcttttggtcctgcgtttatatcccacagacaaacagtatggtcatcagatgcacttaggagatgtccactcaaatttgaattccaggagagaccatagccttccttctggtgacctcttaatctgagatcaggattacattctccacttgggtctggtttagcagggtgttttgtatagtcaaaaaccaacacatcagaagatggtgtttttgtagcaatgatgtgaggattctgcggcatgtaacgagcacggtttacttctccttcgtgattgattttaatttcacattcaatttttcctgttacagaaccaaagccaccaaattcacccttgtcactgtcacaatgggaagcatcaaactgtgcatcatcattgggaatatgtactcgagcaaccaccagatgattctgctcatcagacgtatgagtccccagcactagccaatgaagggcataatcttgtcccttcaggtttagtcacttcaggaagccactgaacggtaagactgggccactgaagagcatgggtcataaccaggtcatatagaaacggtgtattcttcttccagattttatattcttcattgatgacacgctcctccacagtatcttcaaacatctctttactcgccatcttgcgtcgggtcgttcgcccctcgccgccgcctcggactcctctcgttagccaagagcagcccgaccgctggcgctcctgcctttcccaagcgcgtcacactccccactgtcgaaagcccgggccccgtcttgctgcctgggtgctccccagacgccgcgtccttctttcctgcctcctccccgctcgcgggtaccgaggtctgaggcgctcttctctctctctccaaacttggaacgagacttttcaacccgcgcctcccagcccgcccaggcagctgagcgcaggcgcatccgccctgggaaaagtccc

SEQ ID NO: 172883 - DNA, 889 bp, Homo Sapiens
ggggcgctcagctgcctgggcgggctgggaggcgcgggttgaaaagtctcgttccaagtttggagagagagagaagagcgcctcagacctcggtacccgcgagcggggaggaggcaggaaagaaggacgcggcgtctggggagcacccaggcagcaagacggggcccgggctttcgacagtggggagtgtgacgcgcttgggaaaggcaggagcgccagcggtcgggctgctcttggctaacgagaggagtccgaggcggcggcgaggggcgaacgacccgacgcaagatggcgagtaaagagatgtttgaagatactgtggaggagcgtgtcatcaatgaagaatataaaatctggaagaagaatacaccgtttctatatgacctggttatgacccatgctcttcagtggcccagtcttaccgttcagtggcttcctgaagtgactaaacctgaaggaaaagattatgcccttcattggctagtgctggggactcatacgtctgatgagcagaatcatctggtggttgctcgagtacatattcccaatgatgatgcacaccttgatgcttcccattgggacagcgacaagggtgaatgtgggggcttttggttctgtaacaggaaaaaattgaaatgtggaaattaaaaatcaatcaccgaagggagaaagtaaacccgttgcctccgttacatgcccgccagaaatccctcacattcattgcctaccaaaaaacacccatctttcctgaatgtggttggggttttttggacttattccaaaaccacccctgccttaacccaagaacccccaaggtggggaagaaatggataatcccctggattcttccgagatttaaggaggggtccacccccgaaaagggggaagg

SEQ ID NO: 172884 - DNA, 298 bp, Homo Sapiens
tgtattggtggtgctcccaacgattatagcattaatgcaaccattccaggtccctaaggttgagttaacattaatatgtaagtaagtgttcgcatttcatgtctacaataaggtagattgtgaacttcccgtatctctgaattttagcaaaaattccatgagataatttacagtaatgtcaaatttctggagtgcaaactcatactctacatttggatcacttttttgctttgagttacctgacttgagaatacaaggcaatttttctttcctaaatccttggaaaaatatttttgca

SEQ ID NO: 172885 - DNA, 216 bp, Homo Sapiens
tgtattggtggtgctcccagtctactcattcgctcaccaccccagtggtttctgtggcaacgccgagtttactcagccagggcctccccttctcttccatgcccactgcctacaacacagattaccagttgaccagggcagagctctcctccttaccagcctgtagttcacctggggggctgccgctaggcaatgtcactgcctggcaagagccac

SEQ ID NO: 172886 - DNA, 397 bp, Homo Sapiens
  misc_feature (382)..(382): n is a, c, g, or t
attgctcagccccagctgcctccaaaatgcctgctttcagggcctacgagtgaagggctaatgacctgggagctagaccggctgctctgggctcggtcagtggagaacctggccacagccaccaccacccttacctccctggcgcagcttctgggcaagatcagcaacattgtcattaaggacgacgtggcatctgaggtgtacaaggctgtagctgccgtccagaagtcggcagaagagttggcgtctgggcacctggcatctgcctttgtcgccagccagggaagctgtgacatcctctgagcttgccttatttgacccgtcactcctccacctcctttatttccctgatgaccagaagtttgccatttacatcccactntttcctggcctatgg

SEQ ID NO: 172887 - DNA, 406 bp, Homo Sapiens
cgagctcgggacccacagcataaactattacacaatggggcctagactagatattttaaaatcagtgtctttaggaattgtttgagatgattagaatacaaattcttgaacttcatcaccaagtttctatttcagtaggtcagggaagcacattttgaagaacactaaaatagaccttcaatgtttgaatccaattatgcataaggtattaatataagaattatacataagatattgatataatactacactaatataaggtactatttgtagagttatacactgctgaatatactgtgctaattacaaagtatttatgactcttgtgaggaccacttgacaaggttgctatatatatgtaaaaaaaccctctgcacttcctcatttgacttactactgatacgtc

SEQ ID NO: 172888 - DNA, 1083 bp, Homo Sapiens
  misc_feature (616)..(616): n is a, c, g, or t
ggggggaactgcaattggtggctttgaaggcgcggcgagcgggaacagctcttgaggagtgagactgcaggagatgtgggccgtgccaaagagatggatgagactgttgctgagttcatcaagaggaccatcttgaaaatccccatgaatgaactgacaacaatcctgaaggcctgggattttttgtctgaaaatcaactgcagactgtaaatttccgacagagaaaggaatctgtagttcagcacttgatccatctgtgtgaggaaaagcgtgcaagtatcagtgatgctgccctgttagacatcatttatatgcaatttcatcagcaccagaaagtttgggatgtttttcagatgagtaaaggaccaggtgaagatgttgacctttttgatatgaaacaatttaaaaattcgttcaagaaaattcttcagagagcattaaaaaatgtgacagtcagcttcagagaaactgaggagaatgcagtctggattcgaattgcctggggaacacagtacacaaagccaaaccagtacaaacctacctacgtggtgtactactcccagactccgtacgccttcacgtcctcctccatgctgaggcgcaatacaccgcttnctgggtcaggcgctgacaattgctagcaaacaccatcagattggtgaaaatggacctgagaagtcggtatctggactctcttaaggctattgtttataaacagtataatcagacctttgaaactcacaactctacgacacctctacaggaaagaagccttgaactagatataaatatggattcaaggatcattcatgaaaacatagtagaaaaagagagagtccaacgaataactcaagaaacatttggagattatcctcaaccacaactagaatttgcacaatataagcttgaaacgaaattcaaaagtggtttaaatgggagcatcttggctgagaggaaagaacccctccgatgcctaataaagttctctagcccacatctttctggagcattgaaatccttagcaccagcgggtattgcagatgctccactttctccactgctcacttgcatacccaacaaga

SEQ ID NO: 172889 - DNA, 694 bp, Homo Sapiens
gggagtgagactgcaggagatgtgggccgtgccaaagagatggatgagactgttgctgagttcatcaagaggaccatcttgaaaatccccatgaatgaactgacaacaatcctgaaggcctgggattttttgtctgaaaatcaactgcagactgtaaatttccgacagagaaaggaatctgtagttcagcacttgatccatctgtgtgaggaaaagcgtgcaagtatcagtgatgctgccctgttagacatcatttatatgcaatttcatcagcaccagaaagtttgggatgtttttcagatgagtaaaggaccaggtgaagatgttgacctttttgatatgaaacaatttaaaaattcgttcaagaaaattcttcagagagcattaaaaaatgtgacagtcagcttcagagaaactgaggagaatgcagtctggattcgaattgcctggggaacacagtacacaaagccaaaccagtacaaacctacctacgtggtgtactactcccagactccgtacgccttcacgtcctcctccatgctgagggcgcaatacaccgcttctgggtcagggagttagaagctactgggaaaatctacccccgacaagaggagatcattttagatattacccagaatgaagaaagcttgcaattagtgaacatgaaaaggaaaataaaaattcctcaccagtc

SEQ ID NO: 172890 - DNA, 545 bp, Homo Sapiens
tcggtaccctgtattggtggtgctcgcagaacaaagtggagaacttcatccataacaagagaggcgtctgtttacaaacttccacaggcagctgttctgttggctcgataagtgggttgacctgaccatggacgacattcgaaggatggaagaaaagacgaagagacagctggatgaaatgagacaaaaggacccagtgaaaggaatgacagcagatgactaaagccgcctttcccctctgcactttttgcaagacagtggtcaacaggaagacccagcagctccaccctcccaagtgacaggccattttcggacgcagccgttctgtgcccattcttcaggcaactttcgaatccttactgtagctaattctagatgcccttcagtattgtgaacaaatagaccgtctggtgtcacagagcccgcgtgtgcaggagcctgctcctccgagatacgtggcgtgtaggttgctgtagttacaagcgcctccgtctctctccattgtgttccgatccatttctgtgtgttcccccaacctttatttc

SEQ ID NO: 172891 - DNA, 1342 bp, Homo Sapiens
  misc_feature (59)..(79): n is a, c, g, or t
  misc_feature (118)..(126): n is a, c, g, or t
  misc_feature (267)..(268): n is a, c, g, or t
  misc_feature (280)..(280): n is a, c, g, or t
  misc_feature (287)..(310): n is a, c, g, or t
tcgaggagggggagataataaggagctgaggcgggtagatgcaaaaggtctggtcatannnnnnnnnnnnnnnnnnnnntttagagtccagggcacgttcgcccgtcataggaaagcnnnnnnnnnacccaatggagaataggccagtccattgtaaagagtggaaataagttccatcatgagtagggcggaaggcccgtttatggggggatgtttcctcacctgattagcaagggcggcgtgatattaggggaagtggggacttgnncgacaaagcccngacaatnnnnnnnnnnnnnnnnnnnnnnnnagcagtgattaaaaacccgtacggtcactttctatgtgatggctgtctccctctcaccagactgcatagcggttgcagatgaacatttggcacctagatgggggtcaaggagctggggctgtgattcagggaagatgctgagggggactgggagtctctgtttgaatcttgaagcaaggggtgaaggtgtggggtgtgtgtaggggagctgacactgaagtctttcaggaagcagatggtaagggtcagggggtgtgtgtctatgctggggtgagggtcctgtggtgttgctggtgatgctgactgccttgcccaccccaagttggactaggagagtcctatcaggctgctgggcagggagggcaaaggagagcaccattctgcgggtagggcaggaagggtggcctccccaccctgggtgcctgcagagcctggcagccccgccctgtggccatccgatgccacatgtcctctagagttcctgggccggctgctccacagcctgctcctccacaggctgcatggcctcctgcacgtagacgatgaactccgaggcctccccgccctgcgtgtagacagtcaccgtctcaatgccctccacgtcgtcggaggacaccaccaggtggtgctgctcggcaagctccacggacgcttgctggaccgtctcctggatcatgaccgtgtggttggagctgggctcctcctcggtgacctgcttaaccacagtcaccgtccctggtgccatggcaaccaccgaggcaagggcagtggcgtcatgggtctcggcgcccagctcaatgatctgctgcaggatgttcacggccgtggggtccagtcggtcgccactctcagaggtgtatctcaggtcctggagcgcggccaccgctgcctgtgtcccttgaacgtcttcttcggcctctgttatgtggagatactgggtggagggctcctcaggagcttctgttgctgtctcccacttggggtctccatcaatttccaccaccttcaagccatgtttgttcttcaagtgcc

SEQ ID NO: 172892 - DNA, 318 bp, Homo Sapiens
agctcggtacccctggcatctcatccaacgtgctagaggagtccgccatctccgacgacatcctgtcgcccgacgaggagggcttctgctccgggaagcacttcactgagctggggctggtagggttgctggaacaggcagccggctacttcaccatgggcgggctctacgaggcggtgaatgaggtctacaagaacctcatccccatcctggaagcccaccgtgactacaagaagctggccgcggtgcacggcaaactgcaggaggccttcaccaagatcatgcaccagagttccggccgggagcaccaccaataca

SEQ ID NO: 172893 - DNA, 332 bp, Homo Sapiens
tgtattggtggtgctagcccattagtcgaaggatgaggaactgaagcacaatacatagcagggagtggtagagctggtttccaaagttaaaataagcaattgagaggcctgtaaaggtatggaagaggtggatgaggtaggtctccttgtagaaaaggtaatgccgataaaacaaagcaaaggggtaacccaggaagatggagatgatcagccgcagcgcctgttctgacgcgcccagggacgtcgccaacttgttaaggctcagctcctggaaacccgactgcagaacccccgccagcaccaccacagtcccctcatccgcttatccaatg

SEQ ID NO: 172894 - DNA, 640 bp, Homo Sapiens
gggcttctggtctcctgataactgaagtggagacagaagttgagcctgttgcccaggcaaactaaagctgcttttgttcttcggaatctgctttgcctccgtcagcctgcttccttccccacacatgctggccgcactgtccccactccagacctctgctgtgtgtcctgggcagggccgcgttttggcagtaccctttcaactcatcctaagcttcgtgtagattactttagtatatattttttataaaacataaagcctttcctctcgatggaaatcaaagcttaccatgtgagcactcgaacttctaagttgtgacaggaataacaaaactgcaaggagtggaaaagatggaaaagcctgtgggaaatccgaggccttttgaaagaagggagctgatgacttcacgaccagctcctggagcccctcctttctgctgaagccgcggcatttccctccgtggccacacgagggcacccttggcccttttatcaaagcgccttcactcccccgtgggaatggagacaagtctgtccacggtgttttctggaaatacccagtttgctacccagatttgtatttttatgtaaaaaaatacattttcacagaaataaaatttgaaaaataaaagtagaaagag

SEQ ID NO: 172895 - DNA, 674 bp, Homo Sapiens
tgtattggtggagcttttgtattcgtctggagaaccttgacagtgatgtgggcagtttttttagcggcactggaggatattcagtctctctggcaccttggagaacagtgcgaggccgaggggtagtgggcaggcaaccagtgttatccaaggagcagcctgcgttccagtatagcagccacgtctcactgcaggcttccagtgggcacatgtggggcacgttccgctttgaaagacctgatggctcccactttgatgttcggattcctcccttctccctggaaagcaataaagatgagaagacaccaccctcaggccttcactggtaggccagctgaggccccaagtgcccaggcttggtcaccgggaagaacaactctcatcccacaattgctgcagaactcttctctccccatcatgggccacagtgggtctcttaatttgattgtggggttctttttgtggggaggggtggtataacttttcttcagaagacccatgtgggacacctccaaggctggcctcctcataagcccagactacaccatgttccagtaaacctctccaccaaggaactgtgctcagcagccacaggcctggaggagtttcctggcctgtcacgtgaggtttgatcagtaaaccaggcgcggggttggctcgctaccacaagccag

SEQ ID NO: 172896 - DNA, 1076 bp, Homo Sapiens
  misc_feature (383)..(391): n is a, c, g, or t
ggtgctctattatgggccgggttgaagaaacatccccctggagaggaggggtgggcataaatctatatcgcgcgcatcatgatggggagagaaagacttctgccagccaagggtgggaaggaaacatggtctatcacgggtgaccaagcctgcggcactggagccccacagctgacaagaacagtgaaggcgagaggcccccctgtcttccacagcggtattgctttccaccgagaagggaggaagccgaacatcaaagctcggagccaccagcgccctcaaagcggaacgcgcccaacatggagaatgcccactgaaagccatgaagcgaaacgttggctttgctagtggactggggaaacgcaggctgctccttggataannnnnnnnnccactgggttcccttggcccactacccgctcagggcctcggcacgtgtatcaaaggttgccagaggagactgaatatcctcccgggcccgctcccggagctgtacctcatcacggtcaggtttctccaaacggatacagtagccccgccagtacacgtgggaattctgggcttccgtcatgcccatgtagaaggggatgacagtgacacgtatgttctcagttgtttccggatgagcatcggagagctccagccaggggtgattcttctcttgccaggcccttagcgtctcccgagccacaaaaggaggtgctttggtctggtcatgcagaagaaatctttcaaagagttcatgttggatgggaacctgatcagtggaggtgtaggggaggatgtcttcatggctgacatagtgcaagcctgggatggcatagagggcccgactgtcatcatggttagccaagaaggtcacagcttctgtctgagatctctgagatatatgtgggcagtcacgagcatcaatcagcgcctgatagtaagtgtgagttttgcctttcacctccttggagccatggccagcagggttctctgctttttctggagctgcagaagccacatcccggtcatacagtcttaccttccagggatgcacccttttgggaaaatcgtcatttctggcttcggta

SEQ ID NO: 172897 - DNA, 584 bp, Homo Sapiens
ggggcctggcaagagaagaatcacccctggctggagctctccgatgttcatcgggaaacaactgagaacatacgtgtcactgtcatccccttctacatgggcatgagggaagcccagaattcccacgtgtactggtggcgctactgtatccgtttggagaaccttgacagtgatgtggtacagctccgggagcggcactggaggatattcagtctctctggcaccttggagacagtgcgaggccgaagggtagtgggcagggaaccagtggtatccaaggagcagcctgcgttccaatatagcagccacgtctcgctgcaagcttccagtgggcacatgtggggcacgttccgctttgaaagacctgatggctcccactttgatgttcggattcctcccttctccctgggaaagcaataaagatgagaagacaccaccctcaagccttcactggtaagccagctgaagccccaagtgccccggcttgggttaccgggaaagaacaactcctcatccccaccatttgctgcagaaactctttcttctcccccatcattggggccaacggggggggtcctccttaa

SEQ ID NO: 172898 - DNA, 1015 bp, Homo Sapiens
ggagggcaaagtgttggagacagttggtgtgtttgaggtgccaaaacagaatggaaaatatgagaccgggcagcttttccttcatagcatttttggctaccgaggtgtcgtcctgtttccctggcaggccagactgtatgaccgggatgtggcttctgcagctccagaaaaagcagagaaccctgctggccatggctccaaggaggtgaaaggcaaaactcacacttactatcaggtgctgattgatgctcgtgactgcccacatatatctcagagatctcagacagaagctgtgaccttcttggctaaccatgatgacagtcgggccctctatgccatcccaggcttggactatgtcagccatgaagacatcctcccctacacctccactgatcaggttcccatccaacatgaactctttgaaagatttcttctgtatgaccagacaaaagcacctccttttgtggctcgggagacgctaagggcctggcaagagaagaatcacccctggctggagctctccgatgttcatcgggaaacaactgagaacatacgtgtcactgtcatccccttctacatgggcatgagggaagcccagaattcccacgtgtactggtggcgctactgtatccgtactggagaaccttgacagtgatgtggtacagctccgggagcggcactgcaggatattcagtctctctggcaccttggagacagcgcgaggccgaggggtagtgggcagggaaccagtgttatccaaggagcaggctgcgttccagtatagcagccacgtctcactgcaggcttacagtgggcacatgtgggcgcacggttccgctgtgaaaagagctgaatgggctcccactttcgaggtgcgggaatcactcccgttgctcccgggaaacgcaatacacgaatgacaagaaaccagccatccgtgccttacaacggtaggccactgaaggacccaagtggccaaggctgagatcacagggaagaaaaaatctcatcccaa

SEQ ID NO: 172899 - DNA, 438 bp, Homo Sapiens
ctgacaatggaactgttgtaggtaaagtcattttcagattaaatacaacaatttccacattagaatcagaagagttataatttttccaatcataggacatcccatgaaattcacaaaaattataacttattttattttccatttgacagtatttacatgttccacagatatttgtaaaacggctgcaaattccttgcttttcagatacacattgcatatctggcttcacaattatttaacatctctttatcaacaaaaccagcttgtctcaaacacatacaccttactttagataaaaacaataaacatccaattacagttactcttttaggacttttatgatgaacattaagaaaaaaatgacaattttgggtgacattcttctttgtcttaaagaggcagaagcattcatgtaacatagtttgcaaaagatctttt

SEQ ID NO: 172900 - DNA, 1668 bp, Homo Sapiens
  misc_feature (433)..(433): n is a, c, g, or t
cgccggagttccttgtggccgacgtgcaccaaggacaggaagatgtcacccaagcgcatagctaaaagaaggtcccccccagcagatgccatccccaaaagcaagaaggtgaaggacacgagggccgctgcctcccgccgcgttcctggcgcccgctcctgccaaggtgcctgcgggccgagccctcctgaccagaaaacccgaccagtctcacacaggtcccacagcacagaacccggcttggtgctgacactaggccagggcgacgtgggccagctggggctgggtgagaatgtgatggagaggaagaagccggccctggtatccattccggaggatgttgtgcaggctgaggctgggggcatgcacaccgtgtgtctaagcaaaagtggccaggtctattccttcggctgcaatgatgagggtgccctgngaagggacacatcagtggagggctcggagatggtccctgggaaagtggagctgcaagagaaggtggtacaggtgtcagcaggagacagtcacacagcagccctcaccgatgatgccagtgtcttcctctggggctacttccgggacaataacggtgtgattggactgttggagcccatgaagaagagcatggtgcactgtgcaggtgcagctggatgtgcctgtggtaaaggtggactcacagaaacgacacacttggtgatgctgacagctgatggtgacctctacaccttgggctgcggggaacagggccagctaggccgtgtgcctgagttatttgccaaccgtggtggccggcaaggcctcgaacgactcctggtccccaagtgtgtgatgctgaaatccaggggaagccggggccacgtgagattccaggatgccttttgtggtgcctatttcacctttgccatctcccatgagggccacgtgtacggcttcggcctctccaactaccatcagcttggaactccgggcacagaaccctgcttcataccccagaacctaacatccttcaagaattccaccaagtcctgggtgggcttctctggtggccagcaccatacagtctgcatggattcggaaggaaaagcatacagcctgggccgggctgagtatgggcggctgggccttggagagggtgctgaggagaagagcatacccaccctcatctccaggctgcctgctgtctcctcggtggcttgtggggcctctgtggggtatgctgtgaccaaggatggtcgtgttttacgcctggggcatgggcaccaactaccagctgggcacagggcaggatgaggacgcctggagccctgtggagatgattgggcaaacagctggagaaccgtgtggtcttatctgtgtccagcgggggccagcatacagtcttattagtcaaggacaaagaacagagctgatgaagcctctgagggcctggcttctgtcctgcacaacctccctcacagaacagggaagcagtgacagctgcagatggcagcgggcctctccccagccctgagcactgtgtcagttcctgccttttctcatcagcagaacagaatccttttcctcttttccttcctcctctttggaattttcctgggacctacagaataaagggggggatggacagggggttttcaaaaggaacatgctcactcagactatatgatcagacgt

SEQ ID NO: 172901 - DNA, 372 bp, Homo Sapiens
attggtggtgctgccacctcagcctgccaagtagctgggatcacaggcatgtgccactgtgcccagccaagtgcagcatcttatcacacctttacaaaattaataattccaatcatcctatagttgatcagtgttcaaatttccaattgcctcataaaaagatcatttcttaacattttgttttgttgcaattggttgctgtaagtcacctaaatatcttctcttttttatactttttattggagtaaaataggtataacatacaatttgccattttaaccattttaagtgtttaactcagtggtgttaattacattcacaatgtgtagccagcaccaccaattattggtggtgctggcaggaaacgaccac

SEQ ID NO: 172902 - DNA, 386 bp, Homo Sapiens
tgtattggtggtgctggcgcagatacagggacactcatgtcccattgctcctcagaagtcctagcagcagccagactaggggcaaagtaagttttcacagggggaaaaaccccaccaaaaaccccctaaagtaactggacaatcctttccctgagaccactacagtaacatcacccacagacaacttctaaagagcacttctaactgctcaaagtcttgagaagggaaagattttagcaaggctaggaaaataaaaatgcaacagcacattgtccagaaaccctagacaaccatgcaaaaaggaatgagccaaaaagtcttagctttgtaagacttgaaaggaaaaaaacacacatttaaaactcctacataaaatgagctaatgg

SEQ ID NO: 172903 - DNA, 850 bp, Homo Sapiens
caaaggagaagtctttttgggcggcccagcttcatcacatacacggtcggcgtctcggaccccgcggctggcagccaagggcctctgtccactaccctgaccttctccagccccgtgaccaaccaagccattgccatcccagtgacagtggcttttgtgatggatcgccgtgggcccggtccttatggagccagcctcttccagcacttcctggattcctaccaggtcatgttcttcacgctcttcgccctgttggctgggacagcggtcatgatcatagcctaccacactgtctgcacgccccgggatcttgctgtgcctgcagccctcacgcctcgagccagccctggacacagcccccactatttcgctgcctcatcacccacatctcccaatgcattgcctcctgctcgcaaagccagccctccctcagggctgtggagcccagcctatgcctccctactaggccagcgtgaaggttcccggaggatgggtctcagccgagcctcgtgcacccccaagaaggaacatccctgctgcattcacactggaacaagcccctccagatgagtgccccggccccaggccagcttcactgccgtctcttcacacagagctgtagtttcggctctgcccattagctcattttatgtaggagttttaaatgtgtgttttttttcctttcaagtcttacaaagctaagacttttttggctcattccttttttgcatgggttgtctaaggggtttctgggaaaatggtgctgggtgccttttttatttttcccagcccttgcctaaaaatcttttccctttctccaagacttttgaaccaacttaagaaattgctt

SEQ ID NO: 172904 - DNA, 704 bp, Homo Sapiens
caaaccaaaggctggggttctcatctccaagtggctgttctccaactttcccaagccgcttgcattccccagactggactactgtggcggttaggttagatttgaagacggggcccaggctgggtatgaacgggtgcagccctcttctcctcttcccccccacatctctcatgagagaggtagtggcatttccttctcagggagcttcaatgggaaaggtctcgaaagcttcaggaggagcagaataccaacgcaggggatggctgtaacgatctcaccgtctcctaacctcagtcccttttttgagagtgaatggtggagggtgggaagggacccagatttgtagatctcttcgtctgggggaggggaaggatgtggtttgcagagcggaagcagagtttggaaacgcatgagagcagagcttcgtgtgttcccaccctcagtgaggaggtgtgagtgggtgagcatgtggagtcgggtgttcccaccctcagtgaggaggtgtgagtgggggtgcatatagaggcagtgcctgctgtggggtcacaactggtgcatgccagcgccaaaggggacctgtctttaggggtcatttcagccagctcctcccatcacagatgacagctccaagcctagaagggctcagtgacagggccaggacaagcctcaggacctgtggcctcctggcccttggtttccctgcc

SEQ ID NO: 172905 - DNA, 408 bp, Homo Sapiens
  misc_feature (358)..(358): n is a, c, g, or t
  misc_feature (367)..(367): n is a, c, g, or t
  misc_feature (384)..(384): n is a, c, g, or t
atgtaataattgatcccccagcaaatgatgggatgccctgaaggttgtaaggctagttttgatggcttaggcctttgaaatccaatttggagctacagaagttagggccatgaaaagggagagttgatttggggtggaaggatgagttggtgagtttggtcacagcagattgatttgaggttctttggaaatacagagtagatttgcagtcattggtacccagcagagagattaaaactgagggcacagtggcagctgtgagggagacagaacgatgctcatgctttggattggcaggaaagaggggctatggcggaaacaaaaggagatgagggcaggggcacttttaggaaggacngaggctgcnggcagtgtcacatgacngttgagaagaagggaatttgttag

SEQ ID NO: 172906 - DNA, 754 bp, Homo Sapiens
tgtattggtggtgctggcaggaaggccactcaatcaatatgagataagatttaattgtcctttaagagtatccgcaggcctttgtgttctctctgttacagaaacgtgttttctttcacactgaagagctgatttagaaacaggaatataaaactgttccattgtaaagcagaggaaggatgagcaggagcgggagatcctgatgagggcagcaaagtctcggtcaagacaagaagatccagaacagttaaggctgaaacagaaggcaaaggagatgcagcaacaggaactggcacaaatgagacagcgggacgccaacctcacagcactagcagcgatcgggcccaggaaaaagaggaaagtggactgtccggggccgggctcaggagcagaggcctccgtggcactcagtaagcagcgggctcagggagagcgtcctggatggtcaccatgcaggtaagatgaggaggacacttggaaccaggcattggatgcgagccccaccccatgggagggggacggggggatgctgggcaccagggggacctgtgggccagctggcccagggcttgtgcttggggagtgaatgatgggttctgacccccatgcacccctgtgggcccctggcatcactggccccatccttcacccctgccaaacacgcttgccctgtgcctctgaagctcccccactaagggggtggagtctaattccctgccccttgactgtgggttcagccatgtgacttgctttg

SEQ ID NO: 172907 - DNA, 457 bp, Homo Sapiens
tgtattggggtgctcgctccccagcgccctctgcttggttcccgatcttgatatgtgcccctgacatctgccggatctcgctgatcttgctgccctggcgcccgatcacacagccaatcaaatcgttgggaaccaagaactcctgtgagctggtctgtgtgccgggatccagtcctggcaccacgctgggtgtggcaaaggggaccgcatggcttgagagctgctggagcttggtgacctcagctggggtcacagccccatactgaccctggacagagaagccctggttggcagagagaagaacagtacctagggagaggctcggatggtaggggatagtggctcctttgggtggggactccaggataacagcgcagatctggcgcacacacaggatgatggcatcaggcacaccagaatactgtaacactgtgatcgtgggaatgtaaggaccagc

SEQ ID NO: 172908 - DNA, 1231 bp, Homo Sapiens
cttctcatgcatgacacctctaggcatcgggctgggtgcagctctggcagagtcggcaggacctctgcaccagctggcccagtctgtgctagagggcatggcagctggcacctttctctatatcacctttctggaaatcctgccccgggagctggccagttctgagcaaaggatcctcaaggtcattctgctcctagcaggctttgccctgctcactggcctgctcttcatccaaatctagggggcttcaagagaggggcaggggagattgatgatcaggtgcccctgttctcccttccctcccccagttgtggggaataggaaggaaaggggaagggaaatactgaggaccaaaaagttctctgggagctaaagatagagcctttggggctatctgactaatgagagggaagtgggcagacaagaggctggccccagtcccaaggaacaagagatggtcaagtcgctagagacatatcaggggacattaggattggggaagacacttgactgctagaatcagaggttggacactatacataaggacaggctcacatgggaggctggaggtgggtacccagctgctgtggaacgggtatggagaggtcataaacctagagtcagtgtcctgttggtcctagcccatttcagcaccctgccacttggagtggacccctcctactcttcttagcgcctaccctcatacctatctccctcctcccatctcctaggggactggcgccaaatggtctctccctgccaattttggtatcttctctggcctctccagtcctgcttactcctctatttttaaagtgccaaacaaatccccttcctctttctcaaagcacagtaatgtggcactgagccctacccagcacctcagtgaagggggcctgcttgctctttattttggtcccggatcctggggtggggcagaaatattttctgggctggggtaggaggaaggttgttgcagccatctactgctgctgtaccctaggaatatggggacatggacatggtgtcccatgcccagatgataaacactgagctgccaaaacatttttttaaatacacccgaggagcccaagggggaagggcaatgcctacccccagcgttatttttggggagggagggctgtgcatagggacatattctttagaatctattttattaactgacctgttttgggacctgttacccaaataaaagatgtttctagacgcc

SEQ ID NO: 172909 - DNA, 788 bp, Homo Sapiens
cgcatgtgccgctccggtgacagtctctgcggaaagtcacgtttgtgatttcgggagagcatagaacgggacgacggcgctcttgctgggtcatctgggccaggtgacgaagaaacagtttcctggtgaagcagtccctcacccctagtcagcccacacccctagggcctaaagatgctgaggtctgtatggaattttctgaaacgccacaaaaagaaatgcatcttcctgggcacggtccttggaggagtatatattctggggaaatatggacagaagaaaatcagagaaatacaggaaagggaggctgcagaatacattgcccaagcacgacgacaatatcattttgaaagtaaccagaggacttgcaatatgacagtgctgcccatgcttccaacactgagagaggccttaatgcagcaactgaattccgagagcctcacagctctgctaaaaaacaggccttcaaacaagctagaaatatgggaggatctgaagataataagtttcacaagaagtactgtggctgtatacagtacctgcatgctggttgttcttttgcgggtccagttaaacataattggtggatatatttacctggataatgcagcagttggcaaaaatggcactacaattcttgctcccccagatgtccaacagcagtatttatcaagtattcagcacctacttggagatggcctgacagaattgatcactgtcattaaacaagctgtgcagaaggttttaggaagtgtttctcttaaaacattcttgtcctttttgacttg

SEQ ID NO: 172910 - DNA, 864 bp, Homo Sapiens; identical to SEQ ID NO: 15533
  misc_feature (638)..(638): n is a, c, g, or t
  misc_feature (772)..(772): n is a, c, g, or t
  misc_feature (778)..(778): n is a, c, g, or t

SEQ ID NO: 172911 - DNA, 1238 bp, Homo Sapiens
  misc_feature (1164)..(1164): n is a, c, g, or t
tgtattggtggtgctgtcggcgcctgagggagtcgctgacgggcacgctgactggaggctggcggacaggcgacagcgacctgcggcaggaccagaggagcgagagcagcaagaaccacacccagcagcaatgtcagcggaagtggaaacctcagagggggtagacgagtcagaaaaaaagaactctggggccctagaaaaggagaaccaaatgagaatggctgacctctcggagctcctgaaggaagggaccaaggaagcacacgaccgggcagaaaacacccagtttgtcaaggacttcttgaaaggcaacattaagaaggagctgtttaagctggccaccacggcactttacttcacatactcagccctcgaggaggaaatggagcgcaacaaggaccatccagcctttgcccctttgtacttccccatggagctgcaccggaaggaggcgctgaccaaggacatggagtatttctttggtgaaaactgggaggagcaggtgcagtgccccaaggctgcccagaagtacgtggagcggatccactacatagggcagaacgagccggagctactggtggcccatgcatacacccgctacatgggggatctctcggggggccaggtgctgaagaaggtggcccagcgagcactgaaactccccagcacaggggaagggacccagttctacctgtttgagaatgtggacaatgcccagcagttcaagcagctctaccgggccaggatgaacgccctggacctgaacatgaagaccaaagagaggatcgtggaggaggccaacaaggcttttgagtataacatgcagatattcaatgaactggaccaggccggctccacactggccagagagaccttggaggatgggttccctgtacacgatgggaaaggagacatgcgtaaatgccctttctacgctgctgaacaagacaaaggggccctggagggcagcagctgtcccttccgaaacagctatggctgtgctgaggaagcccagcctccagttcatccctggccgctggtgtggccctagctgctggactcttggcctggtactacatgtgaagcacccatcatgccacaacggtaccctcctcccgactgaccactggccctaccccctttctccagccctgactaaactanccacctcaggtgacttttttaaataaaatgctgggtttaagaaaagcaaccaataaaagccagatgctagcaaa

SEQ ID NO: 172912 - DNA, 658 bp, Homo Sapiens
atgtgttggggcccttcttcctcatcaccctggtcggggtggtggtggctgtggtaatgtatgtacagaagaaaaagcgggtggaccggctgcgccatcacctgctccccatgtacagctatgacccagctgaggaactgcatgaggctgagcaggagctgctctctgacatgggagaccccaaggtggtacatggctggcagagtggctaccagcacaagcggatgccactgctggatgtcaagacgtgacctgacccccttgccccacccttcagagcctggggtcctggactgcctggggccctgccatctgcttcccctgctgtcacctggctccccctgctgggtgctgggtctccatttctccctccacccaccctcagcagcatctgcttcccatgccctcaccatcacctcactgcccccaggccttctgccctttgtgggtgttgagctcaccgcccacccacaggcactcatgggaagaggctttccttctgggatgggggcggctggtagacacctttgctttctctagccctcctgggctgggcttgggcacaaatccccaggcaggctttggagttgtttccatggtgatggggccagatgtatagtattcagtatatattttgtaaataaaatgttttgtggct

SEQ ID NO: 172913 - DNA, 276 bp, Homo Sapiens
  misc_feature (159)..(159): n is a, c, g, or t
agcagagctcatggtggaaggaaaagagatccagggtgaggagcaaaaggtacctcctagagcccctggatgccacccaggctggggtaatcagtccagagtcctggccagctctcaaagggttaattcagagagagcacctgccaccccaccagccanggtgactgtaaacagggctgccctcctacctctgctctccttcactccctcttcttggctctaatcagcccccttgtgcctccattctctgctgttccagcctaaggaggtgcgaag

SEQ ID NO: 172914 - DNA, 810 bp, Homo Sapiens
ggggacgcagggaaatcgaagctgccagatgcccacgagcacaacgtcaccctccagattgccctctcggaggggcccagtccgcgcaggtggctgctccctactgcctgagctgtggctgagcagcagattggggagaaacaggctctcgcaccttgtcctttattcgacgatttcttcaatggacagaattattagatcctacaaatgtgttcatttcagttgaaagtatagaaaactcgaggcaactattgtgcacaaatgaagatgtttccagccctgcctcggcggaccaaaggatacaggaagcttggaagcggagtcttgcaacagtgcatcccgacagcagcaacctgatccccaagctttttcgacctgcagcgttcctgcctttcatggcgcccacggtatttttgtcaatgacgccactgaaagggatcaagtccgtgattttacctcaggttttcctctgtgcctacatggcagcgttcaacagcatcaatggaaacagaagttacacttgtaagccactagaaacgatcattactaatggcgggagccgctgcttcttcaactttcttaggagtaatccctcagtttgtccagatgaagtatggcctgactggcccctggattaaaagactcttacctgttgatcttcctcgtgcaagccagtggaatgaatgtctacatgtccccgaagtcttgaatccatttaaggggattgcggtcatggaccaagaaggccatgtccctgggtcattccagaattgcttgggaccaagggttggtagagaaacgctagattca

SEQ ID NO: 172915 - DNA, 637 bp, Homo Sapiens
caccaaatggaatcctgagccaaggcatcatgtctgatgatgctcaacactactaacactacttgcaatcacaattacacatcagacattgttttatttggtaatccccaagtgatttttgtcggccagggatcctatcttaaatttttgagtagaatacttagcacaatgctatgcatttattaaatgcataaaaaaactgaacattaatggaacagacatattttctgttctcaggagcaaacaatacaaacatatcattaatagcaaagacagctaaatatatgtaggcctcaacacttccttagagttcccattgtgtatacctatactcatcaaactttcttagaaaacaataaggaacatggaaatgtttttgaaagttcttataattcatctattaaaatccaatagctttagcaggacacttctaaacttctcaggtcacaaggcaggaagggcaagaaataaggggagaatacatataaaataggaatttcaagcaaaacagtaacatttttggatgaaaattacttaagtattgactatataccacacactgttcttaattcatgccactggaggaaagtagaaatttggatatttcaacaacaaaaaaatcttttttggagacaga

SEQ ID NO: 172916 - DNA, 838 bp, Homo Sapiens
cacctcctaccccacgggtggcgtcacacgtagcggccaaaatggcgctagcggttggagcaggggctctgctgcgacctttacggtagtgaggttagggacgatgggagagcagctttgttcctgaagtgccgtcgaggattaggatcgagtttcttcgatcgtgagggcaattattagtggcctctagccccccagatggcatcttgaggagagagaatccacgctacgagaactaacatagtggacatcgcagttgtccgtagccgatttgcgggttacggagttgttgcaagtaaagaaggggaaatccgagcgttctcgcgttggatttcctccacgtgtgaagtgggaatggtagtgatatctcgtgctatctctgtcaagggcaagaaggagaaggaatttatttgaggccctacgacgtggtaggttcaccctcagcctttgttcttatttcatcttattcgtggagaaggtcttttcgttcctattttacaggtgagaaaaggggcccaatatatagttatttgcggccataaaatagaagccagttgcctgatactgaagattcaatgaaatcttgtgattgacttcccctctttaattttgtactttgggtaacatcggatccggtagaaacgctcgtcagaaagagtttttaatgtgcattctacaatttccagacatagtttccttcttgaaaaatgggttaatactaccctatagggatcttgtgatgccccacgaaaacgttggtaggttgtggaccacttataacaaccgtatggagactcctccatggtcctttgagggggaacctggtagggtttaggaa

SEQ ID NO: 172917 - DNA, 567 bp, Homo Sapiens
gtacccacctcctaccccacgataggtacttcgccacaggtcacgtataattttattgatttcttccattttcatactgtgaaatttcattattgcttggtcaagagtcttataataaatatccagatccttgttcacaagttctgttgtcctcataacaatcatcatttctctatacttttcctcagcatcccgaaattgtggttctcgaagttctttcttaaaatgaataatttcttcttcataacctttctgtcgccctaatgccaaattatgatttctttttatattgtctatgttctcttccaacttctgatgttcacttttcatttgcaaaacctgcatttgacccatttccttcaaatgttgttttctttcttcttcaacttcttttagttcctcatttctttttcttaaagtaaggttatcttgtagccacctttcttgtatcttctgtgtatcaatatcttgtctcatgagtctcatatcttcatttatcttttctttgtgtttctcgcattcacttagttgcgtggggtaggaggggatactctagagtgggccatc

SEQ ID NO: 172918 - DNA, 646 bp, Homo Sapiens
agcccactctagagtatccccctcctaccccacggatacagcaaagtttgattctccattaccaggctgtacacaaatcagatctacctgcattttcagcagaggtcgaagaggaaagtgaagctggtaaagaaagtgaagaaactgaaactaaacaaactttgaaagaatttcgatgtcaggtaagtgactgttctcgaattttccaagcaattaccggcctaatacaacactacatgaaacttcatgaaatgactcctgaagaaattgaaagtatgactgcttcagtggatgttgggaagtttccatgtgaccagttagagtgtaaatcttcatttactacataattgaactatgttgttcatctagaggcagaccacgggattggactaagggcaagtaaaacagaagaagatggtgtatacaaatgtgattgtgaaggctgtgaccgtatatatgcaacccggtcgaatctcctccgacacatttttaataagcataatgacaaacataaggctcatttgatttcgtccaagaagaataacaccaggccaggaaaatatgtcaagcaaggcaaaccaagaaaaaacaaagtctaaacatcgggggacgaagcacagcagatgggggaaggaaggaataaaaa

SEQ ID NO: 172919 - DNA, 385 bp, Homo Sapiens
ggaccgctctagagtatccccgtatcttagaaggatctcagggtgagaggttggggtgggtatttatagagtttctaggtatgaactcaaatggtttacatcttaggtctttcaatacgaggtctgattgtggttgggtataaatttatcatagaagattttaggattgggagaaagtgaggcaacggtcctgatgtaggtgttgattagtaaacagttggtaagtgaaattttttcctgagtaacttattgttctgaaaatgagactgtttgtctaaataagcagtttattattcaaatacattggtgttcctgaagcaaacagtgaagttatttgttctttgcaatcttatcttcgtggggtaggaggtgggaaccgagctcg

SEQ ID NO: 172920 - DNA, 205 bp, Homo Sapiens
ttgaagttggggtctttcccaccacatggcaccaccccaaggagatggtggcagggcccgaggcaccccgggaccagagcagagcttctggaacctttcctgccactgaccaaggtgccaggtgccatcctaattgatgacacaactctctggggtaggcaccaatacaatcccactatcgtggggtaggaggtggggatcctct

SEQ ID NO: 172921 - DNA, 760 bp, Homo Sapiens
acctcctaccccacgaacaatggaaatattggaggacccactctggcatttatgtaaagatttcatatcctatccaacatttactttagtgtctaatcaaattccataccctcaaaaagatctgttggaacaaattgataaaattaggtggaaaggaaagtggtatgggactcaaatacaagtcacttctggtttaattattggctctgctgcttaattcctctgtacctcacgtcctcattgtcgaagtggggacaataatctggacctacctcacaggggaattgaggatattttcatatattagtgtgctttgaagttgactgaaagatatactggatatcataattatataatttctaaatagatttctttaaatccatgctatgttttctttttcagtcaggtcctacagaatgactattgcacttggtctattgttttaatagtaaattttgttattaatctcctatgtgttaaacgtgggtaattgtattatgttaatacatacttagggaggaaaagcaggtggatgtaaatcagtgattcccaacttcagcagatgatagcagtggagggtatccttgagctttagtaatattcaaaaagtatattagaacattatgcatagcacccataatattcctgcttcacaagtcaattaagacatgtgaattgccagttcattagtgcctatatgctctccaaaagctgtgaaatggcaggcatgtgagagattgactaagtaagaataagacac

SEQ ID NO: 172922 - DNA, 513 bp, Homo Sapiens
ggtacccacctcctacccccggtaccttcctcactgacaaattcctttttcaatcccaacctttcccatccttcatattctggtatatgaaacctccatccctttttactcactcttgcgcggcatcaccaactggcaaatcacaaattctgcccacaggaggctgtgtttaactggcatggtactttgaatgccttcactcaagacttggactctggtagactccagtccccagccctctctgcagccttcaatcccatgatctgctgacccctgaagctatttaaatgatgaattcttctctgggcactctcctaagagaggactagcagttccaaattcctgctctcctaaagggtaagccatggagatatatatgagaactgtgatttccagtggccttcccaaattccccattctcactggggcctgtgaatttgctgagagaactctctagggagccctgcagaaaatctcaaatcgtggggtaggaggtgtggatactcgagagtc

SEQ ID NO: 172923 - DNA, 541 bp, Homo Sapiens
acctcctaccccacgattggaatcagagtttatataagcataatatactcagtgaagtgttttatctgccacaaacactgttctatttttataccatcattcagcatgcattcactaagcacccatcacaggtcaggctgcgggtggtaggagggataccaagaagaaccctgtggtcctttccagtcctttcccttcaaacagctcttaatcccatgaaaagacagcatgtacattatactgcctggtatgtactgtaataaaaccatggacaaaggccatggaaacacaggggataaaccagccctctttgcctaccagagtcaggagatccctggcagagcaaatgatcacccagttgggtcttcaagtctagttggaggttatgagctgggggatgaggtgagatgctccccatagaagggaggagaatatgcaaaaacttggcggagctgggacatttggagagttgagtgattgcaggggaccaaaggggctgtagcaagaaatgagactggaaaaataagtagaagcttataaa

SEQ ID NO: 172924 - DNA, 448 bp, Homo Sapiens
  misc_feature (186)..(198): n is a, c, g, or t
ccctcctaccccacgctctaaccatacactgagaattccctttctctcactccatctctaccagccaacaaattcttgctcatctttcaacatcttgggcaaaaggctcctttaaactcttccagactttctttattggaattaaaccttctcttctttgcatccccatggataaaacttttaagnnnnnnnnnnnnnccagcatataaagcagttttcattgtctagtttttacagtactgttctaaccttccttataattctataaagtacttgaggccaaaggctctctcttaaatcttcactgtccctaaaatgaccatcacaatgtattagacaagttcaattttagggagaaatatgctgaacagttcttaacattagtacttttcatatgagttatcatgtttacatttccccgtggggtaggagggagatactctagagc

SEQ ID NO: 172925 - DNA, 577 bp, Homo Sapiens
  misc_feature (271)..(271): n is a, c, g, or t
ccacctgctaccccacgattgaggtataatttgagtatcataaaatttactcattttaactgtagagtttgataaatagtaacgttatatagctatgaaagcatggctacaacccagtttttattttaaatttgcatggtacttagatatttctttttaaaatccagttttagaatatttccttgttccagaaggttccctcttgcccatttgtaggtaataactgctcccggccttagtctggtcctagccccctctctatctctattgntttaccttttttagaaattattttttattttcataaaaactctttgaaataatatttttataacaaatttgcagataaggaaaataagccataaagagcctatgtgatctgcccaaggtcaccgagctataagtgatggagctagtatctatgtccgagatgacctgagagctttggccattatgctatgctgctgtaataagtactatgaaaagtctgaggaattaagaaatgggagagttcacatttggctataggatttggggaacatttgatgcggggggtaggaggtgggtaccgagctcg

SEQ ID NO: 172926 - DNA, 577 bp, Homo Sapiens
  misc_feature (445)..(461): n is a, c, g, or t
ccacgcaaatagacagcctggagaacgaaacattaagtaacttgcccacaagccccccaaaaaggctgagatggacccacaccctcataaaatagagttccaagcaggaaaggagaacatggagtcaaacagggctttcctcctgggactttctccgttggaggggaaaatctcagaagccatcagcagacttcctttacatctcatttgtccagaactggttcagatgcccaccagaccaaacactggggaaactatgactgacttaagagctgccacagtctatatcctggggtttagcaccttgccatttaaaaaatgagggaatctggcagcaagcaagaagagggaatagctattgagcaggaaaccaacaatgtcagccacatctgcattcaatatttaccaaaatttagtaaagattacatacatattagtttgaccnnnnnnnnnnnnnnnnngttaaattaagaggataggagacagaagtatatacattgggagaagggtgtatataacaactaaatcctcatcttccatacgtggggtaggaggtggggatactctagagcgagcc

SEQ ID NO: 172927 - DNA, 511 bp, Homo Sapiens
cccactctagagtatccccacctcctaccccacgactggcgccctgctttccccattcactgccttgtctccacccctcgacctccttgctctcctgctgctgactttgggacccctaccctgcaggctgtcctggaatctcctcggggatgaggcagctgccgagctggcccaggtgctgccgcagatgggccggctgaagagagtggacctggagaagaatcagatcacagctttgggggcctggctcctggctgaaggactggcccaggggtctagcatccaagtcatccgcctctggaataaccccattccctgcgacatggcccagcacctgaagagccaggagcccaggctggactttgccttctttgacaaccagccccaggccccttggggtacttgatggccccctcaagacctttggaatccagccaagtgatgcacccaaatgatccacctttcgcccactgggataaatgactcaggaaagaagggcctcggcagggcg

SEQ ID NO: 172928 - DNA, 482 bp, Homo Sapiens
acctcctaccccacgtcatacacctgtccaggtgtaccccagacacctttgcctcctgcaccacctttctttggtagtccccttcctttcccagatctggatcgcctatccagcaaccttccctttggactggttggcacagttaatccacttctaagggcgtcactcccactgtcgctgaccgaatcgcctctgccagagtcccgggatgagtttttccttagtcgcctttttgccttggcattaattctagcttcgttaatggaggatgctgaaatccaatttccatttatctcattctttacttcctcagtcccagcattttcttcatcaccggaaaagagagagtcacttaagttatcaggatctgcagggtttacattcagtatctgctcattttctacatccatttccccttaatttcgcttgcactgattaaacaaattacctaatggaaatcttccttcagaatcctccattaa

SEQ ID NO: 172929 - DNA, 628 bp, Homo Sapiens
  misc_feature (529)..(529): n is a, c, g, or t
  misc_feature (604)..(604): n is a, c, g, or t
acatcgtcctaccccacgaggatgtgaaacggttctttaaaatgggattttagagcctcgggaatgcatgtgcgtcgcatctttcatattatgggtcagtatagattcatttcttgcaacatagtggaaaagatataagctgcagtaatttgctctttgaatgaccgtcacccccagtataggatatgcttgtatccccccgtcactcctccgcctgttttttaaacttttccaccacctgcgtccaaaaagaatgttatagcgagtgctcttaaatgttgaacctgggtgttgcttccgggccagtctgcgtggctccatgaaaagctcactgctgccccagccgggcttcttagaggaggtcagttgtcctatgtatcatcatttactctgggaatcctactgtgaaatcatgtctgtatttttctggagcagttcacatagagtagaatgtggaatttcccgtgaacgtctccttcctcccccgtatctgccgcctgtcacttcgccaccgtgctaagaatactgntgtgttgtaagatgactaattttaaaagacctgccctgaaaagtcttagaaacgcaatgaaagggaggaacttgncctttacccagtttttccttttgg

SEQ ID NO: 172930 - DNA, 957 bp, Homo Sapiens
  misc_feature (929)..(929): n is a, c, g, or t
gactcgtggatttctagaatacatggagaatggtccaggtacactctgttgggtgtgaaatttctttgatttatactccaagaaatgtgtacatgaaataaaatgacgaagctggtttggtgggaatttttgaacacttttgctttaacagttattagcactatggattatttggttaaaattttccctcattgtggccttggatctggctccataatataccccattcccttattcagcagctctttgaaataaaagtgatttcagttcctaggactattggttatactttgggagctgtctctttccctccctcaggatgtaaaatgtatttcctgtttgtatataccacttcatttaaaaatatttttccttgaggctcaagacagtatgagtaatgataattttaagaggcattaggatctggatggaaattctggctctgttgtatcctgtggtgatgtcactgtaagaattgtgcatttaatatggatcttcaagcatagctttccatattttaacatctgaaatcagaaagcgcctttactgggtttctggttttacaaacatcaaataataatgtatgccaaaattgaatggcctttttgactccgatgatatacccctttatcattccaatctcccctttataccaatttaacatttttatccctcctgggaattggaaacaattatttttattggatcttccacacacttcattttccaaattttccacacgaacccttgtaaaaattttgccgcaccctggggttgcctcaccttttcgccccccgaattcccgcaaaatcttttgttcccccctccaataataactcccttttttgccaccctttcggcgcgcccgaaactcctaccccctgggtcccttgcgccctcccacttaaccactgcgtgttctggccccncggtaacaactatcctcttctccccccg

SEQ ID NO: 172931 - DNA, 972 bp, Homo Sapiens
  misc_feature (942)..(942): n is a, c, g, or t
gcgtcgcgcagggtcggggactgcgcggcggtgccaggccgggcgtgggcgagagcacgaacgggctgcctgcgggctgagagcgtcgagctgtcaccatgggtgatcacgcttggagcttcctaaaggacttcctggccgggggcgtcgccgctgccgtctccaagaccgcggtcgcccccatcgagagggtcaaactgctgctgcaggtccagcatgccagcaaacagatcagtgctgagaagcagtacaaagggatcagttgattgtgtggtgagaatccctaatggagcagggcttccgtctccttctggaggggtaacctggccaacgtgatccgttacttccccacccaagctctcaacttcgccttcaaggacaagtacaagcagctcttcttagggggtgtggatcggcataagcagttctggcgctactttgctggtaacctggcgtccggtggggccgctggggccacctccctttgctttgtctacccgctggactttgctaggtccaggttggctgctgatgtgggcaagggcgccgcccagcgtgagttccatggtctgggcgactgtatcatcaagatcttcaagtctgatggcctgagggggctctaccagggtttcaacgtctctgtccaaggcatcattatctatagagctgcctacttcggagtctatgatactgccaaggggatgctgcctgaccccaagaacgtgcacatttttgtgagctggatgattgcccagagtgtgacggcagtcgcagggctggtgtcctacccctttgacactgttcgtcgtagaatgatgatgcagtccggccggaaaggggccgatattatgtacacggggacagttgactgctggaggaagattgcaaaagacgtaggagcccagggccttctttcaaaggtgcctgggtcccaatgtgctngagaaggcattgggccgtgctttttgtatt

SEQ ID NO: 172932 - DNA, 608 bp, Homo Sapiens
  misc_feature (217)..(225): n is a, c, g, or t
aggcgctctacaggagcttaaaaagctctacctcctgggctcaagcatgcctcccactttgcctcccaaaatgctgagatttactggcatgagctactgcgcctggcatatcagctttttgtgtatgtgtctttagagatgcagtcccttggccagtataatttttacaagtctgaaattccagtttctaatcgtgtttattttgttagaaactgannnnnnnnnctccttaagtcatgacagaggcattctatcaggtataattaattggtcacagttgaatcatgatgagatggcttagtttataatccaaattcatgtgagaaggacatatttctttgctctgttttctactctgtttattagaaaaaattagtattgaagtatttttcttaaggcagaataatattgaaataggggtattgtaacggcatattttacttcagatctaaagtttaaatatgatggttttaatctcaaaagaaatagtaaaattgctgtgtatgccaagaaaacttgtacaaacgtaatcttcataaaccaatagtaatatatatttatttctggttggttattttttaagctgccttcagtaggagcttttgctt

SEQ ID NO: 172933 - DNA, 971 bp, Homo Sapiens
gcgagacagtttccttcctctaagcaagagaatactgcatccagcaacactgctttggctagctcttttttctgtatggcctcatgtgtgtggcaattgaagcagctatttctcccttcctcttgttctggccaaaataatctagaaactcaccatctggtccaatcaagtacattattattgtgtgatccactatgtagtcttcatcttcgtccttggggccagggctgtaatacactctgtatgctctggccacttgatcgacctcttctctcgtgccagtcaagccaaccagtttgggagaaaattctttcacataatttgcgatggcttcttttgtgtccctctatgggctcaatgctgatgaaaagtggagttagatctggcagagttgtaatgctatctatttcatccacgacttgaatcatcttttctagttcttctggacagacatcagggcaatgagtgaagccagaataaatcaataaccactgacccaagtagtccttgtcagttttacgctccccagtatgagttgtgagggaaaacggtcccccaagtaaaggcttgccgatgtgtcgctgccgttccttctctaacttctctgccttttctttcttgacgtgcttcattccagccagtaaagctcctccaatagcaaatgtgattgctaaagacttccaggaaacaggcccgggcttcgaggggcgcgtggagtctccggggcccttctgcgaccacgggggtggcggcctcgcagtgctgaggggccgggttcccaggcaatagccagggcgccccgaggcacgccacgcctccgcttgccgcgcgcagaactgcctcagcaagactctcgcagtcccctcggctgggccccaaaactcgagtccgcgaggcaagaagcgccaaagttggccacccagaggccgcactcaactcgtccgggtactaggaccagcatcgccatgagc

SEQ ID NO: 172934 - DNA, 278 bp, Homo Sapiens
aagtgttgctgaggtgactctagaggattccgagtgggtaggaagaaggaatgaagattgacctcatcgatggcaaaggcagggtgtgattgccaccaagcagttctcccggggtgactttgtggtggaataccacggggacctcatcgagatcaccgacgccaagaaacgggaggctctgtacgcacaggacccttccacgggctgctacatgtactattttcagtatctgagcaaaacctactgcgtggatgcaactagagagacaaatcgccggg

SEQ ID NO: 172935 - DNA, 623 bp, Homo Sapiens
ctagtcgtcactgtctgtagtggaaattagagagatattgcttgtctagctcactaatagagacatagagtgatgctattctggtgcagcggtctcccatgccgtgttgcggtcctcagttgtggctctcttgtccatgttgcggaagcgtaccatggcaggacatgttgcgttggatgctctgttttggaatatctaacttggagacgaaggtcaggcagccgcggtcatcgtagttaaagggcattgggcagcagtcatggccagcagccacgacgctgttctctgagacaaatgacacacttaggagcggcaggaactctgtcttcagagtcgagacctgcacactttttgaggcatcagcaacagacacggtgctgtcgtggctgacccaggccaggcggctcccactggcagagaagcttaccccgtggacccagccaccagtgccactgccaccaaactctgacatcagctgcccaaaaggcatcttgctgccccagggcgtgctggctgggctttcatccacttctttattgtggcagaaacactctgcatttgaagcacatgatcctgctgcagcaaaactgttttggatgccaatcaagttgtggctggggccc

SEQ ID NO: 172936 - DNA, 1180 bp, Homo Sapiens
  misc_feature (991)..(1026): n is a, c, g, or t
ggagtcagaaagatggtgtttggaagccaaccctggtgatcctgagaattaatcgcgcagctacttttgtgaagtggtcccccctagagaacaaatttgctgtgggaagtggagcacgactcatttcttaaaaagccgattcgctccacagtcctcagcttggattggcatcccaacaacgttttgctggcagcaggatcatgtgacttcaaatgcagagtgttttctgcctacattaaagaagtggatgaaaagccagccagcacgccctggggcagcaagatgccttttgggcagctgatgtcagagtttggtggcagtggcactggtggctgggtccacggggtaagcttctctgccagtgggagccgcctggcctgggtcagccacgacagcaccgtgtctgttgctgatgcctcaaaaagtgtgcaggtctcgactctgaagacagagttcctgccgctcctaagtgtgtcatttgtctcagagaacagcgtcgtggctgctggccatgactgctgcccaatgctctttaactacgatgaccgcggctgcctgaccttcgtctccaagttagatattccaaaacagagcatccaacgcaacatgtctgccatggaacgcttccgcaacatggacaagagagccacaactgaggaccgcaacacggccttggagacgctgcaccagaatagcatcactcaagtctctatttatgaggtggacaagcaagattgtcgcaaattttgcactactggcatcgatggagccatgacaatttgggatttcaagaccctcgagtcttccatccagggcctccggataatgtgaagctgagtgagcctccgccatccagcatgacaaactgtggccgaccgcagctgtgccgtggcacgatggcgaggaagccagccccaaggaaacactgaaaacacatatcacgccaatgccgtgtggttttgtttgaatataaaattggtgaaagtgttgnnnnnnnnnnnnnnnnnnnnnnnnnnnnnnnnnnnnggcgatttcattccattcttgaccaaagcttctctttaagtagtttattatggaaaattgtcacactaacttaaaagacagggtgagggagatatgtaaattgtccactagaaaattaaataaaagaactgaatgtggacacacaaaacaaaaa

SEQ ID NO: 172937 - DNA, 1287 bp, Homo Sapiens
cacagtttgttccatgctggattgccggaggcttcacccaagcttcacaattatccggaggccctgggatggaagacttcgagggtccttgaaatcccaaattgtcatggctcccatcgatgccagtagttgcaaaattttgcgacatcttgcttgtccaccgtcataaatagagacttgagtgatgctattctggtgcagcgtctccaagcccgtgttgcggtcctcagttgtgcctctcttgtccatgttgcggaagcgttccatggcagacatgttgcgttggatgctctgttttggaatatctaacttggagacgaaggtcaggcagccgcggtcatcgtagttaaagagcattgggcagcagtcatggccagcagccacgacgctgttctctgagacaaatgacacacttaggagcggcaggaactctgtcttcagagtcgagacctgcacactttttgaggcatcagcaacagacacggtgctgtcgtggctgacccaggccaggcggctcccactggcagagaagcttaccccgtggacccagccaccagtgccactgccaccaaactctgacatcagctgcccaaaaggcatcttgctgccccagggcgtgctggctggcttttcatccacttctttaatgtaggcagaaaacactctgcatttgaagtcacatgatcctgctgccagcaaaacgttgttgggatgccaatccaagctgaggactgtggagcgaatcggctttttaatgtgcttgctcacccaccagtcattttcagactcaaagtaacaaacagaaatgagtcgtgctccacttcccacagcaaatttgttctctaggggggaccacttcacaaaagtagctgcgcgattaattctcaggatcaccagggttggcttccaaacaccatctttctgactccagacataggcattgcggtctgccccacaagtgacaatgcggtcgctcttgggagcccagtcaatacctgtgatgtgtccgttgtgctccttgagttcatgagctttcacccactggctcccgttcttcttatagatgtgcacttcgtgattattgggactgagggcaatctgagtacgatccctgttccaggcatgacaggtgattggctctagtaaaaactgatgcagtgacattattcttagtgttttcaaaggagagaaagctgggatcgggggagtccggacgggctcggagcggaggattcgcggactctgggcagtcgacgcgaacaggctccgtcgggcgcgggcggagga

SEQ ID NO: 172938 - DNA, 212 bp, Homo Sapiens
caggatgaggaggggctccttgggaacctgctccaaggccttgccctgtgagaaggtgcttggctgctttggggagggtctcttggcacagtgaagctctgggctccctactcactgggccattgaaacatccatcagggaccttgctggggtcactgagtaagagagcggaaggggagggaagacactacccactcggaatcctctagtgg

SEQ ID NO: 172939 - DNA, 632 bp, Homo Sapiens
cgtcaagcaaatgtggccgtagtgatttgtacttctaagttcaaagagggtcgtttgtcaccgagtgaagccactgatatggctgattcggcgcgctccttcaacgactacctgatagattctcatggtggcagattcgatcgcagtcatgtgaaattgttggaaaatgccggcgctactcgtcaaggaattatgagtgcgctggggcaaaatttcctcggaaacgcagtcggcaaggatgatctcgtagtagtttacctggcgaccagtgcgtttcccacaacggacggaaacacttatctgtgtacttacgattgtgctctcgataatatctacggtacctgcatttctatgcaatcgcttatgagtacgctcaagaaaaatgtccattccgaccgcatcctgcttgttcttcaggcggcgtacagtggtgctgctgaactcgaatctggtgctaaatcattggagcatcgcgccgcccaaagctataatctggacccaaacaaagtgataatgggcaacggttttatcattctctcatcgagccaggctaatgaaatcacgtggagcactgcgttttcgaagaatctgacgactgcgttgcgcataagatgcgtacgttttagcgcttg

SEQ ID NO: 172940 - DNA, 483 bp, Homo Sapiens
gtataaggtatggaaacaccatgcattatggccataaaatccaagcaacaatcagctagtacccttcacccaagccgctctcactttaagtcaccactgctcacgtgctgaactgcccacatctctgtcattaccaaatctaataacgacagctctgctgatatttattctacaaaagctggaccctatgtagcagacatcagctaccattttgtttgaagaggatatccaaatcaatatgcccaaaccaaataaaagaaatattttgctaatgagctgccgaatttcatggaaatgtattcagaatgacaaatggtccacctatttactgacctcagtttgcttcaacatgtaccatggaatcaaaacagtgcaagtttcttgaggataagcaattggggacctttcttttgtgccaccctccccacctggtaaagtgataggttccttgcagctgctgagtaagtgcctgtagatgcgatg

SEQ ID NO: 172941 - DNA, 1771 bp, Homo Sapiens
gagttaacagatattatcagttccaaaagtagatgatgaaatcctagcggtttatttctgaagccactccactaggaggtattcaagcagcctccactgagtcttgcaatcagcagttggacttagcactctgtagagcatatgaagctgcagcatcagcattgcagattgcaactcacactgcctttgtagctaaggctatgcaggcagacattagtcaagctgcacttattcttagctcagatcctagtcgtacccaccaagcgcttgggattctgagcaaaacatatgatgcagcctcatatatttgtgaagctgcatttgatgaagtgaagatggctgcccataccatgggaaatgccactgtaggtcgtcgatacctctggctgaaggattgcaaaattaatttagcttctaagaataagctggcttccactccctttaaaggtggaacattatttggaggagaagtatgcaaagtaattaaaaagcgtggaaataaacactagtaaaattaaggacaaaaagacatctatcttatctttcaggtactttatgccaacattttcttttctgttaaggttgttttagtttccagatagggctaattacaaaatgttaagcttctacccatcaaattacagtataaaagtaattgcctgtgtagaactacttgtcttttctaaagatttgcgtagataggaagcctggtacaaacaatttaacgctttctagatcacatattagtctctaagttgttttctgtttcctgctttacttatgtttttacaattctccaaaactaagaaaattctaattaggatataaggagtatttactgttcaatagaataatatgcatcctcctttatacctaggacagaattaaacatttgttacacattcagaacagtgatgttgttctttttgatacttttatctcagtatcttttcacgttccataacttgtccatatttttgctcatattttcttacttttctttgttatttattcatgtctgcaacatcaatcatagtagtctagatcaatgcaactcaaagcaccagtctacaaactgttacttatccacaggcaagataagcatgcacaagaatttaaatctagagatactttttaggtcaatgacaggatttgattttttagcaaaattttattaatagctaaagcaatgtattgatttacactctgatgcaagtaatttatctcttcattgactggtagcaaccaattcatggaccagtaccatggaccacactttgagaaacacttctttggataataatagatatcctgggatagtgcatgttcaccatctattttgtcagataatggggccttttaaaaaataatactttgctttcatgatatattgtattttgtggaaagttaagtttagcaatatagactctaaaagcaaattaaatttttttaagccataagaaactatactatatcccagcatctggatggctgcataaagcagtgtattatcatgttttcatttctgtgattgtaagttaagagtcttaactgcagaggtattgtggaaagtagtagccttaagcataataaaatatggtctcttgggtactccctctggccattaccacattcttagcatatatgatgtccatctttgcagctttctgagagtaattttatctggttgtctttctgaaatgtacatggtatacatggtacctactggaatgggtatgttgattttttaaaaatgatattactgctaaaa

SEQ ID NO: 172942 - DNA, 789 bp, Homo Sapiens
tagaggatcccgtctcatcttctgatctaaggtaccagtggttacagtgcagctggaagatgaagcagtcatagtctcagcactttccgaaaccactgtcaatgtaagggctcgcttcacacaagttccaggtttcggtgtttcacaggctacacattttattgcttcaggtttattttgcactaaacaggtatcacaatcccaagtgcctatcactggtttaaatttgtctccaaagcctgtccctgatgcagaaagagttgttttgccacttttatttggtgtttcaattccagtctgtttagcagtatctctgggtgacaattttgctgcttgacaggctatgcatttgttgtctgtaactttgttctggagtagacatgtatcacactgccatgatgacccagcttttaaactctccccaaacccaattccactagaagaaaagctacttattgctggtcttgtataaactactgggcttgttgcggtgggctgagcagcaacagaatctatcttcggcgatgcgaaaccagggcttttcagaatatctagaacacttccttctttcaggatttctgcaggtctaaaaggaccctcacaatcttcaggtggtgtcttcttacaatttgtactgttcactgtagtgacatgatgagctgaactacttataattggttctaaagtactactagaaccagaaagttctgctgtttttgcacaggcacactaaatgtaaatcctatagatgatggaggtagtacatttgcctcagtagattttacgatt

SEQ ID NO: 172943 - DNA, 1754 bp, Homo Sapiens
  misc_feature (750)..(750): n is a, c, g, or t
  misc_feature (753)..(753): n is a, c, g, or t
  misc_feature (755)..(824): n is a, c, g, or t
tttgtcctgcacaagaagagagagagtgatatagtgtttgtgtggcggaaggaggggcgatatatctctcgcgtggggcggtgaggagtgttattattatcacccgtgtggggggtgaggtttttaacacaccccgcgcgcctctctctattttgtgcccaccgtgtgtttcattcctaccagcgcgcgcgagtatttttttctcaggggcgccagaaattttgttacaccaggcggtggggggagtaaacatttgttggtgtaagatgccgcgcgcgagggggaaatttcaggggtccccatcaagggcacccccaaggtgttaaggggactaccccctattttggggaagagagaatttcccaaatatttagacattgacaacacactttttatggagctaagagagcgcccaagagggcggggggaaggaaagatcttagaatgcgggggtctctattttgagaaattccccggtggggaggagggcccccgcttaattggccctgtaggaaccttctatgagcggcctttggggtttgccaccccgggaggtttttcccccccgggcgttgtttttcatgcgggggggatttttaacccctgtgttgaatttccaggggtttttttataggaaccgggattttggccaattatcgcgtatcgctcccgggatccgcggggcctcaaagagaattggtttggcaaaatttattgtggggaaaggtttccgaaggaaagaattttttnaanannnnnnnnnnnnnnnnnnnnnnnnnnnnnnnnnnnnnnnnnnnnnnnnnnnnnnnnnnnnnnnnnnnnnncaccatctaaattatttgtttaataacaaaaaaacagcccccacagaactattgtaaaaacaatattttcagtcggtgatcattgtaatatacaatacaaagcaatttcctcagaaatctgagaagcaccaaacgtgaccattttttaaaatgtctgcttttcaaaaaatagaaacacacgagtggaatcccaccccctaaagtctctggtgactagtaggtgtgcagagaggagcgccctctcctcgccagtgcctcagcctcagccccaggctggatgcagttaagggcgcagtggccgccgatcggtcttgttctccctcagatccggcgaggcgcgttgggggagacccacagagcacgtaattcctcttgccccctggatggctggggtccgccggtccctgggggaggcgcttcagcgacacaagatgcgatcgtccgcaggaacgcatgccgcctcggccgtcagggcgctgatctcgccgttgagggtgctgagcggagcccggaccggcagccctcggcccccgggggttccaacttcggattccgagttcagctccaactgaaggtccctgatgtagtcgatgacgtgctggagaatctccaccttgctcaccttgcggttctggggcagggtgggcaccagctccttgaggcgtgagtaacagccgttcatgtcgtagagcagcacgtttacctgctgctcgtccagcagggcaggcaggcgcgccccggcgcccccggcgcagcgcgagatggccacgctctgctcagacagacagcgcaccacctcgcccgcaccgctcgctgtcttgccggccttcagcgcgcagctggggcccgcggcggcggtggcggtgctgccactggcgactttcatgattcctggcgactggctgaaacagaatgggcaagcgaaaaaaa

SEQ ID NO: 172944 - DNA, 743 bp, Homo Sapiens
  misc_feature (602)..(602): n is a, c, g, or t
  misc_feature (608)..(608): n is a, c, g, or t
  misc_feature (616)..(616): n is a, c, g, or t
  misc_feature (628)..(628): n is a, c, g, or t
  misc_feature (652)..(652): n is a, c, g, or t
  misc_feature (664)..(664): n is a, c, g, or t
  misc_feature (669)..(669): n is a, c, g, or t
  misc_feature (680)..(680): n is a, c, g, or t
  misc_feature (687)..(687): n is a, c, g, or t
  misc_feature (703)..(703): n is a, c, g, or t
  misc_feature (718)..(718): n is a, c, g, or t
tactcgttacgccgtttacagttttgcacagtgatcttccccattgtccactcaagtcgtggcctggggaacacagacggagctgtccccagtgtcctccgtccctcagcccctggcctggctgagtttggcagggcctgggccatccctgggacaaaggtgcgtcccttcagctcttctccgtggagctcggggctttctgtatttatgtatttgtacgaatgtatatagcgaccagagcattcttaattcccgccgcagacctggcgcccccgccttggctcctgggggcagccagccctggctgggagagcgggagctggcagaggagccactgccaaactcaaggctcctctggcccagcttggatggctgagggtggtcacacccctgagccttcagcactgtgctggccaccccggcctctgagtaagactcgtgcctccccctgctgccctgggctcaggctgctaccctctggggcccaaagctgtcccttctcagtgcttgtcagcgctgggtctggggcctctgtatgccctaggactgtgccaaagtggccagagattgggctgcctgtgatacccaatcagcccacttgncccggncggcccanataggttttgcntttgccttcagttccacagcctgntccctgatactnggctnctgtcctgcanacacctnttttagaaacgccaancccagcccttagganggggtggggccttcctggtcaaacc

SEQ ID NO: 172945 - DNA, 853 bp, Homo Sapiens
tcccgcagcgccataaaacggaaaaacaacagaacaggaagtgaggcagggaaccacagagatggaagccaggaggtgtccaattagacgggcacaagagaaaaacagccagagaccgagaaaacggcgggaaggaaaggttccatctggagaaaaaagcctctcaagactggaagggacaggagctggtgaccatgaagcagttcagactcagctctgagccccttgtgtggaccacaagcagcactgcaaagtcctcgctgtagagagaagaccatagatgcacacagacggggttatcccttgaaaccagatccgggaagccatcagtcaaaaagcctgtgtggtcacagatgcttactggtggttcctgaaatgagtatttctaggcagggggcttcagtataaaccagatgtgtgctagctgggtggacttcaagtaaggagtcaagacaaaacacttagagtgaccttttggccactgctgtgtctgcaggctcagcctgctctagatctgattcccacagtggagggacaaagggccagcagcttgtaggaccaaatgagaaaaatacataatcattatgttttagccagaaaaaggcaacttgattatgaactggatgacatatcaaatgcaaggccttaaaatgcattcactctaataaactgctctgtagaattcaagggaatgaaatccgcttctcatacgtaccaaggaccaactgctttgaatcttccactgtggatgatggcaactggtccttttaggagagccattttccagacagtcttgtctttatttatttattttttaattgttagtagcttttacttattatttatgtactta

SEQ ID NO: 172946 - DNA, 1549 bp, Homo Sapiens
  misc_feature (766)..(784): n is a, c, g, or t
  misc_feature (1250)..(1258): n is a, c, g, or t
cggacgcgtgggtccacaaaagtggtgctgtggccagcctgctgagcaaggcagagcgggccacggagctggcagccgagggacagctgacgctgcagcagtttgcgcagtccacagagatgctgaagcgcgtggtgcaggagcatctcccgctgatgagcgaggcgggtgctggcctgcctgacatggaggctgtggcaggtgccgaagccctcaatggccagtccgacttcccctacctgggcgctttccccatcaacccaggcctcttcattatgaccccggcaggtgtgttcctggccgagagcgcgctgcacatggcgggcctggctgagtaccccatgcagggagagctggcctctgccatcagctccggcaagaagaagcggaaacgctgcggcatgtgcgcgccctgccggcggcgcatcaactgcgagcagtgcagcagttgtaggaatcgaaagactggccatcagatttgcaaattcagaaaatgtgaggaactcaaaaagaagccttccgctgctctggagaaggtgatgcttccgacgggagccgccttccggtggtttcagtgacggcggcggaacccaaagctgccctctccgtgcaatgtcactgctcgtgtggtctccagcaagggattcgggcgaagacaaacggatgcacccgtctttagaaccaaaaatattctctcacagatttcattcctgtttttatatatatatttttggtgtcgttttaacatctccacgtccctagcatnnnnnnnnnnnnnnnnnnntttaaactgctttttcggaagaacaacaacaaaaaagaggtaaagacgaatctataaagtaccgagacttcctgggcaaagaatggacaatcagtttccttcctgtgtcgatgtcgatgttgtctgtgcaggagatgcagtttttgtgtagagaatgtaaattttctgtaaccttttgaaatctagttactaataagcactactgtaatttagcacagtttaactccaccctcatttaaacttcctttgattctttccgaccatgaaatagtgcatagtttgcctggagaatccactcacgttcataaagagaatgttgatggcgccgtgtagaagccgctctgtatccatccacgcgtgcagagctgccagcagggagctcacagaaggggagggagcaccaggccagctgagctgcacccacagtcccgagactgggatcccccaccccaacagtgattttggnnnnnnnnntgaaagttctgttcgtttatccattgcgatctggggagccccatctcgatatttccaatcctggctacttttcttagagaaaataagtcctttttttctggccttgctaatggcaacagaagaaagggcttctttgcgtggtcccctgctggtgggggtgggtccccagggggccccctgcggcctgggcccccctgcccacggccagcttcctgctgatgaacatgctgtttgtattgttttaggaaaccaggctgttttgtgaataaaacgaatgcatgtttgtgtcac

SEQ ID NO: 172947 - DNA, 1548 bp, Homo Sapiens
  misc_feature (1334)..(1349): n is a, c, g, or t
  misc_feature (1377)..(1385): n is a, c, g, or t
ctggtataccaacccccgattattgaggcattctggagaatgaagactggatcgaagatgcctcgggtctcatgtccactgcattggcatcttgaagatttgtcacactctgacagagaagcttgttgccatgacaatgggctctgaggccaagatgaagacttcagccagtgtcagcgacatcattgtggtggccaagcggatcagccccagggtggatgatgttgtgaagacgatgtaccctccgtttggaccccaaactcctggacgcacggacgactgacctgctcctgtctgtcagtcacctggtgctggtgacaaggaatgcctgccatctgacggggaggcctggactgggattgaccaatctctgtcggctgctgaggagcatttggaagtccttcgagaagcagacctagcttctgaaccagataaaggcctcccaagccctgaaggcttcctgcaggagcagtctgcaatttagtgcctacaggccagcagctagccatgaaagcccctgccgccatccctggatggctcaacttagccttctactttttcctatagagttagttgttctccatggctggagagttcagctgtgtgtgcatagtaaagcaggagatccccgtcagtttatgcctcttttgcagttgcaaactgtggctggtgagtggcagtctaatactacagttaggggagatgccattcactctctgcaagaggagtattgaaaactggtggactgtcagctttatttagctcacctagtgttttcaagaaaattgagccaccgtctaagaaatcaagaggtttcacattaaaaatagaaattctggcctctctcgatcggtcaaaatgtgtggcaattctgatctgcattttcagaagaggacaatcagttgaaactaagtaggggtttcttcttttggcaagacttgtactctctcacctggcctgtttcatttatttgaattatctgcctggtccctgaggcgtctgggtctctcctctcccttgcaggtttgggtttgaagctgaggaactacaaagttgatgatttcttttttatctttatgcctgcaattttacctagctaccactagggggatagtaaatttatacttatgtttccaaaaaccaatcctttccccctcaacactaacctcccctcacaccccccccatctttcgtcccagatggtgcgttcccccaccctccggccctcctatatcccatcactttaccatccccccaccgccccccacacatcgcaaaaatcccatcctccccccacaaccacgtacgcccaccaaaacttccctccttgcggnnnnnnnnnnnnnnnnaacaacatctcttaaaccacctttcgtnnnnnnnnncccaccctaataaaacactcccagtacctccccctattttctcccaaataaatacccgcccggccaccaaactttgtgcctccctcccaacaacataccaacccgcccctctgaggcacccccgctcgtttcaataaacacagccctcgcggttgcgcccccc

SEQ ID NO: 172948 - DNA, 468 bp, Homo Sapiens
cctgtttctgtttttttcagaaactttattttagctgtcaaacagagaatagctggaactattcagactattgttggcactgtttagtagtgaccacacgctcttctacccgggaaggaacatatgacgacatgctcctcccatgtcccctgatggtgtctgttcccacaatatccttctagtctgcatcgtgaagtggcttaggccaaagcttcctgtgtgatgacgcacgtccgagactgttccatctcattcctcgcaaatttgagctcttctgatcaattctaaatatttgattaattttaattctgaaagaaaattttgaggatttaagcttaggggattctatttttataaataccagattattgttagacttaataaatcactgttaaatttaaagatgacagttaccttggaaagttcactaatacttcgctccaaggcgtctgtaaaagaagatatctt

SEQ ID NO: 172949 - DNA, 923 bp, Homo Sapiens
  misc_feature (678)..(678): n is a, c, g, or t
  misc_feature (681)..(681): n is a, c, g, or t
  misc_feature (685)..(685): n is a, c, g, or t
tgaggatggagactcaaatggtacttgcttcgtttaccatgctatctatctagaagaactaacagctgttgaattgacagaaaaaattgctcagcttttcagcatttccccttgccagatcagccagatttacaagcaggggccaacaggaattcatgtgctcatcagtgatgagatgatacagaactttcaggaagaagcatgttttattctggacacaatgaaagcagaaaccaatgatagctatcatatcatactgaagtaggagtgcggcgtttcgtgcccagtggctgctccttccttcacctctgaaaacggccctcttgaagggggatatgaatggagatttgaaggtctgcaagaacctgactcgtctgactgtgtgtggaggagtccaggccatggaggcagaatcctggccctctgtgttggcccaagctcttgtggtacacacagattactgcccaatatgcagttctgcagctgtttttagttaaatttctggaccttgttgttgttaaatatcagtagaaactctacataatttagagtgtatgtagggcataatgatgatgggaaattggtgtgatggttaacaggaagatcttaaatttttgtgatatgggagccctggaatttttttctaataataaaaatgggtatctatatttcaaaaanaanaaantaaagaagggaattgtccgtggtgggccgccctcgggccctccaaaaagctttctaaaaccattccgtttgggggcggggggccccgtagggaaagtggaaattgggccaaaggttgtttccccaaggaaaaacccggcgccaagaaacaaggggtttggaattcccccccacataaaaaaacgcccgcggggggaaaccgcaggggttttttgagaaaaaatcccgagaggggggcc

SEQ ID NO: 172950 - DNA, 461 bp, Homo Sapiens
actagtccaaccatacattggctggaatgaggtggtcaggaaaataaaatgcacaaatctaacaccatgttgaaatcatgtctgagttctggagaaagttaaagtgtaaataattacaaagactgacatgcaaatcttttacctttacattattcatctacagactatttttctcccttagagatgaggagatggccttagtaatctgttcagagtagctgaaaagaccaaatcaatacacattagaaagatctgcctgatttctatagcaattcattatagctgaagaaataatgctaaataatgtattttctctatatcatcctttaactaaattgaatcacatcacccaagtaattctgacttaacttttacttagttaaatataatttctcctgtcttttaatgtcaaaaagcagtttccgtgagtttatccattggtgtatatcacaacagatgag

SEQ ID NO: 172951 - DNA, 212 bp, Homo Sapiens
  misc_feature (52)..(52): n is a, c, g, or t
gagggtgaagcgaaaataggaacagagcagcggttaagcaatgatgtgatgngggtaaataagaatggataagaaaacgagtaagagtaaaagactggagaaaaagtaaaagactggagaatgggtctaacattaaaggagaatgaggagaagggagaatttacaagcaaaggtgaaagcagaaagtcacgttgtcagtatgtgtggactag

SEQ ID NO: 172952 - DNA, 1257 bp, Homo Sapiens
acatttactgtcccatctgtagttgtatcagcagtgtaatgaacacagtttatattacttaactatcctttgaactcccaagaactgttgaagtcttttctgatgttctgcagatgcttgcacagcattcagatgttcaccaaatgtagtagttattcgatagatggcagttttcagtgatgctctgaatgcaaatcttaatgttttatatgaagtgtccacaaggcttcctgaaatccggggtggtttactggaagcatgaggaagcttaaagtacttgtcgactgcctcttgcagtgtcaacaaagtattaaggatagctggtagtgtcgtctggacaactccaaatctatcctctgtaaatgatgctgctactaagtgcgacagaccttctaatgcccaaatatgcatttgggcatctgaaaaaacagcctgaatggaggcctctgggtgcttactgaaaaaatacattatcagcacccgttttgacaagaaattcttaatctgttcacgtttactctgaatccatgaataaatcacactgggttgtctcattgtcttaccctcagcactaatagaggtagatggagaaggattagaaaattcagtcatttgctgatcagaagctgatgtccacaatcttggcccccttcttattagctgaggactttgcggtgacccatagcaggtgtttacatcaaaaattccagccatccgattcattacactagagccaaatggggtcccaaatgggctcacaacatcaggtgtagataattttgaagaaaacagtgatgttttaactaatggtggcactgaaggccgaggcatctggctagattttggtgtctgaaaagcagtttcttctggagaatttaatttcttaggttccactgggtaagatgaagacactctcccattcgtagcagcagcttcttgatagagaatcagtttctgagtcataccatttaaaagattcaaacactcccttgaaatggctgtccaattgtggggatgtccacctggttggctgaggctgaaaacttcttgtcttcgtgaaggagaatattgagaaagcaacatcaggtcctgcaaggctaaatactttatgatggggggaggattgctatttaacacttttggaaggcactcatctgacccttctgcaaatggtggttgaacaggaaacacatgagcctctgtggcatagattttgaagagtatccatgagacataccaagtcgtcaggagaaagac

SEQ ID NO: 172953 - DNA, 1326 bp, Homo Sapiens
  misc_feature (921)..(934): n is a, c, g, or t
gggcgcatgagcagtgctgctcccaacccgccagtcgcggtctccggcgccagctacgccgctgccgctgtcactatggcccattacaaagccgccgactcgaagcgtgagcagttccggaggtacttggagaagtcgggggtgctggacacgctgaccaaggtgttggtagccttatatgaagaaccagagaaacctaacagtgctttggattttttaaagcatcacttaggagctgctactccagaaaatccagaaatagagctgcttcgcctagaactggccgaaatgaaagagaagtatgaagctattgtagaagaaaataaaaaactgaaagcaaagcttgctcagtatgaaccacctcaggaggagaagcgtgctgaataggattcttctcagtttgaaagacaatgaaaaatggttttgtatgacttgaatagtttgtatagtatataatcttttctgaacagatgctatagaactcttttaatatgtttaattcacctatcacactctgttaaaaacacatagaatcatcaataaaaactcaatataactttctttgggtcttaaagcaggagaatccaaagtaaatcctgaacaaaacctaaacacgagccatctaactcattaccgttaaagagacattcctgtttattagcctgattaggaagtgatgccactggtgtgtattgaagccaagacagttgtagcatggagctattccttggcgcaggtcaggatatgaacacaggtacaggcattctttgaaggtgacactgttctgtatattccctataggcagctggagagatctgcgtgacacaagatgctttggtacgggttcccatgaatcttctgctcttgggagagtgacatggaacaaataacttctttgccaccacttggccttagataacnnnnnnnnnnnnnnccagggtgaactctgacaacacattttccttctatgcaatcatgcctgtctgataatcttgcatcgctttcctctgagctttagtgggtcctagttgcacactggcctttctgtgctgtttttcaatttgcctaataatagcagttaccctgattgtaatttatgtaactttaaacaggatcacactgtaccccctgcctgccttatttgcttactgagcacaggacagaggcaatatacaacactgggttcacacacaagctgagatgagaagaggaatgagccatatattggggaaaatcatagtttgtaggtataattatatagtgcttttctccctcaaagtatttttctagccttgaattcattttatcttcattatccctgtgaag

SEQ ID NO: 172954 - DNA, 1380 bp, Homo Sapiens
aaatgattgccactgaaacagtgaagtttgatagctcagcatttaagcatgattacatattcagatagctctttttgctttctataaagtatatgcattgtgtgtgtagtaatagatgtaagtttacactttgaaaggaaatcttgtttcaatgtttattataaaagccttgctaatttagtagtgatgctttccttggttgtacaggtgtacatttgtaaaccttcatgctgtaaatggaattgttttatctctttgggatacatttgcattttagtgtacatttacgtccctgccctctttgacctggcaatatagtgttgtataatgtaaatttatttctccaaatcgagagtgattttttaaaaattttttatctttatatggtttcagaagtatgaaccagctttctttttattattgtgagatcatttgttttataacatagttgttgactgttaatatggacctgctagaatttggatcactttcaattgaagtcagggtattgtgcataatagaaagtattggactgagatatttggttaccatggaggccaatgcttttttcatcttattaaatgtgatgtgacttttttctttgtacagaagagtactgtatttttgaatagcctactcccaagtaagagcaaatctgtatgataacattttttcctctggacataagacataacagtaacacgatgtacatttacaagcggccttatgtacatttcccaacaatctttttaaggcaaaattgtgaccatatgtgtataattaaaatcgtttttaatcctttgcctatgaaaatattttggaaaaaaacttgctgtgtatattcagtttctgaaagataaagaaagtgctttgtattttgttgaagtcagtattttgtataaacatttatgttgacccacttatgttcagtgctgaaaactaaaatgaacatgctattctgtcagctgaatatggaagagatctttttttactagagatctgcagaagaaacgcaatcttctgagcacaatatggaatctaaaggttttatcacttagttgttcatattcatgaacctaaaaataatggcatacaagtttggggatgccaggcatactttttcatgttcggtgtgagttatttttactttttctaaacccaacattccttggtgagaccattaaatccaagacacttgtcaccgttccttctcatagtcactcctgggtccatccagcatgtcccagtccactgcagcaacgcctgtagtaggtaacatttttttaagaccagacaaagccggtgtctcacttttcctaattaagcaacctcagaagtattccggcccgatttgaaactttgtccaaggattcagcctgg

SEQ ID NO: 172955 - DNA, 1687 bp, Homo Sapiens
  misc_feature (143)..(157): n is a, c, g, or t
  misc_feature (279)..(341): n is a, c, g, or t
  misc_feature (354)..(364): n is a, c, g, or t
  misc_feature (413)..(441): n is a, c, g, or t
  misc_feature (446)..(446): n is a, c, g, or t
  misc_feature (455)..(455): n is a, c, g, or t
  misc_feature (466)..(506): n is a, c, g, or t
  misc_feature (509)..(641): n is a, c, g, or t
cccgtgcgggcgaggggggtattgtccccggggcgatgccgaggggattttctccccaccccggggggagggtgtttgtgacagcggcgggggagggggtgtgatgtggtttatccaccccgcatccctgattgtaaacggcnnnnnnnnnnnnnnntgttttaaatgtggagagggggtgggtgggccgcggtctttaaaaaaccgcaggaaaaaggcgccacggggccccctccgggtttgtgttgaggaacaccctggttgcgccccggcgggcgnnnnnnnnnnnnnnnnnnnnnnnnnnnnnnnnnnnnnnnnnnnnnnnnnnnnnnnnnnnnnnntatgcccacctgnnnnnnnnnnnaaaggggggcgcgccccgcccccaagaacgagtgggtaattctcttttnnnnnnnnnnnnnnnnnnnnnnnnnnnnntgggntggtggggnggtggattttnnnnnnnnnnnnnnnnnnnnnnnnnnnnnnnnnnnnnnnnntgnnnnnnnnnnnnnnnnnnnnnnnnnnnnnnnnnnnnnnnnnnnnnnnnnnnnnnnnnnnnnnnnnnnnnnnnnnnnnnnnnnnnnnnnnnnnnnnnnnnnnnnnnnnnnnnnnnnnnnnnnnnnnnnnnnnnntatttcatacaatgttattcacacatttttcattttctaatttatacataatatacaaagaagtgaagttaacattatttcatatgaaccaataagagccaggacttagacaaactggtccagaaacaatccctatcaaaaggagacactcaagagtaaagcctaggtagttttgcccaattgttttattctgaaatgtgattttcagattttaccaaaatttcatgccaacttactaaaaggtaaaaattggggtgggcacccaaaatggcagactgtaaaatttctacaagaacaggtacttctgtagagcaggcctgaaagtattgggaagattgggttgtcagcactgggacaaatgggaatgagtatcaggaccccaagaagagggtttagtttctcaatgtagtattctctacttgtcattttctaaaattgcagagataatgcccgtgccaacagagggcaaggatgaaggaagactaggaattcaactgtacaaagacaggaaagccattaccaatctccaacatgacagctttgatcctgaaaccatgggctgatactgagaacaaaagttcgatacggccgaaatactctgaggttggtaaagtaggaaaaagtgagacagcggctttgtgtgggttttaaaaaaatgaaacaaacacaaggcattgctgcagtgactgggacatgctgatgacccagagtgactatgagaaggaacggtgacaagtgtttggatttaatggtctcaccaaggaatgttgggttagaaaagtaaaataactcaacaccaaacatgaaaaagtatgcctggcatccccaaactttatgccattatttttaggttcataatatgaacaactaagtgataaaacctttagattccatattgtgctcagaagattgcgtttcttctgcagatctctagtaaaaaaagatctcttccatattcagctgacagaatagcatgttcattttagttttcagcactgaacataagtgggtcaacataaatgtttatacaaaatactgacttcacc

SEQ ID NO: 172956 - DNA, 1227 bp, Homo Sapiens
  misc_feature (780)..(788): n is a, c, g, or t
  misc_feature (997)..(997): n is a, c, g, or t
  misc_feature (1199)..(1199): n is a, c, g, or t
  misc_feature (1213)..(1213): n is a, c, g, or t
cccgactagctcccaaccatacctcactcagcaaacaaaacaggatgtagacctggtttgctaaggagttttaatgagttctgtttcctgaaattaacagtgattagttacaccaagcaagagaagatataatgtctcgctttcacatttgcaaagaatactatggctaaccctcatcccctactgcgcatgccaacacagcgtcggccctcctgataccctcagctcttcacaaacgtggcgttcatacagcttgttcagcttgtcccagaaggtccatttggttcccaaagcacactcaaggttttgtgttggctttcattttctaagcccctgaatttgcaagtaaagaatcactgactaacagaattttgcacaatgactgtttcctttccctcaatgaagatgcccaggtctgggtgtgaggagcacctgcctcacctgctgtccacgctggccttcagcatgcccactagctcttccctgctcgcttttgagaatgatctgtgctgggacacctcccttaactgatgaaggcactactggcaatgattactaacaaaaaggtgttgaaagagaacaccctaaaaatcgacgactgtagaattttctaagtgtaccacaatttggcacaacaaccagagtaacaaaacaattccaatttggaattttattggtacagttgtataaaattctgttaatcagtcatgcttcacaacgtcctaaaacccagaaaattctggaatttgtaggtaatactactcattcaataatttatcnnnnnnnnncaagtgcctattactgttttaaccagagcaaaggtcaagttttcttcttgttacattgaactattcctaagaataataataatacaatatgaaaaaccccagaatctgaataccctggatttcttaatgaacatggcatttaaaatctgtaatttcaaacatgaaccacaatgccgtatgatctaaaggctgctgaaccacagcgtgantacacttagctgagctcctcgctgggtcaaagcactcatctccgagtctaaagctacacgctatggagcacacagctctgcctcgtgctgacaccagacaaacacggtggggagctgaggcggacagctacagggaccacgggcataggaccacgggcacctgaggaccgtttttacggcgaggggttttaagggagggcanttttattttccaanttttcaaaagtggc

SEQ ID NO: 172957 - DNA, 261 bp, Homo Sapiens
  misc_feature (134)..(217): n is a, c, g, or t
ccccccccaaaaaacagatacaggtggatgattggatgggtcagggatggatgaatggttggatgggtggaaggatggatacagggtgggtggatttgttggatagatggtgggataaatattcgggtggtgtnnnnnnnnnnnnnnnnnnnnnnnnnnnnnnnnnnnnnnnnnnnnnnnnnnnnnnnnnnnnnnnnnnnnnnnnnnnnnnnnnnnnaacagtggggtggtagatgggtagataaatggttggatggacag

SEQ ID NO: 172958 - DNA, 616 bp, Homo Sapiens
gaggaccccgactagtccaacatacgaaagtaaggagtctgctctgtatatgggtgcatttcaaggcttttgcattgtattttcacgtgccagatgtcaacaaagggcttaataaatacttgtaagataaaaatttaatgaaagatgattttacatattccagtctcacttcagctgaactacattggtcctttgtggactaagtaatccaggcagctctgagagcaagccagtctttaggggaacagatcatacccacaagaaagttgagggagcctccgttaagttaaaaaacatttcgtttatcagtaagtcattttcagcatataaattaagtttaaacagtcattattttcaacttaactagtttcatcacagccaaaatacaacatttttaaattctcactggcagatcctaattggcatattgtaagtagtggaatccatttatagactttaagtatgtgggctttgatgtagcgaatggaatctgtaattagcccaggatcggaacatggccttcctcaatcgtagctaagatcaaaagctaatagctggagttagggacagctgtgtcacatcgaaaacagacctaacctccttcgtttactcgctg

SEQ ID NO: 172959 - DNA, 656 bp, Homo Sapiens
  misc_feature (508)..(597): n is a, c, g, or t
agccccgtaccccgactagtcccacgcatacaattctcattctctcacctctgtaagttatagttacctggtcttcctaaccacctactcattttctctataattattaagatctgcaaaaaattcacgagtcctaagatatcttcccagacaaatctcactgccctgtgatcactccaaattctgtgttcctttatttggatatagtcaactggtgggtctggcaatccctaacatatgacaaagatgacaacgttccttcctttcagccaccagcaaacctagcattcacttcacacaccatcctttccaggtcctaacctccacgggggaagaatcaaatcaccttcatttttatatccccatacctccccagagctgggcgtgtgctaggtacctagcaaatgctgactgaatagatgagtgtggtcgtcaacctcctggagttccaacacaaaagacttgagctcctttaagagtgagtcacggctgggcatggtggctcagnnnnnnnnnnnnnnnnnnnnnnnnnnnnnnnnnnnnnnnnnnnnnnnnnnnnnnnnnnnnnnnnnnnnnnnnnnnnnnnnnnnnnnnnnnctctacagaaaaactattaaaaattaacctgtagggttggactagtcggggtaatctga

SEQ ID NO: 172960 - DNA, 571 bp, Homo Sapiens
cttagaggatccccgactagtccaaccatacttagcaaggaatcaatctttgtgaggaaataagcccagtctggtggaatggggtatttgaggttgcttcactcaggagaatgacggccccagcattctgcagtgaagagtttctgtaaaacagtcctgtgaggttggttttattccaggtggacaacttgggatgctgaggcttcaagaggatacctacttaggaagtggcatagccagggtttgaaagcagatttgtttgtctcttagatatgttctttttccatcttattacactgtttctcaaacattgagtggatcctccatgacctttggttgcttgtcctgtaaatgcataggactgaggtggactgggagaataagagcttgtgggcagctcatgtggtcatggtgaatatctgtgtgtttgaatacatgtggactaatgtgatgaatgatcgctattgatgagagacgtatattaatatatccttaatgttctcagcctgtgaagttggtttattatttttatgtaaaagttatactgtggtcatatgtatggttgggacta

SEQ ID NO: 172961 - DNA, 591 bp, Homo Sapiens
gactgactctagaggttcccgactagtcccaacatacagtattttgtgaatatataaagtagtactgaacaaacgccaagtcataaaagagttgatatagtgtatgaatcaatgacccatcttttgcattttggctgtgatatttcagatgtcaccatctcaaccagcccctagtgaagagattatgcgccctttgaactcatctttgaggatcagcctaatatctgggtataggctaataccaagaagtcatttcaatacagttattgttaactgattttgtaaaatcaattgaagattaaggaactttgtgcctgacttttactatatcagtcaggacatacaatctgcctgtatgtcctgttagtcatataagtattagagtgcatagtttaatgtcttactagtgcacatcatccactgatattctaacagacctagtgctattatttcttgaaaacacataaataaattttgacaccgttgtcagaaccccaggaggttctccaaaaccaacagattagaattacattatccaaccactgtattaacaaaattatagggtatgggtggactagtcgggaactcgag

SEQ ID NO: 172962 - DNA, 646 bp, Homo Sapiens
gactagtcccaacataccacaaaccaccaacaaaaacccaacaaataaacacattcttcaactctcaaaatggaattcttctttcttccaaaagaattcattttctgtacaactctgaagaaatactagtatcaacgttaataggcaactgttgactatccatttatcttggaagataaaacttttctaactttaaaaaaagagggatcattagaagggaaaataaaagcccatttccatttttttccacacagaatgttgtttaaattttaaaatgcctgttcaatatgttatgaggacaaatcaaggtataaaaataagcataggctacaggtataagcacaactatttttaaaaattatatatgcatgtgtatgtcatatgtcacccaaactgtaaacacctttcaatcctctttagccatacctacctgtccccatttacctgctaatccttcctccaaaatatatctcaaattcatctcatcaccactcaccaagataagactactttaacagctacctaaatggttttcccacttccacagcagtaggttctcatttacagtgtatatgaaacatcacagttcctgtttgcaatgcagattctactgtgtatggttggactagtcgggaatcctctggat

SEQ ID NO: 172963 - DNA, 685 bp, Homo Sapiens
aaactgagagctacaacatcttgtcccgaccacatgactaagtatcgtgaacacaatcaagtaatagagttcagcagcaggatgaaaataacaaccagtgacaacaagaacaatacaagaaaaaaccagaggaaagagtacaggattctacacaaacaaagcccaactccaactctaacctagacttccagtatactcggtatcacaaaaataaaatagcaagtcactcgcaatattgtccgaaacttgaaccatctctgcccaccagagttccaccccaaaacctgatcttctatattccgcacctgtgtcagtggcgctgctgtccacttagtgctttattctccaagctagaaggccacatcacaatctttcagcgcccccatgtctcagccacacatccagtaccaagttctaaatgttcaagctcctcaatgttgacaaaaaagcttcacctccttaataagtcatcgaaagctttatatctgttatataatttttcccagactcttttcccaccagctttggtagcctacattccaaactctaaatcaccaaaatatgccatatacctttgaatcttccagtcatgtctttccagatggaaggaggagcacagcaacatcctgcctatcaaaaagctattaatcctccgtatggttggactagtcgggatcctctaagt

SEQ ID NO: 172964 - DNA, 580 bp, Homo Sapiens
cccagaggatccccgatagtccaacatacatgattaaaagtgagaacaaacatgtgtttgcaaatgcttcaagttcctaaagaagacttcgcaaaagaattgagactttaactggtatcaaatatttaaaggcaaaaagcaacagagaaagtgcactttaagcagctaagtaacaaaccaaaacagagcacagatgggagaagaatgaggaaggtaaaaaatctagaacgttagattgaggtcaggagcagaaagccagaagtggacattagccagttggtagtgcgggacttctaagaattgtaaacaggaaagttattatgaaagacacattttaggacttatcacgtaagagtgatattattctaaatatgttttgaggaggatatcatctggagactcagcaggttatgtggaagaaaaagtccagaagaatattaccctaaatcacggtcaggtgataagggtctgcagtatgacagctggaactgaagtgaatgacataaatgtgagcaccacaaagaaagtctcatcgggccttggttgaatataaagagagggaggaattaaaatgtgtcct

SEQ ID NO: 172965 - DNA, 734 bp, Homo Sapiens
  misc_feature (663)..(681): n is a, c, g, or t
  misc_feature (683)..(687): n is a, c, g, or t
ggtcatgatcttgaccgagcacctagtacgatgcgaaactgatgggaccagtgtattaacaccatggtataagaactgtatagagaggctgcagcagatcttcctacagcatcaccaaataatccagcagtacatggtgaccctggagaaccttctcttcactgcgtgaattagaccctcatatcttggccgtgttccagcagttctgtgccctgcaggcctaagggtcattttttcctcatgtcaaggttttttttgatatcttaaaataatttgtcttattttttgatggtttgaatgcttgctttcttgtagtatcctttcacttcttaaaggaaacaaaggggaagaggacacgtgaatgaacatggcattacttttaattgccctgaaaagcaaatacttccctaacggcagtaatgctgactatgaccatgatatattatatatgtgacagatacaaattctctgtgatcagtttgttattctttttctccttaaggcacaaaataattggtttgaggtatgtgaaacactagaggtcaaccttacatagtatatagaactgatgggtttacccagctacccacgtagcataacttttcacagctcggggatgaatgaacatggctgaaataaaactaaaagtatggttttccaaannnnnnnnnnnnnnnnnnnannnnnaaaacatggtcgggcccgcctcgggcccctcgaagaaagcttttccc

SEQ ID NO: 172966 - DNA, 616 bp, Homo Sapiens
cccaatgtgattccaccgagactagagatttgtctttatctacatgtccatgttactcatttgatacatctatctcaggggtattatgttatctcttggccaggactcatgaaagttaagatttgcattgataggaaaaagttttgcagaaaatatggactcttgagagggtgggaaggtatataaaaaccggcagaccaatttgcatttcttatacaccctgcttgagactgatgtcattagtgtttggttaggccaaggctgggggaggctactcagaatagtgggtgaccaattacccagaacctttggaaaaggaaatgacttgattgaagaggccattctttaaatgtatcttactgctcaatttcaccattgcctattgtagaatgcgcgctgcccgctcagcatttgcctctaggcagaccaggactccttcccctccccaactaatcttccttctcctgtatcttattccctagggccacttgcacctttcaaagtggataaattaaattcccctgctccccttctaccaactctaacatcatatccttggtgtatgatgccctacttttcattgttttgcctaaataagagtatgattggacatagt

SEQ ID NO: 172967 - DNA, 1636 bp, Homo Sapiens
cctagaggattaccgactagtcccaacatacctagcaactttgttttcatgtacacaaaagctgtattggtggattttggcctaagtgttcaaatgaccgaagatgtctattttcctaaggacctccgaggaacagagatttacatgagcccagaggtcatcctgtgcaggggccattcaaccaaagcagacatctacagcctgggggccacgctcatccacatgcagacgggcaccccaccctgggtgaagcgctaccctcgctcagcctatccctcctacctgtacataatccacaagcaagcacctccactggaagacattgcagatgactgcagtccagggatgagagagctgatagaagcttccctggagagaaaccccaatcaccgcccaagagccgcagacctactaaaacatgaggccctgaacccgcccagagaggatcagccacgctgtcagagtctggactctgccctcttggagcgcaagaggctgctgagtaggaaggagctggaacttcctgagaacattgctgattcttcgtgcacaggaagcaccgaggaatctgagatgctcaagaggcaacgctctctctacatcgacctcggcgctctggctggctacttcaatcttgttcggggaccaccaacgcttgaatatggctgaaggatgccatgtttgctctaaattaagacagcattgatctcctggaggctggttcggctgcctctacacaggggccctgtacagtgaatggtgccattttcgaaggagcagtgtgacctcctgtgacccatgaatgtgcctccaagcggccctgtgtgtttgacatgtgaagctatttgatatgcaccaggtctcaaggttctcatttctcaggtgacgtgattctaaggcaggaatttgagagttcacagaaggatcgtgtctgctgactgtttcattcactgtgcactttgctcaaaattttaaaaataccaatcacaaggataatagagtagcctaaaattactattcttggttcttatttaagtatggaatattcattttaaacagaatagctgttttgtgtatattggtgtatattatataactctttgagcctttattggtaaattctggtatacattgaattcattataatttgggtgactagaacaacttgaagattgtagcaataagctggactagtgtcctaaaaatggctaactgatgaattagaagccatctgacagcaggccactagtgacagtttcttttgtgttcctatggaaacattttatactgtacatgctatgctgaagacattcaaaacgtgatgttttgaatgtggataaaactgtgtaaaccacataatttttgtacatccccaaggatgagaatgtgacctttaagaaaaaatgaaaacttttgcaaattattgatgaattgtggaattcctattgactaaatttttcttttaagccatttggaaatttaaaatagccatactgtgctatggttttataatccaaatgcccttcctgaaatcttttcctaaacatataataatattttgggaaaccattggttaaagagaattgtggagttaaggcctttaatggtaaaaggattgggtttttctaacccttat

SEQ ID NO: 172968 - DNA, 716 bp, Homo Sapiens
actagtccaaccatccttagatatacagaagggtctgctgaaataacactgggtgctatattgatgggtaaatgtgtacatcctattccttcctctttatctcacaattttgtctccactaagcaagaagtaaactaacacttcgtcactctaaagaaataacttatgtaaaactcttagtaaccctgttagtcttcaaatgagtaaatagaccaaagtggggggacaattttctagttctgtagagggaaaaacatctgagtcaacattttgaaatgcagagggtactggtacatgacgacatggaaaagggcacttttaaacacagcttactcttcctcaagtacagagagtatatagtgaatcaaaactaactacagccattctttttaaagcccaagggatggagcaaaggtgtaaggatgttacctgtttgttttaatcagagagcaaaaagaagtcacaatagtttgggagaaaaagtagtatggtgagtaaggttatgcgtataatttcatactgaatttattactatttgggatgtacgtcaatgttctaacaaacactgccaacacgtcaattttttaaaaagcgtgggccacattgctaagaatttgttaaagcataactgtattttttgttttagggccttattgatgttttgccgttccaatgtatgcatttttttactcaataaacttgtcttaattttaaaa

SEQ ID NO: 172969 - DNA, 479 bp, Homo Sapiens
  misc_feature (97)..(97): n is a, c, g, or t
aggatacgactagtcaacatacccctagtctaaccatccttccattgcttctccccttccctgtggttcaggaatgaaatagaaaggcttttttttngaataaatatctcggtcattgtcttccccaattaacttcaggccagcagatgtaaaattaagtcctgactgtgtgccagatcctcttggaacggagccagctagagggtgtggagtatgtgggaacaatctctgtgctttgccctcggatgacaggggctccagatgctgcctcagaatggaagggtggtgtgggtgtggagctgggctcctcacttgctcttgagagattgtatattcccagagtcccccaactattcatatgtccagattgaaaggactgacgaaggcaaatcaagctgggttcatactgtatgttgccctgcaagtacattgtatttgcatgattcctgtatgtttgggacctagtcggcgttaccgga

SEQ ID NO: 172970 - DNA, 566 bp, Homo Sapiens
cctgaggttacccgactagcccaaccatacgttcattccccacataccccacatttgtggctcaaatgacaatatataattttattgtccaataattcatgaaagcacatacaaaagaaagtgcgaaaaaaataagaggctacatatttgcataacatctatggataacttttgaaggcagttaacagcattttaattagtttcattttgacttcaaaagtaaatgtgtgcaaaagttagtgacaatgctatgaacttagtttaagtagcagctaaactgtagctattaatatactgtacagtagttgctgccagttagaatagaatgttccaggccaaatattaatagatgcatttattcccactgagcaagctaaaaaactaataaagtattagttagttaataaagtaatagtaaaactaataagtattgcccacagattactcttgctaattcaggtttatgaaaacatgaatttgtattccacaagaatatattcacatgtggttacattgcttacctaatttgattcatctaatgcatattccatgaaggattatacctt

SEQ ID NO: 172971 - DNA, 418 bp, Homo Sapiens
tccagtaaaatgctccaacaccaaggctcaggtaagctttttgttggggagtatattctatactgtttgccacatatcgctgggtgaattaggcactgtccacacgatgtcactgggagaggacaactggaagcttgtgctttgtctctcctggactctgacctgtgcacctttttctgctgctgattttaatctgtatctttttgttgtaataaactatgagtaaaacagcttcactcggttttgtgagtctttctaattaatcactacacctttgggacctcagaacacaatgttgtttcttctttaattgaattttccatattatgtaagaaacctatgtgcataaatgaaaaatcacaaactaagaaagagccttccatgcagtctactcacccacccgtatggttggactagt

SEQ ID NO: 172972 - DNA, 753 bp, Homo Sapiens
ggagcactctagaggagtccccgactagtccaaccatacaaaaattagactttatacagtatcttcaattgagcaagtaactgtaatgcaaagaggtacttccagcatgcaattcatcctcaataaatttaaaaaggccctcttctgcatatataaatgtgtaggatcacaaatttaaaaggacagtttcttattgatataatggccatacattcctagaacacttacatagttaaccccaaattcagttggaaactgtgtaaaatgtctgtgacatatactgtgatctatcttctgcttttacaccgtcataagttatgtttcaacaagtgtaataattgcctaaattttacttcctctcacgttcactagattctcactttccctgattggcaatagtatttcttcttaatgcgttattaaatagcattgaattgtctaattttctcggatttcaatcctgaggtatacatttccattttctttgttgatctagcacaggctcaggtgatttctatataatgcatccaattagttcaaacaaggcaaatgaaatcccatatatactaatctccacattactaactataaacagtaacaagatacatatccacactctttgcttgagtccattcaagtgcaactgaagaaaaagattcctgttctctttcatatcctgagtatggcgaattgatctgttcccacagatgagatggtggatagcgggaccggtcatcgatctgcaagtgtcgt

SEQ ID NO: 172973 - DNA, 589 bp, Homo Sapiens
aaagtaagaggcaagagaagaaaactgcagccttgaatctgtcaatctgagaaaggacatctggtttcatgttaggcacatacatgcatgtgtgtgccatctactgatgatttgtacacagctggacctcgtgtgtttgccatgctcagctctcatttgcttttcaaggataccttgggatggctgttctcagagagtaccttacggggaacagactgcctttttagtaacaagggatacttgggaaatacattgtgagtatgatctatcccagattgctggggaaataaaggagggccctgattatatttggtttattcctcactaaatgtttaagaagtaaatgctcccaaggcatttgaaatgaacatagaaacataatctaaatgtctctaaattttccactttgggttttctaaacacaaattgtattactcatttgagcataactcaagaattcagcgatgataaattgaagggctgaatgtgagaactccattaattccacttcttccaagaaacgtaacctcaggaaatactgtttgacgagaagaaagtagtaccaaacaaaaaccttaaacagtactga

SEQ ID NO: 172974 - DNA, 393 bp, Homo Sapiens
  misc_feature (263)..(300): n is a, c, g, or t
actgaatatataaacactccacagtgtttatattgggaagaagtttggaagagctgggattattggcaaaaacttgctagaggggtgaatctttagagctaatcactgcagaatcagagttgcagcaatatgattgcaagcaagtctgaatgcatagttttactttaattcggcttgacaatttgaataggtaaccccctcgggactgactgaatcgttatgcatgtgtcaatcaatgggaggtgtgcattctctagaagtannnnnnnnnnnnnnnnnnnnnnnnnnnnnnnnnnnnnnaaatgcagcctgttgaggcactgtcatgtggtgtgaaagatttaaatgtagcaacgctaaagagtaataatttggggataaggaagtggggac

SEQ ID NO: 172975 - DNA, 923 bp, Homo Sapiens
aatccttagtctcgcatcttcttaaaacagcttcacaaataatttggaaaatcagccttaaggtaaatagaaactgcatttcccctccattcttgaacccaatctttttcaagaaatggactaagcagcacctgttgttgaagacagcaataaagcctgaacctgacactcaagctttggtacaggatcagttttctggcttggactggtcaggagtcacttcactcagaatcttcattagtgattttaagcgattgtgcgttagcactatcttctgctttcagctctgcaatcttttctgatagaggaacattttgaatatccatctctgatgcatttactatggcttttgtttttaagagatagcacaccattttgtcactggaaaggcagaagtgacctctcaaggcagccagggcagcatgggtagaatacagatggaaaccaacgggaatcccacaagaaccacagaataaaaggttgtaagtactgcctttgagtgaaccttcaatgccaactaggaaggcgcttccaaacgacgttatttgtaactctggagaagaccacggccccgagggaccgcgacaggtcccaggcgaggtgcaccgagtcggcgagcactgcgtgacactgtgcgcactggaacacagcgcacctctcaggctgcagccaagacggcagctgcgggccggcggctggctcctcagcccccagccctgcggggccgagcggcgaggaccccttcaccacctgcgtatcccactccatggaggtcgtaaaagaagcttggtcaatcgccctctcagtgccaccacaaaagtccccccggggcggcgttgcacaacgtgagcgatgccgcagcggctgagccgccatcttcccgcagccggcgccttcctttcgaatacacgccaggccccccc

SEQ ID NO: 172976 - DNA, 839 bp, Homo Sapiens
ggcgcctagaggatccccgactagtcccaccataccttagtctctctccttaaaagtaaccactattaacagtttatatttcatactagaaagaagtctgtatatatactggtaaagtacatatacattgattttggtagaaacagtgaggaagagcctcagttttctttctttccaaacagctgctgattatctcaacatcatttattgggaaatgccagtattatccctattgatctgaaatccaacctttattgtatactaaattctcagatgtagttcggtctcctgagactgttctcttccattgaattggtgcttccttctctagtactctaagttatagacaattcactctatactgagttattgtttcacctagtcttcctcttcttactcattctcagactgtttatgtctcccatgtttgtgttggtcaagttccccagactaagcctgttggcattttagttgggatttctaaatgaaatacttacttataatttggaaaaattacagaatttagtttttctcaagaacaaaatatatctttccagttattttagtggtttttaaaaaatatctctcaggagagttttaaagttttcttcccatatgtgtatcacatttcacttatttttagatatttgatcatttttgatgactgttgtaaacagaaatattttcttatattttaagtggttatttgtctaggaaagcttttatttattaacacaataacgagtcacctgactaaatcatcttgctctaaattgtttccagttgatttgtttttttctagatatgcaattacattagctgaaagaaagcatatattt

SEQ ID NO: 172977 - DNA, 882 bp, Homo Sapiens
caagaggcaggccaactggtccttggaggaggagaagagcagactgctggctgaggcagcacttgagttgcgggaggagaacacgaggcaggaacggattctggccctggccaagcgactagccatgctgcggggacaggaccccgagagagtgaccctccaggactatcgcctcccagacagtgatgacgacgaggatgaggagacagccatccaaagagtcctgcagcagctcactgaagaagctgccctggatgaggcaagtggctttaacatccctgcagagcaggcttctcgaccctggacgcaaccccgcggggcagagcctgaggcccaggatgtggaccccaggcctgaggctgaggaagaggagctcccctggtgctgcatctgcaatgaggatgccaccctacgctgcgctggctgcgatggggacctcttctgtgcccgctgcttccgagagggccatgatgcctttgagcttaaagagcaccagacatctgcctactctcctccacgtgcaggccaagagcactgaagacaccctggtcctcccggaagggcagtcccacaggcagcggcacccatttctgggcccagccacaggacgtccgatgggagagcttgtctggctctactgatgatggataggccccttcctgagccttggtgtccctggaatgaggaaagattctccattcgagagaatgactgggagggaagaagtcggggccctcctattagaagcccagactggaagtgagaggcatgatggggagagaccagactgaatctacgggtgagccctgtaacctggctctagggcacaggcccctcccctggcacttagtgggtctaataaagtatgttgattcattggga

SEQ ID NO: 172978 - DNA, 1013 bp, Homo Sapiens
  misc_feature (762)..(879): n is a, c, g, or t
  misc_feature (888)..(903): n is a, c, g, or t
atgagacaaaaattttaaactgactcatttgagtttcaactttacagtcatgaccataaagcacactaaaaatgtaagttatttttaaatacatctgaaataaaaatacttactaaaaaggaagaagccgaagatgtatatttagaccagcacacaattttgatttcaattagccttattctaatatttagcttttagatctttcatacacattttcacgtactttgcaattgagaccagaaagacttgtaggtctttctgcagaatgagtgggtccttgcaaagtgagtgggaaacttactcctagatcagaaatgtttgcctctctgagtaaaatgtttctttcagatgagccatagagggggcaccttttactcaacttttctttgttttgaaactttgtttcccatactgttttcagccttttgtttataattagaaattgtgagaagcttcatttagtgtttaaaaatgtggggagataaatcagacttaacatgtatgtaagatcaattcacttaaaagtatggtccaaatagcaaaaataggaccaggtgaaacatgtagtcattttttaaaaacatgtacttggtcttttgtgtgtgtctgttttattccattagaataaatgtgtccttgatgtaaatgcaaagcatttcttcctgattaaattgtagatgtagactttacaatataattcaataataaaaagtaattaacctctagttttgtcgttgcaataaatggttttcagatagcacnnnnnnnnnnnnnnnnnnnnnnnnnnnnnnnnnnnnnnnnnnnnnnnnnnnnnnnnnnnnnnnnnnnnnnnnnnnnnnnnnnnnnnnnnnnnnnnnnnnnnnnnnnnnnnnnnnnnnntttttgcgnnnnnnnnnnnnnnnnaaaaaattttttaaaaccttttttggggcccgggcccccaaaggaaaaagaacaggggcaaaactgtttcccaagaaaacccggccaagaaaaagggttggattcccccc

SEQ ID NO: 172979 - DNA, 610 bp, Homo Sapiens
agaggaccccggactagtccaaccatacaagaaataaaaaacatagtgattttttctcttaatgtgtagaggtggttttactggcaataattaataatagatttctatttcagtatgtaagcatattaactaaaatatgaattacacttccaaagttagatttctgcttcagtaggtttgtttgctgtgaagattacttcccaaaagacagatgttcatattagcttaattttcggtttaaatatgtttgtaaatgatgtaatatatttcttttgactaaatgtggaaaagtaatgtgtgttatacattgagaagtttttactggctttgactggaggttgtttttgcagagatggtattttatatgattccagtatttggaaaagaattagtcaaaaggaattcacatagtttaaatactgagaaattaatatccaaatatgttcttgtctgatttctaaataagctgggggaggagggaggggtgggaattgaaatgtgcaaatgagtagtgaatgctacactcattttcaactctttaacatgaaactgttcaatcttaacacattgttactttaatatatgtataaagaagtattactgtttgtaa

SEQ ID NO: 172980 - DNA, 157 bp, Homo Sapiens
ctctagaggaccccagtgattacacttctgagttatgaatgtgttcttacctttctgtatatggtaatggtgcttcaaggtaggcatttcttttacattcataaatgaactttactttgccctatttaaaggtcagtattagaactggcctattcgt

SEQ ID NO: 172981 - DNA, 876 bp, Homo Sapiens
  misc_feature (347)..(347): n is a, c, g, or t
tacagcagtgaatgtgaaaatgtatcttatgcattctcaggtacaatctcgagacagccagaagaatagtgatcctaaaatatacctcagcagcatttcactgactaataggcaagtaggtaactgcagaaaagtctaatgaaggagtcttttaaagtagtttatactgagaataatagctataaggagataatatctgtcagggatagtatatgatatgatgaggtatgcaagtacaggatagcaaatttgaccccttatgcttttgctctatttgacatatggaaatcacgtttgctatactactagatctagaatttcatcgataatccaaaaggatctaaatnggtcttgctattaaaaagtgacttcaggggaatttgaataagtactttgcaaatgaaattgaagagatactacagtcatctttctattcaaagatgagtggagaaagtgacacacttaaaatcttacatttattctgttggatgctctacctgccccctctccctctttcactctctgtgaggaatgaatctttgcaagttacctatgttatatctccccaagtcatctcttctccttatgccaacatacaatataccaacaatggtgatttctttaaaagcagggacaaaggctaaaagactatgctgtgcctcaacccctatgatagaaattaaagtagcagagtgttgaagtaggccagcatcactctagaattcatcaacatgtgtgttggggtgggggcagctatagtctgaagatgctcagggtacatgaataatgcatgtgtacgtcctcacagaaatctgtgatttgatgttggcgtgcacaacttaagattttgagctttgggccgggcacagtggctca

SEQ ID NO: 172982 - DNA, 522 bp, Homo Sapiens
ggatttaaatatatccggctatccctcacctaagtattgacttggcaatcaatactttctactttgtggaggggatcaagaatagaatgggcaggatgacgaccatgaaaattataatgattcatgtatatttgtatgatgcttgtaactttgccaagtcttttttattcattgtctcatttggtcagaacaattttattgaggacatgaatttaacaattagaatttagatattctgactgtagctactaaatgttgtagctactagaccaggtgagctaggtttagagcaaagtatataagcctagtatggactatattagaatctcaaaaatcgtaattaattccttatcatcattataaaaagcttgatttttttatttgatctaaaaaagcattattccaaagaattttttcaagtagaaatgggagttagttataccagtgttgtttttaactaataaggctattttagaattcagccttgcctgtaaggtctttgagaagggagaggagtaggcc

SEQ ID NO: 172983 - DNA, 933 bp, Homo Sapiens
gggctccgatcctggaaactcattggctccgaggacttaggacctgttagcttggttgggcgactggcaaatccttccttccccggggtagaagtccagggcatttgaggagactcatctgacctcccttgacccagtgaaacagtttgctgcctggtttgaggaggctgttcagtgtcctgacataggggaagccaatgccatgtgtctggctacctgcaccagagatggaaaaccctctgctcgcatgttgctgctgaagggcttcaggaaagatggcttccgcttcttcactaacttcgagagtcgaaaaggaaaagagctggactctaatccctttgcttcccttgtcttctactgggagccacttaaccgtcaggtgcgtgtggaaggccctgtgaagaaactgcctgaggaagaggctgagtgctacttccactcccgccccaagagcagccagattggggctgtggtcagccaccagagttctgtgatccctgatcgggagtatctgagaaagaaaaatgaggaactggaacagctctaccaggatcaagaggtgcccaagccaaaatcctggggtggctatgtcctgtaccctcaggtgatggagttctggcaaggtcaaaccaaccgcctgcatgaccggatagtctttccgcggggcctacccacaggagattcccctttggggcccatgacccaccgcgggggaggaaaactgggctctatgaaagaacttgcacccttaactctggggacctgctgggcccaaacgtggagctagggcctacgtggtcaacgaaaagggccgcggggattcgggaacccaggcccctcccttttcaaagcctcaccccattttcccctcccctaacctcctttacccttcacggcgactctttttgaaactttagatccctctttccggtt

SEQ ID NO: 172984 - DNA, 925 bp, Homo Sapiens; identical to SEQ ID NO: 1418

SEQ ID NO: 172985 - DNA, 1244 bp, Homo Sapiens
  misc_feature (831)..(853): n is a, c, g, or t
  misc_feature (855)..(972): n is a, c, g, or t
ggcctatcctttcctcctgttgagatacgatcagattaagtacaagcaacttgtcaattatccagcacttgatctaggcctttaattccttcagagagagaaggaatatagagataaaactcccacccacttgaggtatggtttatgagctcttgcccaatcacattaccattcaaaaggattttcctggctgacttaaaccaaaaagcttcattgttccagtctgtcatgtcactgcagcaacagctgtcacctcaattatgcagtataatttttgacataatttatataagcacacagaattcaatcagcagctgagcagggaagcaatgttaacaaatgctatgaatgggtatatgatttgcatattatgtggctcatctgtggactggagcaatccatccattcccctcattactctgaataatctagaaatggtagatgctcctggccagacagctgtatgttttaaaaatcaaaaacaacaagaaaagcagcctcatggctggtgcgctctagaattaaggctatattaagcatttattcttatttcctcagctttggggctgggacaaggattctcaaaaccctgctatttccttacttttaattgtgattctctagccctcctcaactacaaaaagaaaaggataaagtagggcatttcttgggggacaaaggcagaaggatatgatcagacaaatttctcaatagcaacacaagaagaaaccaaaacgaagtattttgctgagtaagaagaaaagggtgtgtcaacatgctaatgccagggcctgtcactttccaaggtgacagtctttcaggaacatgccnnnnnnnnnnnnnnnnnnnnnnngnnnnnnnnnnnnnnnnnnnnnnnnnnnnnnnnnnnnnnnnnnnnnnnnnnnnnnnnnnnnnnnnnnnnnnnnnnnnnnnnnnnnnnnnnnnnnnnnnnnnnnnnnnnnnnnnnnnnnntgaaaattcattttaaaaaataagatacaactataagtttgagggtagaaaaagggaagagcattaatattttggggactcttggtggtaaatccaggagccaagaatgcaggagacataactgctatgaacacttaaaattgatattgtggccaacagctcacctctaaaacttccccactgaaaataatggcatggaagggaaactcgggtccactgagaagtgagggtcaggtttgaagcctctttggtaacaggaatgctttgggagg

SEQ ID NO: 172986 - DNA, 737 bp, Homo Sapiens
  misc_feature (391)..(400): n is a, c, g, or t
cctcctagccctcttacctatataatttactaaagcagaacattttactccttgatgaatccataaaaatacagcacaactgtattcttacagtatggacaaaatcctattttatcctttaattttcacaggcaatgcataattaggttgtttttaaatgagatattatgtaaaattgatagcaataactgtcacacacctctattgccattgtagggtttttctctttctctgatacttttttgtgtgtgtttattcaacatttatcaataagaattttagtgcattcactaagagccaagcaccgacacatcctgatatgcttccatctaggacttttagctgcttaaaaacatttaacatgcttcttttcctccagcaaactcttttnnnnnnnnnntgaaactctttccttcaatgagattatttcagaagttgccagtcatcttggaacccaaactcagtaataagcaactgtggcaccacaagtggaacccttttgatgatgggcccagtggtttcatggaatacacgggtttactgctataacccaagagactccagttgagacagtctggctcagacacatgcatccacaactatgaacaggagtaatgcctggactcatacccagttctcttgttgactatatctttgccaaaggactactgactagttttaatggggccaagaacacaaatggtaagagggctaagaggggtaagagggctaggagg

SEQ ID NO: 172987 - DNA, 856 bp, Homo Sapiens
gacatacgcggttataaaagcaggctggtacgctccggaatcccgggatatccgtcgaccacgcgtcgaatcatcccagttcctaggcaacttgttcaccaggtacgcaagggccgaatagttgagaaatggacattcttacctactcctcctagccccctatccccagtaacagtgatcccttttcttatgtgatttatttcctaattcttgctgagttgactttcccttgtaggaaaagaaaaatatttcaaatagaaacccaccttttatttaagtatgaagcagctgttactttttaaaaaatgaattatctttcaatggtgtagaatgattccaaagtgtctccattagcatatactgagcaggaattaaataaagcatcagatactgatctgagctgtaagctggtagaatctgagccaaagtagactgcttaaattgataagctttgctaaagagttgtatgcacaaaggatgattaattctgggactatactcacaccaaggtctgctgtcttatagccaagaattacagctttatttatagagagtgaattatgggtattttttcagaaaatatcgtcatctgatatacacataaaacaactcacattgttggagttaactaattatccccatttcatggttttcagtggcaacttactgacccttgtttttgcctgtgcttgtatgcatgcattttcaagcaagtaataaagcagctcatttattctggatatgctgggttttacatatagactgaatgctataatcaaatctattgacagtatctgcaggtctttcagaattccagggaaataatatacgactgaatctttctacagataatttg

SEQ ID NO: 172988 - DNA, 915 bp, Homo Sapiens
gcagttgagaaaaacccaacctggaagcttggtttttccaaggatggttcctgttgtcctttcaaaatggaaattccatgttatttctttcttgcccttaagcttttattcctttcaaatgacctaaagctgatgaactgagtaaaccacaacctgctgcagttatcaattagcaagcctagttcaacaatacttcaaaataaacagacttcacaagttatttccattcctaacagtggaataataacttaattttgtttacttttgtctttgtagatttctgtctgcagctccagtaagaatgccaaatcagatggctttagggaaatgctcataggagagaactagagttattcctcacactgaatttaagtcttaccagatttctgcaggttcatatgttaacgttctgatctagcctacctgtaagtctagtttatttctgtacacacttccaaatactcttcataaattttcacttctgactgaaatataacaccttgattgataaaatagtttcataactatagaattttagtgaagatataaaacattaatgaatacttgtgttttaatacatcactactcctatttattacatgttccaataaaccaatagaatgaagcactaagacacggtgaaatctaaacttaaaacccagatggaactgccatatagattacaaatgggtctccccaccacagaattcatatacaaaagcccttcggtatgtagcttttcctgaacaaatacattaatacactttttgttttttacatttgtaaaaattcaaggttttaataacatttctttgcaagacatttggtataaggtggttaataaatattaggaaacaaacactgtaccaaaatggatatgacttgtgaataaaccctaaataaatacttctcgga

SEQ ID NO: 172989 - DNA, 795 bp, Homo Sapiens
tctgggtacataaatgtgtcgtcccaaatagtcatcatgacaggcaacgtattggttagggccaagatccctaaaccacctctcgaaccgaaacatgacacctttggttctttattatgcaaaagtacaaattggcaaaattcaataagaggatgcaatggatttgagcatcacagcccattgcttatactaaaatattgttaattctcagactctctttccctcataccttgtcccgttccccacctcacataagaaaatgatgctgaggaacgaaacagaggaagcaaataaacagaacgaaaaacctatccccaaaggcaggcagaagaggagtcaaagaaagaaagcatttataacaataaaaataaaccaaaaatagcaggggaggatctatacatggcataaaagatgtgtctcataaaaactgagtctccaattcagaacccaaatgagaaagtgattatccatcttaccttcccttttattagataccacacaattcaagagttcttaaaatctaagagatcagtaaaaagtttgaaaggcagtgttgtcctcctcatcactgaaacctgttgtctgtaatgacagctttcacattccctttctccaaacccaaaggatccaaattaaagtagtccaagaaaaagaaacaagcaatttggtctgacattgtgcttaaggaaaagggaggatataaaatatccagtggctggatcagtagctgatactttcagaagtggggctggagcaggagggcagaaaggggcaggtacgctgtggtccacagag

SEQ ID NO: 172990 - DNA, 828 bp, Homo Sapiens
  misc_feature (29)..(29): n is a, c, g, or t
  misc_feature (35)..(35): n is a, c, g, or t
  misc_feature (43)..(43): n is a, c, g, or t
  misc_feature (81)..(81): n is a, c, g, or t
ccggcgaaggaggctcaaagaaaggaagncttttngtcacgtnaaataccccaaaaatagcagggaggatctatacatggncataaaaagatgtgtctcataaaaactgagtctccaattcagaacccaaatgagaaagtgattatccatcgtgaccttacccttttattagataccacacaattccaagaggttcttaaaatctaagagatcagtaaaaagtctgaaaggcagtgttgtcctcctcatcactgaaacctgttgtctgtaatgacagcttttcacattccctttctccaaacccaaaggatccaaattaaagtagtccaagaaaaagaaacaagcaatttggtctgacattgtgcttaaggaaaagggaggatataaaatatccagtggctggatcagtagctgatactttcagaagtggggctggagcaggagggcagaaaggggcaggtacgctgtggtccacagaggtccatgcagataggttctccccatctgtgaataataaatgggtccaagggcagagagtcaccatttagaatgataaaatgtttgcacactatgaaagaggctgacagaatgttgccacatggagagaataaagcagagaatgaacaaacttaatctgcttatctcagggcagaagtaattatttttgttggttcaataaatttggataggactgaaaaaaccatttgtaaactattatgccaacagacacgcagggtttccatatggggccaccgacagacaaatcaggtaaggtggggagcactgatgcatacttgcagccatagaaggaatgagagctgtcattca

SEQ ID NO: 172991 - DNA, 540 bp, Homo Sapiens
  misc_feature (76)..(233): n is a, c, g, or t
atccctgccacctcagcttctccagactgcaggccccatgtggtttcaccatccccacctgcagcctgagagactnnnnnnnnnnnnnnnnnnnnnnnnnnnnnnnnnnnnnnnnnnnnnnnnnnnnnnnnnnnnnnnnnnnnnnnnnnnnnnnnnnnnnnnnnnnnnnnnnnnnnnnnnnnnnnnnnnnnnnnnnnnnnnnnnnnnnnnnnnnnnnnnnnnnnnnnnnnnnncaccatctcattttattaaagggaaattaaagcacaaggaaatacagaccatgactgacaggttagagccactagatttctgtctgcagccacagatcttccctcccaggcatccactgcctgcagctagagagtctagtctgtgttcctcacaacaccattatcagatggggtccctcagatggtgagatgcacaagcacactggcatgtcacttagactctgcccaatttggacaaattttatcaaactctaatctgtgtttgcatttgctgttcattataagtaatcctctgagagtcgccccc

SEQ ID NO: 172992 - DNA, 1357 bp, Homo Sapiens
tatccacatggcctacttccacaccttcatttgttttcaaatgtcacattacaaggaccttcctagaaaagtcctcttgctccactcagttgttctccacactttaacttctctgaaaaatcagcatctcaaacttaacacatccaaaactaacaaaactaaactcgacttcccacctcagtgccaactttcttccaaacgctcagaccaaaatacttgtatcaacattaaatccatcctcacccaccagcatatcctgttgtctctatcttcatttcctaccacctcagtctactaccctagactaagccactatctttgccttaaaaacacattatacacaattattctatgcttttaccctgccacctggcagccaaagtgatcctttaaaaattttgagtcatatcatgtaactcttctgctcagagcgactgcggtttccttgaggtctggtcttccttccttgcacactcccactgctttacaacccttcctgtcttcttgggttagcaaagtggccacttttttcccagaacacatcacactccagactaactgctgttgtcttggcctggaatggtttgtcctgtatatccacatgggcctacttccacaccttcatttgttttcaaatgtcacattacaaggaccttcctagaaaagtcctcttgctccactcagttgttctccacactttaacaaaccctagggcccacaggctactaaagcatgcctttgttaaacttagcatcaaaaacaaaatgttatgagctttctgatgttcacatccttattcttgcccaaaacgtcttgaccctaggaataacgagaaaaagatataaaatgagacagtcttcaaagtctgagaagattctacctggaatcttcaaaggtttaccatgaggtaaacagctggggttcatcacctctgacttaaatagacatgataaaatgctatgtcccagccttgattggatctggatgttgggaaaacagctaagagcactgaaaggacaactggggaaatacctcttctgcagaactgaaaatcttcaaaacaagttggagcagtggagcccacaaagtctctgaattgctacttgtctgtttcaggcttccaaggctagttcaccaattagcttccatctctcacctcaaggccttcttcactatcctggtttccccagctttgaccactgcctgaaaattcccttcctgctatcatttcagaggacaaaaggccctgtagatgagactcacacttttcattacaatgtcaaatcagaacgctaagccaggtgcaatgcctcacacctagcgacagcaggcaggggatcctacatagagtcgggct

SEQ ID NO: 172993 - DNA, 568 bp, Homo Sapiens
ccgggataccccgcgcttcctcaggctgctgtcgccgctgctgggagatgggcctactcgcccgccaccctgcgctgccgccgctctgaggagttaaagaacatccatgatagcagtcttctgtaaatcgaacttttcaagaattctctgaaggaaccaagtaggatattcttacatcatgacttaatgtgaatgcaagaacaagaaataggttttatctctaaatataatgaagggctgtgtgtaaacactgaccctgtctcaattctaacaagcattttagacatgagtttacatcggcaaatgggttcagatcgagatcttcagtcctctgcttcatctgtgagcttgccttcagtcaaaaaggcacccaaaaaaagaagaatttcaataggctccctgtttcggaggaaaaaagataacaaacgtaaatcaagggagctaaatggcggggtggatggaattgcaagtattgaaagtatacattctgaaatgtgtactgataagaactccattttctctacaaatacctcttctgacaatggattaacttccatcagcaaacaaa

SEQ ID NO: 172994 - DNA, 1593 bp, Homo Sapiens
  misc_feature (680)..(757): n is a, c, g, or t
  misc_feature (1067)..(1067): n is a, c, g, or t
  misc_feature (1452)..(1460): n is a, c, g, or t
ttgtgaaaaagctgcatgttttaatttaggaaatgagtagaagttcaggaggaagcaccgggtttcttggcctgtctattgtgaatcttctccaggtttgctctggaaaggcctggggtggccgcgtcctgtcctgccccatcctccttcactggggcagttccaggacgatcttgcctatgttcttgttggcctccatgtacttatgggcctcctggatttcggtcactgggtagattctgtccagaaccggcaggcagacgttgggggccctccgtggagaagtgaggcagaatttgctccgtgaaagcattcaccagcatttgcttgtacttattgtccctagacctcagcaaactggtgatcagacttcctcgcttaaaaagtagctttgaaaacaggggcccattgatgtcacctcctcccatcagaccatagagaacccatcgaccatcaagagccaggcagttgacgttcttctcccagtaggatccgcctatgcagtctagaataagattaactccagcacctttggtgaatttcagcgttgcttcagagaaatcctcttttttgtaattgaatccagcagctgctccaagcttttctgccatttgaagcttcttctgggagccagctgtgaccagaggaatagctccagccatccggttaaaagtttaacnnnnnnnnnnnnnnnnnnnnnnnnnnnnnnnnnnnnnnnnnnnnnnnnnnnnnnnnnnnnnnnnnnnnnnnnnnnnnntttagctaaagaagatactgaggcagctattcaatcaatattatacaaagaaaattctgtaattaagggaaatgcatttatagaacattatgatccaaaagagtatgatcccttttatatgagcaagaaggaccccaattttctgaaggcaaaatatattcaataaaggaattcaaagaagttgagaaggttcagctgcattccagattcccacaaatttctaattcaaggcactttataactccaaacgagtggctgaaactgcctacaagatacatagaaagtgaattttgtagaaggagaaggttanaggtgaaagtgaattttaatgactgtagttttgatttgaaccccttggcaagagctccttatcttttggaatccccaggaagaagaaaaaacagttattttacaaaacaaagggtcatcctttctaaaaagagaacccgctgtgctatcaggagggaaataatccaagtgccaaagaggccatctctgaaagggtatttttcttccttgagcctcagccaggaacgggaggaagaccaggatgggtttcagcaaccaaggagcacacaccctgatccttgattggtgaaaggatacacaaaatcaggctgcttcagaggaagtcatctgctcacaggaatcagggtgaaggccaaggacggcactcaagaattgtcctgtctctnnnnnnnnngcatctgcaacgaacttcctttaatttttgagttcagtgtctgtgataattaagaaatggcaataccatgtattttccccagaagttaagaaatattgctgaacgaaccaataaaaataattacagctccctc

SEQ ID NO: 172995 - DNA, 190 bp, Homo Sapiens
gggccaacaagaacataggcaagatcgtcctggaactgccccagtgaaggaggatggggcaggacaggacgcggccaccccaggcctttccagagcaaacctgggagaagattcacaatagacaggccaagaaacccggtgcttcctccagagccgtttaaagctgatatgaggaaataaagagtgaacc

SEQ ID NO: 172996 - DNA, 1152 bp, Homo Sapiens
  misc_feature (791)..(791): n is a, c, g, or t
ggggacatgcggcgggatgtgcaggagatcttccgcctgacaccacacgagaagcagtgcatgatgttcagcgccaccctgagcaaggacatccggcctgtgtgcaggaagttcatgcaggattccatggaggtgtttgtggacgacgagaccaagctcacgctgcacggcctgcagcagtactacgtcaaactcaaagacagtgagaagaaccgcaagctctttgatctcttggatgtgctggagtttaaccaggtgataatcttcgtcaagtcagtgcagcgctgcatggccctggcccagctcctcgtggagcagaacttcccggccatcgccatccaccggggcatggcccaggaggagcgcctgtcacgctatcagcagttcaaggatttccagcggcggatcctggtggccaccaatctgtttggccgggggatggacatcgagcgagtcaacatcgtctttaactacgacatgcctgaggactcggacacctacctgcaccgggtggcccgggcgggtcgctttggcaccaaaggcctagccatcacttttgtgtctgacgagaatgatgccaaaatcctcaatgacgtccaggaccggtttgaagttaatgtggcagaacttccagaggaaatcgacatctccacatacatcgagcagagccggtaaccaccacgtgccagagccgcccacccggagccgcccgcatgcagcttcacctcccctttccaggcgccactgttgagaagctagagattgtatgagaataaacttgttattacganccaaccaacccccaaaaccctaatccccttgtggggccgctctcgggccctcgaggaagcttttctaaaccacttctttttggcagcgcgggccccaataggttaagtgaaacatgggccataacctgtttccctaaggaaattctggcccatgacataagggcctcgggaatcctcaccaaatacaaaaaaggcctcggcggccaacccggaggggttcttgaaccacatcccgagaggggagttcctgaaggggccattacgtgggaatctgattcagacgggggagtccccaggcggaaagtcacggaataaccaaaatgtaagcggcccggggccccttggcgacactacattgtga

SEQ ID NO: 172997 - DNA, 1568 bp, Homo Sapiens
ctgcctggagcacctctttaaccaggtggactccatcaatgctctcctcaaggggccagtcatgagccgggctttcgaagagaccaagcatttccctatgaaccacagcttacaagagtttaaacagaaagaagagtgtacaatccgtggccggagcctgatccagattagcatccaggaggacccctggaacctccccaactccatcaagaccctggtggacaacattcagagatatgtggaagatgggaagaaccagctgctcctggccttgctgaagtgcacagacacggagctgcagctgcgcagagacgcgatcttctgccaggccctggtggccgccgtgtgcaccttctccgagcagctgctggcggccctgggctaccgctacaacaacaatggcgagtacgaggagagcagccgcgacgccagccgcaagtggctggagcaggtggcggccacgggcgtcctgctgcactgccagtccctgctctcgccagccacagtgaaggaggaacggaccatgctggaggacatctgggtgacgctgtcagagctggacaatgtcaccttctcctttaagcagctggacgagaactatgtggccaacaccaacgtcttctaccacattgagggcagccggcaggcgctgaaggtcatcttctacctcgacagctacccatttctccaagctgccctcccgcctggagggtggggccagcctgaggctgcacacagcgctgttcacgaaagtgctggagaacgtggaaggggctgccttctccaggcagccaggcccgcggaggatttgcagcaggacatcaacgcgcagtcccctggagaaagttcagcagtattaccgcaaactcagggcattttaacctggaagcggtctaaacctgcccacggatgccagcaccacgggggtaaagatagaccagctgatccgccccatcaatgccctggatgagctctgccgcctcatgaagtcctttgtccacccaaagcctggtgctgctgggagtgtgggcgccggcctcatccccatctcctcggagctctgctaccgcctgggggcctgccagatggtcatgtgtggcacaggcatgcagaggagcaccctgagctgtgtccctggagacaggcggccatcttggcacggagacacgggttgctgcccaagtgcatcatgcaagccacggacatcatgcggaagcagggaccaagggtggagattctggccaaaaacctgcgagtcaaggaccagatgccccagggtgctccgcgcctctaccgcctctgccagccgccggtggatggggacctctgaacacccaaatgccccacgctgggccgcggcctctggagctgggatttgggaggacacagcaggcagcgctggccttctcccaggatggcccaaggcttccgcagccgcccgttccgggacctgcccagcgtcctccctgcctcccttccgggacaagcctggcccacccttcccctgtggatgaacgaacctggctggtttggccccggggcccggcccctttcttcacaccgcctgc

SEQ ID NO: 172998 - DNA, 1531 bp, Homo Sapiens
  misc_feature (729)..(778): n is a, c, g, or t
ttaaaagttaaagccagtggcaccaaatggcgctggcccctggggcccttcccccccttttttccccgcagcaggggctaaagcggggtccctcctttgttcttctgatgcaaggataacagtgaacaagggccactgccctgcccttcgtgtatgctgcgccaagagagggaaagcgcacccctggaggggcgggaggctcggatgccagatgccgggaggggttcaaagctcccaggcctgggggcagcagggagccccccacctgaactcaccacctgccaggggtgacaggcgtccccccgcttcctccccagctgtgacctttccctgaaggcataccgaagctggggggacaaactgccgagggggcttgtgtgggtccctcctccccagcaggcagggtggcttcctgtgctctggctggtgatgtcccaatcgccctgctctgagaagttaccatcaagaaaataaatcacagaagccaccgcccggtgtttcccagtgaccctctaacccgtgtgacacggcacctcaggtggggctccatcccctccagctccaaccctggctggccacctctcaggcccttgtagccagtcactcaaagagagcgagttctaacaccggccaaccgctggagaatggagggtgggggaaggaatcacagtcgatacctcaaaacgacaccttacaaccctaatattaacaaacaggaaacaatgacannnnnnnnnnnnnnnnnnnnnnnnnnnnnnnnnnnnnnnnnnnnnnnnnnagtagaagcgggaacagttgtcaatactaccttctgttggtcccctgttagacaacatacctttctttgaaatgtaaaatgtcaaatatataatcacacaactttagaaaaaacaaactttgacaacaccaacaacaaaaaatcccaaaataaaccagagatttcatgccatataaataaagtcagagcaaatctcgtgcccagggctggtggccccagttccaggggcggtgatgtccagagctggtgtggctctcggggatcctctggtaacaggcgtgatggaggccccgtctctcctttcccgacagagccaagtcttttccaagtccaccaagcaggttagtacagggttagggtgaacctggaagctaagatgaggaggaggagacacgtgtggtcacctggaatgtggacgttgaaggaaaccggggtttcaaaagtgcaggcggagccatcccgagggagccgggtggccccatgtggcctccatgacgttcccttgggttctggggacgcaggagccgaaggccaggcaccagctgctcccatcagctctatgggtctccagcacccctccagcttctggcaggcgtgtgaagaatgggccggcccagggccaatcagccagctcgtcatcacagcgagggtggccaggcttgtcccggaaggaggcagggaggacgctgggcaggtcccggaacgggcggctgcggaagccttgggccatccctggagaaggccagcgctgcc

SEQ ID NO: 172999 - DNA, 700 bp, Homo Sapiens
  misc_feature (636)..(636): n is a, c, g, or t
  misc_feature (680)..(680): n is a, c, g, or t
agtcccacacctgcacagtcccacacctgcaccggtgtgctggctaccgctatgtcctgtgccagcctcagcctctttgatgtggccgtgttccatcctggcgctcagctggacaagtgctggctgagccacgtcccagccaggggcatgagatgggggccctggatgggaggctgccagaccccaactcatgggtcccttgactctcccagcttggactcggccagggtggagctgtctgcttgggatgtatcatctcatggctcatttgggaggccagccccaggctgcttgtgcttggtgtgggaggacaggccggagctgggggtcacagtgcgcctctgagctcgggaacctgcttcagcctggggttgctgtggagaatggcccagagctgagcagaaggggctccccctagccccagggaccctgagcctccctcccatctaccgcagggcgaggcacacaccctggaggagcccagatggccttgtgctgagtgtggcctcagctcccattgcctcacggggcctgtctgctaacaggtctgggttttgtgcacagaacggtgctgctaggtgggagatgaagtcagcacctgctggggcgagcacggctttcccaaagcaggaaatnctgggagaaattcgagccgtggtctgatcaggccaagaagtttncacagggcatgataattgca

SEQ ID NO: 173000 - DNA, 513 bp, Homo Sapiens
  misc_feature (22)..(22): n is a, c, g, or t
  misc_feature (51)..(51): n is a, c, g, or t
  misc_feature (69)..(69): n is a, c, g, or t
  misc_feature (102)..(102): n is a, c, g, or t
atttggaaagcccaaccccaanctgcttttccttgttgttgaaagaaaaancggaaactggggttcaanaatgcgcctcttaaacttgggaaacctgcttcnaaccctggggttgcttgtgaaaaaatggccccagaactgaagcagaaaggggctccccctagccccagggacctgagcctccctccccatctaccgcagggcgagcacacacccctggaggagcccagatggccttgtgctgagtgtggcctcagctcccattgcctcacggggcctgtctgctaacaggtctgggttttgtgcacagaacggtgctgctaggtgggagatgaagtcagcacctgctggggcgagcacggcttcccaaagcaggaaatcctggagaaatcgagccgtggtctgatcaggccaagaggttgcacagggcatgatactgcaccctgcctgacccagctgggctcacaggtcaggggagagttggggcaggtgaatgtcagcatcaggcttctg

SEQ ID NO: 173001 - DNA, 1134 bp, Homo Sapiens
cacactggaaggagtcatggcggatggtcaggtggcggaactgctgctccggcggctggaggcgtctgatggcggcctggacagcgccgagttggcggctgagctgggcatggagcaccaggcggtggtgggcgccgtgaagagccttcaggcgctgggcgaggtcatcgaggctgaacttcggtccaccaagcactgggagcttactgcggagggcgaggagattgcccgggagggcagccatgaggcccgtgtgtttcgaagcattcccccagagggcctggcccagagcgagcttatgcgactgcccagtggcaaagtgggcttcagcaaggccatgtccaacaagtggattcgggtggacaagagtgcggctgacgggccccgggtgttccgagtggtggacagcatggaggatgaggtgcagcggcggctccagctggtccgggggggacaggctgagaagctgggggagaaggagaggagcgagctgaggaagaggaagctgttggctgaagtgactctgaagacctactgggtgagcaaaggcagtgcctttagtaccagcatctccaagcaagagacagagctgagcccagagatgatctccagtggctcttggcgggaccggcccttcaagccctacaacttcttggcccacggtgtcctccccgacagcggccaccttcacccgctgctcaaggtccgctcccagttccgacagatcttcctggagatggggttcaccgagatgccgactgataacttcattgagagctccttctggaactttgacgccctcttccagccccagcagcacccagcccgtgaccagcacgacaccttcttccttcgagatccagcggaggccctgcagctcccaattggactatgtccagcgggtcaagcggacccactctcagggcgagctacggctcacaggggtacaagtataactggaagctggacgaggcccggaaaaacctacttgagaaaccaaacaaatcagccagacgcccgtgcagctcataacggctggcccagaagaagaccttaactccgggtcaagtacttctacatcgaccgggtattccggaatgagaccctggatgccaggaaactggatgagttcac

SEQ ID NO: 173002 - DNA, 979 bp, Homo Sapiens
gtggacctgcgcctgctggcgacggcgaggcagactgtcaggaccgctcagacgaggcggactgtgacgccatctgcctgcccaaccagttccggtgtgcgagcggccagtgtgtcctcatcaaacagcagtgcgactccttccccgactgtatcgacggctccgacgagctcatgtgtgaaatcaccaagccgccctcagacgacagcccggcccacagcagtgccatcgggcccgtcattggcatcatcctctctctcttcgtcatgggtggtgtctattttgtgtgccagcgcgtggtgtgccagcgctatgcgggggccaacgggcccttcccgcacgagtatgtcagcgggaccccgcacgtgcccctcaatttcatagccccgggcggttcccagcatggccccttcacaggcatcgcatgcggaaagtccatgatgagctccgtgagcctgatggggggccggggcggggtgccctctacgaccggaaccacgtcacaggggcctcgtccagcagctcgtccagcacgaaggccacgctgtacccgccgatcctgaacccgccgccctccccggccacggacccctccctgtacaacatggacatgttctactcttcaaacattccggccactgcgagaccgtacaggccctacatcattcgaggaatggcgcccccgacgacgccctgcagcaccgacgtgtgtgacagcgactacagcgccagccgctggaaggccagcaagtactacctgggatttgaactcggactcagacccctatccacccccacccacgcccccacagccagtacctgtcggcggaggacagctgcccgccctcgcccgccaccgagaggagctacttccatctcttcccgccccctccgtccccctgcacggactcatcctgacctcggccgggccactctggcttctctgtgcccctgtaaatagttttaaatatgaacaaag

SEQ ID NO: 173003 - DNA, 785 bp, Homo Sapiens
ggccagtctgcccgataccgggacacagaattatagatgtctgagcacggactctcccaggcctgcctgcatggcatcagactagccactcctgccaggccgccgggatggttcttctccagttagaatgcaccatggagacgtggtgggactccagctcgtgtgtcctcatggagaacccagggacagctggtgcaaattcagaactgagggctctatttgtgggactgggttagaggagtctgtggcttttgttcagaattaagcagaacactgcagtcagatcctgttacttgcttcagtggaccgaaatctgtattctgtttgcgtacttgtaatatgtatattaagaagcaataactatttttcctcattaatagctgccttcaaggactgtttcagtgtgagtcagaatgtgaaaaaggaataaaaaatactgttgggctcaaactaaattcaaagaagtactttattgcaactcttttaagtgccttggatgagaagtgtcttaaattttcttcctttgaagctttaggcagagccataatggactaaaacattttgactaagtttttataccagcttaatagctgtagttttccctgcactgtgtcatcttttcaaggcatttgtctttgtaatattttccataaatttggactgtctatatcataactatacttgatagtttggctataagtgctcaatagcttgaagcccaagaagttggtatcgaaatttgtgtttgtttaaaacccaagtgctgcacaaaaagcagatactga

SEQ ID NO: 173004 - DNA, 453 bp, Homo Sapiens
  misc_feature (23)..(23): n is a, c, g, or t
  misc_feature (31)..(31): n is a, c, g, or t
  misc_feature (36)..(36): n is a, c, g, or t
  misc_feature (59)..(59): n is a, c, g, or t
  misc_feature (68)..(68): n is a, c, g, or t
  misc_feature (173)..(173): n is a, c, g, or t
gcccaaaccctatcaaggtaatnggttatgnaaaangaaaagtccccaaaatttagggnaaaataatnaccaaaggacaaatgcccttggaaaaagatgacacagtgccaggggaaaactacagctattaaagctgggtataaaaacttagtcaaaatgttttagtcccattnatggctctgcctaaagcttcaaaggaagaaaatttaagacacttctcatccaaggcacttaaaagagttgcaataaagtacttctttgaatttagtttgagcccaacagtattttttattcctttttcacattctgactcacactgaaacagtccttgaaggcagctattaatgaggaaaaatagttattgcttcttaatatacatattacaagtacgcaaacagaatacagatttcggtccactgaagcaagtaacaggatctgactgcagtgttctgc

SEQ ID NO: 173005 - DNA, 728 bp, Homo Sapiens
cccgctcagagccagtttctcccgctcagagccagtttctcccgctcagagccagtttctcccgctcagagccagtttctcccgctcagagccagtttctcccgctcagagccagtttctcccgctcagagccagtttctcccgctcagagccagtttctcccgctcagagccagtttctcccgctcagagccagtttctccagagccagtttcttctttaaacgctgatggattgcatacatgtatgtcttccatatcagccacatacacaacattcagatagacttccgactgtgcagggggatacaccagcctcctgccaggttctggaagctcaccttataatctaccaggataaagctgtgtgctgagtaggaggttatggtggggttggcggagtaacaaggagataaaagaccttgtggtcccaacttccttatgtggacagagaagataggtccttgactcctcctcattaccctgccctctcatggactgggctaactgaaggccaagctcccagagaagctggactcactgtgcgggattactgagggtgtggctgccaggctacagtcacaggaaggccagactgttgagatggacatggaaaccaggtgaggctttggatggaaagctggtctgggccaaggcctctgcaggatgagtagtagctgttcctgctgggctttgggcagcccctagaccctagcaccaggtactatcc

SEQ ID NO: 173006 - DNA, 564 bp, Homo Sapiens
  misc_feature (434)..(445): n is a, c, g, or t
atcgtcaaagataaatccatgatttggaatcaagtggtcacgtgatttttctgaatcacgatatgacactgtttatttactctttctttttatctttgggcattccagaggggtgtttgatgcttccctcaaaatggctggcttctatggattgtatacctggctgactcatactatgtttggcagcaatattgtcttcataccatcagcattagcagcaatccttggagcagtgccattcctggggacatactgggcagcagtacctgcagttcttgacctgtggctgacacaagggttaggatgcaaggccattttactgttgatttttcatctcttgccaacatactttgtagacactgcaatctactctgacatatcagggtaagtaagccacagaatttcttattagtgaatcatccaggcatttccgnnnnnnnnnnnnaaaaggaggattttattctccggggggtatacaaaagaactggtagtaggaattttcagtgaaatagccttttgtgtcccacaaatgaaatttcattcaaatagtatgttacaggcatg

SEQ ID NO: 173007 - DNA, 659 bp, Homo Sapiens
cctgtggccgccccgacctcaccgatgacacacagtttgctcagctacttctctacccttgacatccagcttcgcgagagcctagagccagatgcctatgcgttgttccataagaagctgaccgagggtgtgctgatgcgggaccccaagttcttgtggtgtgcccagtgctcctttggcttcatatatgagcgtgagcagctggaggcaacttgtccccagtgtcaccagaccttctgtgtgcgctgcaagcgccagtgggaggagcagcaccgaggtcggagctgtgaggacttccagaactggaaacgcatgaacgacccagaataccaggcccagggcctagcaatgtatcttcaggaaaacggcattgactgccccaaatgcaagttctcgtacgccctggcccgaggaggctgcatgcactttcactgtacccagtgccgccaccagttctgcagcggctgctacaatgccttttacgccaagaataaatgtccagagcctaactgcagggtgaaaaagtccctgcacggccaccaccctcgagactgcctcttctacctgcgggactggactgctctccggcttcagaagctgctacaggacaataacgtcatgtttaatacagagcctccagctggggcccgggcagtccc

SEQ ID NO: 173008 - DNA, 1391 bp, Homo Sapiens
  misc_feature (1355)..(1355): n is a, c, g, or t
gactctgcagtagcaaaagcattagaacatcacagaagtgaaatacaggctgaacaggacagaaagatagaagaagtcagagatgccatggaaaatgaaatgagaacccagcttcgccgacaggcagctgcccacactgatcacttgcgagatgtccttagggtacaagaacaggaattgaagtctgaatttgagcagaacctgtctgagaaactctctgaacaagaattacaatttcgtcgtctcagtcaagagcaagttgacaactttactctggatataaatactgcctatgccagactcagaggaatcgaacaggctgttcagagccatgcagttgctgaagaggaagccagaaaagcccaccaactctggctttcagtggaggcattaaagtacagcatgaagacctcatctgcagaaacacctactatcccgctgggtagtgcagttgaggccatcaaagccaactgttctgataatgaattcacccaagctttaaccgcagctatccctccagagtccctgacccgtggggtgtacagtgaagagacccttagagcccgtttctatgctgttcaaaaactggcccgaagggtagcaatgattgatgaaaccagaaatagcttgtaccagtacttcctctcctacctacagtccctgctcctattcccacctcagcaactgaagccgcccccagagctctgccctgaggatataaacacatttaaattactgtcatatgcttcctattgcattgagcatggtgatctggagctagcagcaaagtttgtcaatcagctgaagggggaatccagacgagtggcacaggactggctgaaggaagcccgaatgaccctagaaacgaaacagatagtggaaatcctgacagcatatgccagcgccgtaggaataggaaccactcaggtgcagccagagtgaggtttaggaagattttcataaagtcatatttcatgtcaaaggaaatcagcagtgatagatgaagggttcgcagcgagagtcccggacttgtctagaaatgagcaggtttacaagtactgttctaaatgttaacacctgttgcatttatattctttccatttgctatcatgtcagtgaacgccaggagtgctttctttgcaacttgtgtaacattttctgttttttcaggttttactgatgaggcttgtgaggccaatcaaaataatgtttgtgatctctactactgttgattttgccctcggagcaaactgaataaagcaacaagatgaaaactgagtatcttatcccttttcaaaaagtacagttctggccagggtgcagtggctcgcgcctgtgggtcccaggggtgcttnggattaccaggtgtgagccacccgtgccccagtcaa

SEQ ID NO: 173009 - DNA, 446 bp, Homo Sapiens
  misc_feature (35)..(37): n is a, c, g, or t
  misc_feature (44)..(44): n is a, c, g, or t
  misc_feature (49)..(49): n is a, c, g, or t
  misc_feature (52)..(52): n is a, c, g, or t
tcttcctttttatatatcccatttattcccttagnnnttccttnttgtnttntttgggaaaccagctcatgtttaattgtgacattttaaaattgtacaggtattttgacatctgccccccacatttagtctctcaaaatgacaggaaaacaaccaatcacaggtttaatacattgaccccttcagttcctatatgcagcacccaatattcctttgaaatatgaaatagacctggcagtggccaacagtaaatttctgcccgctgcctcccaccaccaacggagttgaaaagttcaggtttagtgttgttgtagtggcacttgtccagaattggtacctccccatagttgggggactttaaatgtaccaatgaaaatagctttttccccttcaaggggaagaaagaaaatcactcctcaaaacccagcagaaactgcctgagcggg

SEQ ID NO: 173010 - DNA, 719 bp, Homo Sapiens
gcacttctcggtcatctggggatacacttcctcgactgaacagagtatggaaacaatttacaatagcatctgaagagagagtacatagattggaaatggctattgcatttcactcaaatgctgaaaagattttgcaggactgtccagaagagcctgaagctattaatgatgaggagcaatttgatgaaattgaagcagttgggaaatcacttttggatagattaactgttccagtagtttatcctgatggaaccgaacaatattttgggagtccaagtgacatggcttctactgcagaaaacatcagagacaggatgaaactagttaatctcaaaaggcagcagctgagacatcctgaaatggtgaccacagagagctaatagctaccagctacctacagatttgcagttcataatccccgcatgttgtcaacatactacagcattagcccacccacaccttaagatgcatttcacagccaaaataagtctcatttcttttcatgacacatttctctttacatgttaacaccttgctactaccaaggcataattacttaacatgcttcgaggctgtagattccaagtatcttaaaagaaggaactataaacattgcactgaaaacttgctttaaagctttacctgacctgtcagtttgtagacaaacaactgataataagctttgaatggtgctaataagagtaggaattctctctatt

SEQ ID NO: 173011 - DNA, 466 bp, Homo Sapiens
  misc_feature (382)..(382): n is a, c, g, or t
  misc_feature (408)..(408): n is a, c, g, or t
  misc_feature (431)..(431): n is a, c, g, or t
  misc_feature (455)..(455): n is a, c, g, or t
gaaatggctattgcatttcactcaaatgctgaaaagattttgcaggactgtccagaagagcctgaagctattaatgatgaggagcaatttgatgaaattgaagcagttgggaaatcacttttggatagattaactgttccagtagtttatcctgatggaaccgaacaatattttgggagtccaagtgacatggcttctactgcagaaaacatcagagacaggatgaaactagttaatctcaaaaggcagcagctgagacatcctgaaatggtgaccacagagagctaatagctaccagcttacctacagatttggcagttcataaatcccgcatgttgttcaacataattacaggcattagccaccacaccttaagatggcntttcacaggccaaattaagttctccnttgtttttcatggacacatttcncttttacatgtttaacaccctggntattaccaggg

SEQ ID NO: 173012 - DNA, 1385 bp, Homo Sapiens
  misc_feature (108)..(108): n is a, c, g, or t
  misc_feature (702)..(717): n is a, c, g, or t
  misc_feature (1326)..(1326): n is a, c, g, or t
cccactatctatcagctcctctctgcttgggaatcctttaaggagatcgtcgtcactgactactcagaccagaaacctgcaggagctgtagaattgcttgaagaaagnaccagaggcctttgactgctcccaagtggtaaccaatgtgtctgatcttgaaggaaacagagtcaagggtccagagaaggaggagaagttgagacaggcggtcaagcaggtgctgaagtgtgatgtgactcagagccagccactgggggccgtccccttacccccggctgactgcgtgctcagcacactgtgtctggatgccgcctgcccagacctccccacctactgcagggcgctcaggaacctcggcagcctactgaagccagggggcttcctggtgatcatggatgcgctcaagagcagctactacatgattggtgagcagaagttctccagcctccccctgggccgggaggcagtagaggctgctgtgaaagaggctggctacacaatcgaatggtttgaggtgatctcgcaaagttattcttccaccatggccaacaacgaaggacttttctccctggtggcgaggaagctgagcagacccctgtgatgcctgtgacctcaattaaagcaattcctttgacctgaaacctcccaacttccccatcgccgcgccccccgccggcccggaaccagaaatatcttgtcggnnnnnnnnnnnnnnnngaagaaatctttccagaaccatttcctttgggccccgccggggccccactagggaaacgggaacacatgggcccctagccgtgtttccccataaaagagaatcccctggagcaaaaggaaaacaaggggcggcttgggggcatttccctccccccccaatattataatataaaaaaccctccccccgtggcggggggattacaaccccggataacgctcgcttcttcttgtgagaaaacaaaacaaactcccccaggatagtggggaaagtgttttccgttgaaagcggccccgactttacagccggggcgagatttcattatgcccacacccagggggaagtcgccccccaaaccgcccaagccccctgcgggataatctcccgaagaattgtgacgcgcgcccctcgcggctcctccgtggcggccaacctctcacttcccgcgagggaaaaaccggggcggtcggtgagcacttatcacatctataaaagggcctatttttcttgcgcccccgagaaaatgtgggaaaagacaccccgcttctccaccgaaagcccggggacgactggagatgagacaaaccccgggagaagacgccccgccgcgncgaggagaatacacagcgcccaccctttgggggcggccccccttgtgggcgcaagaaaa

SEQ ID NO: 173013 - DNA, 469 bp, Homo Sapiens
  misc_feature (106)..(170): n is a, c, g, or t
tcggggacaccggccgtctcggggacaccggccgtccctggcagtggttggttctgcttctccctgcagaaaagcagcattttcggaagctgaagaataagctagnnnnnnnnnnnnnnnnnnnnnnnnnnnnnnnnnnnnnnnnnnnnnnnnnnnnnnnnnnnnnnnnntctctgagctgagccagcaccatggttgacggtcagatgcccttctcctgccactacccaagccacctgcgcggagaccccttccgggactctcccctctcctctcgcctgctgaatgatggctttggcatggaccccttcccagacgacttgacagcctcttggcccgactgggctctgcctcgtctctcctcgcgctggccaggcaccctaaaggtcgggcatggtgcccggggccccactgccaccgcaggtttgggggtgcctgcgacggcggtgtcccgaggtaccgagtcgaa

SEQ ID NO: 173014 - DNA, 175 bp, Homo Sapiens
cgagctcggtaccctggtgactgtgaagagatgggcgatgtggtggggctgaggtcagtagtaggtttccttctccacccaaccacctgggttcctgcgcaggatgagtttgcggatttcgtcgtagacgaagatgaggaaacatgtaggggaaggcacagtcccactgcaccca

SEQ ID NO: 173015 - DNA, 853 bp, Homo Sapiens
  misc_feature (32)..(32): n is a, c, g, or t
  misc_feature (294)..(294): n is a, c, g, or t
tcagcatttccagcagcgactgggggcggcgncggcgcgttggaggcggccatggcaaagcagtacgactcggtggagtgccctttttgtgatgaagtttccaaatacgagaagcttcgccaagatcgggccaaggcaccttcggggaggtgttcaaggccaggcaccgcaagaccggccagaaggtggctctgaagaaggtgctgatggaaaacgagaaggaggggttccccattacagccttgcgggagatcaagatccttcagcttctaaaacacgagaatgtggaaaaangattgagatttgtcgaaccaaagcttccccctataaccgctgcaagggtagtatatacctggtgttcgacttctgcgagcatgaccttgctgggctgttgagcaatgttttggtcaagttcacgctgtctgagatcaagagggtgatgcagatgctgcttaacggcctctactacatccacagaaacaagatcctgcatagggacatgaaggctgctaatgtgcttatcactcgtgatggggtcctgaagctggcagactttgggctggcccgggccttcagcctggccaagaacagccagcccaaccgctacaccaaccgtgtggtgacactctggtaccggcccccggagctgttgctcggggagcgggactacggcccccccattgacctgtggggtgctgggtgcatcatggcagagatgtggacccgcagccccatcatgcagggcaacacggagcagcaccaactcgccctcatcagtcagctctgcggctccatcacccctgaggtgtggccaaacgtggacaactatgagctgtacgaaaagctggagctg

SEQ ID NO: 173016 - DNA, 469 bp, Homo Sapiens
tccaaccttgccattgcaataaaaaaggaaaagaggcctcctcagacactctcaagaggatggggagatgacatcacttgggtacaaacttatgaagaaggtctcttttatgctcaaaaaagtaagaagccaataatggttattcatcacctggaggattgtcaatactctcaagcactaaagaaagtatttgcccaaaatgaagaaatacaagaaatggctcagaataagttcatcatgctaaaccttatgcatgaaaccactgataagaatttatcacctgatgggcaatatgtgcctagaatcatgtttgtagacccttctttaacagttagagctgacatagctggaagatactctaacagattgtacacatgagcctcgcgatttacccctattgatagaaaacatgaagaaagcattaagacttattcagtcagagctataagaggtgatgactttcttagag

SEQ ID NO: 173017 - DNA, 704 bp, Homo Sapiens
  misc_feature (410)..(545): n is a, c, g, or t
  misc_feature (594)..(638): n is a, c, g, or t
caagaaatggctcagaataagttcatcatgctaaaccttatgcatgaaacccctgataagaatttatcccctgatgggcaatatgtgcctagaatcatgtttgtagacccttctttaacagttaaagctgacatagctggaagatactctaacagattgtacacatatgagcctcgggatttacccctattgatagaaaacatgaagaaagcattaagacttattcagtcagagctataaaagatgatggaaaaaagccttcacttcaaagaagtcaaatttcatgaagaaaacctctggcacattgacaaatactaaatgtgcaagtatatagattttgtaatattactatttagtttttttaatgtgtttgcaatagtcttattaaaataaatgttttttaaatctgnnnnnnnnnnnnnnnnnnnnnnnnnnnnnnnnnnnnnnnnnnnnnnnnnnnnnnnnnnnnnnnnnnnnnnnnnnnnnnnnnnnnnnnnnnnnnnnnnnnnnnnnnnnnnnnnnnnnnnnnnnnnnnnnnnnnnnnnttttgtgggggccccccgggcccctcaaaaattttttataaaacccttnnnnnnnnnnnnnnnnnnnnnnnnnnnnnnnnnnnnnnnnnnnnntctatttgtgttcttcctaaagaaaaccccggggcaagaaaaaagggggtggggaaccccccccac

SEQ ID NO: 173018 - DNA, 762 bp, Homo Sapiens
  misc_feature (214)..(226): n is a, c, g, or t
ggcattaggtgttccctagtgtttcttaatttctttttagaaagtgtatttttattagtatttttccggtgaacagaagatttgtttggatttaaacatttactaagacagtacctattaggaaaaccaaatattgcaaatggtcaattcgattttaatttctcaaaagatactctgttatccagaagattaaaatgcctacattgagtgcttnnnnnnnnnnnnncaactgtgatgatgtgagcagaatggcaagtaagttaagcatttttgatcctgtaatcatggtatcattacaatgaaaggaattcacaaactactgccagaggaagtttgttttttaatttaagagggaaatataacctataaatttgtttcttccaagcttagctcttaaatttggagactcaaagttaaacatcctcaacagagttttatttataattttgaattgtcaatttgtattttgctactgatctgtgatcaaccattttaactttcatctctagggatggttaacatttataattgcaaaataaaccaactataaaaaaagaaactaagagagaattggaactttaattaccttgtgggttttgcaaataggctcccattttcccatggttggagtagaattataaacctttatttaactatggccttagggccctaagaaaaaggtgggccaaatggaaacctgggggccatgggtaaaattttttaaaaatggggggtaacctttttggggggcaaaattcccct

SEQ ID NO: 173019 - DNA, 478 bp, Homo Sapiens
  misc_feature (18)..(18): n is a, c, g, or t
  misc_feature (466)..(466): n is a, c, g, or t
aataacctcccctggtgnaaggaaaagctgttcacttagctggggattttgggtaacatttgcgaaacggagtttcccgcccaaagccgtctctgagtatttgaaccggcagccacacagacccgagtgacctgcactcccgaaagaatatgctgttggccaccaagcaactttgtaaagaatttacggatctactggcgcaggaccggacaccgatagggaacagccgacccagccccatcctggagccggggatccagagctgcctcacgcacttcagcctcatcacgcacggcttcggcgccccggccatttgcgccgcgctcacggccctgcagaactatctcaccgaggcgctcaaaggcatggacaagatgttcttgaacaacaccaccactaacaggcacacgtctggggaaggcccaggtagtaaaactggcgacaaggaggagaaacacaggatatntatcaaattttt

SEQ ID NO: 173020 - DNA, 553 bp, Homo Sapiens
  misc_feature (41)..(41): n is a, c, g, or t
aaagtgcactcttctatatctaccggactgcaataccaganaagttctgcctccagccccgcgatgagaagccgttctgtgctacatgtcgtgggttgcggaggaggtgccagcgagatgccatgtgctgccctgggacactctgtgtgaacgatgtttgtactacgatggaagatgcaaccccaatattagaaaggcagcttgatgagcaagatggcacacatgcagaaggaacaactgggcacccagtccaggaaaaccaacccaaaaggaagccaagtattaagaaatcacaaggcaggaagggacaagagggagaaagttgtctgagaacttttgactgtggccctggactttgctgtgctcgtcatttttggacgaaaatttgtaagccagtccttttggaaggacaggtctgctccagaagagggcataaagacactgctcaagctccagaaatcttccagcgttgcgactgtggccctggactactgtgtcgaagccaattgaccagcaatcggcagcatgctcgattaagagtatgccaaaaaat

SEQ ID NO: 173021 - DNA, 890 bp, Homo Sapiens
  misc_feature (859)..(859): n is a, c, g, or t
caaaagtggacattaaggagacctacgaggtggaagccagcactttctgcttccctgaatctgtggatgtgggtggtgcatcaccccacagcaagaccatcagtgagagcgagctgagcgccagcgccactgagctgctgcaggactacatgctgacgctgcgcaccaagctgtcatcacaggagatccagcagtttgcagcactgctgcacgagtaccgcaatggggcctctatccacgagttctgcatcaacctgcggcagctctacggggacagccgcaagttcctgctgcttggtctgaggcccttcatccctgagaaggacagccagcacttcgagaacttcctggagaccattggcgtgaaggatggccgcggcatcatcactgacagctttggcaggcaccggcgggccctgagcaccacatccagttccaccaccaatgggaacagggccacgggcagctctgatgaccggtcggcaccctcagagggggatgagtgggaccgcatgatctcggacatcagcagcgacattgaggcgctgggctgcagcatggaccaggactcagcatgatggacagtggcatggggggggcaaccacaccttccgcgcaggcgccataggccttcccagaaggagctgcccagacctgagtggtcagcccttggtggtggccagggagaggcgcccggcgcagatggccccgggacggcccaggtcctctactgtgaaggagcagggagctgccgagggacacgagcctcagtgcggggtggaaggctctttgccttgtccaccagggctcagccaagccctgcagtgtgtccccggctcgggggagggccccggccgancggggcagggaaaagcccagtccctggtcgg

SEQ ID NO: 173022 - DNA, 1252 bp, Homo Sapiens
atatggaagaggagggcaagaagggcaagaagcctggaatgtctcgccatttaaacgagtattcctaaaaggtgaaaagagtagagataagaaagcccatgagaaggtgacagagaggcgccctctgcacactgtggtgttgtcattgcctgagcgcgtcgagccagacagactgctgagcgactatattgagaaggaggtaaagtatttaggtcagttaacgtccataccaggatacctgaatccctccagtaggactgaaatcctgcatttcatagacaatgcaaagagagcccaccagcttccgggacacttgactcaggagcacgatgctgtgctcagcctgtctgcgtacaacgtcaagctggcctggagggacggggaggatatcatcctcagggtgcccatccatgacatcgccgccgtctcctatgttcgggatgacgctgcacacctggtggtcctgaagacagcccaggacccaggatctcccccagccagagtctgtgtgcggaaagttccagaggcctcagtgcaggctccctgtcggagagtgcagttgggcccgtggaggcatgctgcctggtcatcctggctgcagagagcaaggtcgctgcggaggagctttgctgtctgctaggccaggtcttccaggttgtttacacggagtccaccatcgactttctggacagagcgatatttgatggggcctctaccccgaccaaacacctgtccctgcacagcgatgactcttctacaaaagtggacattaaggagacctacgaggtggaagccagcactttcggcttccctgaatctgtggatgtgggtggtgcatcaccccacagcaagaccatcagtgagagcgagctgagcgccagcgccactgagctgctgcaggactacatgctgacgctgcgcaccaagctgtcatcacaggagatccagcagtttgcagcactgctgcacgagtaccgcaatggggcctctatccacgagttctgcatcaacctgcggcagctctacgggggacagccgcaagttcctgctgcttggtctgaggcccttcatcccctgagaaggacaggcagcacttcgagaacttcctggagaccattggcgtgaaggatggccgcggatccatcacttgacagctttggcaggcaccggcgggccctgagcaccacatcagttcaccaccaatgggaaccgggcacgggcaagtcttgatgacggtcggccctcaaggggt

SEQ ID NO: 173023 - DNA, 739 bp, Homo Sapiens
tgggtgcagggtgactgtgtagattgtggaaaagccttcagtgctcaggaacaattaaaaaggcatctgagaattcatactcaggagtcttcctatgtatgtgatgagtgtggaaaagccctgactagcaaaagaaatcttcatcagcatcaaagaatccatactggagagaaaccctataagtgtagcaagtatgagaaagcctttgggacttcttccccagctaggtcaccttgagcatgtctactctggagagaagcctgtgctggacattcgtcgttatggcctcccagaattttttacccccttttactggtaatagtacactccagtgaaatgtactgagtggattccgtcttctactcaggaatggaatgtgtgacacaggcctgactcagcctctgatccatccctcaagccacagttaatgattcagatgtcagtagatgaccaaagatggttcaattagagtcccaggattgcaagagctaataggaacaaatactctccccccgcccacccccattggttttaatgctgagaagaagaactagactcttacagaggtgagaatgaagtccacacagcaaaaatgcatctgagaattggagagcagtaaaagactgaagataatgtttgaacagccacatacaccatgcctgaagctaaaaatatatacgggtttttgaattgcagcagccaataaattccatttttgtttggttggttttggctttgg

SEQ ID NO: 173024 - DNA, 718 bp, Homo Sapiens
  misc_feature (470)..(470): n is a, c, g, or t
  misc_feature (479)..(479): n is a, c, g, or t
tggtgctgtggtgactgtgagatggcccaaggaggagggccagccaccgcattccgggtggatggaaaaaagccccgaaaagccggctgaacgtgccgggcctcagcgagaacgtgccctacaagttcaaggtgcaggcccaggaccactgagggcttcgggccagagcgcgagggcatcatcaccatagagtcccaggatggaggacccttcccgcagctgggcagccgtgccgggctcttccagcacccgctacaaagcgagtacagcagcatcaccaccacccacaccagcgccaccgagcccttcctagtggatgggccgaccctgggggcccagcacctggaggcaggcggctccctcacccggcatgtgacccaggagtttgtgagccggacactgaccaccagcggaacccttagcacccacatggaccaacagttcttccaaacttgaccgcaccctgcccnacccccgcnatgtcccactaggcgtcctcccgactcctctcccggagcctcctcagctactccatccttgcacccctggggcccagcccacccgcatgcacagagcaggggctaggtgtctcctgggaggcatgaagggggcaaggtccgtcctctgtgggcccaaacctatttgtaaccaaagagctgggagcagcacaaggacccagcctttgttctgcacttaataaatggttttgctactgcca

SEQ ID NO: 173025 - DNA, 766 bp, Homo Sapiens
  misc_feature (609)..(609): n is a, c, g, or t
gtcaaatccatcaaggcagcctcctccacggagaagttccctgatggtttctggctaggagagcagctggtgtgctggcaagcaggcaccaccccttggaacattttcccagtcatctcactctacctaatgggtgaggttaccaaccagtccttccgcatcaccatccttccacagcaatacctgcggccagtggaagatgtggccacgtcccaagacgactgttacaagtttgccatctcacagtcatccacgggcactgttatgggagctgttatcatggagggcttctacggtgtctttgatcgggcccgaaaacgaattggctttgctgtcagcgcttgccatgtgcacgatgagttcaggacggcagcggtggaaggcccttttgtcaccttggacatggaagactgtggctacaacattccacagacagatgagtcaaccctcatgaccatagcctatgtcatggctgccatctgcgccctcttcatgctgccactctgcctcatggtgtgtcagtggcgctgcctccgctgcctgcgccagcacaatggatgactttgctgatgacatctccctgctgaagtgaggaggcccatgggcagnaagatagagattcccctgggaccacacctccgtggttcactttggtcacaagtaggagacacagatgggcacctgtggccagagcacctcagggaccctccccaccacaaaatgcctctgccttgactggagaaaggaaaaggcttggcaaaggtga

SEQ ID NO: 173026 - DNA, 1128 bp, Homo Sapiens
  misc_feature (527)..(550): n is a, c, g, or t
  misc_feature (940)..(967): n is a, c, g, or t
tctttaaaaagaaaagaattctatattcttttttatttatttgagcaaggattttgcattacaatcgggaacaaaaacagacctttctgagaagagaaggggcctcctgcagtagcctaggaaaatcacatttagaatccactcccgggatgtcattctaggctctgctgactacaacagcctgagtgaggaggaaagaggcagcagcagacagcggatgtggagcaagtaccctctggatgtgcagaaggagttcggctatgacagcccccacgacctggattcagactgatggtcttgtgatgtccatgaggttctgccacatgcccttgagggctctgagtccagagttaactgccctgctgacatcctgttaggtttcctagcttaacatgtggaaggaaaagcatatcaagcatatcgggcggcaccatcccaccacagtgaaaacttatgttaggggagtgagtcttttccacttacagtaggacccctttgcctcaatcaaaagtgaccctacagtttgnnnnnnnnnnnnnnnnnnnnnnnnggaaggtttctttagctttagcttcttggcccaggaatttttcctggcattcaggttctgtgctgaaaccacaagggagggggaggttcccatttcattagcagtaagcttctgctgtgccataccaccaggctgcctgcctctaggaaaaccctgttccttttgatagaatctaaaaggggtaccagtgggtcccttgtagcaatacagactggatagtaatggccattagggcagaaagtagtctgagcagtgggagattttagttaacagctatttctgcttccaaactctgataacggttgtgaaattactgactgacttcctttggcagtggggccaagaaacaatatatatgaatgtgatacatgtgtttagtaaaatctagcnnnnnnnnnnnnnnnnnnnnnnnnnnnnacatgtcgggcggccccggcccccaaaaagttttccaaaacctttcgttttggcggcgggggccccaggagaggaaaggggaaacgtgggcataacctggtttccctagggaaaaccctgggggcatgaacataggggcttggggattcctcccccacaat

SEQ ID NO: 173027 - DNA, 503 bp, Homo Sapiens
  misc_feature (58)..(70): n is a, c, g, or t
ctcagatgcagtttctgcctcccagacgcggcgggagccaagctcctccaaccacaannnnnnnnnnnnncggtgaatcacctctgaggcctgggcccagtgttcaggggaaccttccaaggtgtctggttgccctgcctctggctccagaacagaaagggagcctcacgctggctcacacaaaacagctgacactgactaaggaactgcagcatttgcacaggggaggggggtgccctccttcctaaaaaccctgggggccaggctgacttggggggcagacttgacactaggccccactcactcagatgtcctgaaattccaccacgggggtcaccctggggggttagggacctatttttaacactagggggctggcccactaggagggctggccctaagatacagacccccccaactccccaaagcggggaggagatatttattttggggagagtttggaggggagggagaatttattaataaaagaatctttaacttta

SEQ ID NO: 173028 - DNA, 936 bp, Homo Sapiens
  misc_feature (551)..(563): n is a, c, g, or t
  misc_feature (828)..(848): n is a, c, g, or t
gagcgaggcctgggtggcgaatcggcacgaggcgggcgcaggacgtgcactatggctcggggctcgctgcgccggttgctgcggctcctcgtgctggggctctggctggcgttgctgcgctccgtggccggggagcaagcgccaggcaccgccccctgctcccgcggcagctcctggagcgcggacctggacaagtgcatggactgcgcgtcttgcagggcgcgaccgcacagcgacttctgcctgggctgcgctgcagcacctcctgcccccttccggctgctttggcccatccttgggggcgctctgagcctgaccttcgtgctggggctgctttctggctttttggtctggagacgatgccgcaggagagagaagttcaccacccccatagaggagaccggcggagagggctgcccagctgtggcgctgatccagtgacaatgtgccccctgccagccggggctcgcccactcatcattcattcatccattctagagccagtctctgcctcccagacgcggcgggagccaagctcctccaaccacaannnnnnnnnnnnncggtgaatcacctctgaggcctgggcccagggttcaggggaaccttccaaggtgtctggttgccctgcctctggctccagaacagaaagggagcctcacgctggctcacacaaaacagctgacactgactaaggaactgcagcatttgcacaggggaggggggtgcccctcccttcctagaggccctgggggggcagggctgactttggggggcagacttgacactaggccccactcactcagatgtcctggaaattccaccacnnnnnnnnnnnnnnnnnnnnnttagggaacctattttttacccctaggggggctgggcccacttagaaggggctgggcccctaaaaatacagacccccccaaactcccc

SEQ ID NO: 173029 - DNA, 870 bp, Homo Sapiens
  misc_feature (708)..(708): n is a, c, g, or t
gtcctctgctgccactcatgccacacccggacctgtttgtccttgtggagcttcaccattccctctgtcagaactcactgccaagagccctgaacaggagccaccatgcagtgcttcaacttcattaagaccatgatgatcctcttcaatttgctcatctttctgtgtggtgcagccctgttggcagtggccatctgggtctcaatcgatggggcatcctttctgaagatcttcgggccactgtcgtccagtgccatgcagtttgtcaacgtgggctacttcctcatcgcagccggcgttgtggtctttgctcttggtttcctgggctgctatggtgctaagactgagagcaagtgtgccctcgtgacgttcttcttcatcctcctcctcatcttcattgctgaggttgcagctgctgtggtcgccttggtgtacaccacaatggctgagcacttcctgacgttgctggtagtgcctgccatcaagaaagattatggttcccaggaagacttcactcaagtgtggaacaccaccatgaaagggctcaagtgctgtggcttcaccaactatacggattttgaggactcaccctacttcaaagagaacagtgcctttcccccattctgttgcaatgacaacgtcaccaacacagccaatgaaacctgcaccaagcaaaaggctcacgaccaaaaagtagagggttgcttncatcagcttttgtatgacatccgaactaatgcagtcacccgtgggtggtgtggcagctggaattgggggccctccagctggctgccatgattgtgtccatgtatctgtactgcaatctacaataagtccaacttctgccctctggcactactggctggcaac

SEQ ID NO: 173030 - DNA, 446 bp, Homo Sapiens
cgggtactgagatggaagacaatgaaatgagtagttcaccttaacccattacgctggcaaactgatacaactcagaaactgctcaatgtcaggaaaaccggaactagttgatgaacctgttttcaaaatatcatctcatcaacgaggcctggacaaacaagccctgaggagggatctgcaacaaccctgaagacaacaaggaaagaaaccatgaaagtctgtctgtactgcagtgggaattcttgagtgaggtcttacctcttctttaaacctcttcaggagtgtcctgattatgtccagaattttccctaaaggcagggattcttaacctggatagaagccaggggtaaccatggactagatggaagaaaatggtacatctttattttcagcaatgaaactgaaatttagccttactcccaagttataaacactgacaacggact

SEQ ID NO: 173031 - DNA, 431 bp, Homo Sapiens
cccagacccttggcaagggataggctcgttggtgacattgtgaatctcagatttgttttatccactttttttgctatttatttaaatggtcgatcaacttcccacaaactgaggaatgaattccacgagcctgttctgaaaatgtggacgtaagacaaacacgtgctcgtcctttaatggagttcaccagcacacttgttaaccagtcctgtttgctttcgtctttttttgtgcgtaataaagtcaactgaccaagtgaccatgaaaaggggctgtctggggctcctgttttttagctgctgttcttcagctccgaccatgttgctgtgtgattatctcaattggttttaattgaggcagaaactgaagctctaccaatgaactgtttagaaacaagacacacttttgtattaaaattgcttgcagtaaca

SEQ ID NO: 173032 - DNA, 156 bp, Homo Sapiens
tgtggttagtggtgactgtgctgactcccaggcagaccgtggtgttgaccccactggatgtgtggtatgtaggcacggggtggcaccgtcacctgcccctcacagacacactggcggcctgtgcacaaacccactcacgcacacagcaccactgca

SEQ ID NO: 173033 - DNA, 795 bp, Homo Sapiens
ggggttgtgaggggtgtcagctcagtgcatcccaggcagctcttagtgtggagcagtgaactgtgtgtggttccttctacttggggatcatgcagagagcttcgcgtctgaagagagagctgcacatgttagccacagagccacccccaggcatcacatgttggcaagataaagaccaaatggatgacctgcgagctcaaatattaggtggagccaacacaccttatgagaaaggtgtttttaagctagaagttatcattcctgagaggtacccatttgaacctcctcagatccgatttctcactccaatttatcatccaaacattgattctgctggaaggatttgtctggatgttctcaaattgccaccaaaaggtgcttggagaccatccctcaacatcgcaactgtgttgacctctattcagctgctcatgtcagaacccaaccctgatgacccgctcatggctgacatatcctcagaatttaaatataataagccagccttcctcaagaatgccagacagtggacagagaagcatgcaagacagaaacaaaaggctgatgaggaagagatgcttgataatctaccagaggctggtgactccagagtacacaactcaacacagaaaagggaaggccagttccagctaattagggaatagaaaaagaaatttccatccctgaatggtttagggggaactttggccccttgggtccatctttaagttaaaatgggggtcccttttggcacaaaggtgggaatccttacggtttggccctaccccctttgggaaa

SEQ ID NO: 173034 - DNA, 1494 bp, Homo Sapiens
  misc_feature (772)..(780): n is a, c, g, or t
  misc_feature (881)..(985): n is a, c, g, or t
  misc_feature (1129)..(1154): n is a, c, g, or t
  misc_feature (1340)..(1348): n is a, c, g, or t
ggggttggtccgcgcgttgctgcgttgtgaggggtgtcagctcagtgcatcccaggcagctcttagtgtggagcagtgaactgtgtgtggttccttctacttggggatcatgcagagagcttcacgtctgaagagagagctgcacatgttagccacagagccacccccaggcatcacatgttggcaagataaagaccaaatggatgacctgcgagctcaaatattaggtggagccaacacaccttatgagaaaggtgtttttaagctagaagttatcattcctgagaggtacccatttgaacctcctcagatccgatttctcactccaatttatcatccaaacattgattctgctggaaggatttgtctggatgttctcaaattgccaccaaaaggtgcttggagaccatccctcaacatcgcaactgtgttgacctctattcagctgctcatgtcagaacccaaccctgatgacccgctcatggctgacatatcctcagaatttaaatataataagccagccttcctcaagaatgccagacagtggacagagaagcatgcaagacagaaacaaaaggctgatgaggaagagatgcttgataatctaccagaggctggtgactccagagtacacaactcaacacagaaaaggaaggccagtcagctagtaggcatagaaaagaaatttcatcctgatgtttaggggacttgtcctggttcatcctagttaatgtggtctttgccaaggtgatctaagttgcctaccttgaannnnnnnnnaaatatatttgatgacataatttttgtgtagtttatttatcttgtacatatgtattttgaaatcttttaaacctgaaaaataaatagtcatttaatgttgnnnnnnnnnnnnnnnnnnnnnnnnnnnnnnnnnnnnnnnnnnnnnnnnnnnnnnnnnnnnnnnnnnnnnnnnnnnnnnnnnnnnnnnnnnnnnnnnnnnnnnnnnttgggggggccccctccgccccccgagaaattttcaaaacttttggttggggccgccgcggccccagaagggaaagggaaaccgggggccataagtggttccctagggaaaacccggggccaagaaacaagggggttgggattnnnnnnnnnnnnnnnnnnnnnnnnnngggggggaaaacccaggggtgtttttgagaacaaaaccccacagggggtgcggttcctgggagggccctttctctgggggattcttttccaacagggggagttcccaaaggcggagtctctataatttaacaaaattaaaaccccccccgcgccccgggggcgcttatatttggggaaagaaagcnnnnnnnnnacaatttctccattaaagccactttttgtggccgaaaattgtggggaaaccccttctcccaaaacggcgggtgtgtgggaaaaaccctcggaactcccgcacggggcggataattacacacaccccttggggcgcgcttggtagag

SEQ ID NO: 173035 - DNA, 677 bp, Homo Sapiens
ggggcagcagtgaccagccagggcaaatggcttagaagcaggccactccccagcctgctgccagcactcactgtgctcaagccgccagggctcatcatggtagctgggagctgtggacgggagtcaccaggtggtggggccaagccagggactcatgacttttgcccctcccttcagagcctggtcacacaaggggcgagcaccaggccagcctgggactggacagagctgggcccaagctgcgctggaatcgcagcaggagaggggagtgggctggttcttcccaccacttcccaggctctgacagccgagactcatttccaaggcacagcagctttctaaagggactgagtttggactgggttttggacctccaggggctggagcttcatcacctgggcagtgtcttttctcagagagcaggtttctttatagtttggaaataaatggttcacggtccactggccgccttgtgttgctggaaacgtgggggcagggaggggacagtgtgggcctggcctctcctttcctttccctgcctggagccttcttcaaatgtctggtcttaagccaggcctccttcattttctcgctcctgttagaacaccagtcccctcaccagtggggccccactgcacctgctggcaggaaataaatgaatgtttactgagtactgc

SEQ ID NO: 173036 - DNA, 353 bp, Homo Sapiens
  misc_feature (39)..(39): n is a, c, g, or t
  misc_feature (295)..(295): n is a, c, g, or t
  misc_feature (305)..(305): n is a, c, g, or t
  misc_feature (312)..(312): n is a, c, g, or t
  misc_feature (326)..(326): n is a, c, g, or t
  misc_feature (332)..(332): n is a, c, g, or t
aatggcaaggcatcctggtgaattcatgcgcttcgagtngcggggctgcccagaggccgggggagcagacagggccggtgctccctctggaagcttgggtgaccggggccctggctcccacgggatggagggtgtggtcctgtggtcagagcccaagcagcactcaggagaggggagaaaggaggtgcacctgggcagcccacatttttgtcgctccccaaatccctccccacgtggggatgagaaccttcctgctgtgatgtgacaccttcggggacattgaccactcaaaaantcagatcatnttggccnacctgggagaagtncaaaantaatttgtaagaatttaaggg

SEQ ID NO: 173037 - DNA, 661 bp, Homo Sapiens
  misc_feature (425)..(567): n is a, c, g, or t
  misc_feature (577)..(590): n is a, c, g, or t
ggtggggagaaaggggctttcatgtcgtttccttcctgctcctgctgcacagctgccaggagtgctctgcctggagtctgcagacctcagagaggtcccagcactggctgtggactttcaggtgtaggcaggtgggctctgcttcccgattccctgtgagcgcccaccctctcgaaagaattttctgcttgccctgtgactgtgcagactctggctcgagcaacccggggaacttcaccctcaggggcctcccacaccttctccagcgaggaggtctcagtcccagcctcgggagggcacctccttttctgtgctttcttccctgaggcattcttcctcatccctagggtgttgtgtagaactctttttaaactctatgctccgagtagagttcatctttatattaaacttcccctgttcaaatnnnnnnnnnnnnnnnnnnnnnnnnnnnnnnnnnnnnnnnnnnnnnnnnnnnnnnnnnnnnnnnnnnnnnnnnnnnnnnnnnnnnnnnnnnnnnnnnnnnnnnnnnnnnnnnnnnnnnnnnnnnnnnnnnnnnnnnnnnnnnnntttggggggnnnnnnnnnnnnnnaaaaagtttttaaaacttttttttggggcgggcgcccccaaaagaaaggaaaaaggggcaaattgtttccc

SEQ ID NO: 173038 - DNA, 390 bp, Homo Sapiens
  misc_feature (369)..(369): n is a, c, g, or t
gatccccctcccctgcctgctctgcactcgtgggtggggcccgtgcgccgtttctccttggtagcgtgcacggtgttgaactgggacactggggagaaaggggctttcatgtcgtttccttcctgctcctgctgcacagctgccaggagtgctctgcctggagtctgcagacctcagagaggtcccagcactggctgtggcctttcaggtgtaggcaggtgggctctgcttcccgattccctgtgagcgcccaccctctcgaaagaattttctgcttgccctgtgactgtgcagactctgggctcgagcaacccggggaacttcaccctcagggggcctcccacacctttttccagcgagggaggtctnagttcccagctttggggaagg

SEQ ID NO: 173039 - DNA, 449 bp, Homo Sapiens
  misc_feature (213)..(221): n is a, c, g, or t
ttttcaagattgcaaaacaccaaatctatatttacacttccacatataataacataactttaagctgaaatatatcataaataaaacaagtaatgtctactgttcgacaacttaagtatcaacaattaaaataaatcaaactggaatgaaataaatacataaacaaaaatccaacgaattgtacctctattatatgtactgttgtctcaaagnnnnnnnnntataaaaccagtagtataccaatagttaatactgatggacacaaaaacatattttgaagtacaaagggctgtaggaaaataattggtatttttatacattcagaaatgtggttaaaaagagaaatctgaaagcccaaaaaattccagcataatacaaatcgacttgttttcaaatagatttggtgattcttttttttaaatacaggtttaaattccagccctctatcc

SEQ ID NO: 173040 - DNA, 958 bp, Homo Sapiens
catcatagaccagttggctgaggaggcacgggccttcaaccgcatctacgtggcctctgtgcaccaggacctctcagacgatgacatcaagagcgtgtttgaggcctttggcaagatcaagtcctgcacactggcccgggaccccacaactggcaaggcacaagggctacggcttcattgagtacgagaaggcccagtcgtcccaagatgctgtgtcttccatgaacctcttagacctgggtggccagtacttgcgggtgggcaaggctgtcacaccgcccatgcccctactcacaccagccacgcctggaggcctcccacctgccgctgctgtggcagctgctgcagccactgcccaagatcacagctcaggaagcagtggccggagcagcggtgctgggtaccctgggcacacctggactggtgtccccagcactgaccctggcccagcccctgggcactttgccccaggctgtcatggctgcccaggcacctggagtcatcacaggtgtgaccccagcccgtcctcctatcccggtcaccatcccctcggtgggagtggtgaaccccatactggccagccctccaacgctgggtctcctggagcacaagaaagacgaaggaagaagaggagctgtttcccgagtcagagcggccagagatgctgagcgagcaggagcacatgagcatctcgggcagtagcgcccgacacatggtgatgcagaagctgctccgcaagcaggagtctacagtgatggttctgcgccaacatggtggacccccaggacattccattgatgaccctggaaaccgcactgtgacacgaggagttgttggcagttccggcgccgtgaacgccgtcatccatctaccagaagaaacactgcgcagaggacggatgccaaaaatcttggtcaacaacttgggaattatccatagccctaagatctaaggctcc

SEQ ID NO: 173041 - DNA, 1246 bp, Homo Sapiens
  misc_feature (293)..(326): n is a, c, g, or t
  misc_feature (811)..(819): n is a, c, g, or t
  misc_feature (1117)..(1130): n is a, c, g, or t
accgaatgttctggtgaaacagacttacacttcttcagaagccacatttggccaggcctcccgccttggtaaatgctgtactctttgcatcaagtatgctagtcatccttccccacttggaaaattcctatgcatcttgcaggcctgacataagcatttcctctgtgaaacctcctttgctccactcaaggagagtcatctaacttccactttcgtgtcaccactgtaattacaacctacctctacttgtatgtcacttaaatcatactgtattgttttatttttcaaaagtnnnnnnnnnnnnnnnnnnnnnnnnnnnnnnnnnnaaggaacctttttattttttgcatctccatagcatagtttttggcatatgaatgtttaataaatgtttgttgaataaattgattttaaagtgacatctttattatattagaggtcctacctatattccaaatactttcactcccttcactttacagcaagggtcagtagagtcccaaggatttgtagactttagggggtcaataaagctgaaattgtattcaagatttggtgtggtttttggtgggtcatgaaaggggtctattcggggaaaaaaaggaacttctttcatgggaaaaggcagcatcattgaggaatttcttgaataatcaaataataccttcctaggattataaggtagataaatggattcctgtttaagattctgaagggaaggggagaagtgttataaattatttcatacaacaatttttcttagcttaatgtttgaataaataaaaatgttggtacccgaacccgacctctnnnnnnnnntcttttaatcttgtcgggccgcctccggccctccagaaactttctaaaccatttcgtttggccgcgcgggccccagtaaggaaagtgaaaattggcccttagctggtttccctaaggaaatcctggggcatgaacttagggctttggaattcctccccaaataaaaaaacggcccggcggggcaaacccgagcggtttctgaaccaaatcccaaaatgggagtttcctgaaggccattaacctggatcctaatcaacaggaagtcccaaggcccaagcttccaatattcaaatttaannnnnnnnnnnnnntggcccaccttctatcccaagaaaccggggtggaaaatttcaattaaagacatttctttggcggaacattggcaaagccccttccacaaaaccggggattgaatggaaacccctga

SEQ ID NO: 173042 - DNA, 293 bp, Homo Sapiens
tgacctctagaggactcccccccggtaagagcagtttcttaaagagggagtcgagtgtggggccagtggtctctggtgggggcatagccccagagatggggctcctgtgagtccagcctaagggttgagggggatctgagccagttcacattgtcctggccacaggggtctctagggcatgacactcagggccactctgcctgttccaggccctgatcgtggtaatttaaagctcagaatggtggatgggggaagcctcagcccccccgcccctgccttcccctagacctgag

SEQ ID NO: 173043 - DNA, 698 bp, Homo Sapiens
acccgtggcttccctgcagacctatgcggaggacatcagcgccgatgagtaggcccaagtggtacagactctggcgcacctgacctctgcatctgcccacgcagcatctacctccctgcacatcagtgacgaggacctctgcctcatctgcaaggaacccacgcttccttggagagccagtgggcagtggagcccaacgccagagtgggtcctctcctggaagtcgaagctgccgctgcagaccatcatgaggctgctgcaggtgctggttccgcaggtggagaagatctgcatcgacaagggcctgacggatgagtctgagatcctgcggttcctgcagcatggcaccctggtggggctgctgcccgtgccccaccccatcctcatccgcaagtaccaggccaactcgggcactgccatgtggttccgcacctacatgtggggcgtcatctatctgaggaatgtggacccccctgtctggtacgacaccgacgtgaagctgtttgagatacagcgggtgtgaggatgaagccgacgaggggctcagtctaggggaaggcagggcttggtccctgaggcttcccccatccaccattcttgagctttaaattaccacgatcagggcctggaacaggaaggagttggcccttagttttatgccctaggagacccctgttggccaggggcaattttgaatt

SEQ ID NO: 173044 - DNA, 460 bp, Homo Sapiens
  misc_feature (43)..(43): n is a, c, g, or t
  misc_feature (95)..(95): n is a, c, g, or t
  misc_feature (212)..(212): n is a, c, g, or t
  misc_feature (222)..(222): n is a, c, g, or t
  misc_feature (334)..(334): n is a, c, g, or t
aaacacccccttaaccctgtccccagcaacctcaaaggaacancccgtggttccccctggtcaaaaccccttaaggccacaatgaaccccattgncttcctgcctctggggactgggtaagcacaggagtgggtgggcaactgaaggggcccagcactgaacccaggtctttaaagagggagtccgaagtgttgggggcagtggtctctggntgggcataancccagagatggggctcctgtgagtccagcctaggggttgagggggatctgagccagttcacattgtcctggccacaggggtctctagggcatgacactcagggccactcctnctgttccaggccctgatcgtggtaatttaaagctcagaatggtggatgggggaagcctcagggaccaagccctgccttcccctagactgagcccctcgtcggcttcatcctcacacccgctgtatc

SEQ ID NO: 173045 - DNA, 662 bp, Homo Sapiens
caacagggcaagcgctggtacggtccggaattccgggatatcgtcgacccacgcgtcggttttaatcgcttggatctaccaccatataagagttatgaacaactaaaggaaaaacttctttttgcaatagaagagacagagggatttggacaagaatgaatgtggcttcttattttggaggagctcttgcatttaaataccccagccaagaaaaattgcacagatagtgtatataagctgttcattctgtacagtgaattttccgaacctctcaaagtatgttttccgttcttccacagaaatatgcaaaacagttcatccttttctactttatttattgttcccttgaaatgactgaccaggaaaaagatcatccttaaattttgaagcaagtgagagactttattaaaaatacatatatatctatataaacatatatgatagtggctctagttttatagagctccaagtgtattaaacatgacagccattcattcataaagatctggatttgctttaccttgttaatattatctaggggaaaaagtgcaaattgctccatgttcttctctcccttatgtaacatctcctgagggtgtttagttgcatggctgttcagaaaggtattaagggcttagggcacatcttactttgagtatgtt

SEQ ID NO: 173046 - DNA, 327 bp, Homo Sapiens
cggcggcaagaggaggaacggcggccacggtgctggactggagcaggaagtctttgtaggccatctcggcttcctccttggatgacctttttgccttcttgggttctttggtctctgtggtgctctcagtggtggcaacaaactcttcttttcctccgagggatgtctcctgagtgatcgaagaggctcccatgttgtcattggctccaaattccctggagttctcgaagtctgacatgctaatgtctgtcctgtagcttctgattgaaactcggtcgacgttcttcctgtgccgggctctggccaccccgacagccacggctccca

SEQ ID NO: 173047 - DNA, 980 bp, Homo Sapiens
ggatctcttaggctttctgctcagaaggatttggaacagaaagaaaagcatcatgtaaaaatgaaagccaagagatgtgccactcctgtaatcatcgataaaattctaccctctaagaaaatgaaagtttctaacaacaaaaagaagccagaggaagaaggcagtgctcatcaagatactgctgaaaagaatgcatcttccccagagaaagccaagggtagacatactgtgccttgtatgccacctgcaaagcagaagtttctaaaaagtactgaggagcaagagctggagaagagtatgaaaatgcagcaagaggtggtggagatgcggaaaaagaatgaagaattcaagaaacttgctctggctggaatagggcaacctgtgaagaaatcagtgagccaggtcaccaaatcagttgacttccacttccgcacagatgagcgaatcaaacaacatcctaagaaccaggaggaatataaggaagtgaactttacatctgaactacgaaagcatccttcatctcctgcccgagtgactaagggatgtaccattgttaagcctttcaacctgtcccaaggaaagaaaagaacatttgatgaaacagtttctacatatgtgccccttgcacagcaagttgaagacttccataaacgaacccctaacagatatcatttgaggagcaagaaggatgatattaacctgttaccctccaaatcttctgtgaccaagatttgcagagacccacagactcctgtactgcaaaccaaacaccgtgcacgggctgtgacctgcaaaagtacagcagagctggaggctgaggagctcgagaaattgcaacaatacaaattcaaagcacgtaaacttgatcccagaatacttgaaggtgggcccatcttgcccaagaaaccacctgtgaaaccacccaccgagcctattggctttgatttggaaattgagaaaagaatccaggagcgagaagc

SEQ ID NO: 173048 - DNA, 592 bp, Homo Sapiens
gtccgctcagcccactcagagccagctccctgcctcaggctctctccctcctcccctgcagctccagctttgtgctctgcctctgaggagaccatggcccagcatctgagtaccctgctgctcctgctggccaccctagctgtggccctggcctggagccccaaggaggaggataggataatcccgggtggcatctattacgcagacctcaatgatgagtgggtacagcgtgcccttcacttcgccatcagcgagtataacaaggccaccaaagatgactactacagacgtccgctgcgggtactaagagccaggcaacagaccgttgggggggtgaattacttcttcgacgtagaggtgggccgaaccatatgtaccaagtcccagcccaacttggacacctgtgccttccatgaacagccagaactgcagaagaaacagttgtgctctttcgagatctacgaagttccctgggagaacagaaggtccctggtgaaatccaggtgtcaagaatcctagggatctgtgccaggccattcgcaccagccaccacccactcccaccccgtcggtgagcggtaccgagctgattt

SEQ ID NO: 173049 - DNA, 328 bp, Homo Sapiens
cgagcccctcaaatatttggacacagtactgacaggcatgatggggggtgcaggccgggccctgcgagggctcgagggcttggtccggccaccccaggccctagctccagctgcaagtccgacctgggcgagctggaccacgtggtggagatcctggtggagacctgagcaggagccctgagtgctcacagccgcctctgacgcattgacacgtgagcactggctcccaacggagggtgcgcctgcggcaaggggccacagcttgttgccctgtttgctggattctgagaaatcccagaacagcccattaccaggtgggggctgcagc

SEQ ID NO: 173050 - DNA, 1727 bp, Homo Sapiens
  misc_feature (18)..(18): n is a, c, g, or t
  misc_feature (1437)..(1535): n is a, c, g, or t
  misc_feature (1598)..(1607): n is a, c, g, or t
gtctaagagcgagcctgngtggcgattccgacgaggggactcggcggtcgaaaggggagttcaaggagacgggggcgacgcggctgagggcttctcgtcggggtcggggctgcagccgtcatgccggggatagtggagctgcccactctagaggagctgaaagtagatgaggtgaaaattagttctgctgtgcttaaagctgcggcccatcactatggagctcaatgtgataagcccaacaaggagtttatgctctgccgctgggaagagaaagatccgaggcggtgtttagaggaaggcaaactggtcaacaagtgtgctttggacttctttaggcagataaaacgtcactgtgcagagccttttacagaatattggacttgcattgattatactggccagcagttatttcgtcactgtcgcaaacagcaggcaaagtttgacgagtgtgtgctggacaaactgggctgggtgcggcctgacctgggagaactgtcaaaggtcaccaaagtgaaaacagatcgacctttaccggagaatccctatcactcaagaccaagaccggatcccagccctgagatcgagggagatctgcagcctgccacacatggcagccgcttttatttctggaccaagtaaagatgggtccgtggcccacactcggtcatgtgctcagacaacgactgatgaaaacgcccatgcagtttgcatcgactgatagtgtgttctttccgggatcacaaacattaacaaaaaagttaacttatgtgacttggcagttattctataccatttcctgtccattaaaatttttaaaggaaatagcaaaaacaatgaccccgcactacagctcccatgtcggccgcctcggcctctagaatccttcataaagaattaccctgataacatatgcgtaatgctttatgaagctttagaaatgagctcatgactcattaaaaaataataaacatgatgctacttttactatctccacctaaataatctgaggacgggttccatactttagcctcaacgctgagtcgcgccttgtagaaattggcctctgtctatacttgccaaaagactatccggttaggatgaactacattccctaacttacagtgcaaattccgatcttgggaaaaaggccacaccacctcccttgtatttttaaaggggcgctctccgccacctttttaaccatatcgcctagggggggttggcccttgtggcccttattcgggaaccaaaactgggccttttgggctcattacagagcggaaaaaagggcccccggaaatctaaggccctcccccaagggccggaacaggcacacacctccggcctgtttacgccccgtaggagagcccctgatagccccctatatgttataccgtctgcacagtgatagtaacccctccccctatttatttttcnnnnnnnnnnnnnnnnnnnnnnnnnnnnnnnnnnnnnnnnnnnnnnnnnnnnnnnnnnnnnnnnnnnnnnnnnnnnnnnnnnnnnnnnnnnnnnnnnnngaaaagcacggccttttattgagaaaaccatttgttacctctgtgggagggcgcgggggaggnnnnnnnnnnggcgggggtcgggggggcgaccaaagtggggcctcccccatgctgatttattcctctcgcagagagccgcacccgcgaggggccactgaaaaaacaagggcccctggcgggtatacgcga

SEQ ID NO: 173051 - DNA, 184 bp, Homo Sapiens
cggcagcccaagccggtcgctgaagtgcgcagctgtgtctagaagtaaggcaatgaggtaggcggcttcctggggctctgggtcttccgctaggtactcttctaggccgtcgagcagcagaagggagggggctggccccggggcctcatgggcagagcacaggagccggaaaagctctcgggtt

SEQ ID NO: 173052 - DNA, 1127 bp, Homo Sapiens
  misc_feature (236)..(236): n is a, c, g, or t
  misc_feature (1086)..(1086): n is a, c, g, or t
ccccagttctatttttcctaatggaaatggcaattttttaaggggaagcttacttggagggagttttgggttttccccttttccaactcttttttatcccctaattcctttttccaataaggtagaaaccaagaattctccaataaagtgggtattggagtaacctaggtaatcctcattggaaacttaaaaccatcatcttttatccaaaaatttcaaaaggggcaatatagganaagtattacaaatttacataaaaagaggatgaaccatgagaaaaaacaagttatttccctgcaaagcagatcaaatagtgagacaaggaactttgacttctagtccctttaagcaggacgtaactgctagacacagtctgaatgtctagatatatttatactaaacttacaaggatcaaaaaaaggaatgaagggtaaatacaaaataatctttttgtaaacaattcttagattatacccaatgcaaaatgtttaaatgaagcagttgagtcacagctcgataagtcacaaaaccatattataactcaaagtccaaatatgtattcgtttgcccagatatattcgtcggaatataagagctgccaatgccaaagtcaggatgacaatcagtacagctgacccaccatgatcagtgtggttgtctcttggctggtggccctggattacatctggtgaagtagacaaccttctctgactctgctgctgggcccggcgctgtcgagggctcatggaggtattcttagctacaggttgggtaggttgatgaaaggatgctgctgaggaattctggagtccgtacgatgtactggccgtagcaccctggaatgttgtaggtatatcatcttgtaaatcagttagtgaaaaagagtggtttaagtctgactcagagatagtctttccagatgaattgacttcttgccttaaagcttatttgcctagccagttctttggcttcttggtcagcttggcttgaattcgcttccagattttaaaggcaacaggacatccttcatgggcagagccccattcctttcacaacagaaatcttgtggattttttgggcaagtgntcttcttttccccaggagtttaatctagggaacccatgggt

SEQ ID NO: 173053 - DNA, 129 bp, Homo Sapiens
aatgtcgagttatcacagtcaagcatagatgtaacttcatgcttcttcaaagaagatgatcagtaactcccaggaaacatgcgccacgtgtcccgcgaagtctgcccatcccctagatccccgcgtcat

SEQ ID NO: 173054 - DNA, 597 bp, Homo Sapiens
agaaatatagacttagcattcgaatgcgagaaggaatatggaactcctttctctgagcactcagtaagatcaagttttacatgcagttaagtatctcatggtgtgcaatgctcgactaatggcctatacatcggagctacagaaattagaagaacagattgcaaatcagactggaagatggttagtaacatagtttacctgtggcttttaatgtacttaaatatgtaaatttaaaacacagtataatttcaagcttaagtaccaatgtcaaatcaccaaactgttttaaaaaacaaatacactgaagtagcagctgacatcataaacagttggccgacacagctcagagtgaacttaggcagcagcttttattgggctgttgtgttcaatatgtaattataaaatgaaaattatccagaagcaatgactgagggagcattttaagaagaaagtaccaatattgatagaaatgtagagtaagaaaattaattgcttagaaatatgctaatataaaggtactagcttgtgagacattggaaactcaagtatagaaattgagatgagtgagcagcaaaattataaagagataaaagccgt

SEQ ID NO: 173055 - DNA, 619 bp, Homo Sapiens
tggacacagcactggacctgtgtgaaagagctaactaggacatacatatgaatattgtcaggatactgacgctgttaacctatgtttaataactatgttgaacagaggcgcagtctaaaccaccgcccatcagtctgaaagcggagtgtctgacacccagccagcaggacacgtccgttcccagagcattgtgagctcccggtattctctgaagcctggaaacgaggcacgcagttggaagagtccagcaaggtaacagcttcgttttaatgttacattgaaaattctgtggttattcttttggttttaaattgttgctctcttatgtctttattcggggatcttatttggccttatttcagtctccttgtattaattttcaatcttcctaattgtagtgggtaaagacagttcagagagacctgttgatttgacttccccttggaaatgagtattgtacaaattggctctaatgacttaaaatctctattaatatacaaaaaaaactggcagtttaattctttcatcagtggctcagatttttaagaaataacaatttcttcctttccacctgtaagcagtttggatggcgaacaccatctatcctaacaatgaaagg

SEQ ID NO: 173056 - DNA, 455 bp, Homo Sapiens
tgtgatcagaattctcatttttttagtcactaaaaatgctgggggggcactcctttctccattatgtgattagttcacattgcatgcttgtatcaaaacatcatatataccccaccgaatatatacaaagaaactttaaaattttaagtattaattgctcaggaaaaaattaaaatgctggggtgctgaaatctcaagggccccattacaaaactccttaggaacctcgccctctctctgctgtaaggactggttccagaatgagagaatttaaaagacattccccgcccaaaatgttcataatgtcaccccggaaacctgcgaatatggtatattacatgaccagggagaagtaaggttgcagatggcagtaaggttgctaatgggctgacctgaagataaggagatgatcctggatgatctgggtggacccaactgtaatcacaagggtccgt

SEQ ID NO: 173057 - DNA, 433 bp, Homo Sapiens
agtctgactgagccaagtgaaattcatgaaaagcaagccgggggccgccatggtggagatggctgatggctacgctgtagaccgggccattacccacctcaacaacaacttcatgtttgggcagaagctgaatgtctggtaggtgctcaggctcgggagggcagcagaggtacaggcgagagaaaaggaggggaatggggcccagcagaggagcacagtgaggccgaggtgttgactcacacagaaatgggatgtggcaggtgtgttcccagacgtgtctctgacaccacaggagaaagtgagtcagccttgcctcaggtgtagagcaatgccccaaggcacacagggcaagctaagcctctggaggccacaggggaaagcttcagggacaactttgggtatgacaaaggctcccctttcttccttgctgcag

SEQ ID NO: 173058 - DNA, 1378 bp, Homo Sapiens
  misc_feature (830)..(870): n is a, c, g, or t
  misc_feature (1230)..(1241): n is a, c, g, or t
  misc_feature (1325)..(1333): n is a, c, g, or t
cgggtatccgtataggtggggagaacacgatgaccgcacaaaaccctgctccccagttgtccacatcaggtgcctgattgacggtgtggtggaagcagaccttgtggaggccttgcaggagtttggacccatcagctatgtggtggtaatgcctaaaaagagacaagcactggtggagttctgaagatgtgtcgggggcttgcaacgcagtgaactacgcagccgacaaccaaatatacattgctggtcacacagcttttgtcaactactcttaccagccagaagatctcccgccctggggactcggatgactcccggagcgtgaacagtgtgcttctctttaccatcctgaaccccatttattcgatcaccacggatgttctttacactatctgtaatccttgtggccctgtccagagaattgtcattttcaggaagaatggagttcaggcgatggtggaatttgactcagttcaaagtgcccagcgggccaaggcctctctcaatggggctgatatctattctggctgttgcactctgaagatcgaatacgcaaagcctacacgcttgaatgtgttcaagaatgatcaggatacttgggactacacaaaccccaatctcagtggacaaggtgaccctggcagcaaccccaacaaacgccagaggcagccccctctcctgggagatcaccccgcagaatatggagggccccacggtgggtaccacagccattaccatgatgagggctacgggccccccccacctcactacgaagggagaaggatgggtccaccagtggggggtcaccgtcggggcccaagtcgctacgnnnnnnnnnnnnnnnnnnnnnnnnnnnnnnnnnnnnnnnnngagtatggccctcacgccgacagccctgtgctcatggtctatggcttggatcaatctaagatgaactgtgaccgagtcttcaatgtcttctgcttatatggcaatgtggagaaagtgaaattcatgaaaagcaagccgggggccgccatggtggagatggctgatggctacgctgtagaccgggccattacccacctcaacaacaactttcttgtttggggcagaaacctgaatgtcttgtgtcctccaagcagcccagaccatcatgcccgggtccagttcataacgggttgggaaaaacggggccttggcagtttacaaaagactttcaggggaatccccgggaaacaatcgggtttnnnnnnnnnnnnacaaagcaagggaagcccaaagaaaaccgccaattccaagcaacccccaaacaaaaggtggcttgcgaattttctttcaaaagnnnnnnnnnttgggaagggggcccccgaagggaaacacctttcctttttgaagc

SEQ ID NO: 173059 - DNA, 1501 bp, Homo Sapiens
  misc_feature (31)..(31): n is a, c, g, or t
  misc_feature (578)..(717): n is a, c, g, or t
  misc_feature (800)..(800): n is a, c, g, or t
  misc_feature (1335)..(1335): n is a, c, g, or t
  misc_feature (1370)..(1370): n is a, c, g, or t
tctttcatagttagcgacgagagttctctgnacatgtaacagttcttatggaatgcttatgaaggaaaagccatagcaggagttattaaccagccatattacaactatgaggcaggaccagatgctgtgttggggaggacaatctggggagttttaggtttaggcgcctttgggtttcagctgaaagaagtccctgctgggaaacacattatcacaactactcgatcccatagcaacaagttggttactgactgtgttgctgctatgaaccccgatgctgtgctgcgagtaggaggagcaggaaataagattattcagctgattgaaggcaaagcctctgcttatgtatttgcaagtcctggttgtaagaagtgggatacttgtgctccagaagttattttacatgctgtgggaggcaagttaaccgatatccatgggaatgttcttcagtaccacaaggatgtgaagcatatgaactctgcaggagtcctggccaaactgaggaattatgactactatgcaagccgagttccagaatctattaaaaatgcacttgttccttaaaggaaagtttcatnnnnnnnnnnnnnnnnnnnnnnnnnnnnnnnnnnnnnnnnnnnnnnnnnnnnnnnnnnnnnnnnnnnnnnnnnnnnnnnnnnnnnnnnnnnnnnnnnnnnnnnnnnnnnnnnnnnnnnnnnnnnnnnnnnnnnnnnnnnnttaaactgggggcaattcccttggtcccaggcgcccggggccgcccccagcctaaacatttgtgggggagagaggcagggccngggcgcccccccgccgtagccccaacccctcacccctgctgcacggccacaagcccctccgctgctcgccgcaacctcgcgccgacgcgctctctcccccttgtgtcgattcgtgtcgctctggagaggggaactacccccctccgctgcgggcaatgtagaaatctcgtcccccccggtgcgccgccagacaaaccagcggcctacaccgctcccacacacccccgccgtggcgcgcgccgccccttctcaacctctatccggccattaaaccgacacaatttgagagtgtggccccagacagggtgggcgacacgcacatcacattccgggcaaacgcacgccgccggcggtagacccaggcccgcgtgggatttgcccccggcaccccaggggtgcggggtcggccatcgatgcgcttactactaacggggcccgcactagccgcagtgcggcgtggggtgcggtgcccaccgccctgcctacgccgaggcaattgctcgttgcgaggtggccccacaataacgaccagcgntcgtcgaacacaactggagccggcagagcgggtanacgccaatgagatccacatctactccacgcgctgtggacaccacgtgggatgtactggggcttatggaacagacagtaggggcggcgcgcggcccctcgcctgccgattgtactgcccggtgctaagggta

SEQ ID NO: 173060 - DNA, 656 bp, Homo Sapiens
atatgtattagttaaagtatgagtatatatgggattcatcagcaggtgacatcttgtcttgaccagtaatgagttccagagcactgaggtaaaatcagagtgggtgtgtcagtggtccttgacccaggctcacctatcgaatgggcttcagagcttcagaaacacaccagtgcccagcccgaagcacataagttgagctctgatatgatctgtggcccagcaatgggtagttcttacagctccccaggtgcgttcttctatggcagactgtggtagaaaaccaaatagcttcctccaccttcaggtctccattaagggtgggccttgcccttcacctcagtcaaaacccaccttcaaaaaagatctgagaaatcccctcactaatgtttccaatggcttgttgtatatggactggagcaaagcctttggctaaagagcacttcactcagtttaagatgtttcacactttcaaagctgctggggagagacttttcctcctgacctcaaatcagagggcagcttatgacttatttgcaaataggtcctggctggaggttacctctgacttctggtcctgggtggtagtgcagggtaggagggaaactttccatgagtttgtaagtaatgcctaagggagtacatgagctgtttgtaca

SEQ ID NO: 173061 - DNA, 526 bp, Homo Sapiens
tttggtgtggagaaagaggccagtttaaataggctttcaagggtctagggtcagaaaagcaatagtcactaagctaggtgacctgaaagctttaattttcatgacctggatatgtggtctattgtatatctttttctgaaatggtttgtattcatttaggttagatcaatcagcagatattgggtccggtataccaggtattattttggggtaagctaacaagtacaactcatgtttgcagccttcgaagatgtaacaatctcagttggaaacataagacatacatcacattatacacaaaagtgctatgatatgtacaactgagtggtacagatatgacatggaagatctgggggaggaagttcaaggaaggcaccacaccagaaatgggacctaaattaaggcttaaagaatgagcatggccacactgtcagtgagtgttctttacggtggtaggactatggttgatatttttcttcttcctatcttcctgcctttttcagattttcaatattaaacttgttat

SEQ ID NO: 173062 - DNA, 521 bp, Homo Sapiens
gttggggtggctggagcctatctcagcagcttagggtgcaaggctcggaaccagtcctggacaggacatccactgcagaaagcaatcacacttacacacacagctccacacacaagtaaacatcacgtacacagctgcgggatgtgggaggaaatcaagagtacccagagaaaacccatgcagggatagggagaacgtgtaaactccacagacagttcttcttctcaacattatcttgaaacaacattattcaaggacctgctgtaatctgtatatacatggactttctggctgaaacataaaagagagcaacttattctcaagaaactatatctatggtaacaattctcaatgcttaaaagttttacgttaagcttaatgggaagcactacacatttttaaaaatgtgttgtgtcctttcccagatactaaattggcgtttctttcctaaatcaattttaagaggtgtatctttccccatcttccaggtagtcataactaaaacataacatgtaacattt

SEQ ID NO: 173063 - DNA, 759 bp, Homo Sapiens
atcgctgtctgcttcctcatcctcgtcatccaaggttcctcgagtcaggatcaaatcagaagggtgcagcacaggagataagcggtctttggcagtccctgcagccaaggctacagaacccagatcttttcgaaggcgttccagttgttctctctgctgtaggctctctgcgatggccagtgataaggtcagacgttcatattcaggacgatactccctcttcatattcctcggcagcactggtaacttgcacaaagagttcatctaatccagtacccagaacagcagatgacacccaccaccctgagtgagctgtaaaactcatctaacaccaggctcattgaacgagtcaggttacagacgtatgtagtctcttgattcaaggcatacgtggaaagcctcaaaatcctgcatccattccacctgcaaagctgtggtcaatgatgtcagtttcacttcatgaccacaatgaaaggcagcttggttttgtataagatgctgcaggcatagagcatgttggacatgaaggtcactgggttggtacttctcgatgtgtccattacatagatgacaactgttggaaatgaggatgcaagggcttcagtgataattgtcccagaagctgaccaggtgaatacctcaatctgtccaggtgtcaatcaacacatatttggacatgttctgggccttctcaataaatttcatcacctgatcaaatctggtagcaaagagattgagtgaggtcactatgccgccatt

SEQ ID NO: 173064 - DNA, 1167 bp, Homo Sapiens
gggtgatttataagaaacccttagctgaatgcagggtggggagaacgaaagacaaaagcatcttttttcagaagggaaactgaaagaaagaggggaagagtattaaagaccatttctggctgggcagggcactctcagcagctcaactgcccagcgtgaccagtggccacctctgcagtgtcttccacaacctggtcttgactcgtctgctgaacaaatcctctgacctcaggccggctgtgaacgtagttcctgagagatagcaaacatgcccaacagtgagcccgcatctctgctggagctgttcaacagcatcgccacacaaggggagctcgtaaggtccctcaaagcgggaaatgcgtcaaaggatgaaattgattctgcagtaaagatgttggtgtcattaaaaatgagctacaaagctgccgcgggggaggattacaaggctgactgtcctccagggaacccagcacctaccagtaatcatggcccagatgccacagaagctgaagaggattttgtggacccatggacagtacagacaagcagtgcaaaaggcatagactacgataagctcattgttcggtttggaagtagtaaaattgacaaagagctaataaaccgaatagagagagccaccggccaaagaccacaccacttcctgcgcagaggcatcttcttctcacacagagatatgaatcaggttcttgatgcctatgaaaataagaagccattttatctgtacacgggccggggcccctcttctgaagcaatgcatgtaggtcacctcattccatttattttcacaaagtggctccaggatgtatttaacgtgcccttggtcatccagatgacggatgacgagaagtatctggggaagggacctgacccctggaccaagccctatagctatgctgtgggagaatgcccaggacatcatcgcctgtggctttgacatcaaccagactttcatattctctgacctggactacatggggatgagctccagttctacaaaaatgggggaagattcaaaagcatgttaccttcaaccagtgaaagggattttccgctccctgacagcgactggattgggaagaataagttttccgccatccaggtggttccctccttcaacaacttattcccccagatctttccaaaaag

SEQ ID NO: 173065 - DNA, 458 bp, Homo Sapiens
gaagaaaaaacggaagcacaaatcttccaagtcaaatgagggttctgactcagagtgacaaggatgtgacttgttcaacattctcttctcaaacactgaccaaggaacagaggaagatgcagtcagagaaagcagcaggatagagacgccgagagaggagtatatgtgggtcacagcagtgagctcccacccgccttgcagtgaagatgtgaccccaggagagggagatgtctccttccaggtgctagctctggacagcagctgattttaggcaggaaagtttcttcatcgtagtcctccctgctggtcacatgagtttacgattcctttgaagtgtctcccacagggtggcaggactgggagaatctctgaggcgtgtcttccaggccctcccacagcttgtgccctccacagtgtggactcaggtcccatagacatcaggctggagtcttctctgt

SEQ ID NO: 173066 - DNA, 332 bp, Homo Sapiens
cacagaaggtgggcaggctggggctgagcaggagatgatgaatttcatgtagacaggtgtgatgtttgaggcgcctgtgggacattcatgagaggtgtctatgggctccagggctcgggctagagaaacgcatgtgggagacatcttacagctgatgtttgaaggatgggcttgcgtgaggctctctagaaacatgatgaacagcgagaaaggagaaggggtcatggacaccaccctggggtacactccactggagggaggctggggcggagaagccaacaaaggaatgtaaagagggattggatcatattcccgtcctacagccaaataat

SEQ ID NO: 173067 - DNA, 838 bp, Homo Sapiens
tgtctgaaggaaagctgtgggaccatccatggcaaccccggtagtatggctgggttctagcagtagccgtctgtgtggccggtgggggacctgcggtcggagatgggagggccagtctgcacccaagaggtggaagaggacgggctttaggctggaagcgccttagaggagccatttttccaggatgcctggtttgcttttatgtgaaccgacagagctttacaacatcctgaatcaggccacaaaactctccagattaacagaccccaactatctctgtttattggatgtccgttccaaatgggagtatgacgaaagccatgtgatcactgcccttcgagtgaagaaggaactggatgcatttcagccataccccattgaaatcgtgccagggaaggtcttcgttggcaatttcagtcaagcctgtgaccccaagattcagaaggacttgaaaatcaaagcccatgtcaatgtctccatggatacagggcccttttttgcaggcgatgctgacaagcttctgcacatccggatagaagattccccggaagcccagattcttcccttcttacgccacatgtgtcacttcattgggtatcagccgcagttgtgccgccatcatagcctacctcatgcatagtaacgagcagaccttgcagaggtcctgggcctatgtcaagaagtgcaaaaacaacatgtgtccaagtcgggggattggtgagcccgcctgctgggaatggggagaaagactaatcccttggaaaatttcccatcacaaaaacatccatggggatcccgcctctaactggatcctttctccccaaaggcccccacccct

SEQ ID NO: 173068 - DNA, 139 bp, Homo Sapiens
gcctactactatacggctgcgagaagacgacagaagggtactgaagagcctcacctgggggcattttgtgggtggagggccagagtgtgtatacccaggcttgtctggaaggagaaggcctttgctgcctgaaagtcac

SEQ ID NO: 173069 - DNA, 401 bp, Homo Sapiens
cacatccggatagaagattccccggaagcccagattcttcccttcttacgccacatgtgtcacttcattgggtatcagccgcagttgtgccgccatcatagcctacctcatgcatagtaacgagcagaccttgcagaggtcctgggcctatgtcaagaagtgcaaaaacaacatgtgtccaaatcggggattggtgagccagctgctggaatgggagaagactatccttggagattccatcacaaacatcatggatccgctctactgatcttctccgaggcccaccgaagggtactgaagagcctcacctgggggcattttgtgggtggagggccagagtgtgtatacccaggcttgtctggaaggagaaggcctttgctgcctgaaagtctcatgtcgaa

SEQ ID NO: 173070 - DNA, 1147 bp, Homo Sapiens
  misc_feature (1063)..(1063): n is a, c, g, or t
ggggtcggaaaggaaagctgtgggaccatcctggcaaccccggtgtttggctgggttctagcgtagccgtctgtgtggccggtgggggacctgcggtcggagtgggagggccagtctgcacccaagaggtggaagaggacgggctttaggctggaagcgccttagaggagccatttttccagcaggatgcctggtttgcttttatgtgaaccaacagagctttacaacatcctgaatcaggccacaaaactctccagattaacagaccccaactatctctgtttattggatgtccgttccaaatgggagtatgacgaaagccatgtgatcactgcccttcgagtgaagaagaaaaataatgaatatcttctcccggagtctgtggacctggagtgtgtgaagtactgcgtggtgtatgataacaacagcagcaccctggagatactcttaaaagatgatgatgatgattcagactctgatggtgatggcaaagatcttgtgcctcaagcagccattgagtatggcaggatcctgacccgcctcacccaccaccccgtctacatcctgaaagggggctatgagcgctttctcaggcacgtaccactttctccgggacccaaaagatcatcctggatgcctcaggaactggatgcatttcagccataccccattgaaatcgtgccagggaaggtcttcgttggcaatttcagtcaagcctgtgaccccaagattcagaaggacttgaaaatcaaagcccatgtcaatgtctccatggatacagggcccttttttgcaggcgatgctgacaagcttctgcacatccggatagaagattccccggaagcccagattcttcccttcttacgccacatgtgtcacttcattgaggtcctgggcctatgtcaagaagtgcaaaaacaacatgtgtccaaatcggggattggtgagccagctgctggaatgggagaagactatccttggagattccatcacaaacatcatggatccgctctactgatcttctccgaggccccaccgaagggtactgaagagcctcacctgngggcattttgtgggtggagggccagagtgtgtatacccaggcttgtctggaaggagaaagccttttgctgctgaaagtcaaaaa

SEQ ID NO: 173071 - DNA, 670 bp, Homo Sapiens
  misc_feature (199)..(256): n is a, c, g, or t
  misc_feature (404)..(404): n is a, c, g, or t
  misc_feature (408)..(408): n is a, c, g, or t
  misc_feature (411)..(411): n is a, c, g, or t
  misc_feature (413)..(414): n is a, c, g, or t
  misc_feature (461)..(461): n is a, c, g, or t
  misc_feature (575)..(576): n is a, c, g, or t
  misc_feature (579)..(579): n is a, c, g, or t
  misc_feature (585)..(585): n is a, c, g, or t
  misc_feature (621)..(621): n is a, c, g, or t
  misc_feature (626)..(627): n is a, c, g, or t
  misc_feature (640)..(640): n is a, c, g, or t
ggtgctcgggctcgaacttcagtatcgctggatcatgctatcaccagttgatgaacatgaagcaggagcggcagcagctcatcctgatgctagaaccgacaccgcccacctgcatcgtccggaccgacagtgtcaagacccccgagtcagaaggcaacccactgctcgagcagctcgagaagaagtgaccatgggctgnnnnnnnnnnnnnnnnnnnnnnnnnnnnnnnnnnnnnnnnnnnnnnnnnnnnnnnnnnggggccccagatggcccttcctttggtgcatgaaaaactgtacaatgaggttcagcacagccagcatcagccgagcttttttgtgaaactcagatcagccacccaggaggaagagcgggctgaggaaacccagagggaccaagcgctngagnacncnnaaagttgaccctcgggtagggttgtcctgcctggggccccacttganggaggcaggacagaggcaccgaggccagggagacgcccaacgaggcagccctgggcttcttctctggcctcttcaccagggcacccatccaaggaacctccgaacagccaggannagncatganttgcaaccaaaacgcggctgaggatggaactcagantgaanntgcaacccacctncccccagccctgccccttgccctgatgcga

SEQ ID NO: 173072 - DNA, 1016 bp, Homo Sapiens
  misc_feature (491)..(491): n is a, c, g, or t
  misc_feature (758)..(758): n is a, c, g, or t
ggcctgctttctcgagcgctcctgcaccgtggggtggcggagccgggggactgcatggaacccgggacgcccccgcggggagaggagcgcgagcggccgcgggaggagggcgcccaaggcggcgggggaggttaaggctggcctgccactcctcctgctatgatgcctgggcagatcccggacccttcggtgaccgcaggctccctgccagggcttggccccctgaccgggctccccagctcggccctgactgtggaggagctgaaatacgctgacatccgcaacctcggggccatgattgcacccttgcacttcctggaggtgaaactgggcaagaggccccagcccgtgaaaagtgagctagatgaggaagaggagcgaaggaaaaggcgccggaagaagaacaaagtcgcagcagcccgatgccggaacaagaagaaggagcgcacggagtttctgcagcgggaatccgagcggctggaactcatganacgcagagctgaagacccagattgaggagctgaagcaggagcggcagcagctcatcctgatgctgaaccgacaccgccccacctgcatcgtccggaccgacagtgtcaagacccccgagtcagaaggcaacccactgctcgagcagctcgagaagaagtgaccatgggctgggaggaggtggaggaggaggaagaagagaaggaaaagagaccaagagagaggacgagggggggccccagatggccccttcctttggtgcctgaaanactgtacaatgaggttcagcacaacccggaatccacccaagctttttttgtgaaactcagaatcgcccacccacggaaggaagaccgggccttgaggaaaccccaaaggggacccaagccgcctgaaaaccaaaaatttgaaccctccccgggtaaggggtttggtcctcttgcccctggggggcccccccacttttgaaaagagagggcccagggacaagaaaaggggcacccccgcaaggggccccactggggaaa

SEQ ID NO: 173073 - DNA, 809 bp, Homo Sapiens
ggggtacgcgggcaagatggaggcgactacggctggtgtgggccggctagaggaagaggcgttgcggcgaaaggaacggctgaaggccctacgggagaaaaccgggcgcaaggacaaggaagatggggagccaaagaccaagcatctcagagaagaggaggaagaaggcgagaagcacagggaacttaggctgcggaactatgtcccggaggatgaggacctgaagaagaggagggtgccccaggccaaaccggttgcagtggaggagaaggtgaaggagcagctggaggccgccaagcccgagcccgtcatcgaggaggtggacctggccaacctcgctcctcggaagcctgactgggacctcaagagagatgtggccaagaagctggagaaactaaaaaagcggactcagagggccattgccgagctgatccgtgaaaggctgaaaggccaggaagacagcctagcctctgcagtggatgctgccaccgaacaaaagacctgtgactccgactgaggcatgccctgccccaccactcgcccatcaggcctgtcctgcaggggatggtcttgggcagggatgggggctaggcttgccatcacctccagtttggcttctgagcagagactccctgcccatcaagtctgaaacccccatggatgaggtcagctccttgtctgctgggtggcccctgccatttctgaatggaggcagaaacagcaacaactctgggcgtgcctgtgtctgcacatgttggatgtacacatgtctgaatatatgtatatatttttgaacttttcccaaaaac

SEQ ID NO: 173074 - DNA, 351 bp, Homo Sapiens
ggggggcaagatggaggcgactacgggtggtgtgggccggctagaagaagaggcgttgcggggaaaggaacggctgaagggcctacgggcagaaaaccgggcgcaaggacaacgaagatggtcttgggcagggatgggggctaggcttgccatcacctccagtttggcttctgagcagagactccctgcccatcaagtctgaaacccccatggatgaggtcagctccttgtctgctgggcggcccctgccattctgaatggaggcagaaccaccaacaactctgggcgtgcctgtgtctgcacatgtggatgtacatatgtctgtatatatgtatatattttgaactttct

SEQ ID NO: 173075 - DNA, 675 bp, Homo Sapiens
  misc_feature (88)..(88): n is a, c, g, or t
  misc_feature (95)..(95): n is a, c, g, or t
  misc_feature (141)..(141): n is a, c, g, or t
cttaaaaggattcccggtaagatttccaagaaacgggttccaccaagcatgtgtacacggccggcaagggctgttttaaaggtgtggnacgtggnccagcctggggccaagacgcccgtggcccagctcgacttgcttganccgagacaactacattcgttcctgcaagttgctgccggatggccggagtctgatcgtggcggtgaggccagcaccttgtccatttgggacctggcggcgcccaccccccgtatcaaggccgagctgacttcctcagccccagcctgctacgccctggccgtcagccccgacgccaaggtttgcttctcctgctgcagcgatggcaacattgtggtctgggacctgcagaatcagactatggtcaggcagttccagggccacacggacggcgccagctgcattgatatttccgattacggcactcggctctggacagggggcctggacaacacggtgcgctgctgggacctgcgggagggccgccagctgcagcagcatgacttcagctcccagattttctccctgggccactgccctaaccagggactggctggcggtcggaatgggagagtagcaacgtgggagatcctgcacgtccgcaagccggagaaataccagcttgcaccttccacggaggagcttgcgtgcttgttc

SEQ ID NO: 173076 - DNA, 918 bp, Homo Sapiens
  misc_feature (588)..(588): n is a, c, g, or t
  misc_feature (655)..(655): n is a, c, g, or t
cctgttatgccctggccattagccctgacgccaaagtctgcttctcctgctgcagcgatgggaacattgctgtctgggacctgcacaaccagaccctggtcaggcaattccagggccacacagatggggccagctgcatagacatctccaatgatggcaccaaactctggacagggggcctggacaacacggtcagctcctgggacctgcgcgagggccgacagctacagcagcacgacttcacctcccagatcttctcgctgggctactgcccaactggggagtggctggctgtgggcatggagagcagcaacgtggaggtgctgcaccacaccaagcctgacaagtaccagctgcacctgcacgagagctgcgtgctctccctcaagttcgcctactgcggcaagtggttcgtgagcactgggaaagataaccttctcaacgcctggaggacgccttatggagccagcatattccagtctaaagaatcctcgtctgtcttgagttgtgacatttcagcggatgacaaatacattgtaacaggctctggtgacaagaagggccacagtttatgaggtcatctactanacaagaactccagcagggctgtcaaactctgggagaaaccgactcggctctgacagggagacccccnagcgaggggccccgaagatggcggaggatgggccgcaggcagccgagcgttcagggctgcgctccggccggctgagagggcacgtgcccccgtcacagtctggactcctggggcctggattgatgtgtctcacagaactcggaaggggttctggttcctcttcctccccctgaaccatgctgggcagttgctaacaaatagaatttaattggaaggccttattggctcccggttccccccacaaaggccattctattgtcggt

SEQ ID NO: 173077 - DNA, 1958 bp, Homo Sapiens
ttcgctcgcgcctaggttggcgcgggctgggaggtgttccagccctttaagatgttgcgcgtggtgagctggaacatcaatgggattcggagacccctgcaaggggtggcaaatcaggaacccagcaactgtgccgccgtggccgtggggcgcattttggacgagctggatgcggatatcgtctgtctccaggaaaccaaagtgaccagggatgcactgacagagcccctggctatcgttgagggttataactcctatttcagcttcagccgcaaccgtagcggctattctggtgtagccaccttctgtaaggacaatgctaccccagtggctgctgaagaaggcctgagtggcctgtttgccacccagaatggggatgttggttgctatggaaacatggatgagtttacccaagaggaactccgggctctggatagtgagggcagggccctcctcacacagcataagatccgcacatgggaaggtaaggagaagaccttgaccctaatcaacgtgtactgcccccatgcggaccctgggaggcctgagcggctagtctttaagatgcgcttctatcgtttgctgcaaatccgagcagaagccctcctggcggcaggcagccatgtgatcattctgggtgacctgaatacagcccaccgccccattgaccactgggatgcagtcaacctggaatgctttgaagaggacccaggccgcaagtggatggacagcttgctcagtaacttggggtgccagtctgcctctcatgtagggcccttcatcgatagctaccgctgcttccaaccaaagcaggagggggccttcacctgctggtcagcagtcactggcgcccgccatctcaactatggctcccggcttgactatgtgctgggggacaggaccctggtcatagacacctttcaggcctctttcctgctgcctgaggtgatgggctctgaccactgccctgtgggtgcagtcttgagtgtgtcctctgtgcctgcaaaacagtgcccacctctgtgcacccgcttcctccctgagtttgcaggcacccagctcaagatccttcgcttcctagttcctctcgaacaaagtcctgtgttggagcagtcgacgctgcagcacaacaatcaaacccgggtacagacatgccaaaacaaagcccaagtgcgctcaaccaggcctcagcccagtcaggttggctctagcagaggccagaaaaacctgaagagctactttcagccctcccctagctgtccccaagcctctcctgacatagagctgcctagcctaccactgatgagcgccctcatgaccccgaagactccagaagagaaggcagtggccaaagtggtgaaggggcaggccaagacttcacaagccaaagatgagaaggagtaacagacctcaatctggaagtctgtgctggcggggcccttgcgcacacccctctgtgggggccacagggagccatgtgtgatgcgtactgtgaagaagccaggacccaacttgggccgccgcttctacatgtgtgccaggccccggggtcctcccactgacccctcctcccggtgcaacttcttcctctggagcaggcccagctgaaccaatggaggcctggggacatctggcatggtcacccctgcacatgatctgaggccagctccccttccctgagctgcctcctgcttctccctcaaagtctcctacccttctcttcctcttgtaagccctctcttcctcgctttccttcctacctagctccttgtgggtgagcttcttgtgccttaatcctgtgaaccagcccttacaccactttccaccttcctgtccgaagttacacggacactagctgccccaggaaggtgctgtgaatttaaattcacttctgtctttgcctggacagtgtattgggccttaagtacggcccgggtattggctaaaacacaaaaaag

SEQ ID NO: 173078 - DNA, 195 bp, Homo Sapiens
gtgatccacattctagagaaatttgtaggttttaatttcttttctcttggtcctctcttcatgtataatggttgcttttaacagctgttcgctgatgtggtcctgctctgtcccagtctagcagctttagtgtatggaaaaattgaactaggaattgagttttgaagaaataaaggtgtaagagcagacatcaag

SEQ ID NO: 173079 - DNA, 840 bp, Homo Sapiens
cgctgtcccgctcttgctacggtggcctggaggagtggcgaaaccggaacagagaatttatcacttctgggactcacagtcgtgatgtctttcaagagggaaggagacgattggagtcaactcaatgtgctcaaaaaaagaagagtcggggacctcctagccagttacattccagaggatgaggcgctgatgcttcgggatggacgctttgcttgtgccatctgcccccatcgaccggtactggacaccctggccatgctgactgcccaccgtgcaggcaagaaacatctgtccagcttgcagcttttctatggcaagaagcagccgggaaaggaaagaaagcagaatccaaaacatcagaatgaattgagaagggaagaaaccaaagctgaggctcctctgctaactcagacacgacttatcacccagagtgctctgcacagagctccccactataacagttgctgccgccggaagtacagaccagaagcccctggtccctctgtctccctttcccctatgccaccctcagaggtcaaactccaaagtgggaagatcagtagggaacctgaacctgcggctggcccacaggccgaggagtcagcaactgtctcagcccctgcacccatgagccccacaagaagacgagccctggaccattatctcacccttcgaagctctggatggatcccagatggacgaggtcgatgggtaaaagatgaaaatgttgagtttgactctgatgaggaggaaccacctgatctccccttggactgatacccttttcccattcattcacaaataaattacaatgggtgcttgagaaacaagaaacaaaag

SEQ ID NO: 173080 - DNA, 912 bp, Homo Sapiens
  misc_feature (497)..(512): n is a, c, g, or t
  misc_feature (795)..(803): n is a, c, g, or t
cacggggaaaggaaaagcctgaggtgacagacagggcaggtggtaacaaaaccgttgaacctcccattagccaagtgggaaatgtagacactgcttcagaacttgagaagggggtgtctgaggctgcagtcctaaagccttgtgaagagttacctgctgaggctacctcatccgttgaacccgaaaaggatttctggctcagcagcagaggctcctcgttagagactggaatttgtgaaaatgtgacagtgacatcttcctggagtgtagagcttgaggtgtacagatgctgtattatacccgctcccgctgtactgcagccccgcgccagctggtggggaactgtaagcaatttgattgcttcccttctatttaaaaatagccacaaaataacaaaaaatactgaaaatatgaataaatattaccctttttgctgtaactttttaaaagttttgactttaaaaagtttacaaatcgtaattagaagtgctctctannnnnnnnnnnnnnnnaatttaagacaaggtaacggtgaaagctcctccaaacaatagggatgtttttaataaactccattttcgtaacaaactttaaaaaataaaaccaccccccccacgtaattcctaaagcgcatcccccctcttcctcaccctcccccttatcaacctctccaaaccactcccttgccaacctcagccaccactatgcgctcgtgcacaataaacgctacctcctcagtaaatatcccctcggcgggtgtcccccgccgctccttggaaaatttctcttttaaannnnnnnnntttcgggggcccgtcgcccccctttatggtataacacaacacgggggtcgcaattttgtttccccacagagaaatccccggcgaattctaaactagggccctggtagct

SEQ ID NO: 173081 - DNA, 881 bp, Homo Sapiens; identical to SEQ ID NO: 15366
  misc_feature (631)..(650): n is a, c, g, or t

SEQ ID NO: 173082 - DNA, 818 bp, Homo Sapiens; identical to SEQ ID NO: 15367
  misc_feature (676)..(722): n is a, c, g, or t
  misc_feature (770)..(770): n is a, c, g, or t

SEQ ID NO: 173083 - DNA, 899 bp, Homo Sapiens
  misc_feature (888)..(888): n is a, c, g, or t
cagtggttatgggaaggttggaggggtggtatttttgggttaaggtggagtggggaggcaggtatcgggttaggggggaattgaagggtggagttttgggtgtcggtttgtgtggggttcgtggtcctgttggcttttggtggttgttgtttgtgggtcggaggcagttgggttgcggtctggtgcggtggtggcgctgggtgcaggttgggtcgcgggtcgtcgtaggcatctgagggttgggctgctggtttggcctcgggcctggtaaggggtagcgaggcaggcgagtgcaggtggggccggggccggggtggggctcgcctgccctcactccagggactgtagcatcagcagctgtttcagcaccttcgtctggctggtctctcggatttcgccagccaggaacatctcgtccacgagccgtgtaaaccttgtagaagttgaacaccaggtccagttcacagacattgtggaaatattcgtttaagacctccacgaagttgtgaatggcctccaggtaagccaggttgttgtcattgacatccacacagatgcagaagtagaggccagcatagcggcggtaaatgatcttaaagttccggaactccacaaagttggtgtgtttggcgtctcggacggtgaccacggcatgcacctcctcgatcagcttctgtttctcatcatcatcaaactgcatgtaccacttggccaggcgcgtcttgcctgcccggttctggatgaggataaagcggatctccaggtcctctctccttttacagcgctttcccagacccctaagtttcattccctacagttgcctccttttggtttcctgtgccaggtctcttcttgagatcatccctctctcacaggcagtctcctgcncctgtctcaac

SEQ ID NO: 173084 - DNA, 864 bp, Homo Sapiens
gaaatggctgcaagtgcaccctgagccggagctgcccagtcgccgcgggaccggggccgctggggtctggacgggggtcgccatgatccgctttatcctcatccagaaccgggcaggcaagacgcgcctggccaagtggtacatgcagtttgatgatgatgagaaacagaagctgatcgaggaggtgcatgccgtggtcaccgtccgagacgccaaacacaccaactttgtggagttccggaactttaagatcatttaccgccgctatgctggcctctacttctgcatctgtgtggatgtcaatgacaacaacctggcttacctggaggccattcacaacttcgtggaggtcttaaacgaatatttccacaatgtctgtgaactggacctggtgttcaacttctacaaggtttacacggtcgtggacgagatgttcctggctggcgaaatccgagagaccagccagacgaaggtgctgaaacagctgctgatgctacagtccctggagtgagggcaggcgagccccaccccggccccggcccctcctggactcgcctgctcgcttccccttcccaggcccgtggccaacccagcagtccttccctcagctgcctaggaggaagggacccagctgggtctgggccacaagggaggagactgcaccccactgcctctgggccctggctgtgggcagaggccaccgtgtgtgtcccgagtaaccgtgccgttgtcgtgtgatgccataagcgtctgtgcgtggagtccccaataaacctgtggtcactgcctgtaagaaaaaaacaagggggggacaaaagatacacgaaggggccaagtacgcgtacgaggtattgcacaagggtc

SEQ ID NO: 173085 - DNA, 448 bp, Homo Sapiens
agaggcgctgcgggtggcccggggtcacctgacccggctcacaggtggagggggtaccgaggagatcctggacatcatcttccaggacttctgtgtgggcaagtgacgggatccagggaagtcgcacccaagctgcgtggagacccaggagcctcgggggatctggaaacagtttaggccaattgggattctcattcgcctgggaaagaacttgattctcaaatagtgaagcaacacagctgagaggtagtgagatccctgcagggactccctggagattcaggccctggaatggggctgaatggaggtcccgttcgacccttgatgctggggcatccgggttgggatggagataggaggatctcagtatatttgtttcgtagttttttatttattttgcaaataccaaaggaatgtaaaaaaaactcaggtgatctagaagtgttta

SEQ ID NO: 173086 - DNA, 300 bp, Homo Sapiens
aaggtcggggggatgtcagggtcattccagtgcccagggccggccactggctgcagtatgtcctggtgctccacgaaccaattcaggatggagagcacgctccaccaggagtcctggatgtcatcatagttacgccagaggttgcagatgtccgccagcagactgtagttcacccttggggggaggccgccttcataggctggccagctgcaggagaaggcgatggggcggcctgtggcattcagggcagcagccatcttggggtacacctgggcccgctactcggggggaagaagcagg

SEQ ID NO: 173087 - DNA, 1268 bp, Homo Sapiens
aaggtcgggtggtgagcacttggaatggctggatctgcttcttttcccggtcccaagccaacggcttcggtgtccaggatgaaggatgtgaccgatgggagtttaatcttggggatgcggctgatgatgtccgggtacttcccagtgttgtcttcctgattcctgctgaagagcttcacctccccgccttccagggcgtggatctgtgccctctgcccgtcatatttgtattcgcaggtgaaagctgcctcctcaaagcgtttcaggacctcgctgatgccccgggtgggatgggccaacattggtttcaggggaatacctgggctcagcttgcagtgcttccgggagacgttccagccgttgctccagcagcacggggataattcggtccaggtcgggaacctcgcagaacgtctgcttcaggatcatgccttgctcctccagccacgtctgtgctggcctctgctgtcttgcccttcccagcatccaccatggctggtgggaattcttggcccgggggcgtgaggctcactgcctgggagagggcagccagcaccgactgctctgccagcccaaaggcgcagccgtccgctcagggacctagcgatgaaccgggcttctgagtggcggcaggccacaaagaggcctttgatgatgtctatcttcttggctgtggaagcactgccagtgagcctggcgatgtcgcggaacttgctgaagaccccggaggcagtgagcggaggtggtggcagcatgagcctctgggtgctgcggctgttctcggccaccagccccacgtcgcctttctcggctgcctcagcccggacggactccagctgccgacctgtggcctgggccactgccttgagaaggacaccatcacccacgccaagctccaggccctgctggggtggcccaaggtggttgaggctgaggtagaggacagggaggaggtctggaggcgacagggccaccacggagcgcagcaagttgctcagcgtctccaccatccggagccgagcagacacctcctcgatcttctcaaacgtccgggccacagccaggtaaggaaccttctggcccaggtttccagcaggcatcttccacgggatgatagttgttcttggcaggattgtaaccagatggatccaggggtccctcagcagctccctcctttcctggagcacctggctcctcttccttcacttcttttttgactgctggcttccggggggtgaagaagctgctgagcgtcttgggagctctgc

SEQ ID NO: 173088 - DNA, 244 bp, Homo Sapiens
agctcggtactcatgatcgctgggtcacaccttgcacaggggcaaggaggcctatgaacaagaggtcttatagcgggtaaaggaatcggaaatacagtacctgaaacaggagattagctcccgaaaggatgaagtctgcaagacggcagctgcgggtacaagaagatacccatagtgcataagtatcaatagattatgtacacagagactcagtcatcgccgataggaggagggatgacagtga

SEQ ID NO: 173089 - DNA, 879 bp, Homo Sapiens
  misc_feature (95)..(95): n is a, c, g, or t
acggaaggtccaccccagccagagagttggtgtgggacaaccccagaaagccagcctcacgcaattccatgccccacagttaacgatgacaacanccggcaattaataataataataataaaacaaaggtacaggtgaaaagcagcgcttggggtgtgctgctgcaagctggggaaggcgcgtgctcaacttggatgggacacacctagtctttcttcaagtccctggattcaaagagcttcaaccgttcttgcaccgtcaggccttccttcagactcttggacctgatgtttctgagtgccgggtgacacaggatctgtctttcttcaagaagtcagggttgcttttagatttcattatatcatatccggacaccgtggcactgtcaggggacttctcccccagtgcttccgttgcagccttgagctgctccttcaacctgctgatgtcacagtcagccttagccttcgcgatgctgagctctgtgtagatgtctttgtacttgtcacttgcgtacttcttgtcccgcagtgccgtctgcagctcatccttgagggagctaatctcctgtttcaggtactgtatttccgattcctttacccgcaataagacctctagttcataggcatccttgccctgtgcaaggggtgacccagtggcctccccaccgccgtccccagtcagcagcgtccgcaaccgtgtgatctctgcagccaggcggttgttcagctcctggttgtgggcattgagctcctggttctcacgctggcactgccgcagggcctgccgctcggcctccagcgcctgggccagatgggcattctccaggcacttctgcgagtactgctccgagaggacctccagttcccgctgcaccga

SEQ ID NO: 173090 - DNA, 340 bp, Homo Sapiens
  misc_feature (195)..(214): n is a, c, g, or t
  misc_feature (305)..(305): n is a, c, g, or t
  misc_feature (330)..(330): n is a, c, g, or t
cctgtgtcacccggcaactcagaaacatcaggtccaagagtctgaaggaaggcctgacggtgcaagaacggttgaagctctttgaatccagggacttgaagaaagactaggtgtgtcccatccaagttgagcacgcgccttccccagcttgcagcagcacaccccaagcgctgcttttcacctgtacctttgttnnnnnnnnnnnnnnnnnnnngctgttgttgtcatcgttaactgtggggcatgggaatgcggtgaggctgggcttctggggttgtccacaccacttctctggtgtgttgganttcctgttgttctttcatcaaaggntttttccgtg

SEQ ID NO: 173091 - DNA, 997 bp, Homo Sapiens
cacagagactaaattctagtcagagtgaagacccatataaaaggccggctgatggtttaaaggaagtaactacatggagtctaatcgagacattcatgagttacatctcattattagccttagtaatgtaagaaaacaattctcaacaaaactggagtccacagttgtcaagtatgctttctcaggcacgggtaggtaaaagtctggagaaatgggttctctccatgcccaatgacaaagcaagacggtcctaggtttgaggttaagagcaggtcccattgccgggcggtatccgcagctcacagctgagtttagcagtggaatcgagtggagaatttgggagatacaggcacagtcagaggctggtcacttgactttatctccagacctggtacttgcgtattggatttgccttatgcaccagttctctccgtagcctggccagctcctcttttttctgctcttcctcctgtagtctggcctcctccaactgctgggctttctgggcttctacctcagccattctcttctccagctcctgccgctctttggctctcttctcagtagccagctgaaaaggttcctgaactagagaaccagaaaggccctcagcaactgatttcttctctttcttgggaacaaagggctcctgagagatgacggtgtttggacgagccttgaaacaagctgcttctttctgctgtctcagttcttcttccagctggtgcttccaagtctgtgccttcagagcacctcttctgtcagtctccaagcagaaaggttcaatctgggtcacattctttaccttcttctctggcaggttaatggtgtcaaaatgaggcaagggaagtgccttgaacttgggcacctcccctttctgcagttcttttattttcttctccttctgtaactgacgttctttgtctcgagaatcaaacgagaaagggcatatttccacagttcttgcctctgggatttggggcttaaaaggcacccc

SEQ ID NO: 173092 - DNA, 776 bp, Homo Sapiens
  misc_feature (85)..(95): n is a, c, g, or t
  misc_feature (222)..(238): n is a, c, g, or t
  misc_feature (240)..(240): n is a, c, g, or t
tcgcagcaagtgctgtgtttattttccaaacaattttattgaaatgttccaagagtacatgggcagcacaaatgtatgaacaggnnnnnnnnnnntcacatgtacaataattttttaaaagtgaaggttaatcttgggagataacagttcccctctccctccccctgcagatttccagcgtttccattaaggttaagtaagcctctacaaacctagcatttnnnnnnnnnnnnnnnnnanaggaatacaagatcttttgcaaataacaaaaacaaaaaatggcataaaggaaagagaaatgtcttcctgctcagatgggactcttcctaggcacctaattaggaggcgtgctgagcagtggagaaacacaacttcagagtgtaagggtatggaccatttgggtttttcatctggtaatggttcaggaagcccagagtctccagggcatcgctcttggattcccactccagcagtccagaggagctgcgctcacttttgcctgagaatactttcacagaagatggccgcttcactcccagctcatcgcagatctcaaagaagttctcctcggtcacctccagcggggcgttgaagaagtgcagcacgttgctggggtgctggatgcggttcttggctgcctgctctggggtggagaaccgattgttccgggattcactgaagtctttgtaactgcaagacccgtcttccaacccgtatgattgaccaggcatgatggctggctgcttggagacacagacattcagcttctgcccaaa

SEQ ID NO: 173093 - DNA, 1139 bp, Homo Sapiens
ggggcgctcttttccacgtgcgaaagccccggactcgtggagttgtgaacgccgcggactccggagccgcacaaaccagggctcgccatgaagccaggattcagtccccgtgggggtggctttggcggccgagggggctttggtgaccgtggtggtcgtggaggccgagggggctttggcgggggccgaggtcgaggcggaggctttagaggtcgtggacgaggaggaggtggaggcggcggcggcggtggaggaggaggaagaggtggtggaggcttccattctggtggcaaccggggtcgtggtcggggaggaaaaagaggaaaccagtcggggaagaatgtgatggtggagccgcatcggcatgagggtgtcttcatttgtcgaggaaaggaagatgcactggtcaccaagaacctggtccctggggaatcagtttatggagagaagagagtctcgatttcggaaggagatgacaaaattgagtaccgagcctggaaccccttccgctccaagctagcagcagcaatcctgggtggtgtggaccagatccacatcaaaccgggggctaaggttctctacctcggggctgcctcgggcaccacggtctcccatgtctctgacatcgttggtccggatggtctagtctatgcagtcgagttctcccaccgctctggccgtgacctcattaacttggccaagaagaggaccaacatcattcctgtgatcgaggatgctcgacacccacacaaataccgcatgctcatcgcaatggtggatgtgatctttgctgatgtggcccagccagaccagacccggattgtggccctgaatgcccacaccttcctgcgtaatggaggacactttgtgatttccattaaggccaactgcattgactccacagcctcagccgaggccgtgtttgcctccgaagtgaaaaagatgcaacaggagaacatgaagccgcaggagcagttgacccttgagccatatgaaagagaccatgccgtggtcgtgggagtgtacaggccaccccccaaggtgaagaactgaagttcagcgctgtcaggattgcgagagatgtgtgttgatactgttgcacgtgtgtttttctattaaaagactcatccgtcaaaaaa

SEQ ID NO: 173094 - DNA, 1089 bp, Homo Sapiens
  misc_feature (193)..(249): n is a, c, g, or t
  misc_feature (974)..(982): n is a, c, g, or t
ccccggactcgtggagttgtgaacgccgcggactccggagccgcacaaaccaggctcgccatgaagccaggattcagtccccgtgggggtggctttggcggccgagggggctttggtgaccgtggtggtcgtggaggccgagggggctttggcgggggccgaggtcgaggcggaggctttagaggtcgtggannnnnnnnnnnnnnnnnnnnnnnnnnnnnnnnnnnnnnnnnnnnnnnnnnnnnnnnnttccattctggtggcaaccggggtcgtggtcggggaggaaaaagaggaaaccagtcggggaagaatgtgatggtggagccgcatcggcatgagggtgtcttcatttgtcgaggaaaggaagatgcactggtcaccaagaacctggtccctggggaatcagtttatggagagaagagagtctcgatttcggaaggagatgacaaaattgagtaccgagcctggaaccccttccgctccaagctagcagcagcaatcctgggtggtgtggaccagatccacatcaaaccgggggctaaggttctctacctcggggctgcctcgggcaccacggtctcccatgtctctgacatcgttggtccggatggtctagtctatgcagtcgagttctcccaccgctctggccgtgacctcattaacttggccaagaagaggaccaacatcattcctgtgatcgaggatgctcgaaacccacacaaataccgcatgctcatcgcaatggtggatgtgatctttgctgatgtggcccagccagaccagacccggattgtggccctgaatgcccacaccttcctgcgtaatggaggacactttgtgattttcattaaggcccactgcattgactccacagcctcaaccgaggccgggtttgcctccgaagtgaaaaacaaggcaccaggaaaacatgaaagccgcaggaaccagctggaccctttgagccccattgnnnnnnnnnccaatggccgggggttacctggggaagattttacacggcccatccccccccaaagggggaaatcaaactggcaaaatcccaaccatctctatcagagaaatttgccc

SEQ ID NO: 173095 - DNA, 743 bp, Homo Sapiens
gctatctgtgcgtgatacaggtccttattggtggacctgatggcatgtcttgcccgtgatcaggtcctccattggtggccctgaggcgatgtcttgcccgtgatcaggtcctccattggtggccccccaccacgcccggggcatgcttttggcggggggggctgatgcaaccttttgttccaatagcatcagcttagcctgggttccaacatctcctccctttttctttaaaaaaagaggaggcggaccttaaccagctaggggaggtagaggctgtgctcctcctgagccttaattttcaggcttacaggtaccttttagggaggagaggatttttcgagtaccaacctctatgcaagccagcttacctctcaggagactcgacagtagccttagtaaggactctccttgcagtgccttgctttgcacctagcggtgtccattaccttcgtaaaagcatagtgtcgagcggtatgctgctcccgtaggaggggaaccggctacagtctgccatattctagatcacgtgttgctagttggtgatagtggatttgtatgggctttcccagtagggaattgagctgatccctgattaacgctgttactcgtcttaggatccaaggggcaaaagagaagaacaggatgatagcgaataagggtccaaggaaggggaggaggtaagggagaagtccattgaggccggtgaggaagggattgtctgcaagtgccttgcgtctttgttc

SEQ ID NO: 173096 - DNA, 413 bp, Homo Sapiens
cattggacaatgacaaattgagagcaatcatggaagctgatcctcttacaactacatgagaaggggccaaagaactcagaatcgaccattctacagtcattcagcatttgaagcaaactggaaaggtgagaaagctcggtaagtgggtgcctcatgagctgagcgaaaatcaaaaaaatcattattttgaagtgccgtcttctcttactctacgcaacaacaatgaaccatttctcgatcagattgtgacatgtgatgaaaagtggattttacatgacacctgcgacaaccagctcagtggttagaccatagaagccgctccaaagcatttcccaagagccaaactcgcaccaataaaggtcatgatcactgtttgctggtcagctgctgactgatccactacagatagaccg

SEQ ID NO: 173097 - DNA, 1342 bp, Homo Sapiens
ctagagggccattcacttgggattttcttcactcttactgtccgtcacaccaagatcctatacagcctgtctcagtcagccctcttgctcaattctcatttacacaatgcacaacaatggaggggatcattggagaagtctgggacacaaagtctgccagcattccctctccaatcttgacaggtgttcctatcagggtaggaatgcagggaaggggacagcggtcccgacgttctggatgagagaccacacgacagtctcgacacttcagagataatttgccaaattttatccgctttccacatggaacacaggattcaggtttaataaccgtcttagaaacaaagtcatgcaggcgcatccctccattactctgtggcgtgcccacactgtctgtctcagttcttggctccagctgcctgctgttcagggtggagtcactgttccaaggttgtaaagtacctgttttccttcggctcctggtccaatatggcacagtctcaatagtggacacagcttcgatgggcccgccatcattgggaacagtcactgtagtttttgcaactatggatttcattccccctggtctactgcagagcccaatggaacgagttttctttacaggtccagggggaccatcaacaaaactgtcggctagtagagcgcctcttttctctcttcttcagtttgaaagtcttcaccaaagaagagtcccaatccagtgattcatcagtcttgccaaagctgatatctgataaaatggaaccagattcatcaatggtggatagtcttttgttcccagcattgctgctggatggttggcctctgttgagaaaagccagagctgatttttgctcctcgcttagttgaatgctgccagatgtgtcacacatgagcatctctcgaatcagctgaatctgtcgttccagcttttcgcagtcagcctcagctctctgtctccgtttgatctctacatccacctgattacgtgcatgcttcagcttaacatccagagcacttcgctcagtctctgctttcatcaaaagatccttgtatttccccagctcatggtcagtcctctgccactttttacggaaatcctcaaagtcattcgccaactggataaattggacttcatttccttcactgagaatctccacccggcgcacaagctgctcaaacagattccgcacattcagcatcatagtatccatcctaagtgctacaggacagaaacaggggcaggacattgggtagtcaattcaaatgttgatttcctttggctctcttcagtcagcctggccccacctgggccacccttcacttcactccgcgcctcccc

SEQ ID NO: 173098 - DNA, 328 bp, Homo Sapiens
cggctatctgtcccttccgtgtctcactgtctctggaagcttcagcccatgtgtgtactggtgttcccagccccaccagagccccgtgccgggagctgacagctttcacgcttaaggcacgtgggacctgggtagtcagacaccacttgagcccctgcccacatctgctggtttggggcttcagtggggagctgacagctgtgagcacaccactgtcccctcatccacctcggactgcatggggcacccacttccttctgggtggggcttccatggtaagggggcctgcgtccctgcacactgcgaggactgccttggccacaggccc

SEQ ID NO: 173099 - DNA, 938 bp, Homo Sapiens
aactaaactaattaagggtgatatttataaaacaagggctggtggacaatctgttcagtttactgatattgagactttaaagcaagaatcaccaaatggtagtcgaaaacgaagatcttccacagtagcacctgcccaaccagatggtgcagagtctgaatggaccgatgtagaaacaaggtgttctgtggctgtggagatgagagcaggatcccagctgggacctggatatcagcatcacgcacaacccaagcgcaaaaagccatgaactgacagtcccagtactgaaagaacattttcatttgtgtggatgatttctcgaaagccatgccagaagcagtcttccaggtcatcttgtagaactccagctttgttgaaaatcacggacctcagctacatcatacactgacccagagctaagctttccctatggttccataagacaactagtattcaacaaaccttgtatagtgtatgttttgccatatttaatattaatagcagaggaagactccttttttcatcactgtatgaactttcttataatgtttttttaaaatatatttcatgtatacttataaactaattcacacaagtgtcgtcttagatgattacggaagactatatctagatcatgtctgatctcgcactcgtgacttctccagccctggtctgaatttcttaagggtttataaacaaatgctgctatctattagctgccaagaatgccacttagaactattcgacaattcagactttccacccataacacgatgctcccatgactggcccaataataaccattctaggaagggggttttcgaacttcctgtactgctatataattccactttgcctggacctttgacgcattttgcccacagcaattaacattccaataggcacttaagcacaccacacacacaacaacacgaggc

SEQ ID NO: 173100 - DNA, 1137 bp, Homo Sapiens
  misc_feature (1048)..(1074): n is a, c, g, or t
  misc_feature (1076)..(1076): n is a, c, g, or t
gggcgcttccggtgcttccgtcgctccttgccgggcataatggccgcgcagcgacccctgcgggtcctgtgcctggcgggcttccggcagagcgagcggggcttccgtgagaagaccggggcgctgaggaaggcgctgcggggtcgcgccgagctcgtgtgcctcagcggcccgcacccggtccccgaccccccgggccccgagggcgccagatcagacttcgggtcctgccctccggaggagcagcctcgaggctggtggttttcagagcaggaggccgacgttttctccgcattggaagagcccgccgtctgcaggggcctggaggaatcactggggatggtggcacaggcactgaacaggctggggccttttgacggccttcttggtttcagccaaggggctgcgctagcagcccttgtgtgtgccctgggccaggcaggcgatccccgcttccccttgccacggtttatcctcttggtgtctggtttctgtccccggggcattgggttcaaggaatccatcctgcaaaggcccttgtcattgccttcgctccatgttttttggggacactgacaaagtcatcccctctcaggagagtgtgcaactggccagccaatttcccggagccatcaccctcacccactctggtggccacttcattccagcagctgcaccccagcgtcaggcctacctcaagttcttggaccagtttgcagagtgaaagatcaagaaatgtctctgctcctacatccagctcctctaggggcagcctccgtcatccatgccctcccaggaccctccactcactgctgtgagtgcgcctcaccagaaccagttaagagacaactatcaattcttgagacccaaattataagggccctgccctgtactgaagaaaaggggagcacaaggccttaatggacattgacttgtgaaaacgcaaacatgaatatggttggagagccctggattaggagggtgacatggggaaggcagaggctggcaccatggtgactgccacataataaagtggtgattttggaannnnnnnnnnnnnnnnnnnnnnnnnnncntgtcgggccgccctcggcccctcgaagaagcttttcctaaaccaattccgttttggcgccg

SEQ ID NO: 173101 - DNA, 1746 bp, Homo Sapiens
  misc_feature (821)..(829): n is a, c, g, or t
  misc_feature (891)..(891): n is a, c, g, or t
  misc_feature (1517)..(1517): n is a, c, g, or t
agctgagaagcagcctgcgagggcttgcgggggagattgttggggaggtccgatgccacatggaagagaaccagagagtggctcggcggcgaaggtttccgtttgtccgggagaggagtgactccactggctccagctctgtctacttcacggcctcctcgggagccacgttcacagatgctgagagtgaagggggttacacaacagccaatgcggagtctgacaatgagcgggactctgacaaagaaagtgaggacggggaagatgaagtgagctgtgagactgtgaagatggggagaaaggattctcttgacttggaggaagaggcagcttcaggtgcctccagtgccctggaggctggaggttcctcaggcttggaggatgtgctgcccctcctgcagcaggccgacgagctgcacaggggtgatgagcaaggcaagcgggagggcttccagctgctgctcaacaacaagctggtgtatggaagccggcaggactttctctggcgcctggcccgagcctacagtgacatgtgtgagctcactgaggaggtgagcgagaagaagtcatatgccctagatggaaaagaagaagcagaggctgctctggagaagggggatgagagtgctgactgtcacctgtggtatgcggtgctttgtggtcagctggctgagcatgagagcatccagaggcgcatccagagtggctttagcttcaatggagcatgtggacaaagccattgctctccagccagaaaaccccatggctcactttcttcttggcaggtggtgctatcaggtctctcacctgagctggctagnnnnnnnnnctgctacagccttgcttgaaagccctctcagtgccactgtggaagatgccctccagagcttncctaaagggctgaagaactacagccaggattttccaaagcaggaagggtatatatttccaagtgctacagagaactagggaaaaactctgaagctagatggtggatgaagttggccctggagctgccagatgtcacgaaggaggatttggctatccagaaggacctggaagaactggaagtcattttacgagactaaccacgtttcactggccttcatgacttgatgccactatttaaggtgggggggcggggaggcttttttccttagaccttgctgagatcaggaaaccacacaaatctgtctcctgggtctgactgctacccactaccactccccattagttaatttattctaacctctaacctaatctagaattggggcagtactcatggcttccgtttctgttgttctctccccttgagtaatctcctaaaaaaatcaagattcacacctgccccaggattacacatgggtagagcctgcaagacctgagaccttccaattgctggtggaggtggatgaacttcaaagctataggaacaaagcacataacttgtcactttaatctttttcactgactaataggactcagtacatatagtcttaagatcataccttacttancaaggtaaaaagagggatcagagtggcccacagacattgctttcttatcacctatcatgtgaattctacctgtattcctgggctggaccacttgataacttccagtgtcctggcagcttttggaatgacagcagtggtatggggtttatgatgctataaaacaatgtctgaaaagttgcctagaatatattttgttacaaacttgaaataaaccaaatttgatgttaaa

SEQ ID NO: 173102 - DNA, 509 bp, Homo Sapiens
ggacgttaccgtgatgaaactgccaatagctgtcttcatacagcaagaaagagaatttgtatttagtgggtgtacagtgacctagtattttctcacttggccatggtcttaggagtgactacttttgatattgacgttcagtgagattgtccaacaggagcgtggaatgtttaagctgtacatgtcagaacagtttgtagtaacaccaaggcttagcttgaacatcagattagttctcagaggtcaggggctggctgctttttactttcttgaacatattgaaatccagacagacttgaggtcaggatttagtagcagcgacatgctcggcaggcacaggttggaaccagctgaaatgatgccagcagtatgtttttacaaaacggagcaattggggagaatttggtggcatgttaaccagcattaaacaagcaggatacattataggcaaaagcagcctcttcaaatagtaccactagtttgccactggcgtatagaattttcccata

SEQ ID NO: 173103 - DNA, 942 bp, Homo Sapiens
ctctcaagtagtcatagacatgacaggccgggagcagaaggtctactacagctacagtcagatcagccacaagcacaacgttcccgatgatgggctgccgctacagtcccaacagctgccacagtctggcaaagaggccaaggcccccggcttcgcgctgcccgagctggagcacaacctgcagctgctcatcgacctcacggagcaggagatcatccagaatgaccggcagctacagtatgagcgggacatggtggtcaacctcttccatgagctggagaagatgaccgaggtcttggaccacgaggagcgggtcatctcgaacctcagcaaggtcctggagatggtggaggagtgcgagcggcggatgcagcccgactgcagcaaccccctcaccctggacgagtgtgcccgacatcttcgaaaaacccctgacagggacaacgtacttatgcagagagtacaggatgtccgaccgtgttggaccttgctgtggccatcgtctatccactcatgaaggagtacttcaaggagtgggatcccctcataagccttgcacatttatgggccaccgagatcatgctctaagtggaaaagcctcctagagaaatgaccagctcttgtgttccatggcggcaggacctctcagcagaggccttgcacaggttgatatgggaagtctggatgccttttgttcgaaatattgtcacccagtggcagccaaggaactggtgacccgatggtggactttttggatagttgggtgcacattattcctgtgtggatcttagataacatactggaccaactcatcttccccaagctgcaaaaggaggtggaaaactggaacccgctcacagacactgttcccatccactcttggatccacccatgctgccccttatgcagcacgctggaccactctattcccccatttcgcat

SEQ ID NO: 173104 - DNA, 747 bp, Homo Sapiens
ggggcgatgagactccacttacaaatgtgaagacagaggcatcccctgaaagcatgttgtctccatcacatggctcaaatcccattgaagatcctttagaggcagagactcagcacaagtttgaaatgtcagactcattgaaagaagaatcagggactatttttggaagccagataaaggatgccccaggtgaggatgaggaggaagatcgtgtcagtgaaagcggccagactaaaggagcctaaggaagaggatcaaggagaaggctacttgtcagaaatggataatgaacctcctgtgagacgagagtgatgatggcttcagcatacacaatgctacactgcagtcacacacactggcagactccacccccagcagccctgcttctacacagttctcgtgtctgtagtgaggatcaggaagctattcaggcacagaaaatttggaagaaagccatcatgcttgtatggagaagctgcagataatcataggtataccaatgtcttcctgcagcctgttacaaatgacatagcacctggctaccacagcattgtgcagaggcctatgggatttgtccactattaagaaaaacataagaaaatggactgatccgaaagcacagctgaattttcaccgtgacctttatgcctgatgttttcagaaatgctgtaaatgtaccataacctccaaaccatggatggtctattcacattgggcaatgggaaaaatgcacccgaagatggcctt

SEQ ID NO: 173105 - DNA, 990 bp, Homo Sapiens
  misc_feature (61)..(98): n is a, c, g, or t
  misc_feature (883)..(883): n is a, c, g, or t
tccgggggcccccccgttgttcaaaaggacggggggttatttcggccccttatgggttttnnnnnnnnnnnnnnnnnnnnnnnnnnnnnnnnnnnnnnggggccaggcggcccaggtttttcccattaagttttcccctttggggtgtgggccttcccaggccccttccaactgggtaggggttttttcccccagcttccatgcagcagttggtctatggatcattgtctccaaatttggtttttggggtcccagttcggccacttcctcccagcgctgcgggaacaacccctcccccaattttcatgatgttggcctggtggccagcagggaccttgcccccgccctttttgggtggcatagtcaaaggcgaccttggcaatcccgctgagacttggctcgtgtgacaatcttcaaacactcaatcacacccgttgcactctcatgttccagagagctgtactccccttctgtctgctctcgaatgatcaccaggtctagattgttgtgccgagtcatatacccaggaagtgacttcacatggactacgttggcaaataagtccaacttacgcctcagccgcatatcataggaggctagctcccccttatactccatcggggtatgaatcatccaatgatggccactttgttctccttcatggaactcagcacctgctccagcttctcctccgatgccatattctgcacctcactcaggtggtgctcctggaactcgactgggacagcggcagccttgaacacctccttgacggcgtgcatcagctcaggccccacaccgtctcccggaagcatggtcacgggaaaggagccctccaccctcacgtcctcgaaatggctccgaaatgctgtctgcttcgcangcaaaggtactcagacctctccatgccccagggttcccggcggagaccagcgctgggatcagccagcggactccgccctcgggaaaatcgccacccaggcctcgctc

SEQ ID NO: 173106 - DNA, 926 bp, Homo Sapiens
  misc_feature (754)..(754): n is a, c, g, or t
  misc_feature (885)..(885): n is a, c, g, or t
  misc_feature (916)..(916): n is a, c, g, or t
ggggcgacttcctgcgggaaacatggcggcattgagcggagtccgctggctgacccgagcgctggtctccgccgggaaccctggggcatggagaggtctgagtacctcggccgcggcgcacgctgcatcgcggagccaggccgaggacgtgagggtggagggctcctttcccgtgaccatgcttccgggagacggtgtggggcctgagctgatgcacgccgtcaaggaggtgttcaaggctgccgctgtcccagtggagttccaggagcaccacctgagtgaggtgcagaatatggcatctgaggagaagctggagcaggtgctgagttccatgaaggagaacaaagtggccatcattggaaagattcataccccgatggagtataagggggagctagcctcctatgatatgcggctgaggcgtaagttggacttatttgccaacgtagtccatgtgaagtcacttcctgggtatatgactcggcacaacaatctagacctggtgatcattcgagagcagacagaaggggagtacagctctctggaacatgagagtgcaaggggtgtgattgagtgtttgaagattgtcacacgagccaagtctcagcggattgcaaagttcgcctttgactatgccaccaagaaggggcggggcaaggtcactgctgtccacaaggccaacatcatgaaacttggggatgggttgttcctgcagtgctgtgaggaagttgctgaactgtaccccaaaattcanatttgagacaatgatcatagacaactgctgcatgcagctggtgcagaatccttaacagttttgatgtgctttgtgatgccccaatctctatggggaacattatttgacaaatctggcttgcctggcctggnttggggggaacctggtggtgggttccctggnggagaagcct

SEQ ID NO: 173107 - DNA, 601 bp, Homo Sapiens
agttctaaagagagactgtcatgggtcattccccacaagagccacatcctcacacctgacagatgcacggcccaaggggctgcagcccgtgttgcaattccatgcttcccccgccaaccagctcctgctgccatccccagggaggtggcccaggaaggtgcctggcccagaataaggaactggcatactgcaaagtccccagccctgcctctggtggacagcatcgtcctggaatggccacggagtgatgagttgtgtgcttgtccctggcagtggcaggctgtgtcctatggacatcttggcaggacatggaattcggcctcatgacaggcccaactagggataggaaggaaaatgaagagagccagtatttccccttctccagaagcaggtactcagctttctgggaaaagcgtgcctccagccgtggggacaggccatcctactgactacctcttgcttggcatgaaataaactgctatcctccccttggaatctaccgccactctacatcctactgctttggcctccctctcctctcaccagatggcatgtggtgtggcacctgtggctggacacagagaggacctcgaggaatcag

SEQ ID NO: 173108 - DNA, 780 bp, Homo Sapiens
ttgcagttactgggctgagttcagtcccgctctctacgccaccttaggcccgcagcgtgccgggtgctcttcagcatgtccttcatcccggtggccgaggattccgacttccccatccacaacctgccctacggcgtcttctcgaccagaggcgacccaagaccgaggataggtgtggccattggcgaccagatcctggacctcagcatcatcaagcacctctttactggtcctgtcctctccaaacaccaggatgtcttcaatcagcctacactcaacagcttcatgggcctgggtcaggctgcctggaaggaggcgagagtgttcttgcagaacttgctgtctgtgagccaagccaggctcagagatgacaccgaacttcggaagtgtgcattcatctcccaggcttctgccacgatgcaccttccagccaccataggagactacacagacttctattcctctcggcagcatgctaccaacgtcggaatcatgttcagggacaaggagaatgcgttgatgccaaattggctgcacttaccagtgggctaccattggccgtgcctcctctgtcgtggtgtctggcaccccaatccgaaggcccatgggacagatgaaacctgatgactctaagcctcccgtatatggtgcctgcaagctcttggacatggagctggaaatggctttttttgtaggccctggaaacagattgggagagccgatccccatttccaaggcccatgagcacatttttggaatggtccttatgaacgactggag

SEQ ID NO: 173109 - DNA, 952 bp, Homo Sapiens
cattcaagtgctctctctaaagacctcgctcaccccgcctgctcctgcggagtgactgccgcagcggggccggaagacaggtgcgccccagcctcgccagctctggccctggcctccggggaactcggcgcctccctcgtcaccgtcggtggcggttaaaactggcctctacgcttctgcttcaatctccaatttggcatgcaaagcacacctttatggtgcctgcaagctcttggacatggagctggaaatggcttttttttgtaggccctggaaacagattgggagagccgatccccatttccaaggcccatgagcacatttttggaatggtccttatgaacgactggagtgcacgagacattcagaagtgggagtatgtccctctcgggccattccttgggaagagttttgggaccactgtctctccgtgggtggtgcccatggatgctctcatgccctttgctgtgcccaacccgaagcaggaccccaggcccctgccgtatctgtgccatgacgagccctacacatttgacatcaacctctctgttaacctgaaaggagaaggaatgagccaggcggctaccatatgcaagtccaattttaagtacatgtactggacgatgctgcagcagctcactcaccactctgtcaacggctgcaacctggcggccggggggacctccctggctttctgggaacaatcagcggggcccggaaacccaaaaaactttcgggctcccatgttggaactgtcgtgggaagggaacgaagcccatagaccctgggggaatggtcaggaccaggaaagtttctgctgggaacggggaatgaaagtcatccataacagggttactggcccaggggggaatgggtaacccgcaatccgggctttttggcccaatggtggcttgggaaaaaattgcctggccctggctctcctcccttggca

SEQ ID NO: 173110 - DNA, 1268 bp, Homo Sapiens
  misc_feature (1247)..(1247): n is a, c, g, or t
  misc_feature (1254)..(1254): n is a, c, g, or t
tgtataacagtgcttttgcaggctggtacggtcggaatcccgggatatcgtcgaccacgcgtcgcccacgcgtccggtcaggctgcctggaaggaggcgagagtgttcttgcagaacttgctgtctgtgagccaagccaggctcagagatgacaccgaacttcggaagtgtgcattcatctcccaggcttctgccacgatgcaccttccagccaccataggagactacacagacttctattcctctcggcagcatgctaccaacgtcggaatcatgttcagggacaaggagaatgcgttgatgccaaattggctgcacttaccagtgggctaccatggccgtgcctcctctgtcgtggtgtctggcaccccaatccgaaggcccatgggacagatgaaacctgatgactctaagcctcccgtatatggtgcctgcaagctcttggacatggagctggaaatggctttttttgtaggccctggaaacagattgggagagccgatccccatttccaaggcccatgagcacatttttggaatggtccttatgaacgactggagtgcacgagacattcagaagtgggagtatgtccctctcgggccattccttgggaagagtttcgggaccactgtctctccgtgggtggtgcccatggatgctctcatgccctttgctgtgcccaacccgaagcaggaccccaggcccctgccgtatctgtgccatgacgagccctacacatttgacatcaacctctctgttaacctgaaaggagaaggaatgagccaggcggctaccatatgcaagtccaattttaaagtacatgtactggacgatgctgcagcagctcactcaccactctgtcaacggctgcaacctgcggccgggggacctcctggcttctgggacccatcagcgggccggagccagaaaacttcggctccatgttggaactgtcgtggaagggaacgaagcccatagacctggggaatggtcagaccaggaagtttctgctggacggggatgaagtcatcataacagggtactgccagggggatggttaccgcatcggctttggccagtgtgctggaaaagtgctgcctgctctcctgccatcatgagattttctctgctcttctggaaaaaaagggctcaagcacccctttcaaccctgtgactggggtcctccctcgggctgtaggcctggtccgccattcagtgacaaataaagccattgtgctctgaggccnattccantcggcagaaacaaa

SEQ ID NO: 173111 - DNA, 920 bp, Homo Sapiens
gggatcgcgcgggcgggcgggcggggtctggcggtttgaacgagacgaagacggaaccggagccggttgcgggcagtggacgcggttctgccgagagccgaagatggcagtgaacgtatactcaacgtcagtgaccagtgataacctaagtcgacatgacatgctggcctggatcaatgagtctctgcagttgaatctgacaaagatcgaacagttgtgctcaggggctgcgtattgtcagtttatggacatgctgttccctggctccattgccttgaagaaagtgaaattccaagctaagctagaacacgagtacatccagaacttcaaaatactacaagcaggttttaagagaatgggtgttgacaaaataattcctgtggacaaattagtaaaaggaaagtttcaggacaattttgaattcgttcagtggttcaagaagtttttcgatgcaaactatgatggaaaagactatgaccctgtggctgccagacaaggtcaagaaactgcagtggctccttcccttgttgctccagctctgaataaaccgaagaaacctctcacttctagcagtgcagctccccagaggcccatctcaacacagagaaccgctgcggctcctaaggctggccctggtgtggtgcgaaagaaccctggtgtgggcaacggagacgacgaggcagctgagttgatgcagcaggtcaacgtattgaaacttactgttgaagacttgggagaaagagagggatttctacttcggaaagctacggaacattgaattgatttgccaggaagaaacgagggggaaaaacgacccctgtattgcagagggattgtagacattctgtatgccacagatgaaaggctttggtgatacctgaatgaaagggggccccacaggaggagcaagaaagagtatt

SEQ ID NO: 173112 - DNA, 822 bp, Homo Sapiens; identical to SEQ ID NO: 6938

SEQ ID NO: 173113 - DNA, 1288 bp, Homo Sapiens; identical to SEQ ID NO: 2967
  misc_feature (958)..(1036): n is a, c, g, or t
  misc_feature (1043)..(1102): n is a, c, g, or t
  misc_feature (1155)..(1174): n is a, c, g, or t

SEQ ID NO: 173114 - DNA, 1125 bp, Homo Sapiens
ccccgtcccgatccatgtaggggacagtgtggaaatcctttcagcttgaagctcttcaggtgttttcagcagcagcatcccatcaatcacagtgctcagaaggggttgactctctctggggtctccctgtaagtccagagataagaatttcattttcaatgtcgtctccaagagctcctcttccgtcttctgtcgcaggcagtgaaccatgacagcagaggtggtgtttttgcacccagcagtgatagcaatttgctcagccaagggcttgacatcacctttcttcaccagaacagaagtgagggccacgccactctcagaaatggcccggtggaagaggttcttggccaatggagacaaaacaagaacagagacactttctcctcccgctgactctccaaagatggtcacagagcctgggttccctccaaagctggcaatgttgtcctggacccagcgcagggcagccacctggtccaggtgaccccagttcccccggctgtgttcatcccctgtgctgaagaatccccagatgcccaggcgatattgaatggtcaccaccaccacgttttcatgggcagcaagggccagcccatcataggttgatgccgcacccaccatcagcccccctccgtggatccacaccatcaccggcagcctgtttttcttggtcaagtcagcaggagtgtaaatattgaggtaaagacagtcttcagaaagcttgagaggaatgttctcctttcggtttgtaaatagctctgagagtaactgccccgccttgggatcttgggtgcacataggagggtacgaggtggcattcttcacaaagctccatggttctgcaggctgcggtggagtaaacctcaggggtccaagaggcggcttggcaaaagggattcccaggaaaatggccacaggctgtgcaaatccttctaagctgacgaacttccccagcactttgccatgcacggtgtccaccacaggtggcgaggacggatgcccccaagccgcggaagcagcgagagtggccaggacaagagcagggagccacatcctggaagggcgacagttccgggggcctgcgaggtctccgtgcagctcagagggactgtgctgtccagccct

SEQ ID NO: 173115 - DNA, 738 bp, Homo Sapiens
cgatggccacggacggatagatggggtgactcggggtgtatggagaggcctccagagagaccccgaatttggaccggatggctgcagaagggctgcttttcccaaacttctattctgccaaccctctgtgctcgccatcgagggcggcactgctcacaggacggctacccatccgcaatggcttctacaccaccaacgcccatgccagaaacgcctacacaccgcaggagattgtgggcggcatcccagactcggagcagctcctgccggagcttctgaagaaggccggctacgtcagcaagattgtcggcaagtggcatctgggtcacaggccccagttacaccccctgaagcacagatttgatgagtggtttggatcccccaactgccactttggaccttatgacaacaaggccaggcccaacatccctgtgtacagggactgggagatggttggcagatattatgaagaatttcctattaatgctgaagacgggggaagccaacctcacccagatctacctgcaggaagccctggacttcattaagagacaggcacggcaccacccctttttcctctactgggctgttgtacgccacgcacgcacccgtctatgcctccataacccttcttgggcaccagtcagcgagggcggtatggagacgccgtccgggtagtattgatgacagcattgggaagatactggagctcctcctagatctgcactcgcgacacac

SEQ ID NO: 173116 - DNA, 924 bp, Homo Sapiens
acagtccagctgcacttaggccaggaggacctcccccacccagcttcccctgagactggccccaggaccagaaatgagtcagtgcagagccggtgccactccaggacagtgacaaaaggggagaagagaagtcacaggcacttatagtttggcctttgttgagcagtatcaatcactatcgctggtctcactgctctgctcgccttgcaccttgctgcggtgctgcagagccctgtggtaggcgatctgtactgacttgcggatgttggactcgcggccctccagcatcttctccttgtctaggtcctggttcacacccagaggaaccagcttggtcctgggcagccactgccaggttcgtttgttgtcaaagaagaggacgaggtagagatgctctcgggcttcctgggtcatctgctccccaagtttcagcacctccagtgggggcacagggatgggaaccccatggtggaacataccttctcggggcatctttggatcaatgatcagagctgggtatgatggatagcctcggcatttggcccacacgaggtccagagcatccagcggggagtcctcatcctctgacagccagccagctccccggcccagactcttccttaccatgctgtggcccacgccgcggccagtgcccacggagtaggcctcattctcagtgcctgaggtatcctcactgctgtcctctgggaaagtgccccgagagaaggagggtttgccccggccttgttttgagggcgttgtgctggtccggtctgaagcagcgctgctactgctactgctgctggactcagagtctgagctgctccggggaaggctgcagtcattacggtataccaagaaactcttcttcactggttggtttccaccgctgaagcgacccacgcgtccggacccacgcgtccg

SEQ ID NO: 173117 - DNA, 1064 bp, Homo Sapiens
cggtacccccgtcgatggccatgatttccgacagcttcttgcccctggcgagcctgagctgactcggacgcaggaggtccccggtggagaggtgggtgtagccatacttctgcacgatcttctcacactgggtgccctttcctgagccaggcccacccaccacaaagatgatcttggttttcttcagcttctcttccatcctgccgaggtcccgggagccgtgtcagtgctctgggcagggcacgcactggccccggcgcccacccgcacccctccccagagcactgacacggctcccgggacctcggcaggatggaagagaagctgaagaaaaccaagatcatctttgtggtgggtgggcctggctcagggaagggcacccagtgtgagaagatcgtgcagaagtatggctacacccacctctccaccggggacctcctgcggtccgaggtcagctcaggctcggccaggggcaagaagctgtcggaaatcatggagaaggggcagctggttccactggagacagtgttggacatgctccgggatgccatggtggccaaagtcaatacttccaaaggcttcctgattgatggctacccgcgggaggtgcagcaaggagaagagtttgagcgacggattggacagcccacactgctgctgtatgtggacgcaggccctgagaccatgacccagcggctcttgaaacgtggagagaccagcgggcgtgtggacgacaatgaggagaccatcaaaaagcggctggagacctattacaaggccacagaacccgtcatcgccttctatgagaaacgtggcattgtgcgcaaggtcaacgctgagggctccgtggacagtgtcttctcccaggtctgcacccacctggacgccctaaagtagcaacgctggagccgcttccccagctcagagccccgccccaccccgtcctgattagaggtcctcctggcctgagcgcagcgcctccaccctgccctgctgagcacagacggaggaagccgcttatcctgttttcatggacagctgagcactaaaggaatttctaagga

SEQ ID NO: 173118 - DNA, 774 bp, Homo Sapiens
  misc_feature (627)..(627): n is a, c, g, or t
  misc_feature (630)..(648): n is a, c, g, or t
  misc_feature (650)..(654): n is a, c, g, or t
ggggcgtcgtttacgccagtttgaaccaaagacgcccaaggttgaggccgagttccagagcatggggtctcggttgtcccagccttttgagtcctatatcactgcgcctcccggtaccgccgccgcgcccgccaaacctgcgcccccagctacacccggagcgccgacctccccagcagaacaccgcctgttgaagacctgctggagctgtcgcgtgctttctgggttggggctgatgggggcgggcgggtacgtgtactgggtggcacggaagcccatgaagatgggataccccccgagtccatggaccattacgcagatggtcatcggcctcagcattgccacctggggtatcgttgtcatggcagaccccaaagggaaggcctaccgcgttgtttgaaagtaccaccagtgaatctgtcttctgtctctgtccctttccccgtgacacacagagcaggcatggaatttaatgggtgttctggacagacacttgtacatggacagacatcactactgtggatactacaagactgaaaagaaaatcgtatgttgtcattctctggctatggagtgtttgtggccttcacagatttcacaggaaccaataaatccctcagagaagtngannnnnnnnnnnnnnnnnnnannnnnaaacatggtcggccgcctccggcccctcgagaagcctttctaggaccatttccttttgggcgccgcgggcccccagtagggtaagggggaacatgggtccatagcctggttttcctagac

SEQ ID NO: 173119 - DNA, 400 bp, Homo Sapiens
ccccgtcccgattggcccatgggcagcttgctgtggggcagtgcagggagtcctgcggccgcccaggtgtcaggagaggtccccgccgagtgcttcagctgccctaagctgcaccagcgctttgccaagatgggatgaggagggggtatgagaactggcagagcctcggtgcagcagggctgaagggctttctcaccccagctctggctatgcccagttctctgagaaaggagctcagtggggaggtggtccctccagcggaccagggaaggggtcactgtgctgggagcagcctccttgggcctcaggaaaccaacaagtgcctcggatgatggctgcccacggcgcttctgctgagaccctgcccccggcccaggtgtctcggagggtggctgcccac

SEQ ID NO: 173120 - DNA, 1297 bp, Homo Sapiens
tgtgggttgggttcgtaccagcaagtagactaggaactgagcccaggaaagggggatgttttcctggtgtttggatggtcagctgggagtgtccatcatcaggggaagatcaaacacaggtgcactcagctgcccagggcctctgggacacttgccttgacttgcaacttgccttgaacatcacgatcaaagcagcaggtgctgtggtctctcaaaattgatttttatttgactctgtggctctaagactgccttgaaccgcctgaggcctatgcatctgaacaagtgggtctctcccttgagcaccaggagtgggtgccagccggccccgaggattcccagcaccccacctatggtcttgccagcataggcttgctagttccttcttggtcagaggtagctgcagaggggggaggccaagggttttgtctaagctgtgccctgccacctggcaggaggcccactcactgcccaagtcatggcaacaggctggagcagcccaggagatgggcctaaaatgttctggatcccttgggtcctagtgttatgttccagtctgcccacctgtgctcaggatgcagccctgggatccagcacccatggaagcttctgctgggatggtgtcacctatgggttttgaaccagtgtggtatggtccttgggagctctgctctgagcttgccacactgctgagagcacccactgtcctgaccagagtctcagtggtcctgacccccaatgtgggcaggggctgggcaggagggtggggtctgctgtgggttcagaggactccacctcctggctggtttacctgctgctgcccattttctctgggtactgctggccagaggactttagcctacccctgaagagcctgtccatgtcattttcctactgccatagataccctaagcccagggccccttgaggcccagactcagcctgcccactggtgccggagacggagtggagtgggcctggatccgagggatgctacctctccctttcccacttgaggaccctggggagagatgggggcggggaaaatggaggtatgaatttggggtaagaggaagtgagatctccgcttgcaggtcagcccctgccttgcagggcgggctggcttgactcaggccctgtgagatagagggcccagcccagccccacccacagatcccctgctcctgttgtgttctgttgtaaatcatttggcgagactgtattttagtaactgctgcctaacttccctgtgttctatttgagaggcgcctgtctggataaagttgtcttgaaattt

SEQ ID NO: 173121 - DNA, 1092 bp, Homo Sapiens
agcctatggtgggccaagtttcaagagagcccggagtcttccccaaaggccccatatccccccatttggttcaaaaaaccccattgggggtaccacccttccacagccagaaaggtttccccggggggcggggatcccccgggtcggcatcctggagcacagggtgggccagggtggaaccataacactagggaccccaggggatccagaaccatttaggccccatctcctggggctggatacaagcccaggttgccatgacttggggcaagtgagtggccctccctaccatggtggaagggccacaggttagccccaaccccttgtcttcccacctctgcagctccttctggccatgaaggaactagcaagcatatgctggcaagaccataggtggggtgctgggaatcctcggggccggctgccacccactcctggtgctcaagggagagacccacttgttcagatgcataggcctcaggcggttcaaggcagtcttagagccacagagtcaaataaaaatcaattttgagagaccacagcacatgctgctttgatcgtagatgttcaagcacaagttgcaagtcaaggcaagtgtcccagaggccctgggcagctgtagtgcacctgtgttggatcttcccctgatgatggacactcccagctgaccatccaaacaccaggaaaacatccccctttcctgggctcagttcctagtctacttgctggtacgaacccaacccacacactccccgcccacaatgcagctccttccaaatcctcccacaagccacctttgtgggacttggaagctgcttaggatgggccctgccctctgcgggaagccaatcctagcagaaaggtaagctaaacaacagtctcagaatctgagacccagtgactgttccccccgccccaggccttgggcctgaagtgggggcctgcctgtggcctctgtggtgggctcactcccacccccaacagtggccccaggagaggctttcccaagagtcttcaaactccacccaccccagccctagcatcagggactccccaccccccactggagtgttaatatcattaatgtacaaa

SEQ ID NO: 173122 - DNA, 1385 bp, Homo Sapiens
  misc_feature (1347)..(1347): n is a, c, g, or t
ggggccgccgccgccgcgggcttcgttcgtaaggaagggggcctaggcccgggcctgcggtggtgggggttgctgcgcgccgggggtcgctcctgctgtgtcttccgctccagcttcgcccacttccccttgccagcggggtgggcgcggagaagacctgccggagccatggaggacgaagtggtccgctttgccaagaagatggacaagatggtgcagaagaagaacgcggctggagcattggatttgctaaaggagcttaagaatattcctatgaccctggaattactgcagtccacaagaatcggaatgtcagttaatgctattcgcaagcagagtacagatgaggaagttacatctttggcaaagtctctcatcaaatcctggaaaaaattattagatgggccatcaactgagaaagaccttgacgaaaagaagaaagaacctgcaattacatcgcagaacagccctgaggcaagagagaaagtacttccagcggcaatgtaagcaacagaaaggatgagacaaatgctcgagatacttatgtttcatcctttcctcgggcaccaagcacttctgattctgtgcggttgaagtgtagggagatgcttgctgcagctcttcgaacaggggatgactacattgcaattggagctgatgaggaagaattaggatctcaaattgaagaagctatatatcaagaaataaggaatacagacatgaaatacaaaaatagagtacgaagtaggatatcaaatcttaaagatgcaaaaaatccaaatttaaggaaaaatgtcctctgtgggaatattcctcctgacttatttgctagaatgacagcagaggaaatggctagtgatgagctgaaagagatgcggaaaaacttgaccaaagaagccatcagagagcatcagatggccaagactggtgggacccagactgacttgttcacatgtggcaaatgtaaaaagaagaattgcacttacacacaggtacaaacccgtagtgctgatgaaccaatgacaacatttgttgtctgtaatgaatgtggaaatcgatggaagttctgttgagttggaagaattggcaaaatatctggaccattaagaaaacggatttgtaactagctttaaactaggccaagcaactagttttcctgcaaatcaaatttttaaagcaacttgggttagactatgtttttgacctaacatcccttccttaaatgccttctgtagtttcagatcagtagggagaccatataataattttatggtacctgtttcaaaacatattttttctgtttttataagtaagttgatattaattaaactcttggcaatatttctnctttcttaaaggaaaatataccttaactttttttcttt

SEQ ID NO: 173123 - DNA, 991 bp, Homo Sapiens
  misc_feature (16)..(16): n is a, c, g, or t
gcgtagggtacaggtngggagcacagcgctgccacttgtacccgcagacattatgaaagattaatcctaccatatgaaagatttattaaaggagaagaagataagcccctgcctccaatcaaacctcggaaacaggagaacagttcacaggaaaatgagaacaaaacaaaagtatctggaaccaaacgcatcaaacatgaaatacctaaaagcaagaaagaaaaagacaatgcccaaagccccaggatgcagcagaggtttcatcagagacagaaaaagaacaagagactttaataagccagaaaagcatccctgagcctctcccagcagcagacatgaagaaaaaaatagaagggtatcagtgaattttcagcgaaacccctggaatccaagagtagacccagagaaggaccaacgaaacagaccaaggttccaacagtgagaaggtggcagaggaggcgggagagaaggggcccacacctccactcccaagtgctactctggccccagaaaaagattcagccttggtcactggggccagaaaacagccactcacctctcctagtgccctggtggactcaaaacaagaatccaaactgtgctgttttacagagagccctgaaagtgaaccccaagaagcatccttccccagcttccccaacacacagccaccgctggcaaaccagaatgagacggaggatgaacaaactgcccgacatggcagattacattgccaactgcaccgtgaaggtggaccagctgggcagtgacgacatccacaatgcgctcaagcagaacccaaaggtccttgtggtccagtcgtatgacatgttcaaagacaaagacctgactgggcccatgaacgagaaccatggacttaattacacgcccctgctctactctaggggcaacccaggcatcatgtccccactggccaagaaaaagcttttgtcccaagtgagtggggccagcctctcagggagcactaagc

SEQ ID NO: 173124 - DNA, 368 bp, Homo Sapiens
ccgagcagggatctgtgtgtttgacccgggtgtggtggcacgggagtgggccggtcaccaggtgggccagcgggatgcctgggcaggcctggtgggttatggctgaccacttcttcccattcctcagtgaaagaattgggcactcccggtcatccgagtctgtcccgaaggtttaactgcgcgcggagagagagaggccttgtaggtatccaaagggcggagctccagtgggaaaacttgaaacttgtccgtcggcggatatatatttccacttcttgtaatggcctgaagaatctaggaggagacaaagcagataccacacttacggacaggcagacagtgctgaaaatgcctgacgggtacacgaa

SEQ ID NO: 173125 - DNA, 999 bp, Homo Sapiens
  misc_feature (554)..(601): n is a, c, g, or t
tgtgcgacagctgccacaccctgctcctgcagcgctgctcctccacggcctcctgaacgtccgtcctcaggagcacagcctcacggacagtgccaaaccctgtgggtctccagggcttgggaaatgtgttctttcccaagagaatcaaaggaaagaatcaaatttcttgcccggtcactggcactccagaagacatgcgtgccggaaccggcagctctcacctttctgtgacttgttcggaattaactcctctggatggaaacttccatcttactcggttacatcacggctctggttcagatacaacttcatgattttgctactatcatttttcacttttcaaagaatttaacctattttacagcagttcagttctgctagtgagtagttttcccctcctaccttccttctaaaaacctgattcaatgcacagcgtttgacacacataggagtctgcacagtgtgccgttctactgcttcagacaagagatctgccatttcatgcccttgtgactacctatcattggccctgcaataaaatcatttatttttcnnnnnnnnnnnnnnnnnnnnnnnnnnnnnnnnnnnnnnnnnnnnnnnngggggggggggcgcaaaaatgtaacccccgcgggggcgcacctgtaagcgcacaccagcgtttgtgggaacaaaaggaggggcgccccgaaagagaggaggcgtgattaatatgtaagcacgaacagaggtgggcccgaggggttaaaaaagcaccgtgtaacggcagtggggggaagaaacaacggttgttgcttgtgggagcatctttgtgtaggaagacaccccattcgttgggggggtgcaccgttgttgggaagcaccctctccgttagaaagtattaagcggcagtgcggggaaatataaacgttgacgtgtgattttggtgtgacacccacgatcgttataggtaggcggtgaaaaaatttggtggcccaagtagttttttaagaatttac

SEQ ID NO: 173126 - DNA, 638 bp, Homo Sapiens
tcatcgtggatcttctccacgtgtgattgcactttggaagaaaacagaacgaaagtccttttccgtctgaagcatcctgaggaaagtccgtgtttaggagggccaaccgtcacaccaaaataaaacatgcgctaatggaagccgatagcaaagaaggtgacagagcacactttgggaagcactgctggagtgggggcagaggggtacttgccaatgaaaatgccctggggaccctctgacgacactgttgggatggctgaggcacctgttcccttttggtcccaccggtggcctaaagtgtggtctcagagtgcttgtcttctgctgctcactgggtggggcttgtgagcatctgttctactcttcctaggatcacagaagaactgcagcttcctggggagcagtttcacctccacaggcatcgcttcatactcctcactgtcaatgctaaaagagccccctgctccctccgggataagcaaagtgcactggctggcttggagacactccgtgccctccacgtgcagcttggggtttctcacctttcgacttcctatagttataaagtctcctttgctgatggtgtcaggttcaatgcagatattcagaaaatcttctttgcttgtcgggtcaagctg

SEQ ID NO: 173127 - DNA, 440 bp, Homo Sapiens
atggaacctgtggctgaaggaagtaggctgaattcccgcttctctgccagttattgacacagctctctttgtaagagaggaaagaaactaaacccacccaagggatgatttcagggggagaggtggagggcagatgtcctgggcaaaccgggcccctctgcccacacacctcacttgatccttttgccaaacttgtcaaactcaggggaactggcttcccagttgcccctttgccatattccaagtccccctcagacttcatgtctctgctcatcagcactgtcccaggatcctggagagggagaacccctggccccaggggaaagaggggggggtctcccgtttcctgtgcctgcaccagccctgcccccattgcgtctgcacacccctgcgtgtaactgcattccaaccactaataaagtgcctattgtacaggtcaa

SEQ ID NO: 173128 - DNA, 463 bp, Homo Sapiens
gagggcaggcttggggaaaatggccatgcaggaggtggagaaaattggaactctactcaacccattgttgtcaaggaagaagaaatctttctccctcaactgaaggggtgcacccacctgttttctgaaacacacgagctaacccagaggtggatgttatgaacagctgtgtctgccaaacacatttacccttggccccactttgaagggcaagaaatggcgtctgctctggtggcttaagtgagcagaacaggtagtattacaccaccggccccctccccccagactctttttttgagtgacagctttctgggatgtcacagtccaaccagaaacacccctctgtctaggactgcagtgtggagttcaccttggaagggcgttctaggtaggaagagccgcagggccatgcagacctcatgcccagctctctgacgcttgtgacagtgctacttccgtgaat

SEQ ID NO: 173129 - DNA, 1157 bp, Homo Sapiens
atcctggagaactatatctcagccctcaacacgctgtggcatcctgagtgctttgtgtgccgggaatgcttcacgccattcgtgaacggcagcttcttcgagcacgacgggcagccctactgtgaggtgcactaccacgaagcggcgcggctcgctgtgttctggctgccagaagcccatcaccggccgctgcatcaccgccatggccaagaagttccaccccgagcacttcgtctgtgccttctgcctcaagcagctcaacaagggcaccttcaaggagcagaacgacaagccttactgtcagaactgcttcctcaagctcttctgctaggtgccctgcccctgtctctgccccccttccccagccagcatccccaactgcgactgtgacctagagacttcacccgggggtgaaggggtaaacccgactgaaactggaacccttgtcctccgctggtgcgggatggacagagggccatgaggggtcccccgtgcttgtcttcacccctgccagagcctctgggccccctcctccctcctgtagctctccctaggctgcccactctccatcctccccaggggtagaggctgggggctccaccccagcccatgtacgtccccacgaactggcctggccagcaccccacactggagccatctcttcctcatatttcagcagtgcagccggggggcagggaagggcaggcagggtctgttggggtctctttttatccttattcctcccccgacctaattgtctttgttctgtgattattgggggacacccggctccctccagacaatgccagcataaatccatccatccaaaggcagagaaccaaaggggccatggaaggttctctgtgctcctcctacccttccagttgccctaggcctggcgacttgcccctaccttttagaaccgacctccccttttatacctgctcttgtactactgaggacaagcctctccagcaataatgttgtctagtcacttcctccgtctccgggacgggtgcctggacactgtaccgacttcgatcagatttctacactgagggttggaattcatatcgcctgagttggctttttacttctctatacaaaatgatttgaagagattttaaagacgttccctttggatcatcttctcatca

SEQ ID NO: 173130 - DNA, 183 bp, Homo Sapiens
caccacaggctttcagtacggcctgggcggacgggttgtcgagcagtgccaacagcaggtgttcgaccgtcatgaactcatgccgggcctcacgggcgcgcttgtagcactggccgatggtgtattcgagctctttgctgaacatggatgtactccggcgccagatagggacaaaccgtcccg

SEQ ID NO: 173131 - DNA, 653 bp, Homo Sapiens
tgcggccgcagccccgggctcgcgtagggccgaccgctcccggcccgccccctatggccccggctagaggcgccgcgccgccggcccgcggaccccgatgctggcccggagaagccggtgctgccgcgcatcaccatcaaccctaccatcgccgagggcccatcccctaccagcgagggcgcctccgaggcaaacctggtggacctgcagaagaagctggaggagctggaacttgacgagcagcagaagaagcggctggaagctattctcacccagaaagccaaggtcggcgaactcaaagacgatgacttcgaaaggatctcagagctgggcgcgggcaacggcggggtggtcaccaaagtccagcacagaccctcgggcctcatcatggccaggaagctgatccaccttgagatcaagccggccatccggaaccagatcatccgcgagctgcaggtcctgcacgaatgcaactcgccgtacatcgtgggcttctacggcgccttctacagtgacggggacatcagcatttgcatggaacaaatggacggcggctccttggaccatgtactgacagaggcaaaatgattacgaagagattctgaggagatcagcatcgcgttctcggtggctggctgacttcggaagaacac

SEQ ID NO: 173132 - DNA, 1519 bp, Homo Sapiens
  misc_feature (1451)..(1451): n is a, c, g, or t
ggcctgggtggcgaattcggcacgaggggctagaggcgccgccgccgccggcccgcggagccccgatgctggcccggaggaagccggtgctgccggcgctcaccatcaaccctaccatcgccgagggcccatcccctaccagcgagggcgcctccgaggcaaacctggtggacctgcagaagaagctggaggagctggaacttgacgagcagcagaagaagcggctggaagcctttctcacccagaaagccaaggtcggcgaactcaaagacgatgacttcgaaaggatctcagagctgggcgcgggcaacggcggggtggtcaccaaagtccagcacagaccctcgggcctcatcatggccaggaagctgatccaccttgagatcaagccggccatccggaaccagatcatccgcgagctgcaggtcctgcacgaatgcaactcgccgtacatcgtgggcttctacggggccttctacagtgacggggagatcagcatttgcatggaacacatggatggcggctccctggaccaggtgctgaaagaggccaagaggattcccgaggagatcctggggaaagtcagcatcgcggttctccggggcttggcgtacctccgagagaagcaccagatcatgcaccgagatgtgaagccctccaacatcctcgtgaactctagaggggagatcaagctgtgtgacttcggggtgagcggccagctcatcgactccatggccaactccttcgtgggcacgcgctcctacatggctccggagcggttgcagggcacacattactcggtgcagtcggacatctggagcatgggcctgtccctggtggagctggccgtcggaaggtaccccatccccccgcccgacgccaaagagctggaggccatctttggccggcctgtggtcgacggggaagaaggagagcctcacagcatctcgcctcggccgaggccccccgggcgccccgtcagcggtcacgggatggatagccggcctgccatggccatctttgaactcctggactatattgtgaacgagccacctcctaagctgcccaacggtgtgttcacccccgacttccaggagtttgtcaataaatgcctcatcaagaacccagcggagcgggcggacctgaagatgctcacaaaccacaccttcatcaagcggtccgaggtggaagaagtggattttgccggctggttgtgtaaaaccctgcggctgaaccagcccggcacacccacgcgcaccgccgtgtgacagtggccgggctcccggcgtcccgctggtgacctgcccaccgtccctgtccatgccccgcccttccagctgaaggacaggctggcgcctccacccaccctcctgcctcacccctgcggagagcaccgtgggcggggcgacagcgcatgcaagggaacggggggtctccctctcctgcccgtnccctggcccgggggtgccctccggggggaacggggcgacgcctggctggggtggggggtccccagaac

SEQ ID NO: 173133 - DNA, 1315 bp, Homo Sapiens
  misc_feature (942)..(942): n is a, c, g, or t
  misc_feature (1079)..(1079): n is a, c, g, or t
  misc_feature (1229)..(1229): n is a, c, g, or t
  misc_feature (1286)..(1286): n is a, c, g, or t
aacgagccacctcctatgctgcccaacggtgtgttcacccccgacttccaggagtttgtcaataaatgcctcatcaagaacccagcggagcgggcggacctgaagatgctcacaaaccacaccttcatcaagcggtccgaggtggaagaagtggattttgccggctggttgtgtaaaaccctgcggctgaaccagcccggcacacccacgcgcaccgccgtgtgacagtggccgggctccctgcgtcccgctggtgacctgcccaccgtccctgtccatgccccgcccttccagctgaggacaggctggcgcctccacccaccctcctgcctcacccctgcggagagcaccgtggcggggcgacagcgcatgcaggaacgggggtctcctctcctgcccgtcctggccggggtgcctctggggacgggcgacgctgctgtgtgtggtctcagaggctctgcttccttaggttacaaaacaaaacaggtgatagaacaaggatccgggtgacaacgaatgccgacctctcgcaaccctggcaataagtctatcaccatagtattccttgaggacatcctatgtcccgggacggcctataaaagaggtcatgtgaataggggccacaaggggccgcataaaatagatttccccgggaccgatattcttttagattaagcagccacaagctggctaagaaaacccctggtgcacaggtgtccgccccctaaaatcacacgagtcgtagccataaatctcgcaaggttgtttagcggaaacatatgggtaagacggagctgacacaaacacctctgggcacatctatagtaagagcgggaatcagtcggcacatttggtctgatcgcagtcccccagatgagggaacaatagttcacatgagcaccgcgtgtctcatataacaaacggtgagacagagcgcatacnatgtgtctgtattatgggcggacggcgttcgactcgaacgacgggactgcgctgagctccctgtcgccgatcgacactgcagttactgtcttatgcgctgctcacgcgcaacaacgaaactcactcacctgcaatantagcatctgcagagcgcggcatgatcacctagtgcacccgcctcactacatggctcaccccgaacagacaccggtgaatagcacacaataagtatagacccccacgtgagatagtcgatagaaggacccagggagcgaatccaatgaccnacggttattatacaggaagacaccgacgagagactgccactaaacctcgctgacganattcgctgcagcgtactgtagtacactag

SEQ ID NO: 173134 - DNA, 1067 bp, Homo Sapiens
  misc_feature (971)..(971): n is a, c, g, or t
attttataaagcggctggtccggccggaattcccgggatatcgtcgaccacgcgtcgcagaccctcgggcctcatcatggccaggaagctgatccaccttgagatcaagccggccatccggaaccagatcatccgcgagctgcaggtcctgcacgaatgcaactcgccgtacatcgtgggcttctacggggccttctacagtgacggggagatcagcatttgcatggaacacatggacggcggctccctggaccaggtgctgaaagaggccaagaggattcccgaggagatcctggggaaagtcagcatcgcggttctccggggcttggcgtacctccgagagaagcaccagatcatgcaccgagatgtgaagccctccaacatcctcgtgaactctagaggggagatcaagctgtgtgacttcggggtgagcggccagctcatagactccatggccaactccttcgtgggcacgcgctcctacatggctccggagcggttgcagggcacacattactcggtgcagtcggacatctggagcatgggcctgtccctggtggagctggccgtcggaaggtaccccatccccccgcccgacgccaaagagctggaggccatctttggccggcccgtggtcgacggggaagaaggagagcctcacagcatctcgcctcggccgaggccccccgggcgccccgtcagcggtcacgggatggatagccggcctgccatggccatctttgaactcctggactatattgtgaacgagccacctcctaagctgcccaacggtgtgttcacccccgacttccaggagtttgtcaataaatgcctcatcaagaacccagcggagcgggcggacctgaagatgctcacaaaccacaccttcatcaagcggtccgaggtggaaagaagtggattttgcccggctgggttgtggtaaaaccctgcgggctggaaccagcccgggnacaacccacgcggcaccggccggtgtggacagtggggccggggcttccctggcggtcccccgcgtgggtggaacctggccccaccggttcccttgt

SEQ ID NO: 173135 - DNA, 660 bp, Homo Sapiens
  misc_feature (615)..(615): n is a, c, g, or t
  misc_feature (626)..(626): n is a, c, g, or t
tactggacctggggaacaaccaagttcaagctctatatacaacgaggacaaaaatgaaccaggctccctgaaagcagggaatctaacctgtgctacggcgccttcccagtccacgagggcgtgagagtacatacacatgcaagtgcacatccagcgctcacccaagcaacacccttggagaaacacggactccaggcccaaatccagcctgagaccctcaaagggcagatccgctaacctcaagttttcagaagatctgaacccactgggggctcctgctcctctgcctgccccatgccagactaggattccagtgacataagcgccctctacagactcagaaggacagagaaggttctgctggaagtgggctcctcagcaaaccagcagataggggttcctttgatatttataccccaggttttttcactctcacgtgacatctatgtggggccaatgaagccaattcttcttttgtacatatgcagtcctgtaaagaatgcattcaaacgggatccgctaaattagggaattttctcctggggatttttcaacagtcttatggggggccagaagcttttccacaaaccagtgaaggttggcagcaaagaaagnctttttagganggagggagctgggcagcagctgctattttaggat

SEQ ID NO: 173136 - DNA, 1185 bp, Homo Sapiens
ggagcactgcccaactaaaatgcaattggtttgttactgagtactattcgtgggaagacagcatcctgactccctctctacagaatattgggagtaaaaatgatgcatccccggtggaaatattattgggggttggaagacagagacaggaaaaataagtcagaaacagacactaagagtcactggcaggctgactgcaggtatcaactctccagccgtggtagaataaaagagctaggggctgaaggggattaacacaaaagctgttaacaattaagtgatatctctggaagattcgagagacaggaggcaactcttctatagttttgacttgcccagcacatttccacatacacaaatgtgtatatgcacgtgtgtgcatgcacatacacatacacaccaatgattgctttccccggaagcccgacactataaataaagagaaatagttcccaaaaggaaagcccaacatgagcagcagcatctggacctcacacttgcagaaaccttcaccccaactgaaaactggctgggaaaaggcaaccaggagtcaagctcttgcaataatgccaaaaagggctgagtcagagaggaacaggctttccccaagccctctgcttctcatctctctgttctccaccaactcaccctgggtaccaagaggctacagtatcaggagggaggacgggcccaggacgtttgtctgggtagatgacaactaagacaactgtcacctcctgaaaggtatgtgacaggggttgtggagagggagggtatgttagctaatggagtaggagtctgtgtgtgcatgtctgtatgggcgtatacatgcatacacatatgtgcatgtgaaaacgcccattataaaaacaactgaaggagcttcggaatcgactgaaggcctaaggtatttcttgtcacgatcaagattcaaagtgggatgtacacagatgggaagccctaagtcatcaccagggcaactgtgggaggatccaatgccccacagaggaaagaaacagtaacctcatgtgaggaagagaagttcgtccccccgccgaatgcatgcggtggggatgcgtgcatttatcagagcaaaaccaacccggtcagccccaggatgacacacaggatgcaccccgaatgccgcactggatgccgcacagtataccccccgtgtggtccggc

SEQ ID NO: 173137 - DNA, 210 bp, Homo Sapiens
  misc_feature (188)..(188): n is a, c, g, or t
  misc_feature (191)..(191): n is a, c, g, or t
gggcattttagttgggcagtgctcccacccaccctccagatcccttccagctaaaacccttcccccttccctccatgtgtttctcagtttcccgtttcgtttgttggactgttccactgcccctcctcctcaccctatcacccatggatcgtaatgtaaaattcttttaccatgtcaagaaattattnaanatacaggtactttgacctc

SEQ ID NO: 173138 - DNA, 280 bp, Homo Sapiens
ctactactactaaattcgcggccgcgtcgacctctgggtgctgaagacagagggaggagagagccggcagttccctgcaggagagaggaggggctgctggacccaaggctcagtccctctgctctcaggaccccctgtcctgactctctcctgatggtgggccctctgtgctcttctcttcctgtcggatctctctcctctctgacctggatacgctttggtttctcaacttctctaccccaaagaaaagattattcaataaagtttcctgcctttctgc

SEQ ID NO: 173139 - DNA, 173 bp, Homo Sapiens
aaaggcggggacaggcacaggtggctaatgagctgatgttagtgctatctttagaaaacttaaagattgtcccaccaaaataataataattacaaaaaatcaccttaattgaactggacttggtaatactatctacagtctggtttatagaaattctacctctctatctctga

SEQ ID NO: 173140 - DNA, 782 bp, Homo Sapiens
gaggccggggcaggatacggactgcagggagtgtgagagcggctccttcaccgcttcagaaaaccacctcagacactgcctcagctgctccaaatgccgaaaggaaatgggtcaggtggagatctcttcctgcacagtggaccgggacaccgtgtgtggctgcaggaagaaccagtaccggcattattggagtgaaaaccttttccagtgcttcaaatgcagcctctgcctcaatgggaccgtgcacctctcctgccaggagaaacagaacaccgtgtgcacctgccatgcaggtttctttctatagagaaaacgagtgtgtctcctgtagtaactgtaagaaaagcctggagtgcacgaagttgtgcctacccctagattgagaatgttaagggcactgaggactcaggcaccacagtgctgttgcccctggtcattttctttggtctttgccttttatccctcctcttcattggtttaatgtatcgctaccaacggtggaagtccaagctctactccattgtttgtgggaaatcgacacctgaaaaagagggggagcttgaaggaactactactaagcccctggccccaaacccaagcttcagtcccactccaggcttcacccccacctggggcttcagtcccgtgcccagttccaccttcacctccagctccacctatacccccggtgactgtcccaactttgcggctccccgcagagaggtggcaccaccctatcaggggggctgaccccatccttgcgacaagcctcgctccgaccc

SEQ ID NO: 173141 - DNA, 594 bp, Homo Sapiens
ggcccgaaggtacaagttgcagaagcagcttgatagcctcacagccaggaccccatcagaaggggaggcagggactcagaggcaaacaaaagctttcttccctccagctggaattgtcaaaactggacaaggcagcctctcacctccagcagctgatggatgagcctccagccccagggagcccggagctctaactcatcatccccatcagttttcctccctctcagacctgtctttgaggacaaacagatttgtcagcctggtcagggtggcagtgggaaccgtcagaagactatgtgggtccatcgcccttcattggggaaactggagggacccagactgggcctttgggtccgccaatggaactggggggggtccccttggaaaaaggctcccaattttaaatgggcccgggggccctggctttcccccaacctggggaaaagtcctggggaaaatggacgggaaaatttggaaaaataaaacttttttgtgaaaattcccccctgccctgctacttcttacctcaagcccgcccagcccccgtctgctccttttgttttcgggcccgaatcccctcgtggggccctttgg

SEQ ID NO: 173142 - DNA, 964 bp, Homo Sapiens
tcttgatgagaacatgggacgtgtgaactatggtgcatatatcaacgattttaagggttggtttctaacctgactctcagttccaatatcctcacggactggacgatctttccactggacactgaggatgcagtgcgcagccacctggggggctggggacaccgtgacagtggccaccatgatgaagcctgggcccacaactcatccaactacacgctcccgcccttttatatggggaacttctccattcccagtgggatcccagacttgccccaggacacctttatccagtttcctggatggaccaagggccaggtctggattaatggctttaaccttggccgctattggccagcccggggccctcagttgaccttgtttgtgccccagcacatcctgatgacctcggccccaaacaccatcaccgtgctggaactggagtgggcaccctgcagcagtgatgatccagaactatgtgctgtgacgttcgtggacaggccagttattggctcatctgtgacctacgatcatccctccaaacctgttgaaaaaagactcatgcccccacccccgcaaaaaaacaaagattcatggctggaccatgtatgatgatgaaagcctgtgtctttgagggattctaccctgaacatacctcacagatcctccctgtcatgccacatttcactgattggaatgtggaaatggaaaaggaatttaggatgtgcattttcacctgaggtttccctgcatccctgcagtgccaaagccccaccttcagggaccacctggaatgtgtgaggggctgacagcacagtaacgtgcatacatatctgcagggctggaatggaagctttaaaggtggtagtgatttttattttggaagaatcatgttacctttttgttaaataaaatttgtactcaaatgatgatgtcactgtttttaatgtgcaggtatttgagggct

SEQ ID NO: 173143 - DNA, 170 bp, Homo Sapiens
ctttgaccctgttggccactgatggtttaactggctaatgggggcatcttggagaaaaagctaattcccataactatggggatgtgaaatggcttttctggcctttttgggaaagtagctatcagattcaataaaacagggctgccttccatcctgcttagcccggcctt

SEQ ID NO: 173144 - DNA, 258 bp, Homo Sapiens
ttctgccgcggttctattgcctaacagatagtgatagcgggtgacacgagagtgcagcatttcatccggcatcgacacgggaaaaaataatagatcagacatcatttaccaattaaaggtaggggtcgaagagaacgtgcatccgggggcagtatatatgcaacccgtaaaattctgtatccggtctggatttggaaattacgcagccgctcaactttgactcgtagtaattcatctaacccccctacccgtccgctc

SEQ ID NO: 173145 - DNA, 235 bp, Homo Sapiens
tgagggcagacacgtttgccaggtaccggggatcttgctgagcggcgatctttgcctgggacaacttctctttcacgttgccggacagatattgatcgcgggtctgccacgcgccagtggccggatgttgatagaccagctcctgcagctcggcagacaacttcttcctgcgacttgccgcatagtctcgtcatgagcggcatgtccacacgccaagctcgttcatacgagatcg

SEQ ID NO: 173146 - DNA, 261 bp, Homo Sapiens
aaccagccttgattaaccaggcctggcagactcctggcactatccagcttgacagctcgatcatgaattcctggggctggcgctggctgatgaacaactgcgggccacgcggctccgaacggacttcggccaggtagccgcgcacgcggtcaccagcgcgcagcacgtcgcgcggaaggcccttgtacttcggtaatgaagccttcggcgtttgcccaccgaggtacgacatagatgttagccgcgctctggcgcgctatg

SEQ ID NO: 173147 - DNA, 581 bp, Homo Sapiens
ggggcttttcaaagtcgtcccaccatcaatgaaggcaggccacttccggcgtagccatggcggctaacgctactaccaacccgtcgcagctgctgccgttagagcttgtggacaaatgtataggatcaagaattcacatcgtgatgaagagtgataaggaaattgttggtactcttctaggatttgatgactttgtcaatatggtactggaagatgtcactgagtttgaaatcacaccagaaggaagaaggattactaaattagatcagattttgctaaatggaaataatataacaatgctggttcctggaggagaaggacctgaagtgtgaatgagtttccttgacttacactagattttgttttggcttataatgacaagaaaatggaattttttttcccactttctaatgtttaaatcccataaagctaagtttcccgttaaagggaagtgctttgaagatgtgtacccatttttgtaagttaatcatgattatcctggaaaaagaagaaaagagcttcttctttgcagatgaaaataaaggtgtttttggaaaaacgaagtacccaagagagaaaac

SEQ ID NO: 173148 - DNA, 227 bp, Homo Sapiens
cctaccagtcgtcattgatgacgagggcgagagctcaacgggtgagcctgaagtcgtagtaagtaagcctccatatgctgctgctcaacattgatggtgttatggctgtggcgaagcaacttcccgcgatctatcactcatcttgtttgagctcggataatctcgctaatagtcattgtgtcgcagtactcttacatctgtgcttcgactggtaacatgaagctgtc

SEQ ID NO: 173149 - DNA, 310 bp, Homo Sapiens
accgttgttaatcactgtactttggctataagaggaatattcttgctgaagtcgtctgtgatagaccctgtggatgcatttggcttggaaatacgaaagcgccttgatttagaatcccctcaagtctgcctgttcacaggtgggataacttttattctcattcctctccagaaggaatcaaggggtgtcataaaggaggtacgtctgctaagcagaactacctcccctccccaaagaaagtctgttaccatgtatacttttaaacattttattttaaaataaaattagactcacaagagtaacaaaaacg

SEQ ID NO: 173150 - DNA, 407 bp, Homo Sapiens
tctgactggtgcactctggcccaggaggcaaaaaaacaatacacacaaggcattcgcaaagaacagtgagcagataatagataaatctttagttttatgagagtgacaagactgagaggttttacgtaagggattgctgttctcggctttgaaagccttctctacactctctgcagggctcacttaccacactgtgacttccactagagtacactgggcatctgatccctttctagattccttcaggaccacaatttattcatcttggtgttatttcaagtgcctagcatagcatctttcattcagtggactggtaaatgtttgttaatgagtcgctagtacatatatctgagcaaaaccagaaattcgcatttctggaaaaaaattccattccaatactgctaact

SEQ ID NO: 173151 - DNA, 265 bp, Homo Sapiens
  misc_feature (87)..(121): n is a, c, g, or t
ctgacggcttgattgtttgctttttagagccctgtggggatattaaagagccataacaaattatctgaatataattatcaataccannnnnnnnnnnnnnnnnnnnnnnnnnnnnnnnnnncagcactactgatgttttaggccacgttgattctttattgtgggggctgtcctgtgccctataggatgttagcaacatccttggtctctctacctactagatggcagtagcaccccctctatgtgtgacaaccaaaaatatctc

SEQ ID NO: 173152 - DNA, 211 bp, Homo Sapiens
tgggcgtcagtgagactccatttcagttatctgctttgtggatgagttgttgaatactttattgaaagttggtttccctctgttatataggacccagctgtttttctcccattattctttgccccagtcaacagcatcatttcccagtttgagatgaagagacgtaaagaagccctctaataaggaaattacgccgggcctcactgttaat

SEQ ID NO: 173153 - DNA, 169 bp, Homo Sapiens
caaatctatagagatgtgtgtgaaaacagaaggtagttccaccgagattcacatccagattggacagttagtgttgagtcgaaggggatgatgatgaaaacccgtatgttgctaaattgcttgagttgttcgaagatgactctgatcctcctcctaagaaacgtgctcg

SEQ ID NO: 173154 - DNA, 605 bp, Homo Sapiens
tgacgtttgaatgttggtgaagagaagaaagaaattaaattccgaaataatagaatcttctagacataaccgtaagacctagaaaatgttatacattgtatgtttgtttcctcatctatcaaattcagtggtgaaagacaaggatcaatcccactgaacaaacaaattaaatatacagaactgtatacaaatacacttttcttttgagcacagttacctatcataaacaaaaacaaaaatgtgagcagacataaaatgaagtcaatcaaaaggaaaacgattactgatttccattaacaggtaggcctgataaacccagaaaacaaagctatctcattactagatgcagtatcagtaatactaaaataacatttattgaatggtttctgtgcattagacactgaggaaagttcacaactcccaactacgatccctattttaatgtgggaattgaggctctgagatagttatatatcatttaagtgggtagagtgcgatgtggcctaagtgcccttacaaccattaagttcctggggagcaattagcctccactcacacctcaactaactcgtaccccaacattcagccgtcaggtagcgagctga

SEQ ID NO: 173155 - DNA, 333 bp, Homo Sapiens
tgacggtgaatgtttgaaacttatcctcttgtatgttaaatatttaaatatttgtatatggccctattcagcctgtgctttataaatcacaaaagagctgggttttatatgtttgtttttttatttctaagctctctgcgaagaaagttacagaattgtctccttaagatattttttctctgtaatttttttatatcatgttgtgatttccataaatatgtgcagttactcttgataatacttgtcttattcatttcaggttgctataacaaagtaccatagactgggtggcttataaacgacagaaatttatttcttacagctctggagctg

SEQ ID NO: 173156 - DNA, 411 bp, Homo Sapiens
  misc_feature (134)..(204): n is a, c, g, or t
  misc_feature (207)..(237): n is a, c, g, or t
gctcggaccctgatcggaactaggttgggtgaacctcatctctactaaaaatacaaaaattagccgggcgttgtgacgcacacccatagtcccagctagctccggaggctaagacaagagaatcacttgaactnnnnnnnnnnnnnnnnnnnnnnnnnnnnnnnnnnnnnnnnnnnnnnnnnnnnnnnnnnnnnnnnnnnnnnnctnnnnnnnnnnnnnnnnnnnnnnnnnnnnnnnttagcatgtaaattgtacctcaaatttgagcagtttttgtgttggtgtaaattaaagtaaaaagcagtccacaataatgttttgtaatactgcacaccagttctaccagattttgtaactatcagatttaaatgaaaaaagagaaggaagaggctgattgctggagtgttaaag

SEQ ID NO: 173157 - DNA, 465 bp, Homo Sapiens
tccacctgcctcgggctcccaacgtgttgtgatgacaggcgtgagccatcacacctggccatgtaatactttttaaaatgtggattgttacagttacttagtcttcataataagataacattttattttgctgccatgtagtaggatggagatattctattctgctccatgaagtaatacagggatccacttgtcatgggtgtacaatttcacacttcagtctgtggggaggagaaggaggaaattcaggacagtttgccattgaggaggtgagcaggaagttctgctatttcttttactcacattgcatcattggtgagaacttagtgacacggctatgcctacctataaggaaggctgggaaatggagcctatgtgactgattgtatgctcaggaagaacatgagaatagatgttttgtgagacaactagtagtatggtttttcggcgtgtgcagggtaccga

SEQ ID NO: 173158 - DNA, 578 bp, Homo Sapiens
ccgctctagagtatcccctgcacacgccgagcccccatacctggccacagggtacttcttgccttgtagaatgagtttggaagtattccctcttcaattttgtagaataatttgagtagaatttatattaattcttcttcaaatatttggtagaattcagcagtaaaaccatcaggtcctatgcttttctttaaagagatacgtttaatttctgctttcatctcattactcatagttggcctgtttaagttttctgtttctttatgattcaattttggtaagttgtatgtgccaaagaatttagctgtgtaccgagccaaaatgctgaagcatagtcatacataatagcctctaatgatccgtgagccaccatgcctggccacggggtacttcttgccttgtagaatgagtttggaagaattccctcttcaattttttagaataatttgaggagaatttgtattaattcttcttcaaatatttgggagaattcagcagtaaaaccatcaggtcctatgcttttttttaaagagaaacgtttaatttctgctttcatctcattacctcataggtggcct

SEQ ID NO: 173159 - DNA, 462 bp, Homo Sapiens
tcggctcggcccttataccacgatcacccagcaatggtggctcaggcacggggctgtggttacctctctcttcatgacacccctggacgtggtgaaggttcgcctgcagtctcagcggccctccatggccagcgagctgatgccttcctccagactgtggagcctctcctataccaaatggaagtgcctcctgtattgcaatggtgtcctggagcctctgtacctgtgcccaaatggtgcccgatgtgccaactggtttcaagaccctacccgcttcactggcaccatgagatgccttcgtgaagatcgagaggcaagagggaaccaggaccctctggagcggcctccccgccatcctggtgatgactgtgccagctaccgccatctacttcactgcctatgaccaactgaaggccttcctgtgtggtcgagccctgacctctgacctctacgcacccatgg

SEQ ID NO: 173160 - DNA, 828 bp, Homo Sapiens
ctggcgctcactgtggctgggctggggccccactgcccttcgagatgtgcccttctcagccctgtactggttcaactatgagctggtgaagagctggctcaatgggctcaggccgaaggaccagacttctgtgggcatgagctttgtggctggtggcatctcagggacggtggctgcagtgctgactctaccctttgacgtggtaaagacccaacgccaggtcgctctgggagcgatggaggctgtgagagtgaaccccctgcatgtggactccacctggctgctgctgcggaggatccgggccgagtcgggcaccaagggactctttgcaggcttccttcctcggatcatcaaggctgccccctcctgtgccatcatgatcagcacctatgagttcggcaaaagcttcttccagaggctgaaccaggaccggcttctgggcggctgaaaggggcaaggaggcaaggaccccgtctctcccacggatggggagagggcaggaggagacccagccaagtgccttttcctcagcactgagggagggggcttgtttcccttccctcccggcgacaagctccagggcagggctgtccctctgggcggcccagcacttcctcagacacaacttcttcctgctgctccagtcgtggggatcatcacttacccaccccccaagttcaagaccaaatcttccagctgccccccttcgtgtttccctgtgtttgctgtagctgggcatgtctccaggaaccaagaagccctcagcctgggtgtagtcttccctgacccttgtttaattcccttagtccaaaagatgatggaacttcc

SEQ ID NO: 173161 - DNA, 1481 bp, Homo Sapiens
  misc_feature (1424)..(1437): n is a, c, g, or t
cgctgcgagcgcgcgcggaccgcgcacaggcggcggagccggtatgggcccgcctgaccctgggcgccgcgccgcacgagcaccagcctagagccaggactgaagcttcaagatggctgaccaggaccctgcgggcatcagccccctccagcaaatggtggcctcaggcaccggggctgtggttacctctctcttcatgacacccctggacgtggtgaaggttcgcctgcagtctcagcggccctccatggccagcgagctgatgccttcctccagactgtggagcctctcctataccaaattgccctcctctctccaatccacagggaagtgcctcctgtattgcaatggtgtcctggagcctctgtacctgtgcccaaatggtgcccgctgtgccacctggtttcaagaccctacccgcttcactggcaccatggatgccttcgtgaagatcgtgaggcacgagggcaccaggaccctctggagcggcctccccgccaccctggtgatgactgtgccagctaccgccatctacttcactgcctatgaccaactgaaggccttcctgtgtggtcgagccctgacctctgacctctacgcacccatggtggctggcgcgctggcccgcctgggcaccgtgactgtgatcagccccctggagcttatgcggacaaagctgcaggctcagcatgtgtcgtaccgggagctgggtgcctgtgttcgaactgcagtggctcagggtggctggcgctcactgtggctgggctggggccccactgcccttcgagatgtgcccttctcagccctgtactggttcaactatgagctggtgaagagctggctcaatgggctcaggccgaaggaccagacttctgtgggcatgagctttgtggctggtggcatctcagggacggtggctgcagtgctgactctaccctttgacgtggtaaagacccaacgccaggtcgctctgggagcgatggaggctgtgagagtgaaccccctgcatgtggactccacctggctgctgctgcggaggatccgggccgagtcgggcaccaagggactctttgcaggcttccttcctcggatcatcaaggctgccccctcctgtgccatcatgatcagcacctatgagttcggcaaaagcttcttccagaggctgaaccaggaccggcttctgggcggctggaaggggcaaggaggcaaggaccccgtctctcccacggatggggagagggcaggaggagacccagccaagtgccttttcctcagcactgagggagggggcctgatttcccttccctcccggcgacaagctccaggggcagggctggcccttctgggccgggcccagcactttccttagaacacaactttctttcctgccggcccccaaggcgtgggggaatccatccctttannnnnnnnnnnnnnaaggtttcaagagactaaaatctcttcccagactgcccccccca

SEQ ID NO: 173162 - DNA, 856 bp, Homo Sapiens
  misc_feature (834)..(834): n is a, c, g, or t
  misc_feature (845)..(845): n is a, c, g, or t
ctggttcactatgagctggtgaagagctggctcaatgggctcaggccgaaggaccagacttctgtgggcatgagctttgtggctggtggcatctcagggacggtggctgcagtgctgactctaccctttgacgtggtaaagacccaacgccaggtcgctctgggagcgatggaggctgtgagaggtgagggcccagattgccgtggcaggggacaggtggggtcctgaatggggtctcactgagccggcctcgcgtttgcagtgaaccccctgcatgtggactccacctggctgctgctgcggaggatccgggccgagtcgggcaccaagggactctttgcaggcttccttcctcggatcatcaaggctgccccctcctgtgccatcatgatcagcacctatgagttcggcaaaagcttcttccagaggctgaaccaggaccggcttctgggcggctgaaaggggcaaggaggcaaggaccccgtctctcccacggatggggagagggcaggaggagacccagccaagtgccttttcctcagcactgagggagggggcttgtttcccttccctcccggcgacaagctccagggcagggctgtccctctgggcggcccagcacttcctcagacacaacttcttcctgctgctccagtcgtggggatcatcacttacccaccccccaagttcaagaccaaatcttccagctgcccccttcgtgtttccctgtgtttgctgtagctgggcatgtctccaggaaccaagaagccctcagcctggtgtagtctccctgacccttgttaattccttaagtctaaagatgatgaacttccnggcacaaaagnaaaaactcgaa

SEQ ID NO: 173163 - DNA, 556 bp, Homo Sapiens
tgcacacgccgaatatccaaactttgacttaatttcatacaaagctctgatgacaggccatgactgtagagtggtcagaactgtgtggttggtttgagggagcgaattcggggaaggcacttggtgatataactttgttttgtttacagagtacctgctcgggccaggtaaatgctattggatgtaatccagtagtgtgtaatataaattcaaaccatatccacacacaacaactaattgtatgaaacttttatatcctaatttaaaagctgtgaaattagttttcacgcatcaaaccggattgtttatatgtttaaacattttatgctcttatttaaagaagactttgagctatttttttctgtaccctgtaaaatattgaaaactaacataatatgttgaggttgcttggaaatgtacataaaactaaaattttctgaatcgtgtgtttatgtttgaaatctgtgttttaactttgtaagtaaattctctgcctttgtatttatattttacaaaaattttcttaaaaggcaataaaactgttgaggaaaggaga

SEQ ID NO: 173164 - DNA, 318 bp, Homo Sapiens
ccagaggatcccctgcacacgccgagcgaccagactgtgtttcacaaaagtctcttaactgtatactttagatagtcagattctgaaatgccggtatataatttactgcataaaatgcatgtttggctgtgagtcaaaaactgcggttgaggttccagtgctggttagggagtttgttctctgtatagatcgaggtccatttaggggcttatggataataaaaactgcacgtggtacatctatgccgtttgttaaccaacagaactgttcctgctaaaatgtttgtatggtgtttcggcgtgtgcagggtaccgagct

SEQ ID NO: 173165 - DNA, 989 bp, Homo Sapiens
  misc_feature (284)..(292): n is a, c, g, or t
  misc_feature (849)..(849): n is a, c, g, or t
  misc_feature (879)..(879): n is a, c, g, or t
cacgaagcctcagtttactcctcacaacaaatcctgtgaagtatctaacaacagatgtctcagttacttcacaggatttgttgtgaggtccaaaggaaggaacagatgcagaaaacactttaggaggtgggaaaagcttcacaaggttgttctcatgaatcagaaagttgaaaagacctgccatgggtcctccctgggtggaggtcagactagaggacattggcagtagtccccttcttaagctgttttgatgacacaaagaaaaggctgagattctgaactannnnnnnnnaacataaatgccacttaactagggaccagctctgtgcctgtgccaaaccaattggtgtgagcttgaggaggagtgaaggatggggacagagcatacacattgatgacaaagaggaatcagacattcgaaacaaacatgttctcagagcttcgtggaaattctgtcaaggccctaattcttgcctgctattctcttggccacaaaagatcacagaccagttactatagaaacaattctcttcacaggttgtgcatgttaggatggagatggaaaagatttccttatcaaaaaaagaaagaaattaggttttcagatatatttgccctctatctaaagtggtcctcccttttatgagcagaaggaaagaagaagctgcaatgattgcaaatatgcttctaattcccttgcagttaaatttcaaactttcattgtaggacttggtggagctcgtgcgtttctaatacatgcagaaagcgtgtaattttctccaaagggaaagataagagaataagggaccataaagcttgagtggtgaaaaccttgccaaccctcagggntcccccttctgtcctgggggaaagccaggncacccccaaattccacccaacaatgaaagccctacgttttgaacctccttaacaattttccatcttggttttctgagttccaagggcttggttggggactggccccttgg

SEQ ID NO: 173166 - DNA, 837 bp, Homo Sapiens
  misc_feature (97)..(97): n is a, c, g, or t
  misc_feature (164)..(172): n is a, c, g, or t
  misc_feature (747)..(747): n is a, c, g, or t
taggaggtgggaaaagcttcacaaggttgttctcatgaatcagaaagttgaaaagacctgccatgggtcctccctgggtggaggtcagactagaggnaattggcagtagtccccttcttaagctgttttgatgacacaaagaaaaggctgagattctgaactannnnnnnnnaacataaatgccacttaactagggaccagctctgtgcctgtgccaaaccaattggtgtgagcttgaggaggagtgaaggatggggacagagcatacacattgatgacaaagaggaatcagacattcgaaacaaacatgttctcagagcttcgtggaaattctgtcaaggccctaattcttgcctgctattctcttggccacaaaagatcacagaccagttactatagaaacaattctcttcacaggttgtgcacgttaggatggagatggaaaagatttccttatcaaaaaaagaaagaaattaggttttcagatatatttgccctctatctaaagtgttcctccttttatgagcagaagaaagaagaagctgcaatgattgcaaatatgcttctaattccttgcagttaaatttcaaactttcattgtagacttggtggagctcgtgcgtttctaatacatgcagaaagcgtgtattttctcaagaagggaagataggagataagggaccataaagctgagtggtgagaaccctgcccacctcagggtcccctctgtcctggggggagcccagncacccccattcaaccaacatgaaggcctacgtttgaactcattagcatttccatctgctttctggctctaggcttgttgtgactgtcctt

SEQ ID NO: 173167 - DNA, 981 bp, Homo Sapiens
  misc_feature (831)..(831): n is a, c, g, or t
  misc_feature (834)..(834): n is a, c, g, or t
gatcccctcccacgccgaataaccatacttccgctcctttggggataaacctattaattattgctactatcaagagggccgggcattctctgctggtaattcctgaagaggcatgactgcttttctcagccccaagcctctagtctgggtgtgtacggagggtctagcctgggtgtgtacggagggtctagcctgggtgagtacggagggtctagcctgggtgagtacggaggatctagcctgggtgagtacggagagtctagcctgggtgtgtatggagggtctagcctgggtgagtatggagggtctagcctgggtgtgtacggagggtctagtctgagtgcgtgtggggacctcagaacactgtgaccttagcccagcaagccaggcccttcatgaaggccaagaaggctgccaccattccctgccagcccaagaactccagcttccccactgcctctgtgtgcccctttgcgtcctgtgaaggccattgagaaatgcccagtgtgccccctggggaaagggcacggcctgtgcttcctggacacgggctgtgcttgggccacagaaccacccagcgtctcccctgctgctgtccacgtcagttcatgaggcaacgtcgcgtggtctcagacgtggagcagccagcggaagctcaggagcagggcactgtgtccggcggacaaagtccactctgggggagctctggcggggaccacgggccactgctcacccactggccccgaggggggtgtagacgccaagactcacgcatgtgtgacatccggagtcctggagccgggtgtcccagtggcaccactaggtgcctgnctngcctccacagtggggttcacacccagggctccttggtcccccacaacctgccccggccaggcctgcagacccagactccagccagacctgcctcacccaccaatgcagccggggctggcgacaccagccaggtgctggtcttgggcc

SEQ ID NO: 173168 - DNA, 422 bp, Homo Sapiens
cgagctcggtaccccacagcgccgcacggtcactgcatcctcctgctcattgctgcccagccctgccctgctccaggggaaacaattagagatcagagcactttgggtgcacatctgggcactcggtggtggctgagggggaaggctttgatataaccatcaccacccactgtacggctctcttccaaaagaagagacttatgatagagtcaagtttctaatacagaattattttaagtgttttgaacttaatttttaataacatgcatgggtccctctcactaatgtttcaacaatagggaaaaatgagaactatgtggacacttgtttcattggaaggttagggggaataatttctcatcactaggaatatagacaaatgactgtatggaccttcggcgtgtgcagaggatcctctggag

SEQ ID NO: 173169 - DNA, 674 bp, Homo Sapiens
  misc_feature (534)..(534): n is a, c, g, or t
  misc_feature (541)..(541): n is a, c, g, or t
  misc_feature (595)..(604): n is a, c, g, or t
  misc_feature (622)..(622): n is a, c, g, or t
  misc_feature (649)..(649): n is a, c, g, or t
ctttaggttcccctccccccagaataaacctttactgtagtgtcatcaagacatacagtaaagtttgaaatatgggatacagctggtcaagaacgataccatagcctagcaccaatgtactacagaggagcacaagcagccatagttgtatatgatatcacaaatgaggagtcctttgcaagagcaaaaaattgggttaaagaacttcagaggcaagcaagtcctaacattgtaatagctttatcgggaaacaaggccgacctagcaaataaaagagcagtagatttccaggaagcacagtcctatgcagatgacaatagtttattattcatggagacatccgctaaaacatcaatgaatgtaaatgaaatattcatggcaatagctaaaaaattgccaaagaatgaaccacaaaatccaggagcaaattctgccagaggaagaggagtagaccttaccgaacccacacaaccaaccaggaatcagtgttgtagtaactaaacctctagtttggaactagctggaatagtcttntgctttnctaaatgttaataacaatggaatttggagcatttaaccagcccagttccccttnnnnnnnnnnacgccttatgattgagtnaagtttttaataccagaaatttttttnagtgttttggaccttaatttttaat

SEQ ID NO: 173170 - DNA, 476 bp, Homo Sapiens
ctcggtaccctgcactcgccgaatgaccatactctggtttttattggtcttcctaaatgctcctgccttgaagtatttagtcatttacacaacactcaactagaagtattctcagtaatttccccaagactcagtcagttatctgttttgttggttagtttgttttgtgtattaaaagcttcattctgttactgtattgccagagccatggcaaagaagcatttcaaccttctgagcacttgtggacttcagaatctctgagcaatgaggtttatgttttggttaattataagaaaaaatatcctttgtgaattatgctggtagcaatgccttacagtaaacaaagcatattcacatcctgatttcatttgatactcacaataaccttacaaagtagaagaaaaagtataaaattttcattttacagttaagaaagctgaggctcaaaaatgacttctctagaagcgtgtacattg

SEQ ID NO: 173171 - DNA, 370 bp, Homo Sapiens
ttggccctcagcgtccccttcccatgcctggactgctggagagccctgaacacaccccatcttcatgcctccagcactagcccaagcccttccctctgccaagagcactaagtgcaactcaaggtcacttctagggaccctttcctgtccctcctcctgccaggtgacatgaggatcctgctggccctgcttaacaatgatgcacaccacagttagttcagccgaggtcgctctcccagacttactgccacctacacagcactgggactgactgtttagctttattctttatttcgtgtactttattggagtgtctgttgaaagcaaaaccatccaattaggaacaatccaaaggcagccagcatggagt

SEQ ID NO: 173172 - DNA, 634 bp, Homo Sapiens
  misc_feature (195)..(195): n is a, c, g, or t
tgcacacgccgagtgaccacacttactataaaacaaaaggtaatagcatggtcaagggccaggtatattgtcctagttccagtcgaaggaggggagcaatccttgcctccagaaggaaactggaccctggttgagaccttgattgaaactcctctggggattcgacctttgaccaagatcccaccttatcatggnccttattaccagaccttagctgagatcaaaaaaacagattaggcaaagggaaaagtatgggcctaatccgaaggcctgccactgcaaatcacgtggctttagtttagagcctaaagagtttgataaacttgttgccctccttaagttaactaaggatcctttcattcatgaaatagctacaatgataatgggcatcagtcctgcttatccatttactcaagatataattcatgatgtaggtattactgttatgattgaaaacttggtcaataatcccaatgttaaagaacaccctggagctttaagtatggtggatgacagctctgagtcttccgaagaaccaaaatcaggggagtcatatatacatcaagtttgtaaaggcataatctcttgccccgttgaactcccctgtgcagctgctgaggtatgtgagggctgg

SEQ ID NO: 173173 - DNA, 490 bp, Homo Sapiens
  misc_feature (67)..(67): n is a, c, g, or t
aaatggcttctggagtgaataccaggattgatgatctccaaatggttctgaatcaaacggaggatcnccgccagagggttctgcaggcagctgctaagaacatccgtgtctggttcaccaaagtgcggaagatgaaggccatctatcacaccctgaacctgtgcaacatagatgtgactcagaaatgcttgattgcagaggtctggtgccctgtcaccgaccttgactccatccagtttgcactcagaaggggcacggaacacagtggttccactgtaccttccattttgaacaggatgcagacaaaccagactcccccaacctataacaaaaccaacaagtttacctatggctttcagaacatagtagatgcttatggaattggaacttaccgagagataaatccagctccgtatactattatcacgttcccttttctatttgctgtgatgtctgggctccggcgtgtgcaggggataactctagagtc

SEQ ID NO: 173174 - DNA, 1430 bp, Homo Sapiens
ggggtgacgggtccgcgaggcccagctcgcgcagtcgttcgggtgagcgaagatggcggccgagagggaacctcctccgctgggggacgggaagcccaccgactttgaggatctggaggacggagaggacctgttcaccagcactgtctccaccctagagtcaagtccatcatctccagaaccagctagtcttcctgcagaagatattagtgcaaactccaatggcccaaaacccacagaagttgtattagatgatgacagagaagatctttttgcagaagccacagaagaagtttctttggacagccctgaaagggaacctatcctatcctcggaaccttctcctgcagtcacacctgtcactcctactacactcattgctcctagaattgaatcaaagagtatgtctgctcccgtgatctttgatagatccagggaagagattgaagaagaagcaaatggagacatttttgacatagaaattggtgtatcagatccagaaaaagttggtgatggcatgaatgcctatatgggcatatagagtaacaacaaagacatctctttccatgttcagtaagagtgaattttcagtgaaaagaagattcagcgactttcttggtttgcacagcaaattaccaagcaaatatttacatgttggttatattgtgccaccagctccagaaaagagtatagtaaggatgaccaaggtccaagtgggtaaagaagactcatcatccactgagtttgtagaaaaacggaaagcagctcttggaaaggtatcttcaaagaacagtaaaacatccaactttactacaggatcctgatttaaggcagttcttggaaagttcagagctgcctagagcagttaatacacaggctctgagtggagcaggaatattgaggatggtgaacaaggctgccgacgctgtcaacaaaatgacaatcaagatgaatgaatcggatgcatggtttgaagaaaagcagcagcaatttgagaatctggatcagcaacttaggaaacttcatgtcagtgttgaagccttggtctgtcatagaaaagaactttcagccaacacagctgcctttgctaaaagtgctgccatgttaggtaattctgaggatcatactgctttatctagagctttgtctcagcttgcagaggttgaggagaagatagaccagttacatcaagaacaagcttttgctgacttttatatgttttcagaactacttagtgactacattcgtcttattgctgcagtgaaaggtgtgtttgaccatcgaatgaagtgctggcagaaatgggaagatgctcaaattactttgctcgaaaaacgtgaagctgaagcaaaaatgatggttgctaacaaaccagataaaatacagcaagctaaaaatgaaataagagagtgtggagatttcggcgtgag

SEQ ID NO: 173175 - DNA, 158 bp, Homo Sapiens
tgagttgccccccacacctgcttatagatggaaatgcatagactcagagaggttgggggatcatatgggcagctatagaaatccagtggacctcaaatcccgacatttctaacctgaattaaattctctcacccttgtatggtcgttcggcgtgtgca

SEQ ID NO: 173176 - DNA, 904 bp, Homo Sapiens
  misc_feature (471)..(575): n is a, c, g, or t
atgaatcactgtgctcagccaccatctggagttttaaaaggctcccatgtgagtccctgtgatggccaggccaggggacccctgccagttctctgtggaagcaaggctggggtcttgggttcctgtatggtggaagctgggtgagccaaggacagggctggctcctctgcccccgctgacgcttcccttgccgttggctttggatgtctttgctgcagtcttctctctggctcaggtgtgggtgggaggggcccacaggaagctcagccttctcctcccaaggtttgagtccctccaaagggcagtgggtggaggaccgggagctttgggtgaccagccactcaaaggaactttctggtcccttcagtatcttcaaggtttggaaacctcgcaaatgtcccctctgatggcgcaatccgcgcgtgtgcgtgcgtcgcgcccgtgctgcgtcagaaaccccctgttctcacnnnnnnnnnnnnnnnnnnnnnnnnnnnnnnnnnnnnnnnnnnnnnnnnnnnnnnnnnnnnnnnnnnnnnnnnnnnnnnnnnnnnnnnnnnnnnnnnnnnnnnnnnatgccggttacgcttccccccttcacggctctgtctgcggcccgttcctccggtgtcattcgcgtccccgcctccgttatgctcgtagaccggcctccccccgtagcctgtgctggtttcgcatacctcccccgctcgtttcttcgccccccccgccgggcccccgtgtccgcgcgccttgtcacgggcgtcctatcgcgaccccccacgccacgcatcccgtccgcacctgcggataccggccccgcggggccgcgcgccattttcacccgcccgtgcctttcgcccgtgtgctccccccgcttaaaaacaagatctctgcaatcacg

SEQ ID NO: 173177 - DNA, 325 bp, Homo Sapiens
  misc_feature (232)..(252): n is a, c, g, or t
  misc_feature (266)..(266): n is a, c, g, or t
  misc_feature (281)..(281): n is a, c, g, or t
tgcacacgccgaaccccacaccaagaagtaaaaggatgtgcttgtttaattctatgagtttatagtccaagagaaaaaggtttatggggtttatgggttatcaggttttacatggattaatctgaataactggtcaactctgttatgatagtggaaacttattatgaaattgtgttccagttcagtaattttctagttctatgattctcaattctggtgcacatgagctttnnnnnnnnnnnnnnnnnnnnntaatgtgtgccgtnttctgacaggttcantaaaactctctggggatggggcttgaagaatgggtatgtttcta

SEQ ID NO: 173178 - DNA, 744 bp, Homo Sapiens
agtgtatcgggacattggagaagagatgctgctccacgcctttgaaggctacaacgtgtgcatctttgcctatgggcaaaccggggctgggaaatcctataccatgatggggcgacaggagccagggcagcaggccatcgtgccccagctctgtgaggacctcttctctcgcgttagtgagaaccagagtgctcagctatcctactctgtggaggtgagctatatggagatctactgtgagcgggtacgagacctcttgaaccccaagagtcggagttctctgcgggtccgggagcaccccatcctgggcccgtacgtgcaggacctgtccaaattggctgtgacctcctacgcagacattgctgacctcatggactgtggaaataaagcacggactgtggctgcctccaacatgaatgagaccagcagccgttcccatgccgtctttacaatcgtcttcacacagcgctgccatgaccagctcacggggctggactcggacaaggtcagtaagatcagtatggtggaccttgctgggagtgagcgagccgactcctcaggggcccggggcatgcgcctgaaggaaggagccaacatcaataagtccctgactacactagggaaagtgatctcggcccttgcagatatgcaatcaaagaagcgaaagtcggattttatcccctacagggactctgtgctcacctggctgctcaaggaaaatttgggggggaactcacgcacaga

SEQ ID NO: 173179 - DNA, 214 bp, Homo Sapiens
tgcacacgccgagaccccagacccggcctattttcttaaaggggaacaaatgatcttgacaacatattattccataaaaccagtttagggcacaggccagttcctgattagaacacaggacctgtgggagggactatcagagatgcaaaaattacttcaagatgatgaacctggaacatcgtatggacattcggcgtgtgcagggtaccgagct

SEQ ID NO: 173180 - DNA, 1342 bp, Homo Sapiens
  misc_feature (750)..(831): n is a, c, g, or t
  misc_feature (1172)..(1181): n is a, c, g, or t
catgatgctgatgcagtccagcctgtcaccatctcaggggtaagcccacagagtaggagggtggcttcaaccccaagtcccactgcagtaaggagatgaatattccacacatgaagcagctcacgtacacatagataaaccgccctgctcaccgcccgaccttcttagacctaacccaagtttagaaaataatagcaaaacccactggggagattggaagaatggcagagaggattctcctcaaagccacgggggctatggatgtgaatcttagcagacttgagactcccagctccaggccccttaaaaccagatcaggtcttgaggggaaggagagagaagctaggatggggattcaagtcccatgaagcctttctgtagcctctggagctgcacctggatggtgagtctgatgttttaggggtgtggctactggctaagcagatgtgagggtgggaaggggaagtgacaccacttcccacacgggggacacacaggtgggaagacaggtaggcctggatcactttgcagtcctggcatgggaggccccaggaagcctacaatctaactaaaaagattttcccagtggtaatttcttttcctttctgtttttacttcctgattatcagtgttgttagactttaaaaacacagatacagactagtcccaagctggactctgtgaataaagttgtttcttttataaatattgttaattacaagtaatcctcactccaggtaatttcagtgnnnnnnnnnnnnnnnnnnnnnnnnnnnnnnnnnnnnnnnnnnnnnnnnnnnnnnnnnnnnnnnnnnnnnnnnnnnnnnnnnngctcccaaacttttcacagaaagtctgagagcaaccatgtaattataaaggagccctacctctcaagagtgaagtaagggtgagaaagactatgtcatttcagcctgaagaagccagagacaggagaatgtgtgtcacttaaagaaaaatagggattagcaacaatgtttggttgaaaagccagaaataataaaagatagtaaaattttgattaccaaaggggaaaacaaaaagccaaacaactttcagatttctgtacagagcttcttcctattaagtgcctaaactataggcaaactttggtgttcccactaaaacacaagagcctcacacaattaggnnnnnnnnnntcaaaagaaacaaggaaactgagaatggaagttagtgtaaatctctgcatttggggagttgtcattaactccagagcccagcatagtttccatggagccctgaagggaggggacctcctgccacaaagagtttcgttccagacgagtcgtagcagtgggtg

SEQ ID NO: 173181 - DNA, 911 bp, Homo Sapiens
aagcccccaacatccgggccttaatatccttttccaaaaaataaaggggccattccatttcaaattaagaagggttaccaattaaggttccttccaaaggtccaagagcccacagttcctgaggttatgataactaggcatgaggagtcttccaggctttctcttttgtcccagtactccactgaagtctcatcccgtttttcagggggggccttttagcactcactgtcggttgtacattctttgtggtctctttctcctcagggttttacagtttctggtataggttctgcctctttctttgtttgatccactggaacaggcttttctccaggctttagctgcacaaatttgggtggaaatttttgtctgaggtctaaaagtaaagcatccaaacgttgtctctgaaaaatagagcttggttcttctttccttttggctttaggtctgactttatcttgctcttcatgatctttgaagtgccaccaataccctttggaaggatgatatcgacagtatgacatagcttcatcaaaagctgactgaataccatgcactgcagtaagcactctagagtttataactgatcccaagtctggtgcctgatagatcactccagcaatgatatagtaatcagctagtgggataacttgggcaggggactgccgctgttgcttccgaatgatgaaaagaatgggctcttgagcatgcaaaaggatgtactcgattccaaccatctgattcaagtgttctaatgttagcctctgcattttgaccacttcattattacatgttctgtcataaaaaggattacttctttctgaaaagtaatccaggacactaccactgttcaaaatagggatccaagagctgtcaacccaagaaattcccagcagattgtctcggatatc

SEQ ID NO: 173182 - DNA, 302 bp, Homo Sapiens
cgcaaatttccttccactcggtaacttcctccagttcatacattcatgagtgcagggtacatatataaatatccacacgcatacatccacacacactgcctcgagggctggggaagactaaaatttattggccacacacagcagggcctctggtggactcacccacattgctcccaggagagcagtgggctcacttccttctctctggtctctgccttcacacagaccaagaaccctacaacacgtcgttaaatccaacttttaaaagcaagaggcatctgtgtggatcttcggcgtgtgca

SEQ ID NO: 173183 - DNA, 447 bp, Homo Sapiens
tgcttgagctttctctaacttccccttgcagtctgttgtgtgagcggcctgtttatttctctaatattatgtcagtttattctctttaatggactgtaaaaaaatgtaatcacaagagtgccaaatatcttgaaatgccaaaaggcattttagtttcttttctctgtgctctgagtccacgtacaggaatgcttggagtgtcttttctgttatttatagggattctcttaaggcacaccagctgcctgttttgcatggtatttgcaaaaatgcctcttgcgtgaggaaatcttttaccattttttgtttgcaactttggacctcaagaggtttcccttcccttccccgttccctcttttcttaattcaatattctgtatgttgcaccttgaaccagcacacagggctatttctccaatgtacaataaaagaattgttcctgtgtctc

SEQ ID NO: 173184 - DNA, 853 bp, Homo Sapiens
  misc_feature (644)..(656): n is a, c, g, or t
catggaagtcatggaggagttagagtgctgggctcctgggcctcccagccctccagtggcctgtgggtgagggaagccagaatgacacaaagcaatgcaaagacaagattgccatgcaaatggatggttttggacatacgtgtcttctccgcacatacatgtctaaagttgagttttatacactgaatgtggaagaaccgggtatcatatcttttttaaaaaatgtcagtgcagaaaacatttgggaaaccattttcctacatgatagaactgccttactagatttctatttgtagctctcattcattgttttttatcttagtttgcagaaaggtgttgaaatgcttctctagcccaaacagcgacatgctaaagtccccttctttcagagtccaatagagtagttgttaaaggttttaaattgtacttttctccaaaattagcatgcagctatttaatagggaatctagatttcaccaagattcaaatcaaagcaacatttaaaggaataagacctgttcactagcattttcaagggggttctaaagcattcaagtgcttaaaagccataaaaaatgacttcttaattcctgcctttagtgtcaacttttaagttaatacaggtttcaattgtggcattaggnnnnnnnnnnnnnccttgtgatgctatggttgggggtagttagggagagactacatgaaattgtgtgcccctattttctttctgatcctaaatcattttgttttataaatcagctatagcatctttctagaattaatcctgaatatgttgaatgttaaaatagagaagtttgtatatacacataattaaaaatcaacccttctggcaata

SEQ ID NO: 173185 - DNA, 644 bp, Homo Sapiens
  misc_feature (11)..(11): n is a, c, g, or t
ctctagaggancccccccttggcgctttcgaggtgcagggagaacattccaatcaagagtccaagtagggcaagggtggggagaaaacatcacttcaatgcccttttccattaacttggccatggttggtcttggtcctcctataaataaaggatcgctttgctcttctacacctgggacttcacataagtttggatgctgttcagttgaggttgtcaacaactttggtaaatggagaaattggatcccatacttagaagctgctgtttttactcctggcacttcctgaatcctctggtaccaagaggctagcaatggaaattctaccagcttctcggaaaatttcctgctgataattaccaagaaatgatggatacagggcaagagcacaatatctgccagagtgaagtaaagcccttctgcaaacgcatgctccagaggtggaaggtcggaggcttttgcttttctgatgtgagaaggctctctgttggtagtagctgggtcttcctgtactgtgagctttgagaatgccactttcagttccagactcttggattaagaatccatcccttcagatgtttcctgtgtgtggttcttgctctttaactttcccttagtaaggggaggcccaactccatcagcct

SEQ ID NO: 173186 - DNA, 589 bp, Homo Sapiens
ctcggtaccccgcttggggctttcgagttccgaggctcacacagtgagtttgcagtgacacagctccttgtagatctgccgacgaagtttgggcatgtcctgctgggtgaagctgaatggctgagacagggccagatgcttgcagtactgcaacacaaaagcaccacagtcactgtcattattctgcctggccacattcattttgaagtaacctttccagccctggtggaaatccagtcggtctttctttaccgcctctgcctgtagatacttggcaatatgcttagggcagcggcggtttagggtacgctgcgagtcaaaataggtgatggtgcgtcgcctcacatcaacagagatgagggaccaatgcacctccaggtggatggggattagcagtagctccttattgaagaaactattgaagaaatgcaccttttcagggactgtgtccatgaccaggtctccatacatgttcatcacctggtcattgagccagttctgtccatacaaggtccccaagtcatccatggtcagcacgtgccgcttataagcaactcgaaagccccaagcggccatacacctacaggca

SEQ ID NO: 173187 - DNA, 1121 bp, Homo Sapiens
gggggccccctcgctggagcaacgcaagcaggaggcgggggagtcggaggaggtggcggcgctggagctcctcccggggaccagcgacccggggagcgagcacgtcgctccgcaccgctcttcctccagccgctgagccgtcccttctcgccatgtcccagagcaggcaccgcgccgaggccccgccgctggagcgcgaggacagtgggaccttcagtttggggaagatgataacagctaagccagggaaaacaccgattcaggtattacacgaatacggcatgaagaccaagaacatcccagtttatgaatgtgaaagatctgatgtgcaaatacacgtgcccactttcaccttcagagtaaccgttggtgacataacctgcacaggtgaaggtacaagtaagaagctggcgaaacatagagctgcagaggctgccataaacattttgaaagccaatgcaagtatttgctttgcagttcctgaccccttaatgcctgacccttccaagcaaccaaagaaccagcttaatcctattggttcattacaggaattggctattcatcatggctggagacttcctgaatataccctttcccaggagggaggacctgctcataagagagaatatactacaatttgcaggctagagtcatttatggaaactgggaaagggggcatcaaaaaagcaagccaaaaggaatgctgctgaggaaatttcttggccaaatttagtaatatttcttccagagaacccacatttctttaacaaatgtagtaggacattctttaggatgtacttggcattccttgaggaattctcctggtgaaaaaatcaacttactgaaaagaagcctccttagtattccaaatacagattacatccagctgcttagtgaaattgccaaggaacaaggttttaatataacatatttggatatagatgaactgagcgccaatggacaatatcaatgtcttgctgaactgtccaccagccccatcacagtctgtcatggctccggtatctcctgtggcaatgcacaaagtgatgcagctcacaatgctttgcagtatttaaagataatagcaactcggaagccccaagcgggggatactcaagagt

SEQ ID NO: 173188 - DNA, 397 bp, Homo Sapiens
atcccccgcttggcgctttcgagttgctattacaacatgtaatttactgaggtacaaacagcagggtcagggctgggcaggtgcacacacttatccatcctgaggaactgccaggacaagacaaaggcatatctactcctcgcttgctctgatgccagtggcagtgatccaggttgtggcaggtggcttctgtttctatgcacatcagtaatctaaaactcagtcccatcgtcctctgtggcctgtgttagaggtgaggggaccaggtgcttccatgaaaaaacttctcatctccaaccagccatgctcccagagaatttcacagtctctgtggggtcaaatcaaagagcgctcaaaggcagattaagctctccatcaagcgagtacatagctgggc

SEQ ID NO: 173189 - DNA, 358 bp, Homo Sapiens
gagctcggtaccccttggggctttcgagttgctctatttcaagaaaatgaagttatttagcaatcaacagaagtacttttgactgtaaagcctatttttcattttgggtaggcgaacttcagcctccgtttctttgttgtgcccataaagagaagtggttctggaatgctttttttaacccaggagtgtgtccgtcacctttatcctttgttcttttgggaaacgggagagatgaaggcaacacgctgcttctaaaacagctcacacctggctgctcacacagagggcccagaaacactgggtggcaactcgaaagccccaagcgcaactcgaaagccccaagcggcaactcgaaagc

SEQ ID NO: 173190 - DNA, 677 bp, Homo Sapiens
ccgtaagtagaagttgtataaaaagcagctggtacggtcggaatccgggatatcgtcgaccacgcgtcggaagatataattggttgtggacggctaaatgaacctattaaagtcttgtgtcggagagttgaaatattaaatgaacacagaggagagaagttaaacagggtaaagatggtggaaaaggaaaaggatgccttagaaggagagaaaaacatagctatcgaatttcttaccttggaaaatgaaatatttagaaaaaagaatcatgtttgtcaatattatatttatgagttgcagaaacgaattgctgaaatggaaactcaaaaggaaaaaattcatgaagataccaaagaaattaatgagaagagcaatatactatcaaatgaaatgaaagctaagaataaagatgtaaaagatacagaaaagaaactgaataaaattacaaaatttattgaggagaataaagaaaaatttacacagctagatttggaagatgttcaagttagagaaaagttaaaacatgccacgagtaaagccaaaaaactggagaaacaacttcaaaaagataaagaaaaggttgaagaatttaaaagtatacctgccaagagtaacaatatcattaatgaaacaacaaccagaaacaatgccctcgagaaggaaaacagagaaagaag

SEQ ID NO: 173191 - DNA, 940 bp, Homo Sapiens
gggaattacacccagtggttcccaattgtgatttttttcaacccagactccagacaaggtgtcaaaaccatgagacaaaggttaaatccaacgtccaacaaaagttctcgaaagttatttgatcaagccaacaagcttaaaaaaacgtgtgcacaccttttttacagctacaatcaacctaaattcagccaatgatagctggtttggcagcttaaaggacactattcagcatcagcaaggagaagcggtttgggtctctgaaggaaagatggaagggatggatgatgaccccgaagaccgcatgtccttcttaaccgccatgggcgcggactatctgagttgcgacagccgcctcatcagtgactttgaagacacggacggtgaaggaggcgcctacactgacaatgagctggatgagccagccgaggagccgctggtgtcgtccatcacccgctcctcggagccggtgcagcacgaggagagcataaggaaacccagcccagagccacgagctcagatgaggagggctgctagcagcgatcaacttagggacaaatagcccgcccccagcattcaagccagagccgcccaaggccaaaacccagaacaaagaagaatcctattgacttctccaaatcctatgaatataagtcaaacccctctgccgttgctggtaatgaaactcctggggcatctaccaaaggttatcctccctcctgttgcagcaaaacctacctttgggcggtctatactgaagccctccactcccatccctcctcaagagggtgaggaggtgggagagagcagtgaggagcaagataatgctcccaaatcagtcctgggcaaaggcaaaatatttgagaagatggatcacaaggccaggttacagagaatgcaggagctccaggaagcacagaaagcaactcgaaagccccaagcg

SEQ ID NO: 173192 - DNA, 359 bp, Homo Sapiens
ttgacatgataaattcagctcggtacccaggctgcaacttgggggtcatcatccatcccttccatctttccttcagagacccaaaccgcttctccttgctgatgctgaatagtgtcctttaagctgccaaaccagctatcattggctgaatttaggttgattgtagctgtaaaaaggtgtgcacacgttttttttaagcttgttggcttgatcaaataactttcgagaacttttgttggacgttggatttaacctttgtctcatggttttgacaccttgtctggagtctgggttgaaaaaaatcacaattgggaaccactgggtgtaattcaacaggtccacagctttcggagtcacat

SEQ ID NO: 173193 - DNA, 1329 bp, Homo Sapiens
cgccagcggccagcgctagtcggtctggtaaggcaaagcggagcggagatcctcaaacggcctagtgcttcgcgcttccggagaaaatcagcggtctaattaattcctctggtttgttgaagcagttaccaagaatcttcaaccctttcccacaaaagctaattgagtacacgttcctgttgagtacacgttcctgttgatttacaaaaggtgcaggtatgagcaggtctgaagactaacattttgtgaagttgtaaaacagaaaacctgttagaaatgtggtggtttcagcaaggcctcagtttccttccttcagcccttgtaatttggacatctgctgctttcatattttcatacattactgcagtaacactccaccatatagacccggctttaccttatatcagtgacactggtacagtagctccagaaaaatgcttatttggggcaatgctaaatattgcggcagttttatgcattgctaccatttatgttcgttataagcaagttcatgctctgagtcctgaagagaacgttatcatcaaattaaacaaggctggccttgtacttggaatactgagttgtttaggactttctattgtggcaaacttccagaaaacaaccctttttgctgcacatgtaagtggagctgtgcttacctttggtatgggctcattatatatgtttgttcagaccatcctttcctaccaaatgcagcccaaaatccatggcaaacaagtcttctggatcagactgttgttggttatctggtgtggagtaagtgcacttagcatgctgacttgctcatcagttttgcacagtggcaattttgggactgatttagaacagaaactccattggaaccccgaggacaaaggttatgtgcttcacatgatcactactgcagcagaatggtctatgtcattttccttctttggttttttcctgacttacattcgtgattttcagaaaatttctttacgggtggaagccaatttacatggattaaccctctatgacactgcaccttgccctattaacaatgaacgaacacggctactttccagagatatttgatgaaaggataaaatatttctgtaatgattatgattctcagggattggggaaaggttcacagaagttgcttattcttctctgaaattttcaaccacttaatcaaggctgacagtaacactgatgaatgctgataatcaggaaacatgaaagaagccatttgatagattattctaaaggatatcatcaagaagactattaaaaacacctatgcctatacttttttatctcagaaaataaagtcaaaagactatg

SEQ ID NO: 173194 - DNA, 646 bp, Homo Sapiens
cgccgagctaaatatccagaccaacagaattgctgtaaatcatcagaacaatgactcatgccaagactggttaaaagaattagagttcttgaaaaaacttaatgatgctgatcctgatgacaaatttcattgttctgagactcttcaggcacttctatcacaagcagcatctttgtctggtattcgagcctctcagcatgaacttacgagaggtgttaaaaaaatatggtaaagatgttggtcttcatattaaagctgtaagatcctatagtcagccgttgttcctggccttgaaactccttaaaagatgcaatatcctacatgcagatatcaagccagaccatatcctggtaagtcaaacacccacactgcgctatacatcttgaacatacatttcacttcttactagcagtagtattattactatgggaaacgacatcttagaagcatagttcagtatattaataacctatttcaaatgactaatacttttttatctttcttggaaatcggacagtgaaattttattgacaagtatgaagaaaaagaaaatgtacattgtccctttttttctcttttgactgatagatttaaagtatgcccatcctggatgcttactgtagtatgagtttcttctgttatcttt

SEQ ID NO: 173195 - DNA, 505 bp, Homo Sapiens
aaaaacgccactttaaaagctgagctgctttcactaaaattaaagtttggtttaattagctccacagcatatgctcaagagattcagaaactcagtaattctacagctgtgtactttcaagattaccagacttccaaatccaatgtgagttcatttgtggacgagcacgaaccctcgatggtgtcaagtagttgtatttctgtcattaaacactctccacaaagctcgctgtccgatgtttcagaagtgtcctcagtagaacacacacaggagagctctgtgcagggaagctgcagaagtcctgaaaacaagttccagattatcaagcaagagccgatggaattagagagctacacaagggagccaagagatgaccgaggctcttacacagcgtccatctatcaaaactatatggggaattctttctctgggtactcacactctcccccactactgcaagtcaaccgatcctccagcaactccccgaaaacggcatcttcatcgg

SEQ ID NO: 173196 - DNA, 725 bp, Homo Sapiens
ggtcttcacagggccgctgagtcacttcttctacttcttcatggaacattggatccctcctgaggtccccctggcagggctcaggaggcttctcctggaccgcctcgtctttgcaccggccttcctcatgttgttcttcctcatcatgaactttctggaggggaaagacgcctcagccttcgccgccaagatgagggggggcttctggccggcgctgaggatgaactggcgggtgtggacgccactacagttcatcaacatcaactacgtccctctgaagttccgggtgctcttcgccaacctggcagctctgttctggtatgcctacctggcctccttggggaagtgacgaccgctgggagaacatcaggtgcactgtggacgtgggtctgggggtctcacccgcccagcgagagcagaaccaatccagtcaggatgtcactgactctaaatcaggtgattcaagatgcccaaaaatgatggatagagaaacagaaatctctgaatgtcagaaccctgtcttttaaaaaggcagtcactgccttccagtggtgctgccccagaaatttaaaattaagtcgaggcagttttcaattggtactgggggacccgaatttgggaaccccattaaaccgaatattggcaggttccttgcctccctcacaaagataacactcaacaaactaaacccccttttttcgggcccggcccttccggccccttcc

SEQ ID NO: 173197 - DNA, 503 bp, Homo Sapiens
tggagtgctctgctatgagctgctggtggggaacccaccctttgagagtgcatcacacaacgagacctatcgccgcatcgtcaaggtggacctaaagttccccgcttctgtgcccacggaagccaagaacctcatctacaaaccacctaggcatatgacctcgaattcggcatcgagtgcacaccataaaaatgctgtcttcggctggtctgtgcatgcgccctccctgaggaggaagacaatgtgtggcaccctggactacctgcccccagagatgattgaggggcgcatgcacaatgagaaggtggatctgtggtgcattggagtgctttgctatgagctgctggtggggaacccaccctttgagagtgcatcacacaacgagacctatcgccgcatcgtcaaggtggacctaaagttccccgcttctgtgcccacgggagcccaggacctcatctccaaactgctcaggcataacccctcgaaaacggcatcttcatcgg

SEQ ID NO: 173198 - DNA, 1022 bp, Homo Sapiens
  misc_feature (587)..(587): n is a, c, g, or t
agcgccgtaaagtttccgcgccctggacgcgaagtggggcccaataagggtctctcggttaggggggaatgccactttcccaaagggggtgggttcccccccaccaggccaagcttgattagcaaaaggcatttcccaaatgccgcccgcagatgcccccctttttcattgggggcatggggcccctgcaaatcattttcgggggggcaggttagttccaggggtgccgacaccatggtcttccctcctcagggaggggcgcaggccccagtccagcgcgaagtcaggcatttttcagctctccccttgagccctaagagcagattttctgggctttatgtctctgtgaatcactttcttcccatggcagtgcattagagcatctgccaactcctcccatgatcgtggctgttcgctgctcgtcaaatgtgcagctcttctgcagctccttgtagagctccccgcggggggcatactctagaatcaagtagatcctcctccggtcataaaaatagttgtagagacgcaggatgttgggatggtgcaggtgggcctggattttcgatctctctgcgcagctgatgctnccacgccctccttctctatctgggacttgaagaggaccttgagcgccacgatgaaatggcttttcttctcccgagccaagtacacgtttccaaacttgcctttgcccagaggacgcccaatctcaaagtcatcaattgtgaagtgccgcgttaagatgtcgggtgtcccactgctattctccatcaccttctggccaggggcagctgtgggctggacattggagcggctcatgaggacaagtgcagatggggtgacaggctctttccggaggactcgctggggcagggtgctcaggccagatggagccgtctgtcggccgtagggccaggggtaggagttctccttctgggccatccttagagagaaagggggaggagagctggggtccaaggcactgctactctcccggccgcccgcaaacaactgaatctccc

SEQ ID NO: 173199 - DNA, 999 bp, Homo Sapiens
ctcctcgcacggagagggcgtgtcctcacactcccgataggcgccggccccgggtaggggggtcccccttcctgttccccccgtgcccagacccccgggcgctttctaaaccgccggtccctccggatgtgaaatgaccggggccccttcaggtggacccgattggaagggccagagggaaggccagcccccctcccagaagttggccccggaccccaagggtgggcctgagacctgggcccaggggcagccctttccgagggggttatgcctgagcagttgggagatgaggtcctgggctcccagtgggcacagaagcgggggaactttaggtccaccttgacgatgcggcgataggtctcgttgtgtgatgcactctcaaagggtggggttccccaccagcagctcatagcaaagcactccaatgcaccacagatccaccttctcattgtgcatgcgcccctcaatcatctctgggggcaggtagtccagggtgccacacattgtcttcctcctcagggagggcgcatgcacagaccagccgaagtcagcaatcttcagctctcccttgagccctaagagcagattttctggctttatgtctctgtgaatcaccttcttcccatggcagtacattagagcatctgccaactcctccatgatcgtggctgttcgctgctcgtcaaatgtgcagctcttctgcagctccttgtagagctccccgcggggggcatactctagaatcaagtagatcctcctccggtcataaaaatagttgtagagacgcaggatgttgggatggtgcaggtgggcctggatttcgatctctctgcgcagctgatgctccacgccctccttctctatctgggacttgaagaggaccttgagcgccacgatgaaatggcttttcttctcccgagccaagtacacgtttccaaacttgcctttgcccagaggacgcccaatctcaaagtcatcaattgtgaagtgccgcgttcc

SEQ ID NO: 173200 - DNA, 673 bp, Homo Sapiens
  misc_feature (421)..(441): n is a, c, g, or t
  misc_feature (452)..(503): n is a, c, g, or t
ctccaggcagggggcgctggggtgttgcactttgggggatggagtctcagggtggcagaggggggaccagaacccttgacaccatcctgaatgaggggtccagcctgggggggactctaccaaggtcttcttgggctgggaaagcccatgtagggcaggccttctataagtgcgggcaccaagggcgcctacatccccaggccttgctggggtgcaggggtatatcaacttcccattagcaggagctccccagcggcaagcctggcccagtgggctcggtagtgcccagctggcaggcctgaggtgtacatagtccttcccggccatattaaccacacagcctgagcctggcccagcctcggctgccagaggtgcctttgctaggcccggagccgttggcccgggccggccttgccctatnnnnnnnnnnnnnnnnnnnnngggtcccccannnnnnnnnnnnnnnnnnnnnnnnnnnnnnnnnnnnnnnnnnnnnnnnnnnnctctcagctcccgcccatgcctccctgatgggtgggcccagggcggcctctctctgaggagacctcacccactcctcgctcagtttgaccactgtaagtgcctgcactctgtattctattaataaactaaaataaagggaaaaaaaccgtgtctcctccaactccacgcg

SEQ ID NO: 173201 - DNA, 671 bp, Homo Sapiens
  misc_feature (419)..(439): n is a, c, g, or t
  misc_feature (450)..(501): n is a, c, g, or t
ctccaggcaggggcgctggggtgttgcactttgggggatggagtctcagggtggcagaggggggaccagaacccttgacaccatcctgaatgaggggtccagcctgggggggactctaccaaggtcttcttgggctgggaaagcccatgtagggcaggccttctataagtgcgggcaccaagggcgcctacatccccaggccttgctggggtgcaggggtatatcaacttcccattagcaggagctccccagcggcaagcctggcccagtgggctcggtagtgcccagctggcaggcctgaggtgtacatagtccttcccggccatattaaccacacagcctgagcctggcccagcctcggctgccagaggtgcctttgctaggcccggagccgttggccgggccggccttgccctatnnnnnnnnnnnnnnnnnnnnngggtcccccannnnnnnnnnnnnnnnnnnnnnnnnnnnnnnnnnnnnnnnnnnnnnnnnnnnctctcagctcccgcccatgcctccctgatgggtgggcccagggcggcctctctctgaggagacctcacccactcctcgctcagtttgaccactgtaagtgcctgcactctgtattctattaataaactaaaataaagggaaaaaaaccgtgtctcctccaactccacgcg

SEQ ID NO: 173202 - DNA, 513 bp, Homo Sapiens
aatagggcaatcacaggcgtatggtggagttggggctagctgaccacaccgttgctggtgggcctcttgaggatgcggatctgtggagggggccccgcggaaaggctatcgtcctgaatcacaatgggcaccttgggaggagatttggatttcctgctctctttttgtgtgatcttcagttattttttgccaatcacagtgggaagggggagaaggggggaggtcacagtgcatggggttcaaggtcacagtgggcggagaaaggggggatcacaggtgcaagtaagtcaggtcgttccctctgctcaagtccagctgtctgccacggcattcaaaaccccgtggcggacgacccaggaggcggtgacggcaagcaaacgggggcatcttttcttgcctgcattaatctgcgctgtttgaagccttgagacccatcaggacccccaaaggctgtctgatcacattatggggctgcctgctgtcttcgggttgggagatcctggtgggccttat

SEQ ID NO: 173203 - DNA, 1558 bp, Homo Sapiens
  misc_feature (641)..(651): n is a, c, g, or t
aatacacccgttttggaccacttcggaggccagagaggtcccaagagtcctgggagggcaggactctttttcctggtttttccttggggggggaggccaaaattcttaaacaagttcttctttcccgtcactttttaagccccaggggaggcaattttcattcccctggccatatgcttttcttctagaagtagtaagcctggctggtaggggaacccccctgaggggtagggaaagggggaagtcggttcccttttccctattctccccaaaaatattaggagggggggttgggcaccctcccccagggcttttccgagcctacagaagctagcccagtctccaggcaaggcccagatgccctggggacttagctcggggagggaggtataggcatggggtgctcgtctgtcctggcggctgcagagccctgccccttttctgggcggcagtaggaatacagaagctaagctcaccaaaatcctattggttaatgtttctagtgaatttcccagaaacatttttaagtagactaccaaactaccctttcgtaattaaaaattcattaaaccactaaaacccctcccatgcactttttcttgcaaatcagatatttgtataaacaaacaaaaataggaagnnnnnnnnnnngaaaggatattttcaaatggaacttactttttaagtgatggagacatgcacttgggggtgggtgggtgtgagttttcatttgtgttttgaaatcccaaattaatgagcatgataaactgttattgctggccactggctttaccccaagggggccaaggggcactgtctgactctcagagtccttggctgggtccccccaaaccttcccctaaacccccaccctttccctttccattgacttggggacagcccttgtcgaggtgccaatcacagtgggaagggggagaaggggggaggtcacagtgcatggggttcaaggtcacagtgggcggagcaagggggatcacagtgcaagtaagtcaggtcgttccctctgctcaagtccagctgtctgccacggcagtgcaacccgtggcggacgacccaggaggcggtgacggcagcaacggcggcatcttttcttgcctgcatttatctgcgctgtttgaagccttgagacccatcaggacccaaaggctgtctgatcacattattgggctgcctgctgtcttcgggttgggagatcctggttggcctgtcgaggatgggtttctcctgctcctcctcggggctggcgctgcccaggatccgcttccgggcctcggcgtactcggcctctcgctgtgctagggacttgactggaagggtgggcctgctggtggagttggggctgctgaccacaccgttgctggtgggcctcttgaggatgcggatctgtggagggggccccgcgggaaggctatcgtcctgaatcacaatgggcactttgggaggagatttggatttcctgcccgctgtctgccgcctcttcccagctctcagcgacctcctcatcttccatcttactcgccgctttccctcctccccc

SEQ ID NO: 173204 - DNA, 1013 bp, Homo Sapiens
cggtaccccatacggggcgggaaaatgatcaggtcaagggtctcccagctggcagagagggctcccagcagagtgaggacctcattctctagggcagaccacgcccactggaggaaggaatgtacatcctgggaggcctctaagctccccagactcaaatgccagcagctcacatactggagaagaggaagcctggaatctacagggtgcagaggggctgggcagcagccttcctgccattctgcagaacctgtcagcttcaaagggaggctccactctgcggtggcaaagctgggcctgacccttctggccaagatgtcctggtccccacagctcgccaagcgcaagcacttggcccctaacctgagcctgagggaacctgattctactctgcctcccaaagtgggtgatcctcgtgcaggggaggacagcatcggagatcacactgcttcacagagggatcttcagctgcaaggtcactgctgtactggggccacccttcctaagacagagagtccccagggccaggaggcacctgggaacccaaatggggctccacagaatacacgagcctccaaaaagtttagtattatgaagcatctgaatttttttctcttccagaatggctttaaaaagtagactcaggcccagagtcctcaggacatatcagaaaagctttgagagtgtcctgatccctgcaaaagcctctaataaaatggtcatttgggccaaaaaaacgacagcagtacacggacggccgcgcggcgcagcgcagacatacgggggcgagcggccgaagagaaacgccgccacggaggggccccagacggatgtgacgggcgacaaccggcagtgtcttgcctacaacagcaggcggccccccaaaggaggcggcgccggatcatcatcaaacgcacacgccgcgcgacaccgatgtcacacgccggccgcccacaggacaaacgctcgccgcgtgggaaaactaggggagaaggaacctacgcgcgggcgga

SEQ ID NO: 173205 - DNA, 187 bp, Homo Sapiens
tcctgagagtagaggcacatggggccctccaagttcagggcccttcagccagtgaagtccatacagtctaccaacaggtgagaaatacggctgatttcaggtttaaaccctttagtaactagaggaggaaagtcacgaagccctcacactctgatgcccaattcattatgggctcccccgccgcatg

SEQ ID NO: 173206 - DNA, 362 bp, Homo Sapiens
gttgggccaacgcaccgtcgagaggtcgagccgatccggggagtgggaggctgtggaggtgctgacggaggagcccgacaccaaccagaacctgtgtgaggcacttcagcgggaacaacctatgagcctgcacctgggctccttgccacagggcagagggaccaaggaggggaacaggagccagacatgacagggacttggccctagcagagacagtgtctttcatttaatgagtctgggtgaagccagaggtggctctgggactccgccccctccagtggctcatctgctcctcagacttgcagggtggcaaatgttcctgtctgccaggtaccacgtgcgtgcacaacacgtgcgtgcac

SEQ ID NO: 173207 - DNA, 859 bp, Homo Sapiens
  misc_feature (447)..(472): n is a, c, g, or t
  misc_feature (531)..(531): n is a, c, g, or t
  misc_feature (539)..(539): n is a, c, g, or t
agtggctagaggatccccatcggggggggcagctgcttatcatcctccatctcaaagaactggaataaatatgtaagatatgtataatgctggccattttaaaggggttttctcaaaagttaaacttttgttatgactgtgtttttgcacataatccatatttgctgttcaagttaatctagaaatttattcaattctgtatgaacacctggaagcaaaatcatagtgcaaaaatacatttaaggtgtggtcaaaaataagtctttaattggtaaataataagcattaattttttatagcctgtattcacaattctgcggtaccttatagtacctaagggattctaaaggtgttgtcactgtataaaacagaaagcactaggatacaaatgaagcttaattactaaaatgtaattcttgacactctttctataattaggcgttcttnnnnnnnnnnnnnnnnnnnnnnnnnnttattttccttttgtctcctggtgattaggccaaagtctgggagtaaggagaggattangtacttangagcaaagaaagaagtagcttggaacttttgagatgatccctaacatactgtactacttgcttttacaatgtgttagcagaaaaccgtggggtataatgtaaaatgatgtgcttttctgcccccagtgggaaattcatcttgggtttgcctatggtaaaacctggtaaatacaaccggaaacctttaataaaatatctccttgggggtaacaccctttttaacggggaaaaaagacataacaccccccgcgccgaaagggcctcaccctttggtgcgggcccgccccctcgggaccccttccgaaaaaagcctttttcca

SEQ ID NO: 173208 - DNA, 687 bp, Homo Sapiens
gaggaccccatgcgggtgtgaagaatggaatggaagccactgccttcccataagaaaggtttaccataatttactcacttttttctgtgttagacattttgattatctgcagtttattactacaagcagtggcagagtgaatgtccttgtacattttgagttacatgcttaattatgtccttgagaaagtttctaaaagtggaatgattggtttgactggttcatagggctttaattatacaatttacccctctaattagtactatatgtatgtgacttccctccccctgccagaatactccttggtcaattgtaggtattctttttggtttaatttttgccaatgtaattaaaaaatggtatgtcatttttaaaatttgtatttctttcattacaaataagattgttatgtcagtattgttattggcttttcgtattcctcttaacgtgaaccgtctgttcattgtttttacctgttttcgttttagcaagtagtacttaatttaaagtgtgaacttaatatataagatgccaggaccatcatattgatgacaaaaatctattatgtggttgtagtgcatgtcttggagttaaactcttaagtatcaagaagtaaaataatttcattgtttctgttactaacattaaaagtgtgcaaattgtataaaattaggtacttcgattagt

SEQ ID NO: 173209 - DNA, 870 bp, Homo Sapiens
ggggcggcgcggcgcgcctgggcgctaagatggcggcggcgtgagttgcatgttgtgtgaggatcccggggccgccgcgtcgctcgggccccgccatggccgtcaccatcacgctcaaaacgctgcagcagcagaccttcaagatccgcatggagcctgacgagacggtgaaggtgctaaaggagaagatagaagctgagaagggtcgtgatgccttccccgtggctggacagaaactcatctatgccggcaagatcttgagtgacgatgtccctatcagggactatcgcatcgatgagaagaactttgtggtcgtcatggtgaccaagaccaaagccggccagggtacctcagcacccccagaggcctcacccacagctgccccagagtcctctacatccttcccgcctgcccccacctcaggcatgtcccatcccccacctgccgccagagaggacaagagcccatcagaggaatccgcccccacgacgtccccagagtctgtgtcaggctctgttccctcttcaggtagcagcgggcgagaggaagacgcggcctccacgctagtgacgggctctgagtatgagacgatgctgacggagatcatgtccatgggctatgagcgagagcgggtcgtggcccgcctgagagccagctacaacaacccccaccgagccgggggagtatctgctcacgggaaatccttggggacccccaagccggaaccacgtttctggtccaggaagagccaggtaatccgaaccaccgggccccggaaaccggggagagaacccccctgggagttccttgcgggaaccagcccccaggtttccggaaaattgcgggcgagggtggattcaccccaaaacc

SEQ ID NO: 173210 - DNA, 552 bp, Homo Sapiens
gaggcctaaaaaactctaaattgcaattcgtgcaggaccctctcttacagggccgctttttatagaaattctgaacagatatatctatttttatgaaaaggaaaatgatgcggtaacaattcaggttttaaaccagctttatccaaaagattcgagaagacctcccgaatcttgaatccagtgaagaaacagagcagattaacaaacattttcataacacactggagcatttgcgcttgcggcgggaatcaccagaatccgaggggccaatttatgaaggtctcatcctttaaaaaggaaatagctcaccatactcctttccatgtacatccagtgagggttttattacgctaggtttcccttccatagattgtgcctttcagaaatgctgaggtaggtttcccatttcttacctgtgatgtgttttacccagcacctccggacactcaccttcaggaccttaataaaattattcacttggtaagtgttcaagtctttctgatcaccccaagtagcatgactgatctgcaatttaaaattcctgtgatctgt

SEQ ID NO: 173211 - DNA, 1080 bp, Homo Sapiens
aaccaagtgcataattttattaaggtcctgaaggtgagtgtccggaggtgctgggtaaaaacacatcacaggtaagaaaatgggaaaccctacctcagcatttctgaaaggcacaatctatggaagggaaacctagcgtaataaaaccctcactggatgtacatggaaaggagtatggtgagctatttcctgttttaaaggatgagaccttcataaattggcccctcggattctggtgattcccgccgcaagcgcaaatgctccagtgtgttatgaaaatgtttgttaatctgctctgtttcttcactggattcaagattcgggaggtctttctcgaatctttttggataaagctggtttaaaaccctgaaatggttaccgcatcattttccttttcataaaaaatagatatattctgttcagaattttctataaaaaagctgcacttgtagagaggggtccatgcactgatttgctatttttagagctttttttaggcactccattaccctcttgcctccgtgaagctcctccccatttttgtccgtgtttctgccagaccagaagagatgtgcacaggtgctcacagctcggccctgatcaggtttctttagaagtttggatgcagcaagggcacactgagtcctcagaggttcatgattctcttcactgaagcacttcatcctttcaaaagtgccaatgatcaaggtgatggcagctagctgtgctttggaatcgctgatttcatcttcatacagagaaaatgccttgggacatgaattcatatgcgactgtctcatgattttcaaaaccaatttccccagcagctagtgctccttgaagaaaaagtcttaagggcaattctgccagctctgctttgatcaaagcactgatagtctggtgggcaaatgaaaaaatcttctggcatttcttttcccatttgtcatccactttagaattctctttatatcgaaaagccagctggtaagctgcaaataccaaaggtggcagtgtgaagcgaatccgctgatttccaccagctccaaaatgttttcgtgctgtgttcaaaatcaagtaccc

SEQ ID NO: 173212 - DNA, 286 bp, Homo Sapiens
catactggggggaaaagcgcaatactattgcttccattgctgctggtgtactattttttacaggctggtggattatcatagatgcagctgttatttatccgcaccgaatggctggactgacctgaaaaaaatgtctggatttctagagggcttgagatgctcagaatgcattgactggggggaaaagcgcaatactattgcttccattgctgctggtgtactattttttacaggctggtggattatcatagatgcagctgtattatccgcaccgtatggtccgcct

SEQ ID NO: 173213 - DNA, 914 bp, Homo Sapiens
ggggagccgggtggatggtactgctgcatccgggtgtctggaggctgtggccgttttgttttcttggctaaaatcgggggagtgaggcgggccggcgcggcgcgacaccgggctccggaaccactgcacgacggggctggactgacctgaaaaaaatgtctggatttctagagggcttgagatgctcagaatgcattgactggggggaaaagcgcaatactattgcttccattgctgctggtgtactattttttacaggctggtggattatcatagatgcagctgttatttatcccaccatgaaagatttcaaccactcataccatgcctgtggtgttatagcaaccatagccttcctaatgattaatgcagtatcgaatggacaagtccgaggtgatagttacagtgaaggttgtctgggtcaaacaggtgctcgcatttggcttttcgttggtttcatgttggcctttggatctctgattgcatctatgtggattctttttggaggttatgttgctaaagaaaaagacatagtataccctggaattgctgtatttttccagaatgccttcatcttttttggagggctggtttttaagtttggccgcactgaagacttatggcagtgaacacatctgatttcccacagcacaacagccctgcatgggtttgtttgtttttttactgctcactcccaaccttttgtaatgccattttctaaacttatttctgagtgtagtctcagcttaaagttgtgtaatactaaaatcacgagaacacctaaacaacaaccaaaaatctattgtggtatgcacttgattaacttataaaatgttagaggaaactttcacatgaataatttttgtcaaattttatcatggtataatttgtaaaaataaaaagaaattacaaaa

SEQ ID NO: 173214 - DNA, 665 bp, Homo Sapiens
  misc_feature (493)..(509): n is a, c, g, or t
gtgtctctgcgggattgtttcaaccttttcactaaggaagaagagctagagtcggagaatgccccagtgtgtgaccgatgtcggcagaaactcgaagttaccaaaaagttgacagtacaaagatctgaatcgattttctgcctcccgaggctccatcaaaaaaagttcagtaggtgtagactttccactgcagcgactgagcctaggggactttgccagtgacaaagccggcagcgtccactatggccactacacagccctgtgccggtgccagactggttggcatgtctacaatgactctcgtgtctcccctgtcagtgaaaaccaggtggcatccagcgagggctacgtgctgttctaccaactgatgcaggagccaccccggtgcctgtgacacctctaagctctggcacctgtgaagccctttaaacacccttaagccccaggctccccgtttacctcagagacgtctatttttgtgtctttttaatcnnnnnnnnnnnnnnnnntggttgtagctccattattttttttattaaaaaatacccttccacctggaggctcccttgtctcccagccccatgtacaaagctcaccaagcccctgcccatgtacagcccccagaccctctgcaatatcactttttgtgaataaatttattaaga

SEQ ID NO: 173215 - DNA, 434 bp, Homo Sapiens
  misc_feature (397)..(397): n is a, c, g, or t
  misc_feature (417)..(417): n is a, c, g, or t
agattccctcgaatcctcgtgctccatctgaatcgattttctgcctcccgaggctccatcaaaaaaagttcagtaggtgtagactttccactgcagcgactgagcctaggggactttgccagtgacaaagccggaagtcctgtataccagctgtatgccctttgcaaccactcagggcagcgtccactatgggccactacacagccctgtgccggtgccagactggttgggcatgtctacaatgactctcgtgtctcccctgttcagtgaaaaccagggtgggcatccagcgagggctacgtgctgttctaccaactgatgcaggagccaccccggtgcctgtgacacctctaaggtttgggcacctgtgaaggcccttttaaacaccctttaaggncccagggttccccgttttancttcaggaggaggttta

SEQ ID NO: 173216 - DNA, 814 bp, Homo Sapiens
atgacgggtggactacatccgggcggcggaaaagctgcggcaggagatctacagctcggaggagagagacgagcgactgacacgcatgtacaacgtgcgcataatgcgggtggagttctacttcctttcccagtacgtgtcgccagccgactccccgttccgccacatcttcatgggccgtggagaccacacgctgggcgccctgctggaccacctgcggctgctgcgctccaacagctccgggacccccggggccacctcctccactggcttccaggagagccgtttccggcgtcagctagccctgctcacctggacgctgcaaggggcagccaatgcgcttagcggggatgtctggaacattgataacaacttctgaggccctggggatcctcacatccccgtcccccagtcaagagctcctctgctcctcgcttgaatgattcagggtcagggaggtggctcagagtccacctctcattgctgatcaatttctcattacccctacacatctctccacggagcccagaccccagcaccgatatccacacaccccagccctgcagtgtagctgaccctaatgtgacggtcatactgtcggttaatcagagagtagcatcccttcaatcacagccccttcccctttctggggtcctccatacctagagaccactctgggaggtttgctaggccctgggacctggccagctctgttagtgggagagatggctggcaccatagccttatggccaacaggtggtctgtggtgaaaggggcgtggagtttcaatatcaataaaccacctgatatcaat

SEQ ID NO: 173217 - DNA, 554 bp, Homo Sapiens
tgggggggatattgggctgaataacaggctagttgtctccaatctatggtataaaaagcattagagtgaaagatgacattctacttcttgcctcaccagaatgaactctgcttagaaaataagctaagagccacttcaggaagaagttctagggtgtcctctctttgcatgtctactgtctcccagtcatgtcatcttgtcactggaatcagtgtcaacacctacagcccccagactacaaagaaaaccatctgcccagtaatagcgatcccagcccatccctcatatcagaatttcaggagaaaagcagacaaccactaatccatttccttttgtcttcccttccccccacctctagacttactacttacctgagccaagtatgcaccataaccagtggccttcactgaccactctacccctaccaaaactttgaccccctaatcccttgctcctttctctgcttaatttttctctatacattaataaccatctaataactacacatttcatgtattttgattactgcctctcttctccattaggatggagaa

SEQ ID NO: 173218 - DNA, 748 bp, Homo Sapiens
  misc_feature (644)..(679): n is a, c, g, or t
cattcggggcggcggtcacagctacttcttcaagggtgcctattacctgaagctggagaaccaaagtctgaagagcgtgaagtttggaagcatcaaatccgactggctaggctgctgagctggccctggctcccacaggcccttcctctccactgccttcgatacaccgggcctggagaactagagaaggacccggaggggcctggcagccgtgccttcagctctacagctaatcagcattctcactcctacctggtaatttaagattccagagagtggctcctcccggtgcccaagaatagatgctgactgtactcctcccaggcgccccttccccctccaatcccaccaaccctcagagccacccctaaagagatcctttgatattttcaacgcagccctgctttgggctgccctggtgctgccacacttcaggctcttctcctttcacaaccttctgtggctcacagaacccttggagccaatggagactgtctcaagagggcactggtggcccgacagcctgggcacagggcagtgggacagggcatggccagggtggcacttccagacccctgggcttttcactgctggcttgccttagaacctttcttaacattaggcagtttgctttgtatggcaannnnnnnnnnnnnnnnnnnnnnnnnnnnnnnnnnnnccactttaggaaattgcatttcctgacagaagggattcaggttgtttgaagtcattgcaaagtgcattt

SEQ ID NO: 173219 - DNA, 247 bp, Homo Sapiens
ccacttagaaattgcatttcctgacagaaggactcaggttgtctgaagtcactgcacagtgcatctcagcccacatagtgatggttcccctgttcactctacttagcatgtccctaccgagtctcttctccactggatggaggaaaaccaagccgtggcttcccgctcagccctccctgcccctcccttcaaccattccccatgggaaatgtcaacaagtatgaataaagacacctactgagtggca

SEQ ID NO: 173220 - DNA, 408 bp, Homo Sapiens
ctggctttcccaagctcatcgcagatgcctggaatgccatcccccataacctggatgccgtcgtggacctgcaaggcggcggtcacagctacttcttcaagggtgcctattacctgaagctggagaaccaaagtctgaagagcgtgaagtttggaagcatcaaatccgactggctaggctgctgagctggccctggctcccacaggcccttcctctccactgccttcgatacaccgggcctggagaactagagaaggacccggaggctgggccagccgtgccttcagctctacagctaatcagcattctcactcctacctggtaatttaagattccagagagtggctccttcccggtgcccaagaattagattgctgactgtaattccttcccagggcgttcctttcc

SEQ ID NO: 173221 - DNA, 420 bp, Homo Sapiens
  misc_feature (25)..(25): n is a, c, g, or t
  misc_feature (39)..(39): n is a, c, g, or t
ttcttcatggccttctggccctggnacagcagccttggnctccgggctccccaatggtttttaccagcttctgctgagtttctacaatctttgagctctgctgagaatttcttttccttgaaattcttctacctaaagccccagcccccaaaagagcatgtctcaggaactcattatgccctgagtcaacaagaacttgttgataaatggcttaaaagtttttacaagaagtaacttcccttggtaaggagtaaataatagctctggaattttccagataaaactatttcatttctctgtcagtggcccatggggagagaacgaaatattggagcccctctccctaccaaagagagccacttttctggttgtgccctggcttaaaaccctttggactccgagaaccatactgaatatttg

SEQ ID NO: 173222 - DNA, 237 bp, Homo Sapiens
atacgggtgcgcaaggttaaattcatcacatcaacaggcttaaaaagaaaatcatatttaaattatatactaaacagattttttcaaatctcaataaattaagaaaaattgggtaaattcaacaactcatgactgtaaaacaaaaacgaaacaagaaacaagtttagtaaactaagaatggggtgaaagtttcctttatctgagataagtaggatgctataaacaccccacagcatg

SEQ ID NO: 173223 - DNA, 690 bp, Homo Sapiens
catccgggggggagaggtctctgtcctactgctctccagagggcatttccccttgcgccttctcccacagggcccagcccctctcccctgccccagtccccagggggtactctggagtgagcagtgcacctgtgggggagcctgtaaatgcgggctcagtggaccactggtgactgggctcatgcctccaagtcagagtttcccggtgccccagagacaggagcacaagtgggatctgacctggtgagattatttctgatgacctcatcaaaaaataaacaattcccaatgttccaggtgagggctttgaaaggccttccaaacagctccgtcgcccctagcaactccaccattgggcactgccatgcagagacgtggctggcccagaatggcctgttgccatagcaactggaggcgatggggcagtgaacagaataacaacagcaacaatgcctttgcaggcagcctgctcccctgagcgctgggctggtgatggccgttggactctgtgagatggagagccaatctcacattcaagtgttcaccaaccactgatgtgtttttatttccttctatatgattttaagatgtgttttctgcattctgtaaagaaacatatcaaactaaataaaagcagtgtctttattacttcgcagaagaccaaatccaggaataaaaatcctaccatgt

SEQ ID NO: 173224 - DNA, 441 bp, Homo Sapiens
  misc_feature (41)..(41): n is a, c, g, or t
  misc_feature (78)..(78): n is a, c, g, or t
  misc_feature (158)..(158): n is a, c, g, or t
aagtggggatcctgccccctggtgagattatttcctgatgnccctccatcaaaaaaaataaacaattcccccaatgtncccccggtgagggcctttgaaaaaggcccttcccaaaccagcctcccgtcgcccccctagcaactccccacccattgggncacctgcccatgccagagaccgtggctggccccagaatggccctgttgcccatagcaactggaggcgatggggcagtgaacagaataacaacagcaacaaatcctttgcaggcagcctgctcccctgagcgctgggctggtgatggccgttggactctgtgagatggagagccaatctcacattcaagtgttcaccaaccactgatgtgtttttatttccttctatatgattttaagatgtgttttctgcattctgtaaagaaacatatcaaactaaataaaa

SEQ ID NO: 173225 - DNA, 404 bp, Homo Sapiens
  misc_feature (333)..(333): n is a, c, g, or t
  misc_feature (375)..(375): n is a, c, g, or t
aggtgactgggctcatgctccaagtcagagtttccccggtgcccccagagacaggagcacaagtgggatctgacccggtgagattatttcctgatgaccctcatcaaaaaataaacaattccccaatgttccaggtgagggctttgaaaggccttcccaaacagctccgtcgcccctagcaactcccaccattgggcactgccatgcagagacgtggctggcccagaatggcctgttgccatagcaactgggaggcgatggggcagtgaacagaataacaacagcaacaatgcctttgcaggcagcctgcttcccctggagcgctgggctggntggatgggccgttgggactcttgtggaggatgggagagccantttcacatttcaagtgtttcaaccaacca

SEQ ID NO: 173226 - DNA, 1085 bp, Homo Sapiens
ggggagtcacggctcgcgactggcctaagtcgccgcagaactgccacgtggggatgagatttgctgggctggtagcggcggctgctgcgggaggtcccgcccacgtgaagccagcctaactgagctctggactttggggacagctgtcagtggcctaggccgcaggacaccatgaagcaactgccagtcttggaacctggagacaagcccaggaaagcaacatggtacaccttgactgtccctggagacagcccctgtgctcgagttggccacagctgttcatatttacccccagttggtaatgccaagagagggaaggtcttcattgttgggggagcaaatccaaacagaagcttctcagacgtgcacaccatggatctggaaaccaggacgtggaccacgccagaagtgaccagccccccaccatccccaagaacattccacacatcatcggcagccattggaaaccagctatatgtctttgggggcggagagagaggtgcccagcccgtgcaggacacgaagctgcatgtgtttgacgcaaacactctgacctggtcacagccagagacacttggaaatcctccatctccccggcatggtcatgtgatggtcggcagcagggacaaacctcctcatccccggaggcttggacgggggacagattctatgatgacctccactgcattgatataagtgacatgaaatggcagaagctaaatcccactggggctgctccagcaggctgtgctgcccactcagctgtggccatgggaaaacatgtgtacatctttggtggaatgactcctgcaggagcacctggacacaatgtaccagtatcacacagaagagcagcattggaccttgcttaaatttgatactcttctaccccctggacgattgggaccattccatgtgtatcattccatggccagtggacgtgtgcttctgagaaagaagattccaactctctcactctgaaccatgaagctgagaaagaggcatcaggtgacaaagtaatgagccacagtggtgactcacatgagggaagccagactgtacactggtctggtaggagacggggg

SEQ ID NO: 173227 - DNA, 1319 bp, Homo Sapiens
  misc_feature (1130)..(1133): n is a, c, g, or t
  misc_feature (1135)..(1176): n is a, c, g, or t
  misc_feature (1178)..(1188): n is a, c, g, or t
  misc_feature (1190)..(1197): n is a, c, g, or t
  misc_feature (1199)..(1208): n is a, c, g, or t
  misc_feature (1214)..(1214): n is a, c, g, or t
gggccacatgcagaggctcgctacagaagctacagaagaagatggttacatttcaagtggggcaggtgccgtttgcttatgagcaccatcagccacatcagccacggttctttgaattttacctaattgtctctaattcttaacaattctttgaggtgatctacaactctttcaccatctgtaatgcgcagatgcaggaagttggtgttggcctatatcacagtatctctttgctcaatcacagctgtgaccccaactgttcgattgtgttcaatgggccccacctcttactgcgagcagtccgagacatcgaggtgggagaggagctcaccatctgctacctggatatgctgatgaccagtgaggagcgccggaagcagctgagggaccagtactgctttgaatgggacggtttccgttgccaaacccaggacaaggatgctgatatgctaactggtgatgagcaagtatggaaggaagttcaagaatcccctgaaaaaaattgaagaactgaaagcacactggaagtgggagcaagttctggccatgtgccaggcgatcataagcagcaattctgaacggcttcccgatatcaacatctaccagctgaaggtgctcgactgcgccatggatgcctgcatcaacctcggcctgttggaggaagccttgttctatggtactcggaccatggagccatacaggatttttttcccaggaagccatcccgtcagaggggttcaagtgatgaaagttggcaaactgcagctacatcaaggcatgtttccccaagcaatgaagaatctgagactggcttttgatattatgagagtgacacatggcagagaacacagcctgattgaagatttgattctacttttagaagaatgcgacgccaacatcagagcatcctaagggaacgcagtcagagggaaatacggcgtgtgtctttgttgaatgccttattgaggtcacacactctatgctttgttagctgtgtgaacctctcctattggaaattctgttccgtgtttgtgtaggtaaataaaggcagacatggtttgcaaaccacaagaatcattagttgtagagaagcacgattataataaattcaaaacatttggttgaggaannnnannnnnnnnnnnnnnnnnnnnnnnnnnnnnnnnnnnnnnnnnntnnnnnnnnnnnannnnnnnnannnnnnnnnnccttgntcgggccggcctcggcccctcgaagaagcttttcatagacccatttcgttggggcggcgcgggccccagataggaaaagggaaacatggggccatagcctggttt

SEQ ID NO: 173228 - DNA, 793 bp, Homo Sapiens
gggagagtgcgcgcgcgcacgttgtgcgcaggttcgaatctccgccgcttcgcggttgcttctcaacgtccgggccgcatctcggcggcggcgagggctgagcgcgggagctgcctccgagccggagccccagccctaggccctgcgcgagctgccccgccctaccccctccagcgtcctgtcgcctcctcgcccgacttcggcctgtccctctctcacgcgctcagtcctcgctcttcgccccccgcagctatcggcactcggtctcccgcgcctggcgggctccgcccgagcctctgggcccatggccaagcggcgtgcggccgagccggtgacgttccacgtgccttggaagcggctcctgctttgcgacttcgctgagcagccgccgccacccgcctctctggatccggccgcccggggtcgcgcatgctgggcagctcctcggcgtcccagagcagcaccgaaagcgcaaaatccacgcaggggaccatggcagagccctcggcttcgcccagcaagcgccgtgacagcggggacaacagcgccccgagacggacaggagcgtgaggaccacggtctggagacaggcgatccgccgctgccgacggcgcccgtactgccggggccggcgggaggagctccccgggcgcccggctccggggggcggtggcgacgacggggcggggcgcgcaggacccccgaggggagactgcggggtcgcatcgcgccagcacaatgaagcaatttggcagtataataccttccagtactgcaggaatcttttgctcaa

SEQ ID NO: 173229 - DNA, 532 bp, Homo Sapiens
  misc_feature (77)..(77): n is a, c, g, or t
aacaaggtgggggctacccccaagactggttcctacactgatattgaagaccctgaagaggatccttcaagttctgnccattccagggaccctccagaaacacagtgtttcaagagaccctaaaaaacctgcctgtcccaggacccctatggtaatgaacaccaaacatctaaacaatcatatgctaacatgccactcctggaaactccactctgaagctgccgctttggacaccaacactcccttctcccagggtcatgcagggatctgctccctcctgcttcccttaccagtcgtgcaccgctgactcccaggaagtcttccctgaagtctgaccacctttcttcttgcttcagttggggcagactctgatcccttctgccctggcagaatggcaggggtaatctgagccttcttcactcctttaccctagctgaccccttcacctctccccctcccttttcctttgttttgggattcagaaaactgcttgtcagagactgtttattttttattaaaaatataaggctta

SEQ ID NO: 173230 - DNA, 649 bp, Homo Sapiens
gttagaggactccacgccgaggcacgacacgcagagactgagaaattctggatgttttaccgtttggatgccatcagaaccttcgggttcctgtcacgacatgaagttggcacagacgtgccctgacagtggtagatttgcacaccaggctattacttgtactcccagggcctcctcactctcaacaccgtgtgcctcatgagtgggatatcgggctttgccctgaccatgctgtgctggatgagctatttcttacggagactggtgggtatcctgaatctgaatgagtctggcaccatgctgcgggtggcccatctgaacttctgggctggcggcaggacacatactgtcccatggcagatgtgattcccctgacagaaaccaaggaccggcctcaggagatgtttgtgcgtatccagcggtacagtgggaaacagaccttctacgtcaccctgcgctatggacgcatcctggacagagagcgtttcacacaggtgtttggggtacatcagatgctcaagtgaacaactgggacctggacctctgggtaaacctgggtcgcctggattaacaggaaggctgagggtctggactttcggcgtgtgccactacagaatgttttcttcagtgttcgtgtgtgtgtgcgtgt

SEQ ID NO: 173231 - DNA, 870 bp, Homo Sapiens
tggtacggtcggaattcccgggatatcgtcgacccacgcgtcggccatggctgcccttctccgagctgtgcgtaggtttcggggaaaagctgtgtgggaaaggcctctccatgggctgtggtgctgcagtgggcaggaggatcctaagaggtgggtgggcagcagttcacccatctcgaaggagaaactaccaaacgcagagactgagaaattctggatgttttaccgttttgatgccatcagaaccttcgggttcctgtcacgactgaagttggcacagactgccctgacagtggtagctttgccaccaggctattacttgtactcccagggcctcctcactctcaacaccgtgtgcctcatgagtgggatatcgggctttgccctgaccatgctgtgctggatgagctatttcttacggagactggttggtatcctgtatctgaatgagtctggcaccatgctgcgggtggcccatctgaacttctggggctggcggcaggacacatactgtcccatggcagatgtgattcccctgacagaaaccaaggaccggcctcaggagatgtttgtgcgtatccagcggttacagtgggaaacagaccttctacgtcaccctgcgctatggacgcatcctggacagagagcgtttcacacaggtggtttggggtacatcagatgctcaagtgaacaactgggacctggacctctgggtaaccctgggtcgcctggattaacaggaaggctgagggtgtgggcaaggctgaaagacaggggactgggtacttggagactttgcctgggccctgggaacatgtgtttgtggtgaattaattccaaggcaagagccgggtgtacaggttaggaaga

SEQ ID NO: 173232 - DNA, 491 bp, Homo Sapiens
  misc_feature (91)..(91): n is a, c, g, or t
  misc_feature (107)..(107): n is a, c, g, or t
  misc_feature (253)..(253): n is a, c, g, or t
  misc_feature (258)..(267): n is a, c, g, or t
  misc_feature (272)..(272): n is a, c, g, or t
  misc_feature (288)..(288): n is a, c, g, or t
  misc_feature (365)..(365): n is a, c, g, or t
  misc_feature (373)..(373): n is a, c, g, or t
  misc_feature (379)..(379): n is a, c, g, or t
  misc_feature (425)..(425): n is a, c, g, or t
  misc_feature (446)..(446): n is a, c, g, or t
  misc_feature (456)..(456): n is a, c, g, or t
  misc_feature (461)..(461): n is a, c, g, or t
  misc_feature (476)..(476): n is a, c, g, or t
ggtagagcctagaaaaagtgtcatagccatttctgagcaaaaatctgtatcccagtaaggtattcagtgttatgtttaacacactactganccagaaagtttaagtncctgacacagacgcaaccaggtcactaagaggctccaaaatcaacaagttaagccctgctgctctgttaagatctgaaaggcaagacacagtcctggatgctgtgcccttgttacggggtgactaaaaaggcaggcaacagcatcncggannnnnnnnnnagggnggactcctgtggcacncccacattgcaagggatgtgcttcagcaggcaacactcaagtctcctcttcattctgtatctgcctaaggcaatctncttagggncacgtntgggtcgggtcataaaacatgttccatccagggtgggtaggagttncacttcatcagggcggtaggnttttaggggnagggngcctttccccacccntttttgggggttttt

SEQ ID NO: 173233 - DNA, 789 bp, Homo Sapiens
aaaacgggaaatgcctacatttctgttctgatagcttcccaccacacaccaaggttcctcaaggacagctgccaccagagctgctgcaagaacatgtttttcactgggcgtcgcttcacagtcagttcctcaagcagaagactaaaatattatttctttttagaagatcttggttgagggagaacataccaatatggagaacagatctatgcttctcgaattcaagaaaaaccattaactaatctatcaagttttctccgatatggtgtgccagagtgctctgtgaagaatccttttccatccctaccacgtgtctgggtgaagggagaggagggggtggcaagctgccagtacactagcaggcactcctggtgatgctctgggctctgctccctttctgctggtagtagtaggcatgttttctggcagctgcagcagactgatgttggggggaggaaggggccacccaccaatcacctcttcttgaagccgtattttttgcgttcatagaagaggtctgtcttagagctccccagattgacaatctttgggcagccatctctgtccttctcctggatggtgcactccttacaataataggcatcagagaccccaggtcctccacagatcacacagcgccctggtaagatccatagttacactcatcacatatgcgcaccagagtgcagggacgcacataggagtcacaatcacacacttgccatcacatttttcacacagtcttccgatggcaacaccagcctgccttgcggcaaaagatcaaatcag

SEQ ID NO: 173234 - DNA, 645 bp, Homo Sapiens
  misc_feature (70)..(100): n is a, c, g, or t
  misc_feature (102)..(197): n is a, c, g, or t
cctcctagccctcttacctcagcctcctgagtagctgggactacaggaacccaccaccacacctggctannnnnnnnnnnnnnnnnnnnnnnnnnnnnnngnnnnnnnnnnnnnnnnnnnnnnnnnnnnnnnnnnnnnnnnnnnnnnnnnnnnnnnnnnnnnnnnnnnnnnnnnnnnnnnnnnnnnnnnnnnnnnnnagcttgagccactgcacccagcctggaaagtatatttatgaaaggtttgcactccacaaaagcatctttgctagggtgtcaaggaagagatcactaaaccaaccccaacacatccatacaattccagcaatctagagagggctggtccttttccttttctggattattttctgttctcagtaaaacaagtatttactgtgatactgaaacactgggaaattaacactgattaagatattttaaacactgagtcttaattataacagaaccagttttcatcagaatgcttttacgtcacattcagtgaagtgttacgctaatatattctacagccctgaagatagaaaaaaggtttctctccaggtatgagatatggtacaaaaatacatttttccacatacaaaagagagaaaaaaacaaagacaagtcccaggggacgaagtggtcg

SEQ ID NO: 173235 - DNA, 512 bp, Homo Sapiens
  misc_feature (97)..(97): n is a, c, g, or t
  misc_feature (127)..(127): n is a, c, g, or t
  misc_feature (140)..(140): n is a, c, g, or t
cccaaagtccaaaagatggagccacttgatccagaaagtgtcaagcatgccaaagccttcgcaaccctggttgatggccagttcagcatcctgtgcncttcttcataggagtcatatgtaggaggcncagctggttaaanctggaagggcaaggagaagtgattaacttcataccaccaaaaaccactgggcatgcatcaggcgggcagatacctaccatgtgtgtgcagtaggcagcgtgctatgggtcggagcggcaataatctgaaatgagggacagagggcggcaaagcctccaggtggtagctgagaggagcctgttgtgaactgaagtagccgagccaactcctcctgggtcagactggaaaccacagtccaaaaccacctcatgaccctttctctgaaatgccatgagccaccaacaactactgcatgggctttgaagtcagacacactgatgtctccagtcccacacatcagcagctggaaaaagatggtaaggtgttactatg

SEQ ID NO: 173236 - DNA, 617 bp, Homo Sapiens
taggcggagattgtcacggccatggccatggtctctactggtgttttgatttcccgcctctttcagcagacactcggtgagctcctgacttccaactagatcaccagtactaattgcaacaaaccacctcctcctcccagtcagctagcctcatctctccctgcatgtggaaaagatacagaagccagggagaaaaaggagtttggttatgggggtggcttttttttaatatgtaaagtaaaattacattcagggaattaaaagtctgtgtgtggtttaacaggctcctaaagagctccacggggacaaacatgttatgcaaatgccatggaagcagaggtgctctgaattgcctaggccgttgatccaaaagtttccattctcctctgcaacccaatctttaaaatttcattttgcttcttccctcagccttgattcccagcacccaccacagtgtcatgctcagtgtttatggatctgaaatgaagctgggctgaggcctggccaggagatgaaactctcttagaaagtttcctaggagcggagattctagctacagtgtaaaggaggggtctccggactctgtgtctagtctactgagtctcaggctagttatt

SEQ ID NO: 173237 - DNA, 272 bp, Homo Sapiens
taccgttctgtggtgtctgtaagtctgggggcctaggagggagtctcacacaggagtccggtttgatcacagtggatagggtactctacagtgtgcttaaaggcaagggggctctaagaaagagcagccctggtcagtgtgttctgagaaagcagggcagtgtctgagaggtgagttaaaataggagtgagtagtcaccattttgggatattagacaggaagtgctttctgtacatgcaggctggaaatgcacacaaccctcctgccccacc

SEQ ID NO: 173238 - DNA, 651 bp, Homo Sapiens
aggggaatgtcgcgatgtcagccagtagtgagtcaggtcatcctggttacgggcagagccctgcatcacaacagcaggccgcacggagagcgggggcacaggcagcactgtgacaatcatccactctggccgtgcatagcggggctccatgcccagcacaaaacactcctcatctgagatgcgtttgaagatctcatgcactcgctctggactcagcaggatcttcttctcctgagagtcctcattaacgtgcttccattccgcatacagctctaggccagaacgccggatcctgggctggtaccgcccacagccaccatggcccttttctttggtcagatcctcgtcaccctcaggttgttccacaccgaacttgttgtccatctcctccccaccctcgcatatgtttttgcccttgcaaaggtcgtagacatgtgtgagccgcttcttgggctgtcccttggacttagccaggatatccttgatctttgggttgttagagtccacaagcagttcggagcagaagaagcagacacagcgcaaaactttcattgtcttcaccaggaagcccacgtgaaacacaggcttggccagttcaatgtgagccaaagtggccaggacactctgtcatgtttcctgcacatgtttggc

SEQ ID NO: 173239 - DNA, 399 bp, Homo Sapiens
cagatgagagcagtttataaagtattggtgatagttacacttaattttctagacagttgctgctttttatacctttcctagaatgaattcgttagattgtgaattgtgaaagtatattttaaattaattcagcaacagttttccttgtgatacatagttactttggctgtgtataagaatagcggcagctccatacgtttatatttagttctatatttatgttctaggtactggggacacacagatggaattaagcaaggctagaaaacgtattatctttgaagacaggcaagtaaataaacatttgtaatacattacgataaatctcatggcagaaataaacagaaggttctgagacagcgtaaagaaaggagtaaagttttgaggaaggttgtaggg

SEQ ID NO: 173240 - DNA, 325 bp, Homo Sapiens
ctagagttgcccgtgacatctccgccttacaacaatcacgcttacattgaattcatctaatatgacaggaccagaaagttgtcatgttaaagcgaaagaaaagcagtctgtagaccaggagtacaaaatgatcccatttgtgtagccaaaaaacaaaattataccaaaacaaatgtgtttataaaaggcaataaaatacctgcaagaatattgtcaaactgaaaactgtggttactatgaaaagcggatccaggaaaaacaggaacagaggactgctgtctgtgaaattttaaaacacatgtcaacagggttttaaattaaagga

SEQ ID NO: 173241 - DNA, 296 bp, Homo Sapiens
tgtccttactcagtccctcaatggtaacagtctccttgaacttgtgctgccagcggcatctgacacagacaccgaccccgcctcctcctccttcctctggttctgtgccagtctcctccttccttccacctctgactgctccttctcatcctccacctagtttctcatctctctgaattccaaatactggactcaaacccaacactcagtctttggacttattttcttctacttgtctgcttggtaatctcaactagtctcatcactttaaaccacagcttcatagtaaggcggag

SEQ ID NO: 173242 - DNA, 424 bp, Homo Sapiens
  misc_feature (39)..(39): n is a, c, g, or t
  misc_feature (206)..(206): n is a, c, g, or t
tcggcaccgtgtacatctccgccttactccaaccagagnagatgaagcaggttgaactggtagcaaatgtgtgaattgaggtccttctcccaaatagtatcacaacctacttctgcagaggtgggatcagggcaaaatccccacttttcatctctttcataactggcttgtccgtggccacacccacaagtaagtcatcttcccgnaccttcacggtgtacattcatgactgccactgcatggttatactggaaggggaaacatacacggcatcccgtgggtgttccctttgattgtatgcaaatctttgtgtagatattcacaaatgtctccaccacctgacccataagaaatccacttatgaatatacttccgtgaggccaccactgtgttgtcatgcgccacctggacagagtactgcagc

SEQ ID NO: 173243 - DNA, 879 bp, Homo Sapiens
gggggcggcgacaggaccgaggggccttagttggtgggcaagtcggggatcccagaaagagaagcgtgacccggaagcggaaacgggtgtccgtcccagctccggcctgccagtgagcttctaccatcatggacctattgttcgggcgccggaagacgccagaggagctactgcggcagaaccagagggccctgaaccgtgccatgcgggagctggaccgcgagcgacagaaactagagacccaggagaagaaaatcattgcagacattaagaagatggccaagcaaggccagatggatgctgttcgcatcatggcaaaagacttggtgcgcacccggcgctatgtgcgcaagtttgtattgatgcgggccaacatccaggctgtgtccctcaagatccagacactcaagtccaacaactcgatggcacaagccatgaagggtgtcaccaaggccatgggcaccatgaacagacagctgaagttgccccagatccagaagatcatgatggagtttgagcggcaggcagagatcatggatatgaaggaggagatgatgaatgatgccattgatgatgccatgggtgatgaggaagatgaagaggagagtgatgctgtggtgtcccaggttctggatgagctgggacttagcctaacagatgagctgtcgaacctcccctcaactgggggctcgcttagtgtggctgctggtgggaaaaaagcagaggccgcagcctcagccctagctgatgctgatgcagacctggaggaacggcttaagaacctgcggagggactgagtgcccctgccactccgagataaccagtggatgcccaggatcttttaccacaacccctctgtaataaaagagatttgacact

SEQ ID NO: 173244 - DNA, 266 bp, Homo Sapiens
tcgacttaccacctcatctgcggtttcacacttctgggctctgtggcgagggtctgcccctccatggctctgaaccgctttcctctgtgcgatgaaagtaaacgacgtctccctttgagggcttggggtacggggagaacaaggctcgcacagtaggtgtgcaggccacgtccccacagcagggttccaaagcctaagatccatcagtgaccctgaggagggattcgaagaaaagttcagatttcagatttctggcttcatttgaa

SEQ ID NO: 173245 - DNA, 349 bp, Homo Sapiens
tgtacatctccgccttacagaatctactagcaattgggaaactgctggcacaatccctcctgccttctgtactcaggtaagcgatttctagaaaaaggctgaaagatctttgcgaagtactatgtacgcctaggaacatctaatttgttcagttctgataaaagaatgggtaatgttttcattctttcttccagatctcaggtaagagcttctacttggtagaatctagtctagcactcttgagcacggctctgtaatagaaggaagacgttagatgtggagaggtggtgtcaaaaataatctgggactattaaaatattatatcttgggttctgagtaaggcggagat

SEQ ID NO: 173246 - DNA, 410 bp, Homo Sapiens
tccgcttactgcactgactagaacttccagtacaatgtggactagaagtggtaagggtaggcattttcctcgtccccagttgtaaggggacagtttacagttttccaccaagattgatatgagctgttggttttcagatatcctttatcagaatgatgaagtctccttcgattcccagttgcaagaagtttttataatgaagggatgctgaattttgacatttttcctgtatatattgaaatgatcatctagtttttcagtttcggtctgttaatatgctgaattatattgatgaatatccaaatattaaaccaaccttatacatctgagataaaacctaattggttacaatgtattactttttatatattgttggatttgacctgctaacattatgtgaagaatttttg

SEQ ID NO: 173247 - DNA, 849 bp, Homo Sapiens
ggtgtattaggttgaaccatagaaactgctattctcgtaggtcaaaagggtctagtgatggaagttttgtagataagtaccaggcatctcagtaactcctagactttttctcatcccatgccccgttttaaattgtcagttttccctctgactcttctgtgataaaacatgaaactataaatttagtaattatcatgccgtgctctttttaatctatatgactgatgcaagcccctcttcttaaccgtttcttggctttgagcccagaaacacagctctccctgtctccaactccagtaagccctcctcagcctcaccttacgaatccaaagaactggggtttgttaggttctttctctaatgtagaggcccagatcccatcacaaagcttttcattcttccttgtccaccatgatcttcatcacagtctttgatatgtctgcatgcaaagtggaacagagttgggcggcaatgacagaagagcttccttggcctgactcggtgtgcggccacttcggcactgcttaatccagatattcttgttaactaagcattgtgcttccccagtgggctgaagtcaggtactctctctcctcacacctgtagttgaatatgatttggccagttgctcgctgtaacttggagaaattcctataaagtaagatctccttgcctctttcatccattggtggccacccccttgcaaaaggaaaagaaaccgccaaagtccggaaccagtaattctgagaaaagttaccttccaggatagggaagggtttctattggtaaaacctaaaatggtaaatcctttagtttccaaaaaagtggataaagtttcctgcttttaat

SEQ ID NO: 173248 - DNA, 789 bp, Homo Sapiens
tcatcccgccttactgcataaacaacgactgtttttcctgtctcttatggctgacctttatgtatttcttctggaaactaggagatccctttcccattctcagcccaaaacatgggatcttatccatagaacagctcatcagccgggttggtgtgattggagtgactctcatggctcttctttctggatatggtgctgtcaactgcccatacacttacatgtcttacttcctcaggaatgtgactgacacggatattctagccctggaacggcgactgctgcaaaccatggatatgatcataagcaaaaagaaaaggatggcaatggcacggagaacaatgttccagaagggggaagtgcataacaaaccatcaggtttctggggaatgataaaaagtgttaccacttcagcatcaggaagtgaaacttcactttccttatgtgcaaaatggataacaccatggcataagacaatcccatgaagataagatataaaagaagataatgtttgaaaagaaataagatcttactcttattcaacaggaagtggatgctttggaagaattaagcaggcagctttttctggaaacagctgatctatatgctaccaaggagagaatagaatactccaaaaccttcaaaggggaaatatgtgttaattttacttggttaccttttgtctctatttactgtgtttggaacaattttcatggctaccatcaatatggttcttcgatcgacgtgggaaaacgggatcctgtcacaagaggcattgagatcactgtgaat

SEQ ID NO: 173249 - DNA, 556 bp, Homo Sapiens
gcatccaccccacttctcctgcccgattctgattaccaacaagccaagaatatgaccctttgaaaatgtgtctgctagcactgagccgtctatacttcagagctaaacaaacagccacccacaaccttaaaagagagaacagcagcatacattcatacctgcctaccaggaagctagccagctgggaatctcccggacccaccgattgacacacagtgaccttcatttcactccactgttgctaagtgagcctgaggtgggggaagggcaatggcggatgtgaagaagagacttttccattacaccactgggcaggcagcaaaggcaagcagggtcaaatcagggccagggcttggtagcctgagtgtgtgtgtatatccatgagcatgcgtgtgtgtgcacgcttgcatgtccgtgggcatgcacgtgggtgtgcgtgcctgtgcctgctcagccctctccagcatagctaatagctgcgtcaacagatgagaagcgatgctgcagagcagcactgcaggactgcctaagggggtctcctctggagaaaagcttg

SEQ ID NO: 173250 - DNA, 162 bp, Homo Sapiens
acgagggactgtagttcaacaaggtgatctcatgtcaagagctcagcccaatgcctgtcccaagtacggtgctccatggatgtactgtctggtgatgcggatgggaaacacggtggtggtaggaacctgggcaagcgggtgcatggagcttcccccagccag

SEQ ID NO: 173251 - DNA, 461 bp, Homo Sapiens
cctcaatagtaatccagctttaattgtagagcattaattcgccttacaaacaaattacagtcactacgatttatcagtaagtactgtactggttttgtgttttcttttggcaaactttgaacaaatcagagaagaaaacataactattcatcatcatgtagaaaaagaaaagaaaatgaacctcaagtatctacctatgtgtcaagtgattcatcctgccagtaaaactaaaatctacacttacagcggagttttaaacatccttagtgcaagaaacataaccaattaatacagatcaacactaattaatgaatatggaaaattttcctatacagaggtagaatccagggcacaggctaaaacagtattcagtagtctaaacaagacttgagtctggttttatggaatccactttaaattttaggtatcagactgtatgtacatacatacaataaatagac

SEQ ID NO: 173252 - DNA, 547 bp, Homo Sapiens
  misc_feature (322)..(322): n is a, c, g, or t
  misc_feature (465)..(465): n is a, c, g, or t
  misc_feature (473)..(473): n is a, c, g, or t
tgaacatctccgccttacccttaatgcggccctcagattagatgaaaagcttgctcctggtggatcccaagggaccctcaaggacctcgaggttactgcagtcagatgccatctcatcccctgtgggggccaaaggttttatgtgggccaaatgcctgtggtcaggaactaggcatgctttctggcaatgcactcacccagacaaaaatcccttgatgtaaatccccatgttaatttattaaatttcagtcagaaggtcagcatttacatgacagaatgtatgtagagagttggggtgtctggtaggcaaacgcaaggcagntgagatagttggattaagaggctaggcgagacatagaatactattggtatgtgtgcaatttcatgaatattaaattatgtttcgaagtccagttgtcattcccgcattcagatttcatttgctgttgctttatacgttacgtncccaaggncattgcctcagggttgcaaactctttaaagggaaatttatccatatatccatgtattatatagaagaataaaaa

SEQ ID NO: 173253 - DNA, 243 bp, Homo Sapiens
catgcccctactcactccacatagctaaggctccctgggtggggacagtacaatagtccccccttatccttggggaatatgttccaagacccctagtggatgcctgaaacctccgtactgaacgcctataaatatgtttttctatacacacagacccacaaataaagattaatttataaataggcacataagagataactacagtgactagtaaccgctattgatggcagtgggtaccttagt

SEQ ID NO: 173254 - DNA, 214 bp, Homo Sapiens
acccatagtctacaatcccacttactcagatctcacccacaaacccttagatgaaatagtaagtcatctgctcctccccccgacagccaaccgtattccctatgtctcatctctgctttacttttccttgatagcattcatcatcttctaacatatcacttgtttctatgtctcctggcccctggcctccagattatcgtggggcgtgagtagg

SEQ ID NO: 173255 - DNA, 515 bp, Homo Sapiens
  misc_feature (23)..(23): n is a, c, g, or t
  misc_feature (318)..(318): n is a, c, g, or t
actagacagaatcattctcaganacttgtttgtcatgtttgtactcaactaacagaattgaaccacccttttgaaagagcagttttgaatcactctttttgtagaatctgcaagaggatatttgcatagctttgaggatttcgtgggaaacgggaatatcttcaggtaaaaactagacagaagcattctcagaaacttctttgggacgtttccatgcaagtcacagagttgaaccttcctttcatagagcaggtttgaaacactctttttgtagtatctggaagtggacatttggagcactttgaggcctattttganaaaggatatatcatcccatgaaaactagacagaagcattctcagaaacttgtctgtgttgtgtgtactcaagtaacggagttgaacatgtcttttcatagagcagttttgaaacactctttttgtagaatctgcatgaggatatttgcatagatttgagaatttcgtcggaaacgggaatatcttaatgtaaaatct

SEQ ID NO: 173256 - DNA, 785 bp, Homo Sapiens
caagcgcatggatgacccagaacgttactataattctatgccccaagagttagaagtccaaagagatcggatggtacgtttacttgaaagtcttggcctaaaacccatagttcctgatggaggatacttcatcatcgactgatgtatctttgctagatccagacctctctgatatgaagaataatgagccttatgactataagttctgtgaaatggatgactgcacataagtaactatcagccatccccgattcagcattctgtaactcagagactaaatcactgtttgagaagtttgtgcgtttttgcttcattaaaaaagacagcacactggatgctggctgaagaaatcatcacggcatggagtgtacagaagtcttgattcgtgcagaatggattaatgtttctgttagatgacctagtatggaattgttactcagtgctgccacctgactggatgttaaaaggtatttcagtacaactggaatttaaatatttccattgtttttccaaagcacttaacccaactcctaacaacattttcgggggatctgaccttttttttccagttgaaatgtattaacacaccttccacaatcattttataagagtcagcataacatagtggataagaaatgtgagatgtttaacctctcagtaactcggttctctcattataaaataggaataaaatcagtacctgtttcatatgaaggtcgtttctgagaattaaatggactaatgtatgcaaaaagcctggcaaacaataaacactcatctgacca

SEQ ID NO: 173257 - DNA, 441 bp, Homo Sapiens
tttgtgaaaggagcctaaacataagaaactatcggccaccccgtttcagcattctgtaactcagagactaaatcacagtttgagaagtttgtgcgtttttgcttcattaaaaaagacagcacactggatgctgctgaagaaatcatcaaggcatggagtgtacagaagtcttgatttgtgcagaatggattaatgtttctgttagatgacctagtatggaattgttacttagtgctgccacctgctggatgttaaaagaatgtagaagcgaggcctggaggtgaagcagccatcttccattcatgccacagctagcatgagggtgaatgtctatataataaggatggcagagcagaaagatgaaaagagactggaactctggaagcagtttgaagccactgtacctacccctaccttgtaatggatgagacaaataaaccc

SEQ ID NO: 173258 - DNA, 424 bp, Homo Sapiens
  misc_feature (344)..(344): n is a, c, g, or t
  misc_feature (414)..(414): n is a, c, g, or t
gctttgctagatccagacctctctgatatgaagaataatgagccttatgactataagtttgtgaaatggatgactaaacataagaaactatcagccatccccgtttcagcattctgtaactcagagactaaatcacagtttgagaagtttgtgcgtttttgcttcattaaaaaagacagcacactggatgctgctgaagaaatcatcaaggcatggagtgtacagaagtcttgatttgtgcagaatggattaatgtttctgttagatgacctagtatgggaattgttacttagtgctgccacctgctgggatgttaaaagaatgtaggaagcgaggcctgggangtgaaggcagccatcttccctttcatgccacagctagccaggaggggtgaatgtcttatattaataaggntgggcagtgc

SEQ ID NO: 173259 - DNA, 458 bp, Homo Sapiens
tccccaaagatggccactgagaagaaatctgatggtgcctgtgattctccatcaagtgacaaagagaactccagtcagattgctcaggaccatcagaagaaggagacagttgtgaaagaggatgaaggaaggagagagagtattaatgacagagcacgtagatcgccacgaaaacttcctacttcattaaaaaaaggagaaaggaaatgggctcctccaaaatttctgcctcacaaatatgatgtgaaactacaaaatgaagataagatcatcagtaacgtgccagcagacagcttgattcgtacagagcgcccaccaaataaggagatagttcgatactttatacggcataatgcattacgagctggtactggtgaaaatgcaccttgggtcgtagaagatgaattggtgaagaaatactctctgcccagcaagttcagtgccataattggtagcga

SEQ ID NO: 173260 - DNA, 700 bp, Homo Sapiens
ggggaggtccctgaggccgctgaggtcgttcgtgtctgttgaacggctgtgggcgtcttgctgccttgggtagggggttaaaatcgttcttgagaggaacgtctctgtgcgaagagataatgagtttagctctgagaagtgagcttgtagtggacaaaacaaagaggaaaaaaagaagagaactgtctgaggaacagaaacaagaaattaaagatgcttttgaactatttgatacagacaaagatgaagcaatagattatcatgaattaaaggtggcaatgagagccttggggtttgatgtaaaaaaagctgatgtactgaagattcttaaagattatgacagagaagccacagggataaatcacctttgaagattttaatgaagttgtgacagactggatattggaaagagatccccatgaagaaatactcaaggcatttaaactatttgatgatgatgattcaggtaaaataagcttgaggaatttgcgacgtgttgctagagaattgggtgaaaacatgagtgatgatagaacttcgagctatgatagaagaatttgacaaagatggtgatggagaaataaaccaagaggagttcattgctattatgactggtgacatttaaagaattacaaggataaacactaagaaatgttgcagttaccatcttatattctatttttgtgcctggagccgtgtg

SEQ ID NO: 173261 - DNA, 625 bp, Homo Sapiens
  misc_feature (247)..(293): n is a, c, g, or t
cacgcacccacgataataagaacatgggtagccaggtaattattcagttctgtgtcactcagagcagtacttttccatgttggttgcacaaggaattacaaaaagagcttttaaaacgtaatgcttccatactgacccatcacccctaagtctgagcagggtctgagcaaagataatttttaagtttcctcgggagattctatgaggttggtgaatctcctaatcttattctattaggttctattannnnnnnnnnnnnnnnnnnnnnnnnnnnnnnnnnnnnnnnnnnnnnnaaatatggagctgggcttcagaacctctaataaaggcttccagtgtcctgttcaaaaccaggtcggataactccaaatggcagccggtttttctgccagaacaatatgggtatgttgagtgatcggtttgttttgtgtaagatacacatttattcagcacctgtgttctaggtgctgagagtttttcgaggaacaagacagtacctgcttatgccttaagatgctttctttattagtggatggagaccaaaagtaaatatataaacaggactgcagttaagtgttaggaaggcaataaactagagaattaggagtcacagaaggcctctaat

SEQ ID NO: 173262 - DNA, 576 bp, Homo Sapiens
  misc_feature (414)..(428): n is a, c, g, or t
gggtctgtcatgaaaccactaactgcattcctgactgaagagccatctgtcatctattggggaaggtcttcagttgagctctcagccttaggaaggaagcacgtggaggagggacggaggaggttcccttgctgggcatgcttcgtagagggccaggagcagcaggtcatgtgcacatgccgttgcagcacaagcttatgcttcccgtagccgtggcttttcattctgcacagtcccaggtcccagctcccctcttatggtttctgtcataatgtgctttatctgattgactccaaacatcccgaaatgtcacctgcagatttctcgtgggaaccaatatgtacatgtttgcaattatgctgtgagaatttaaatgtgttagatggaaaatgctattggcagggaataataatnnnnnnnnnnnnnnntcattctgtttcctgcagtgggaactggccatgtagtcttaacagtcttttgtacaaatatctacaaagcagataatatccctatccagtgcttgcccttggaattgtctctaaatgcatcaagcatacaataaaaaaaactgaaatt

SEQ ID NO: 173263 - DNA, 405 bp, Homo Sapiens
ctaaatgcaagggggctctgtggactttaccttgtctccagtgaccttgattcgatgcagactatggagcaagtgggtgaggcagcctctgcctctgctgtttatttagcgccactggcatgtgcatgttgtttaatggtaatactgcacgtgccttgtttccaggacgtccttctctgggaagacagagcgctcaaaagaagcccttctacccagtctacagatagggtgggaggagctggtgtcctccccgtaagcctgtcctgaaacggaagtgtcctctcggagctcccttgcattttgttgccgtggatggagccacgtggcctttgggctgacgtcgtggtgtgtgtggtcgttgcagcctttctcttcgttactctagtacaggattatcgtggtgcc

SEQ ID NO: 173264 - DNA, 257 bp, Homo Sapiens
gcacttcctgcgtgatggccaggacactctggcattttacaaggatcaattcatggaatcctcacctatgacagtggttcccaaacttgactacgctggggaagctttcaaaaatttcaacacataggtcataccccaaaccaatcataacatttgaaggtaagagtaggcaccaatgtatttaaaggcaccctggtaattcaaacatgcagcaaaggttttgaaaccctgagagatgggaactgctacggtctgaa

SEQ ID NO: 173265 - DNA, 399 bp, Homo Sapiens
atgggattggatacggataaaatttcagaaaatctatcaaagaaagaaagaacaacagattgggtggtagatctagtagctgaacgtacagctcaacaacatgacagatatctcagttggtatgctcaacatttaccaaaaagaagacttaatgttcatagactaaaactatttgaacccatttggttgataaatcctagaaatgaaaaaagaggtacagagaaagtgaatctagactactgtttctcaacatgagaacgaataaaataaattagtgtaaaagaggttagccttactccatatatattaccatgaaagtccctaaaaactgatcatgagagcttccgcaactttatcagttttcccatggttaacatatttattgcattttcctgaagc

SEQ ID NO: 173266 - DNA, 564 bp, Homo Sapiens
cacgcaccacgataaatgttgagggggaatacagaagagaatcgaccgttctgaacagctcaacctagtttctaaaggcaagattttactccagcgacatgtactggtgaccatgatgtcactctgtgaagctggcctcaccagtaacccaaacacaacgctgaggaaggagaccatttcccaccaacagcacacacctatggctggggtggccaatgatggggcaccaataaggataagagtctttggcggctttctttttttgagcccatattttatcaatttaaagcatgagagcagcagagatggagagtagagaaaaaaacaggtttcccaagaactctggcaagaatgttgctacttggtgaaggaatggttatcattagtgcacctgtcttaaatcctgaaatgcatcttgggacctgcagttcaatattttgaagactacaaaggtagcagtggctgttggcctctccaggtcctgctgggtcccagagatgagaaagggtggagttagtaaaagaggaggctgaggcagggactcttatcgtgggtgcgttgtgg

SEQ ID NO: 173267 - DNA, 842 bp, Homo Sapiens
tggtacggctccggaattcccgggatatcgtcgacccacgcgtccgcgctattaattacagccttcaattccctggcctggaaagatactctgtcctgccagaggacaacctcacagctctgctggcctctcctcaaacaagtgctgtcagggacactgctcgcagatgcagttacgtggcttttcaccagtgtgctgaaaggcttacagatgcacgggcagcacgacgggtgcatggcttccctgggccatctggccttccagatatacgaggcactgcgccccaggtacctggagataagagctggaatggagcaaatccctgaaatacagaaggactcactggaccagtttgactgcaagccttttaaaaccctccctgcagaaagtggctgacaagcgccgaaaggaccaattcaaacgcctcattgctggttgcattgggaaacccttgggagagcagttccgaaaagaagttcacattaagaatcttccctcacttttcaaaaaaacaaagccaatgctggagacggaggtgctggacaatgatgggggtggcctggccaccatctttgaaccctgaatcaagcttttgggcatccttcctcggcctttcttgtcatctcttctttccctttgtagccgatctctaggcccttcttgcactgcacctcactttccaccactgtcagcctggaaagagatcaggtctggagctggagagacaggcctgtgccggaccagaagtaatatactaaagtatcaagaagggagtttgggcttaactatctgctaaatgtcccaatagtcccatctacttgggaattgggttcaaaaagtga

SEQ ID NO: 173268 - DNA, 665 bp, Homo Sapiens
cagccctcacatacctccgcctcaatcctgctccccgatgcggaggaccgtgtcaggctaccagatcctacacatggactctaactatttggttggcttcacgactggcgaggaactcctgaagttagctcagaagtgcacaggaggtgaagagagcaaagcagaagccatgccatccttacgctccaaacagctagatgcaggacttgcccgttcctctcgtttgtataaaaccagaagtaggtactaccagccatacgagattccagctgtcaatggcaggaggcgaaggcggatgccaagttcaggagacaagtgcactaaatctttaccttatgaaccttacaaggccctccatgggcctctgcctctttgtcttcttaaaggtaagagggctcactccaaatctctggactacctcaatctagataaaatgatcaaggagccagctgatacagaagtgctacagtaccagcttcaaaacctaaccctccgaggggaccgtgtgtttgctaggaataatacatgaatgacttggagaggagcttaaaccaatttaggtcagcctacgcttggttagaaaaaacccatgttgtatctgtaatgactcttcacactatagatggtatatcaggtaagtgttcctggacattaaattgtgtggt

SEQ ID NO: 173269 - DNA, 449 bp, Homo Sapiens
ttaatcactctccaagtgatcaaccataacagcaagggcttagttatagatagctagaaagtctgagtgaaacatctcatcttgtaaccatttagccacacagctagacatttgagtctttaattgatcaatgtattcatcccgtggggtagtgaaaattccactttagcaccttcaatcctttttcagtctttcatcctttgctctttaccatttggaacaacaataaaaataggcccggattagtcttcatcctcctttaagctggttttgctatggcatcttcttcccttgtgcactctttgctgttagaggataatcctggagcttaggcctttatatggatcaggtttgggttctgtactgctggaaatacaatcttcagcaggtgctgatgcaggctggaattgggctggagcggaccctcccattggtttaaaagttgctta

SEQ ID NO: 173270 - DNA, 528 bp, Homo Sapiens
gatcgagctcggtaccgtgtcgatctgacgacaggcactgcatatcggccttacggtctacgttgccgcagcctgctctaggcagcgcctcggtgaccaccaggaaccccatcgagccctcagccctggatgccggcgtactaccaaggttgtgtattcctagacccgtcctgaaacacttaccatagctcccgtggactggaggggttagtcatggcatagccatgcgtggtagcaagcagagaaaaaatcaacgagcaaacaaaaccacacaaaccaaaccgtcaacagcataataaaatcccaacaactatttttatttcatttttcatgcacaacctttcccccagtgcaaaagactgttactttattattgtattcaaaattcattgggtatattactacaaaagacaacccccaaaccaattttttttcctgcgaagtttaatgatccacaagtgtatatatgaaattctcctccttccttgcccccctctctttcttccctctttcccctccagacattct

SEQ ID NO: 173271 - DNA, 594 bp, Homo Sapiens
ccagctgaaaccggactacaagatctggtctagagtcacaaatcaggaagcagagaaatggagcggacggtcgtgatggataaatcgaaaggagagcccgtcattagcgtgcaaaaccacaagcaggtccaaagagagagtgagtattgcctctgccatctcagggccagctgtttctcacgatggctccacggcccgtgtgatccgcattatgaaaacagcactgttttgcctttaaaattgaagtttgtaggaggcgcgataattgtgtagattgcggatacagacacacacatgaatcctggtgctttctgcagagcagtgcccatccgtgttggcttcccttactggctcctgaccgggatgtgccgccttcagacagagcattggttcacacggcagctcaccatagggtgggatgggccagacccaggcttttcgagccggaaggcaggtcctactctttggttgacttaatagcaggttactttcttccattggttttttagtctcctattaaattaaccaaaaaggtagagaccaacctaggacagagagctggtcatgttatcagatcaagatcggcacatacag

SEQ ID NO: 173272 - DNA, 823 bp, Homo Sapiens
gtgatacaggcaacttgtcattaaagatgtgtgtgcagacatggattctgagttaatatctcatctgtagaagtatatatgtgtcccttgctttgggattggtttctggacaccactcccccacccttgctggccatttgccaaggacaccaaaacccaaggatgttgaattcccttttataaaatggacgctgtatctgcatacaacttacacagcatcctcccagtatactttaaatcatttccagatttcttatacttcatacaatgtgaatcctatgtaaatagttgttacattgtgtacttatattggtactattgtattaaatattctcaaatattttcaagcacatttggttgaatctgcagatgcagaacctgaggatatggagggctgactgtgctaatacgttatcaatggatgcgtgcataaacatggctggacttgttacttggcttgtatttgccaggcatcagcaccaactagttaaagatactcttacgtgaaagcttggcaacaaacacatgtcctgaaataatgcaagtgtagaataactttttaaaatctcatggtttatgctaaactatatgttgacataagagtggtgataaggcaacagtaggtaaaagtaaaatttcaggcaccttggcacaaactgtggcagtggcatcaaactctaagttattgttcactgccatgcatttgtggtgtgaacccccacaaaagaaaaaaaccagtttcactcaagaatgtccttgtgaaagcagtgacattattgttaaatcttaaaccccacagacataactttttgaaatggttgtc

SEQ ID NO: 173273 - DNA, 556 bp, Homo Sapiens
tcgagctcggtaccttatgtgcgattcttgagagatggacagagaggacgtgtgacttctctgggacatgcaggcggagacaccagagggggttcccaagccctcggctccctcgcccatcccactccccgtgccatctcccctgcctctctcagagcaaggactcaaatccaccctggctaccaccccccagcactctgcacccagacaagcagtttgcattgtttttccctctagatttggtgttgtactgcgaggcattcctgaccacctacaggaccttcatctccccagaggagctcatcaagaagctgcagtacagatatgagaaattctctccctttgccgacacattcaagaagcgcgtcagcaagaacacgttcttcgtgctggtacgggtggtggatgagctctgcctggtggagttgacagaagagatcctgaagctgctgatggaactggtcttccgcctggtgtgcaatggggagctgagcctggcccgtgtgctccggaagaacatcctggaccaggtggaccagaagaagctactcaggtg

SEQ ID NO: 173274 - DNA, 369 bp, Homo Sapiens
ctccggaagaacatcctggacaaggtggaccagaagaagctactcaggtgtgccacctccagccagcccctggcagcccggggggtagcagccaggccggggaccttgcacgactttcacagccatgagatagcggagcagctaacgctgctggatgctgagctcttctataaaatagagattcctgaggttttgctttgggcaaaagagcagaatgaggagaagagccccaacttgacccagttcacggagcacttcaacaacatgtcctactgggtccggtccataaccatgttacacggaaaaggcccaggacggggaacggctgctcttgaagttcatcagaatcgcacatcagcggtccgagct

SEQ ID NO: 173275 - DNA, 528 bp, Homo Sapiens
  misc_feature (97)..(146): n is a, c, g, or t
ttttaagttgtcatgtgacagaaacttttcctttgtccatcgaggtgtttcataagttttttggtgtgttttctgggtcgtctatgtgtcatatggnnnnnnnnnnnnnnnnnnnnnnnnnnnnnnnnnnnnnnnnnnnnnnnnnnggattcactgcttccattttacagaatgtcactctttagactctcagtccatcatgccatcgggtactcttgttgcagtgtaatttttattacatgcggttatttccctaacgatgtgctattcacgttcatcttcaaactcattttccatcagccagtgtctactatttagtgccctggctctatttcggtcctcctccccgggctttccctggctgctgtgctggccaaaagcatgggctttattctctccattggctgctgctccaccttagaggtgtgacctcactagcgttgactgagcgagtctgttgtggagaagaactttttgtagtaatttactaggaaaaattctgaacaagtaaaatatgaaggaaactct

SEQ ID NO: 173276 - DNA, 1131 bp, Homo Sapiens
  misc_feature (21)..(21): n is a, c, g, or t
  misc_feature (42)..(42): n is a, c, g, or t
  misc_feature (62)..(62): n is a, c, g, or t
  misc_feature (243)..(251): n is a, c, g, or t
cccagtaattcggcacgaggnaaagcaacttaagttttaagnaaaaagcacttcaaaacagnaagggcaaatggaaaaggggaatataaaacaaaccaataaaaataccatctgagggtgttactgtccaaaagtaaagaataagatgcatcactaagccctttgcactcgttatgacctcgtaagtaaaaattatcacttagaataaggggtgcacactacattccctctgtcttctagacnnnnnnnnngtagaagaatcagaaaacaatttactaacctccctgtttgatattaaaaataggaagaattttaatattttctgttagtacaagttgaacttgattgtgccaactgaaaccccagaggtttgtatatcagtagaatgcaagaacattgttaaaggtgcttacgatcttttttgttttcctttccactccattgtatcaattttttgagtaacttttaaatggctagaaaatggtctttttgctttgcccttttaaagctgaaataaccagctccattcttttcatgaatagtaagttgatatatttatttatcaggtatcttgcagttgtcaccaaatactgtagttttcttatgttgtatggaaattatagttcaattattttaatgtgatggagtgcaacaagtcattgtagaacttttcacctgttaatgttgaagttatacctctgaatttctgctgtggatatcaaggaaataataaagcagaaaccccaagaaatttgcaacttaacactttgagactgtctcttatcctagtatttgggaagagaaggaataaatttgtcaaaactaggtgagaaaatagagcattgtgggaaaaactgagtccaactagattagcaaatgttaattcctagctcaaactgtgaatagtaaggattgtaaagtatgtaatgctaagggctgtgttgtcttttcttacgattttaagttttaaaggctgttaaattacagagatgttgcccaaggatacatggggacttctcaaaagtaagagatttcttacctttcttcataatctgccaagctggttcctaatatattgttaaattggtagaaaaatatctttaaattggtgtctgctcagaatcgcaccag

SEQ ID NO: 173277 - DNA, 332 bp, Homo Sapiens
gctgctgtgcgtatcttgatcacatttattcaatatggttggaaattagcaagaatcagaagaagcacatatcaatcaaatacagccacaaaaacatcctggagataaataaagctgcactatgagaaatactcactactgaaggaaccagtactctattacatttactacctcttagcaacaaacaactcaaatgtaaatttaatttactcacaatatagaacccttgactttttaaagaaaaatatagattcaaatcaatcagaatttgcctcgctaggccttttcgttacgtatgtttttgaggcctagttcgacgactgttacgaaaa

SEQ ID NO: 173278 - DNA, 403 bp, Homo Sapiens
tcttcctcacttcctgtactctcatcgctctcggcctccgacacgaaaaggaagcaaatgagctgatggaagatctgtttgaaactttccaagatgagatgggattctccaacatggaagatgatggcccagaagaggaggagcgtgtggctgagcctcaagctaactttaacacccctcaagctctacggtttgaggaactactggccaacctactaaatgaacaacatcagatagcgaaggaactatttgaacagctgaagatgaagaaaccttcagccaaacagcagaaggaggtagagaaggttaaaccccagtgtaaggaagttcatcagaccctgattctggacccagcacaaaggaagagacaatccagcagcccaggaggtcgacgcggccgcga

SEQ ID NO: 173279 - DNA, 822 bp, Homo Sapiens
  misc_feature (414)..(471): n is a, c, g, or t
acactaggatgaatccttggggctaacaccagaggcttcagaacgtaacctgtactcgggcctacagatcattcctgatggcgacggatacgtctcacggtgaactcgtccagcctatggcagtcccatgtatggtaggatctcacgtgatccacgcggacaagttaggtgagaaggtagaagatagcaccatgccgattcgtcgaactgtgaattctacccgggaaactcctcccaaaagcaagcttgctgaaggggaggaagaaaagccagaaccagacataagttcagaggaatctgtctccactgtagaagaacaagagaatgaaactccacctgctacttcgagtgaggcagagcagccaaagggggaacctgagaatgaagagaaggaagaaaataagtcttctgagnnnnnnnnnnnnnnnnnnnnnnnnnnnnnnnnnnnnnnnnnnnnnnnnnnnnnnnnnncaattccttcctgggctaccctttctgccagccagctagccaggcccagaaacaaacaccgatggcttcttccccacgtcccaagatggatgcaatcttaactgaggccattaaggcatgcttccagaagcagtggtgcatcagtggttgctattcgaaaatacatcatccataagtatccttctctggagctggagagcaaggggttatctccttaaacaagcactgagaaagagaattaaatagaggagtcatcaaacaggttacaggaacaaggtgcttctggaagttgggaagaggtccagaaatcaagaaaaacacctcaagaaaatcccagaaacagaaagaata

SEQ ID NO: 173280 - DNA, 718 bp, Homo Sapiens
  misc_feature (67)..(173): n is a, c, g, or t
  misc_feature (176)..(304): n is a, c, g, or t
ggtcgctctagagtatcccgctccgacggggtggctgggattacaggctcacgccaccatgcccagnnnnnnnnnnnnnnnnnnnnnnnnnnnnnnnnnnnnnnnnnnnnnnnnnnnnnnnnnnnnnnnnnnnnnnnnnnnnnnnnnnnnnnnnnnnnnnnnnnnnnnnnnnncannnnnnnnnnnnnnnnnnnnnnnnnnnnnnnnnnnnnnnnnnnnnnnnnnnnnnnnnnnnnnnnnnnnnnnnnnnnnnnnnnnnnnnnnnnnnnnnnnnnnnnnnnnnnnnnnnnnnnnnnnnnnnnnnttgagccacctcgcctggcactcgcaccgtttttctgtgcatgcatctccactcccactgcccaggacctgtggacttagatttgagtcattactgagcacctagcacccagcctcatgcctacctcccacctcgcactacctgtttgcttgatgcattaataaatattccacctgaatccacagcccattcactcctgtgttcaagagctatttcaggaagtgaacctcatttctggcagtgttcagtccagtgacctcagctctgtgtacccggcagggtggctacgcctctgggggagttggatccaggggtgggggagaaagagtgttgttagagagctcggtctaggactagaggaacgtgcccttatgtaaaatacatctcaagaatcgcacatagcggtaccgagcc

SEQ ID NO: 173281 - DNA, 514 bp, Homo Sapiens
atcggaccgctgatgtgcgattctgaatgaggatattgactacaggttacttagttgacctgttaaagccttatcatatcaggattaccagggtacaaaaacgttcctaaaataaatggctctgttactaaacactccccttataacaccattgttgacactgtgacttttaaaaatctctcatatctggccatacctgtctcaccttcctaaagtcacactgacagatgacacaccagggcaagatgaaaactgtagggacttgtgtagaatgaaacgataacttcctgttcttaaaagggactgttgatataatatcctttttgcaaaaacagggaaatgcttaaggttggagtttctgttttcaataatgaagacggatattcacatgaaaagaagacaaaagaaaacagaatgccccagctgtgggctaagcagttggctatttttatttgtcaggacaaaaacatcaaatgacaattctttcttcatttctctttatgaatctagtact

SEQ ID NO: 173282 - DNA, 1280 bp, Homo Sapiens
gctatgtgcgattcttgagggcagtgagagagcctccagaggacgaggaggaagaggacggaagggagaaggagaatgtgactgttctggacaaaacactgtcagtaaacgatgttgcatgcatggcaggtttactagaaatcattgtgattctctggaaaagtattgacagaagtatggaaaataataaagaggccaaactttacacgattaacaagtttgcctctgtgcttccagagtatctgaaagtatttaaggatgatcgctgcaagatccctttattcatgctaatgtcctttatgccggcctctgctgtccccccattcagctgtggtgtgatttccacgctgagaagccgggaggagggcgctgtggacaagagctactgcactttgttggattgcctctgctcctgggggcaggtggggcacattctggagcttgttgacaactggctgcccacagagcatgcccaggccaagagcaacacagcttctaaaggtagggtgcagatccatgacacacgcccagtcaaacctgaattggcattggtctacattgagtatctgctgactcatccaaagaaccgcgagtgcttgctctctgctcctcggaagaaacttaaccatcttttgaaagcccttgaaacgtcaaaggcagatctggagtcacttctgcagacaccgggtgggaagcctcgtggcttcagtgaagcaactgccccgcgagcctttggtctccactgtcgcctgagcatccatcttcagcacaagttctgctcagaaggaaaggtgtatttgtccatgttggaagacactggcttttggatagaaagacaaaattttactcttgtattcaagatcaagaagaagactacctgaagcttcatagggtcatttatcagcaaattatccagacctacctgactgtgtgtaaagatgttgttatggtaggccttggtgaccatcagtttcagatgcaactcttacagcggagtcttggaatcatgcaaacagtgaagggatttttttatgtttcattacttcttgacattctgaaagagataactggaagttccttgattcagaaaacagattcagatgaagaagttgcaatgctgttggacacagtccagaaagtatttcagaaaatgttggaatgtattgcacggagcttcaggaaccaaccggaagaaagcctgcggctgctttattctgttcaaaggcctcttcatgagttcattactgctgttcagtctcggcacacagacaccctgttcc

SEQ ID NO: 173283 - DNA, 681 bp, Homo Sapiens
atggggcttccctggcttgggttgggcgactgtgttggcaaggacttgcagtatcattcacgtttgcatgtgttttgtaacatgttgtggtggccgctgctctcggagagggccttgccgttcgtggaatggtccttctttcagtctaccttgtgcttccgtccatttggccgactgtgttgatacgtatgatgaaccatgccccatgtcgtgacttggaatgccctggagagaacacctggccacagcgtctggaaactccttatctaagaagagggacagactcatgcccacatgatgagttctgttgagtaccaaggtagcagaaaaggggagctttgaactccatttgggagtagtccagggaagatggcctttctgcaagattcttgagggaatgatcaggcactcaggcctgggaggggagaagacatcagacgctcaggggatggtcagatgcctgtgcagaaggtaaaatgaaatctgtcagataaaatctacaaaagaatagcggttggagaattgtgggcacaacaaatgcaaagaccatcctggataaagttaagttggcaggaagcaagagaaaaaggggaaagaaagtatcagtatgcagtcgctagaaaggataggacaaaataacccaacttggaagaacccagaaagacaaatgattcgatcggc

SEQ ID NO: 173284 - DNA, 1046 bp, Homo Sapiens
  misc_feature (572)..(580): n is a, c, g, or t
  misc_feature (737)..(747): n is a, c, g, or t
  misc_feature (862)..(862): n is a, c, g, or t
  misc_feature (869)..(869): n is a, c, g, or t
  misc_feature (937)..(946): n is a, c, g, or t
ctgcaaaataccttgaaacccttatataaagactgaagtcaacggagcctagtgaaagacttactttgtggcttgtggttgaaagtcacatcaaaagacaaatgtggccacgttcaggaattggagacttactggcatggctctacagctgctcagttattaatcatgcagactaacctgtcaacactgggagatgcaacatagcaaaaggacagagaaattagaattttttgtgcagaaagccctaaattcccacctgaatgtaacttacagctcccttacctactctcacacatgccctcaaacatgctagattggcttatacataggccaacacaaaataccaaacgtgacgtgttcatgtagccctagtgggctatatggcctatttctcccatgtaaccctgggatgggtaagggcttgccaaaactttttaaagtaacatttttccttttcaccagacaaggtaattttctttttttcccatacaaggggggggaatatattaaaaattcctcctcttttcaaatgtggaaaaaagggggcggaaaaaattctcaccggttttggnnnnnnnnncttgggagggttcttggggcacaatttcttccccccccactttttttgtgggagcccacacaaagccaaaactccgggggcgcaccaaagggggagagaaaaatattactaagtatttatagtaaccaaaacatttatttccacattttttttgttnnnnnnnnnnntaaaccaaccccccccaggtgcggggatcatatagtaaagggtcgttgtgccccccccgcggcaaggatcccccgcctttttttatattacaaaaagaaggttctgaaaatactntctttcntccgccccgcaaactaataaattatgattgggtggggcggtcttttttattacaaaaacaagcgggannnnnnnnnncctcgcccaattggacaaaggtgtgtatggttcgaacactcaattttattttttaacacacagccctctccccacaccttaaaaaagcttttcaaacaag

SEQ ID NO: 173285 - DNA, 552 bp, Homo Sapiens
  misc_feature (204)..(254): n is a, c, g, or t
cgatagtatagtctgtagagttctatttctcgatagtacactgagcacatgtgtatatatgtgggtacacactgagggctcgtactttatatacactctatataagtgctctctgtgggggcacaccactttttgttgttgtctcgctgcgtgtctctttcccccccctctcacacaacacatacttttggtatatatctctcnnnnnnnnnnnnnnnnnnnnnnnnnnnnnnnnnnnnnnnnnnnnnnnnnnnatatatgtaatccctcccagctctaaaatttgcaactccaaggttgcatgttggaaattggacaactgagtcattaaaaataggtattttcccttcacatcccaccctattgatttctgtcctggtgcctgttcaagcttcatgctagggtctaccggttcaaagaggagcatgacacatgaagtcagtcttgtcactgctaattggtgtcttacatagataaattatctagttatcaggtgtctcttcatttcgtgacaacatagcatcaagaaagttcgtcaagaatcgcatcagc

SEQ ID NO: 173286 - DNA, 734 bp, Homo Sapiens
ctgctgtgcgtacttgaggagtttatagtctcacgggggaaataaaaaaatgaagtttaattaaatcacagtaaattaaactctgtgataaatataatacaggccccctcaaaaagaggattctgtaaaaaagcaggtactgaatatttcagaatatatgttggtcattatattcttgatgatgccaattctccagtcagagatggtttacactttacaacatttgaaaaaagtaccttctacttaaggtagccagtgtgcacagggattaaacaatgattaaaactgtgccaagaaatgaatgtctaatagccaatgtatccaaattcctaatctgtattcctaacatggcaagctgcacacaaataatacacaaacactatatctctagttccccagactctcttaattctcagcattcttttagcatttgcacatcagattgtttacattttctgatttgttgattataaaccgcttattctcatctatttcaagacttagaaatctgtgccatatttaatcaaataaactcatgctttctctttaacagagttgtaaaaacaatgattagtttggcccaactgccaaagcaaacctggctatattttcatttcttagttctcgaacgattacctgaatttttcattgttctgaggaatgttagaaaataagcagctgctaaaaccacaggggttttccaatcacgaccaatgttgaacgacggcacggta

SEQ ID NO: 173287 - DNA, 323 bp, Homo Sapiens
ctgctgtgcgatatcttgagtatgaaccatatattattttctggcctttctttacaattccacttatggctgaccttgaaccagaataggtctgtgattttactttccaaagtccaatacatgtatttttcttttgttcatgttgatatctgcattggcacacgtgaatttccaaatttggtcttcaccttttcagttttcataggcaaaaaataaatttggatgatgcaatagtcagtaaagaactccaaacaaaggttttcttgactagctgggggatatatggaaatccctaactgtggtgtatataaactgtaaaccca

SEQ ID NO: 173288 - DNA, 822 bp, Homo Sapiens
  misc_feature (565)..(565): n is a, c, g, or t
  misc_feature (679)..(679): n is a, c, g, or t
ggggttaaaggaaaaggtgcttctggaagttttgttgtggttcagaaatcaagaaaaacacctcagaaatccagaaacagaaagaataggagctctgcagtggatccagaaccacaagtaaaattggaggatgtcctcccactgcgcctttactcgcgctttgtgaacctaaaggaagcttcctacagtctcatcaggaaatatgtgtctcagtattatcctaagcttagagtggacatcaggcctcagctgttgaagaacgctctgcagagagcagtagagaggggccagttagaacagataactggcaaaggtgcttcggggacattccagctgaagaaatcaggggagaaacccctgcttggtggaagcctgatggaatatgcaatcttgtctgccattgctgccatgaatgagccgaagacctgctctactactgctctgaagaagtatgtcctagagaatcacccaggaaccaattctaactatcaaatgcatttgctgaaaaaaaccctgcagaaatgcgaaaagaatgggtggatggaacagatctctgggaaagggntcagtggcaccttccagctctgttttccctattatcccagccccagagttctgtttccgaagaaagagccagatgattctagagatgagggatgaagatgagatgagtcatcanaagaagaatctgaggatggagagccgcccacctaaaagaaggtgcagaagaaaaaccccagccaagtccccagggaagggcccatctgttgaaagcagaaagggtcccaaacctggaacctaaagttttcagctggcccaaga

SEQ ID NO: 173289 - DNA, 263 bp, Homo Sapiens
tgtctcatcttagggcttctgctgcttaatttccctgagtctcaagcacatctgccccacccctgtcttttgagatacctgatacttccaattcctgtgctgttctgggatccaagggacaaaacttgcttgtttcccaatggtggccccactatgaggactcaggtgtctgctctggaagtcagttaccactccaccaccttcaatagctgtgactggggatgagggatgacagaagttccctagttgcatcaaaagacttt

SEQ ID NO: 173290 - DNA, 224 bp, Homo Sapiens
gctgatgccgatcttgaggtgagagatatcagtttgttctgtgtgttgaatatatccccaggtaacttgcacatgacaggtactcaatagttctttgctgaattaacagatgaatgactaaataaaggacatccaacaacagtatattacatagccattgaaaataatgcagtagatgtccatatacaattacctaaaaggatgcccatgctacaataattgac

SEQ ID NO: 173291 - DNA, 851 bp, Homo Sapiens
ttgatgtacattcttgagggacgctaaaggcaaagtaaggtctgtcttcagagctgtaaggggatggtaaagaaacaatccttaaggtcaataacaatttagtgatagtttagggggatggctacaggagagggaagaacaggctgaagggctcccatggggaccattactttattaacggctcttagatcctgtaaaagacgccagttacctgattttttcttaatgatgaatataggagtattccatggagaatttgtgggctcaatatgtcctgctgcgagctgttcctgtactaacgcaatggcagcgagggttttctcatatgtaagtggccactgatcaacccacacagggtctgtaattttccaggaaattttgtcagcgtggggtacaggaatgtcaatggccgctacggtaaattttggtggaatcctaggcctgttttgtcttttttgggggtaatagtaatgggctgggtgattccttgattattttttcccaacccttggacggggagataccctggcttagcatttgggtcatgacagtatcgttgggactgcacatgacaagtttcatttgagagaggatgtcccttccccagagattgactggcagattggggagagacataaggggtaatgtgaccattattgccttcagagtcctcccacttaagcatttgagcactttgttgggggttggtggcctggccaataccgcgcaggtgagtagcaacggttgttaacggccagttcctcggccggtgagtgtaagatataacggtggcatcggcccctgtatcaagaatgcagaaaagagcttaccatttaattaagttcagggta

SEQ ID NO: 173292 - DNA, 574 bp, Homo Sapiens
ggcttcctattccgggtataaagtgaatgatagtcctttctcttgaagaaatcaggttctattggaaaggaaggtggactcggaaggaagctgcccggtggagcttggccctgtgctaagcattcctatccacttaactgtgggtaatcgtcggagactccctacagacctgggagtaagctattgtattgaaggggctgtatggagtcagggagagaagccaggctttagagtcagatggctctaatcgtgcatctcaccctctctgtgtccccaagctctccctctgtaagatggggacaatgacagcacccacctcccaggtctacagtgggactgacgtgagggtgcagggcagtgtgggaatggagcctgcacatggtgggtggtcaggtagcagccactgtgctgtcactcccatttgggaagtgagcaagtctcctaccaggcaatagtgaggaagcaacagattcaaatataggtttacctaacatagtcccaggaattctcacaaaacaattctgcctctgtccccaatataaaataattgttctcatgtgtcaagaatacgcac

SEQ ID NO: 173293 - DNA, 419 bp, Homo Sapiens
tgtgcctgatcttgagcacacagtgcgctctgcccctagagagcactgtgtcctgatctactctgccactggtgccacccactggctggagacatgggtactctgccaggagtgcccaaccctcccttatcaactcatcctccagctctgctacaaaccggaggggtgaccgcctatgcctaaggtcgtgactactgtgatctgtgcgcctggcctggctgcatggactgtagtgtgtgcaccatgtggccctggccatggctgcatcccagaccttcctgtggatcctgctcccaggctgtgtcactgggcagacgctcaccactctctgagcaagaacacagggagaggctgtatgtggtgtgagaagtcttcctacactgggtgcctcgtcctgtagagacagcactcagtctatc

SEQ ID NO: 173294 - DNA, 467 bp, Homo Sapiens
catgcgttgaaccaaccctggcatgttccctgttttgtgtctgcagcctgtggaaagccccattcggaacaatgtttttcacttggaggatggtgaaccctacctgtgagactgattattatgccctctttggtactatatgccatggatgtgaatttcccatagaagctggtgacatgttcctggaagctctgggctacacctggcatgacacttgctttgtatgctcagtgtgttgtgaaagtttggaaggtcagacctttttctccaagaaggacaagcccctgtgtaagaaacatgctcattctgtgaatttttgaaagtcaacagttcaggagaagagaaggaatttgaagagaaaaaggaaaattaaaattactaattaatttttagattcaatatttatatggagttttgaaaaataatagtggccctgaaggaataaattccagctttaaaaaccaaaa

SEQ ID NO: 173295 - DNA, 500 bp, Homo Sapiens
caagcgcttccatgccacttgcgggaaagaatctgacacaggtctaagacaggcttaggaaactgtgaacgagtacaatcctctgatgatagatttgccctctgaatgatgtgctgtctgccacgagagctaggacaaaataagacaggcgcttgttgccattgatcacacaattgagaaagatccgaaacacaaaatatcctattcagagggcactgcgtttggtggaggcaattacaagagactcgagttatcaaatactcaatagtattgggcactaggaaattgatgcatgttgcttatgaagaatttgaaaaagttatggtagcatgctttgaagtttttcagacttgggatgatgagtatgagaaacttcaggtattgttgagagacatcgtcaaaagaaaaagggaagaaaatctgaagatggtgtggcgtatcaaccctgcccacaggaagctgcaggcccgccttgaccagatgagaaaatttagacgcca

SEQ ID NO: 173296 - DNA, 965 bp, Homo Sapiens
  misc_feature (412)..(420): n is a, c, g, or t
  misc_feature (833)..(850): n is a, c, g, or t
aaatgaaaatgaaatctagtagctgacacttatgaccaaagtcaatctccaatggccaaagcacatggaacaagcagctatacccctgataagtcatcttttaatttagctacagttgttgctgaaacacttggacttggtgttcaagaagaatctgaaactcaaggtcccatgagcccccttggtgatgagctctaccactgtctggaaggaaatcacaagaaacagccttttgaggaatctacaagaaatactgaagatagtttaagattttcagattctacttcaaagactcctcctcaagaagaattacctactcgagtgtcatctcctgtatttggagctacctctagtatcaaaagtggtttagatttgaatacaagtttgtccccttctcttttacagcctgggnnnnnnnnncatctgaaaacactcccttttagcaacacttgtatatctagattagaaaaaactagatcgaaatcctgaagatagtgcccttttcacacatcacagtcttgggtctgaagtgaacaagatcattatcccagtcatctaataaaacggatacttataagtaaaaaatattaagtgaaatcccctaggggcaacaggaatagggactgaagtacgggctaaagaatttctaaccccctggaattaaccatttttgggaagccccccctggaaatccctttggggaagggccccaaaatttcccccccatcggcactcacgttcaccttcgggtcacccctttgttccggacacgcccctgcgggccccccctaaaaaaaccgttttcctaaaaaccctttttcctttttgggcgnnnnnnnnnnnnnnnnnnaggtaagggggtaaaagcggaaaacaattgggctccattaaagggggggtttttcccctcagggggggaaaatcccccggggggccccctgggaagtcaaaaacggggcttgggg

SEQ ID NO: 173297 - DNA, 835 bp, Homo Sapiens
cagaatgtcccagccaaaaacctacttctttgagagcaacagtcttccccctggaaagggacagatgaacagagatagaaagagaagaaagacaaacaacttaccatcaatgacaacctcttcatccaaagtgtacaagtcggggagtctgtgccttaccttttcaagtgggcaatgggtactgtctcggagaaagggaagtaagttgggtcgatcatattcagcataaagactgatctgtttttcatggtaacgctgccccttatggtggtctctcttgaaaagcttatgcaaatactaaaaggaacaaaagataagccgtgacccattaaaatgagaagagcaatacctggctaacattgctatttttagctctaaacacctcccatggacaggttgggggagaagcagtcttcagggaaaacctctaggtgatggagaagtggaaaggaaaaccctttgggagagcaaaggattccgataatttctctagaagggccccaaaacctgactctgccacgtaccaactgtgaccttaggcaagtcactaatctctctgagactcagtttatctacaaaaattttattgagttactgtgacaattaaacgagttgccattacgaaatcactcagaaccaatgaacttagcatacactaagaactacagaaatgttaatgacagtagttgtcaagatcatcattggtatctgctttggatcagaaactaaaaagatgaatggtcttcccagagtcataaaaattattattacacacaagagggtagagtcctggaatcaagcacatattcttagaaaatatcaagaatcggcataa

SEQ ID NO: 173298 - DNA, 286 bp, Homo Sapiens
aaaggagtaaaagatacaagtaattggttaatgggtaggaggtaccgcttgccaggaagacttctgtaaagagaagtagaaaacatttaagttgaccctggagataaggtccttccaggccaaaaagaacggtatgtgcataggcccagagacaggaaggaatatggctagtctgcccatactacaggaatatgactggtctgcccatagtacatgaaacagaactgagattaagcagtgcctgatcacatcagcatatccctgcagcacttcaagaatcggatca

SEQ ID NO: 173299 - DNA, 451 bp, Homo Sapiens
cgagtgccgattcttgagtagagatatctgatgagatatatgactctgcagctcagaaggactgacctaaacatagagatctagaagcaatgaaagtagatgaaaaaagcattcagattacgaggatcaaataaagatccctggtaatataaacagggtaggtaaagtccaaaatggaggcttgaaaagctacagaagctacagggacacgaaaatgttatcagacaagcagcaaatactacagtcgagaaactaataaagtacaaaagaaaactagttcaagatagtacactgagcactgtgtttatatctgaggttacaaagtgaacggcttgaactttaaatccagtctataaaagtgccctttaggggacaaaacagttttagttgttgtctggctgctttctgtttcccaaccttaaaacagaacatttagttttgaatatttctc

SEQ ID NO: 173300 - DNA, 479 bp, Homo Sapiens
agtttgaaattgaagcaatatttagaaccatagatgaggaaacacggcggcattggtgtaatatacacaacgcgcttttcttcattaatctgtaatgtacatcaaatactttacaacaatgcattaacaaaaggcaagaaacatcttgctgtacagaggaaccccaatgcaacctgaagcctagagtcacaacggatgaagagagtaaacaaagcgtgagaagccgtcccccacacagtgtgtaaactattctgtgtcttgtgcttaacgataacccttacgccccaccggcccgaatgcctcgtccctcctcccatcaaccacgttcagtataaagcacttctcgttactctacagctcacgctagaaaggtgctgcccactgtcatatttaggatcactttagctttctactgatttccaagttaacttgcgattcatttagctttctaaaatagctcttaataccctgtgtataag

SEQ ID NO: 173301 - DNA, 721 bp, Homo Sapiens
ccccccagccgtcacatacctcttcaaatatatttcttcaaagaattcataacacccaacaagtagagatccacagtgataataaatgctatgtctaaaatgacttaactgaaacaattccagagtgccatcaacagagatcacgcaaaaggaaacatggcactttcaacgttctcttctggaagaacaggtaggtcttcaaagcttgagagttcaaacaggggccatttaaacaggtagattatcaatggctaatgtattcaatggagtcctataggcaaagatatttagtgattaagtggtctacatacaccttacggctttttcttccaaatatcaaatataagaaagcctatttttaaaagtctcttaggtattttccacagtttcggaattatctgtaggaagctctgacttacttgtatagagtttaatatatgtgtccaccattaaatccaggtcgtgttttatatcaaaatttatgttaagcaaagccaagttacttgacctttggtctgtcaaagtgttcctcaaatatgctttaagacgctttcgtccattttcataccgctcattctcaaccttcatcacaggaagaatacacaggaccttcagcatgcatacacattaggaaaaaacttgatgtcaggcaggtggagggcttcatagatggtggacggaagctctatatctttccccctgtgttccatttgattctccc

SEQ ID NO: 173302 - DNA, 547 bp, Homo Sapiens
ggtcaagcgggaggacctgctaaataatgcagcccatgccgggaaggccctgctcacaggactgctggacctccaggcccggtacccccagttcatcagcagggtgagaggacgaggcaccttttgctccttcgatactcccgatgattccatacggaataagctcattttaattgccagaaacaaaggtaaggggtcaggagtggctgctgagtttcatgagcatccagtatttcctgctgtagctgccacatgttgctaggtactcagcaatattttgtgtggggggcaggtggtacacaggtctgaaaacagcgtgaatgctctttctccaaagaagagaacattacaaatgggatttctttatccatttatttactcaacaagcgttcactgaggaggtgagttgtaagtggacactggagacagttacagtgatgatgaagaccatcagagccccttccttcaggaagcatgcagtgtagcaggaaggcatggctttacacatggcatttcacaaacaatccattgcaattttaagccctgt

SEQ ID NO: 173303 - DNA, 493 bp, Homo Sapiens
  misc_feature (163)..(190): n is a, c, g, or t
  misc_feature (298)..(348): n is a, c, g, or t
ttgatgtgatatacatccccactgtgtcacagcaagattgctctctccaaaacgtagccatcaaaagcagcaaacaaaccctatattacatccatttgacataatttcagccaaacatatattttgctggaaatgattaaatggtgagtgtgtcaaatccatnnnnnnnnnnnnnnnnnnnnnnnnnnnnggatgattatgatttagaagtctctatatattgacaggaaaaaagtgacactactgcactttagctggtataacttaatcttgacagtgtctcaatactgagcatgcnnnnnnnnnnnnnnnnnnnnnnnnnnnnnnnnnnnnnnnnnnnnnnnnnnnctcatcagtatgctactgtcatggaaagtttttgtttaagtaggaatctaaaaatctatttagttctcatgcataaatgcataaatcacatcacttttagtgcaatgcctgttatgtaattccacattgtctaatcatgaaatct

SEQ ID NO: 173304 - DNA, 735 bp, Homo Sapiens
  misc_feature (511)..(638): n is a, c, g, or t
  misc_feature (663)..(687): n is a, c, g, or t
ggtcgactctaagcatcccattgacatatttgcatatgctttcagctacgactggtcaagagggacatgaattttatttatccctagaaagaataccattacattttcctgtcgtaatgcagccgaagagctaaagcccaggattaaaaagtgttgtctgtggactctgtctcgggcagagttgtttctctccactctgcctcatctctgtacgaatttgggtcccagccttgttgggttgtcagccatggacatggatttcaacccctggagaaaacgatgtcattgttcagcagctgagagcccaggcgtccgcggcgacttgccgtctctccattccactgcctgttgcagagtttttctgtaactaagggggttgaggttattgtagacgttagattgcgggcaccgccagggattttgcagcgcttcagtgtacgtgttagagaatattggaaaagcgtctgtgagccccgtgctgtattttgtaataaagtcttttgcagattgnnnnnnnnnnnnnnnnnnnnnnnnnnnnnnnnnnnnnnnnnnnnnnnnnnnnnnnnnnnnnnnnnnnnnnnnnnnnnnnnnnnnnnnnnnnnnnnnnnnnnnnnnnnnnnnnnnnnnnnnnnnnnnnncttgtggggcccccctcggcccccnnnnnnnnnnnnnnnnnnnnnnnnngggccccggcccccaaaaagaaaggaaacggggcaaaagttttttccc

SEQ ID NO: 173305 - DNA, 1202 bp, Homo Sapiens
  misc_feature (129)..(137): n is a, c, g, or t
  misc_feature (708)..(771): n is a, c, g, or t
  misc_feature (791)..(813): n is a, c, g, or t
  misc_feature (916)..(924): n is a, c, g, or t
  misc_feature (1144)..(1144): n is a, c, g, or t
  misc_feature (1148)..(1148): n is a, c, g, or t
ctagttaggtcagtatttttagagactcttaatagctcatactcttgataccaaaagcagccctgattgttaaagcacacacctgcacaagaagcagtgatggttgcatttacatttcctgggtgcacnnnnnnnnnttctcaaaaagcaaggacttacgctttttgcaaagcctttgagaagttactggatcataggaagcttataacaagaatggaagattcttaaataactcactttctttggtatccagtaacagtagatgttcaaaatatgtagctgattaataccagcattgtgaacgctgtacaaccttgtggttattactaagcaagttactactagcttctgaaaagtagcttcataattaatgttatttatacactgccttccatgacttttactttgccctaagctaatctccaaaatctgaaatgctactccaatatcagaaaaaaagggggaggtggaattatatttcctgtgattttaagagtacagagaatcatgcacatctctgattagttcatatatgtctagtgtgtaataaaagtcaagatgaactctcaaaaacccaataaaacgacgtaaaatggccctggcgtgccgcattgcccctccagaagctgtcgacactcttcctcttggcttcctccccccacctctgtcgcgtccccgcctctatctccccgccttcgcgccgcccannnnnnnnnnnnnnnnnnnnnnnnnnnnnnnnnnnnnnnnnnnnnnnnnnnnnnnnnnnnnnnncgttcctactccctagctannnnnnnnnnnnnnnnnnnnnnngtattaccctaaacctgttccgcagcggacgatagacgcccgcccctacgaacgcggcggcttcctagacccaaccactgcgcatattaaccccgccgcgccnnnnnnnnnctctcattcgccgcctttttttcgccgtcccccgttactagtatttccccctgttccccccgcccctctctctcgcattcgccttttcccgtgattcctattactcccctatgttcgccgcccgctaacacctccctgtgtgacgctacgcctccccatattctccccaccctatttctctcccgccccgcgcccgcactctcttcatatcgccgcgccntgtnttgtctgcggatattattcgtgctgccgactcgtgacatcccaccagcggcgcc

SEQ ID NO: 173306 - DNA, 738 bp, Homo Sapiens
  misc_feature (654)..(654): n is a, c, g, or t
  misc_feature (684)..(684): n is a, c, g, or t
  misc_feature (722)..(722): n is a, c, g, or t
agctggagatttccatcatggcggcgtccatttcgggctacaccttcagtgctgtgtgtttccacagcgccaacagcaacgcggaccacgaaggatttttactgggagaggtaagacaagaggaaacgtttagcatcaggtgactctacaaatcagcaacacagaatttctgcaagtaattgaaatccataaccatcagaccttgttcaaaactttatagtttttatgactacgcaaccaaagtgaatgaggagagtttggacaggattcttaaagatcggagaaagaaagtcattgggtggtacagattccggcgcaatacgcagcagcagatgtcctacagagagcaggttcttcacaagcagctcacccgcatcctcggcgtgcccgacctcgtctttcttctcttcagcttcatctccactgccaacaattccactcacgctttagaatatgtgctcttcagaccaaatagaaggtataatcagaggatatcactcgctattcccaatctaggaaatactagccagcaagagtacaaagtgtcttcagtgccaaatacttctcagagttatgccaaagtgattaaagaacatggtactgactttttttgacaaggatggagtaatgaaagacatcagggcgatttatcangtttataatgcacttcaggagaaagttcangcagtgtgtgcagatgttgaaaagagtgagcgagttgntgaatcttgtcaggca

SEQ ID NO: 173307 - DNA, 991 bp, Homo Sapiens
tgtgggcgatctagaggatcccgggtgacccacgcgtctgcgatgggtggacgggggaacaatccccaagaggcatgaactggtgaaggggcgaagaaggttgagaaggtcgacaaagatgctgaattagtggcccaatggaactattgtactctaagtcaggaaatattaagacgaccaatagttgcctgtgaacttggcagactttataacaaagatgccgtcattgaatttctcttggacaaatctgcagaaaaggctcttgggaaggcagcatctcacattaaaagcattaagaatgtgacagagctgaagctttctgataatcctgcctgggaaggggataaaggaaacactaaaggtgacaagcacgatgacctccagcgggcgcgtttcatctgccccgttgtgggcctggagatgaacggccgacacaggttctgcttccttcggtgctgcggctgtgtgttttctgagcgagccttgaaagagataaaagcggaagtttgccacacgtgtggggctgccttccaggaggatgatgtcatcgtgctcaatggcaccaaggaggatgtggacgtgctgaagacaaggatggaggagagaaggctgagagcgaagctggaaaagaaaacaaagaaacccaaggcagcagagtctgtttcaaaaccagatgtcagtgaagaagccccagggccatcaaacagttacagaccagggaagcctgaagaagccagccttgattctagagagcaagaaaaccaactttggctcccaaaagcacagcaatgaatgagagctcttctggaaaagctgggaagcctccgtgtggagccacaaagaggtccatcgcttgacagtgaagaatcggaggcctacaattcctctttaccactcacagctccgacaagcgctccaaggaggagtctggccaatgggtcaccaaagtcctaatgcttctgaagccccgacttgcaaccgatcctgccca

SEQ ID NO: 173308 - DNA, 980 bp, Homo Sapiens
  misc_feature (833)..(833): n is a, c, g, or t
cgacccaaccgtccgggggtttgctgctggctctgactcccgtcctgcgatgggttgcgacgggggaacaatccccaagaggcatgaactggtgaaggggccgaagaaggttgagaaggtcgacaaagatgctgaattagtggcccaatggaactattgtactctaagtcaggaaatattaagacgaccaatagttgcctgtgaacttggcagactttataacaaagatgccgtcattgaatttctcttggacaaatctgcagaaaaggctcttgggaaggcagcatctcacattaaaagcattaagaatgtgacagagctgaagctttctgataatcctgcctgggaaggggataaaggaaacactaaaggtgacaagcacgatgacctccagcgggcgcgtttcatctgccccgttgtgggcctggagatgaacggccgacacaggttctgcttccttcggtgctgcggctgtgtgttttctgagcgagccttgaaagagataaaagcggaagtttgccacacgtgtggggctgccttccaggaggatgatgtcatcgtgctcaatggcaccaaggaggatgtggacgtgctgaagacaaggatggaggagagaaggctgagagcgaagctggaaaagaaaacaaagaaacccaaggcagcagagtctgtttcaaaaccagatgtcagtgaagaagccccagggccatcaaaagttaagacagggaagcctgaagaagccagccttgattctagagagaagaaaaccaacttggctcccaaaagcacagccatgaatgagagctcttctggaaaagctgggaaggctccgntgtggagccacaaagagggtccatcgctgacagtgaaggattgggaggcctaacaagtccctcttttacactcaccagctccgcccaacgcttccaaggaagggaatcctgcccactggggtcaccccacccgtcctaactgcttct

SEQ ID NO: 173309 - DNA, 971 bp, Homo Sapiens
tggtacccggtccggaatttccgggatatcgtcgacccacgcgtgcggtctgtttcaaaaccagatgtcagtgaagaagccccaggccatcaaaagttaagacagggaagcctgaagaagccagccttgattctagagagaagaaaaccaacttggctcccaaaagcacagcaatgaatgagagctcttctggaaaagctgggaagcctccgtgtggagccacaaagaggtccatcgctgacagtgaagaatcggaggcctacaagtccctctttaccactcacagctccgccaagcgctccaaggaggagtctgcccactgggtcacccacacgtcctactgcttctgaagcccgcactgccaccgctcctgccccagaaggttgtttagtttccacgtaggcaggtcgctttgtgcctctgagtgcgctgctgtgtgttctctctatagttctgtgtcataaagctgtcctggccagccttcaagctggtgtggccactcttgatgtgaggcgtgtcggttccaggggggacatgggaggggctgcacagtggcccgaggtcatgcttgcttccacctgcaggtgcatttggtcctttccatggccaggaagccctgtgggctgcactttttatgcttgcagtaacaagagactccagagtcctcaccggtgcagagttggcacatattaattaactaaaattctaatgatcttgctaccagcaataaatcaagtaggccaagtgaaactgggctttaaaaaggatggatttcaaatacactgtgcccactagaagcttcgaagggcctcgtccctctgctacagccctgggaggagccaggatccttgttggtctagctaaatactgttaggggagtgtgccccatctcatcatttcgaagatagcagagtcatagttgggcacccagtgattgggttcaaaaataaagctggtctgcctcttcaaaa

SEQ ID NO: 173310 - DNA, 1152 bp, Homo Sapiens
  misc_feature (1037)..(1037): n is a, c, g, or t
  misc_feature (1051)..(1051): n is a, c, g, or t
  misc_feature (1063)..(1063): n is a, c, g, or t
ctggctctgactcccgtcctgcgatgggttgcgacgggggaacaatccccaagaggcatgaactggtgaaggggccgaagaaggttgagaaggtcgacaaagatgctgaattagtggcccaatggaactattgtactctaagtcaggaaatattaagacgaccaatagttgcctgtgaacttggcagactttataacaaagatgccgtcattgaatttctcttggacaaatctgcagaaaaggctcttgggaaggcagcatctcacattaaaagcattaagaatgtgacagagctgaagctttctgataatcctgcctgggaaggggataaaggaaacactaaaggtgacaagcacgatgacctccagcgggcgcgtttcatctgccccgttgtgggcctggagatgaacggccgacacaggttctgcttccttcggtgctgcggctgtgtgttttctgagcgagccttgaaagagataaaagcggaagtttgccacacgtgtggggctgccttccaggaggatgatgtcatcgtgctcaatggcaccaaggaggatgtggacgtgctgaagacaaggatggaggagagaaggctgagagcgaagctggaaaagaaaacaaagaaacccaaggcagcagagtctgtttcaaaaccagatgtcagtgaagaagccccagggccatcaaaagttaagacagggaagcctgaagaagccagccttgattctagagagaagaaaaccaacttggctcccaaaagcacagcaatgaatgagagctcttctggaaaagctgggaagcctccgtgtggagccacaaagaggtccatcgctgacagtgaagaatcggaggcctacaagtccctctttaccactcacagctccgccaagcgctccaaggaggagtctgcccactgggtcacccacacgtcctactgcttctgaagcccgcactgccacccgctcctgccccagaaagttgtttagttttccacgtaagcaggtccgctttgtgccctctgaagtgcgcctgctgtngtgttcctcctctnaagttccctgtntcattaaaagcttggtcctgggcccaggcctttcaaagcctggttgtggggccacctcttgtgatgttggaaggccgtggttcccgtcc

SEQ ID NO: 173311 - DNA, 1062 bp, Homo Sapiens
gggtgtggggctgccttccaggaggatgatgtcatcgtgctcaatggcaccaaggaggatgtggacgtgctgaagacaaggatggaggagagaaggctgagagcgaagctggaaaagaaaacaaagaaacccaaggcagcagagtctgtttcaaaaccagatgtcagtgaagaagccccagggccatcaaaagttaagacagggaagcctgaagaagccagccttgattctagagagaagaaaaccaacttggctcccaaaagcacagcaatgaatgagagctcttctggaaaagctgggaagcctccgtgtggagccacaaagaggtccatcgctgacagtgaagaatcggaggcctacaagtccctctttaccactcacagctccgccaagcgctccaaggaggagtctgcccactgggtcacccacacgtcctactgcttctgaagcccgcactgccaccgctcctgccccagaaggttgtttagtttccacgtaggcaggtcgctttgtgcctctgagtgcgctgctgtgtgttctctctatagttctgtgtcataaagctgtcctggccagccttcaagctggtgtggccactcttgatgtgaggcgtgtcggttccaggggggacatgggaggggctgcacagtggcccgaggtcatgcttgcttccacctgcaggtgcatttggtcctttccatggccaggaagccctgtgggctgcactttttatgcttgcagtaacaagagactccagagtcctcaccggtgcagagttggcacatattaattaactaaaattctaatgatcttgctaccagcaataaatcaagtaggccaagtgaaactgggctttaaaaaggatggtttcaaatacactgtgccactagaagcttcgaagggcctcgtcactctgctacaagcctgggaggagccaggatccttgttggtctagcttaatactgttaggggagtgtgcccatctcatcattccgaaagattagcgaagccaatattgggccccaggattgggttcaaataaagtggctgctcttttcaaaa

SEQ ID NO: 173312 - DNA, 777 bp, Homo Sapiens
ggcttccagtcctgctggagaaaggtaggttgtggtttcgctgcagctcgtgctcagccacagcacagaatgtgaccgacattaacactcacgtctgccaagtgcacagaaaagagaaaagtgaggaggagcagcagtatgtgatcaagtgtggcatctgcaccaaggcattccagaacacggagagcgctcagcagcacttccacaggaagcacgcggccctccagaaacccaccgcgaccccagggggagccaacagaagcagcacatgccagctggctgctagtgcctcacatgctgagaaaaacctgaaacagcctagctctcagaaacattcagacgtggaaaaaggagctgagcatgatgtacgctgccagaacatagaggaggaagttgagcttccagatgtggactacctgcgaaccatgactcacatagtctttgtagattttgataactggtcaaacttttttggtcatctaccagggcatctaaaccaaggaacatttatttggggctttccaaggaggaaacaccaactggaagcccccgcatcaactgtaagatctataactacctgaacaggattggatgcttcttccttcatcctcgctggcagtaaagaaaagatgccgcgggattttgccatatgtatgcatgctggcccgtctagatgagcaaacttcccaaaacaaattcctttcaccatccctctcgggagaacaaggctttccgggagctaaaagattcaattttagaaagacccagaggccaacc

SEQ ID NO: 173313 - DNA, 527 bp, Homo Sapiens
  misc_feature (236)..(248): n is a, c, g, or t
ccacctctctttggaactgtcataattctaaaggtttggggaggaaaccttagttctcttcatatacattaagttttaaatatgagttggtttagctatggcactggcattaacacaagccagagataggtggaaagtccatcaagccctatagcctagcataatcaaacctgaaccccggggtacagcacacacccagcagtccataaagcgctcttcagtaaccgactttgtcnnnnnnnnnnnnntaacctagaagaataaacagtcctctttggaacagggcagactcttggatctgttaacctctttaagcctcagtttcatcatctgtgaaacagaaataacctcctgggaagagcttgtaaggtttaaagagaaaatgaagagccttccacattgtataggggagagtgcctggtccaatagcccttcataaaaaccagtgcctgccctttctcttccggacagaagaagggggtggagtgcagataagacaagacagcgtaaacgtgattccatcggta

SEQ ID NO: 173314 - DNA, 523 bp, Homo Sapiens
aggggcaggcgctgctggtctctaccaggttctgtgctggccatcctgagcactgccaggcacttgaccattgagcagaagatggcagactactcaaacaaatctctaccatcagttagagcaagaaacagggatccgaacaggttacacaaggacaggctcaatctttctggcccaaactcaggaccgactgatctccctgtaagcgcatcaacgcagggctgagatgttataggtatcccttctgagatcatctcccccaagaaagtggccgagcttcaccatctcctcaacgtgcacgacctggtgggggccatgcatgttcctgaggatgcagtggtgtcttccgctgacgtggctcttgccctggcaagtgctgcctcccaaaatggtgttcagatctatgaccggacatctgttcttcaagtaatgggcaaaaaaggtcaagttactggagtggagaccgataaaggacagattgagtgccagtattttgtcaactgtgctggccagctattgtgga

SEQ ID NO: 173315 - DNA, 552 bp, Homo Sapiens
aagggcttagatcactaacagaacagcaatgagcccaactcaccaagagccacattgaataatgtgaaacttcatgtctagacctgtgatcagactgagctttcaaaactctaggagccagattatcatacgtataagcaacagacataagtcgctgaatcaaactggttccttggacaagaacaagaaatacctctgttaatcgtggtatatgaagacccttagcatgatcaccagcagccttccttgatttgccaggccaggttcttttcctatggctttccgctataccagaccaggcaaagacatcatgataagctaaatccaaatcggatggatctactgcaaactggcatattaacttcagcaagcaagcaagacagtctagctgccacacagtccatgattcctgctctttaggctctagaattccagaattaaaaatttctaataactgttgaagccctccagcagcaacaaacttgcaactccaggaatttttactattttccacttgatcctcacttgaatcatctgaatctagcgacagca

SEQ ID NO: 173316 - DNA, 358 bp, Homo Sapiens
ctttccactcgggccgccagctctagacactcacaggtgggccagggagaatcagcggggtccaagacaagcaggcgccaggaatccattgttagccaggacagggacagtgagggacactcagaagactctgagaggcggtctgagtcggcgtccagaaaccatcatggatctgctcaggagcagtcaagacatggctccagaaaccccaggtcccatcaagaagacagagccagtcatgggcactctgcagagagctccagacaatcaggcactcatcatgcagagaattcctctggtggacaggctgcatcatcccatgaacaggcaagatcaagtgcaggagagagacacggat

SEQ ID NO: 173317 - DNA, 293 bp, Homo Sapiens
gggaggaggatgagctcaaagatgaagttcaaagtcagtactctgcttcctcagaggattacatcatcatcctgcctgagtgctttgataccagcccgccccctgggggattctatgtacagctctgcgctctcacaagccaggcctggagcgaggtgctgaaggcaagcctggggttgaggctgggcaggaaccagctgaggctggggaaagactccctggaggggagaaccagccacaggagcacagcataagtgacatcctcacgacctcacagactctggaaacagtgg

SEQ ID NO: 173318 - DNA, 772 bp, Homo Sapiens
aggcaccgtatccgcgagccgataataggtatttagatgccgtagtaataagtgcgtcctggccacaatagctagataagcctcttgttatgtcagctctactctttgtgtgccccttggttatggtgagatcggaatgatgagcatgtctctaagtgtatttagtgtgaccagcaaatattgccggtgcgagtcgcggccatccccgacatttccactatgcactgatgactgtcgtgggcctgtctgactccttatattagaatcatttagtcctcataataactctttgcagtaagtactatgattatgtccattgtcagatgtgttaggaggacagggatattaagtgatttgtccaaggtgacacagttcataagtaacagaaccactattggaatcaggtgctttgaatatgaagtcctgttatgaaatattgtcgggatgtgttggaaccccacttccttatttataatgagtgatttcatttcaaagatggctgataggcattaaatgtttccatctatggcaagctgcttagcacaatgcctaattggaattaccgtaattcctaattgtaattaaggctagaattagcacctaatctgacaggcactaacaaaactagtcagtcctcttggactaggtggaatatcagtttggacccatgaaaaccagactcatgtgcaagaaatcagagacacaagtggacccatttcttctaagatataggaatatccttaaaagacaggtgcatgtatttcccaatcct

SEQ ID NO: 173319 - DNA, 468 bp, Homo Sapiens
ttcagggaaatacagggccttcctggatcaataaaacagagagagctttcttcagaggtagagacagccgagaggagaggctccagttggtacagctgtccaaagaaaatcctcagctactagatgcaggaattacaggatatttctttttccaagagaaagaaaaggagcttggaaaagccaagttgatgggtttctttgatttctttaagtacaagtatcaagtaaatgtggatgggaccgtggctgcttacagatatccatatctcatgctgggcgacagtctggttttaaagcaggactcgccatattatgaacattgctacatggcactagaaccttggaagcattatgttccaacttaaaagaaatctgagtgatttattagagaaagttaaatgggctaaggaaaatgatgaagaagccaagaagattgcaaaagaaggacagttgatggtttggcgaata

SEQ ID NO: 173320 - DNA, 457 bp, Homo Sapiens
gcttgtctggatggaaaaagcttgagagcaggcattacagaagtgaaggagcctagtgtcacctcacctacaccatcagacatacagcagaacaaaggtctgccaaaaccagagttccgattcaaaggacagagcacaaagtcagactctgcagaagattatctattgtggaaacggctgcaaggtgtctctgcagcttgccctgcaccaagctccgcagctcaccaactagagcatctcagtgctaagcttcagaaaattgacgagcagttgctagcaatacagaacattgctgaaaacatagaacaggatttccccaagcctggaatgctagatctacattgtgataagattggaccagtggatcacattgaattctcttctgcacctgaattcaaaaaaacattagcttcaaaaaccattagcatttctgaagaagtgcgtattacaccatatg

SEQ ID NO: 173321 - DNA, 885 bp, Homo Sapiens
gagcagtggatctcactgatgggttcttcctcttggccaagaagtttatcagttgtgcctgtttcatgggggacactttggctggtactttgggcaaggatttggtgtgagattctatggtggttttcaacaaagcattgcacaggctttccaggtcactgtcataactgtgaatagctgctatgggaaggaacagccgaggacaggctccacagggaagtctgtttgtaaaggcggagctgctgaagactatccaccaggtgattcagcctcttcctctgttggttgatgatttcccgattgttggctagggtgttaaacagtgtctctcgctctggcacaagcaggtgccttggttttttcttttgttccagatgctgatcccactccaagtctagaacatcattcacatcttggacagcaaatttcacatactgatgaaggcgccgaatttcgctgaagcatgagcttcactcgttgggatccagtggtcttttataaagcaaatgcagataaccagagtcacgatttctttcactttgttctctggcttcctcaacaccagcacaagccctcaagtaaagttgttttcaggctacttatatctccatgaagcgactctgtggtctctttaatctccaaaagaaaggtatgcaagtcatctgattctgttcgcagcatcttcatctcctcagaagtgcccacttggaaacaggctttggaagttcgggcttttaactcttccaactccttctgaaagtgtgcaatctcctccccaattccagccattacaggatctgaatctttccactgatgtccctgcttttctgcaacagcaggctgaagtgactttgcctggggagagctggctttgcgctggagggg

SEQ ID NO: 173322 - DNA, 1998 bp, Homo Sapiens
  misc_feature (1110)..(1125): n is a, c, g, or t
  misc_feature (1288)..(1296): n is a, c, g, or t
  misc_feature (1325)..(1325): n is a, c, g, or t
  misc_feature (1431)..(1440): n is a, c, g, or t
  misc_feature (1638)..(1638): n is a, c, g, or t
  misc_feature (1863)..(1863): n is a, c, g, or t
atgaagtacttcaagggccaagctgcccctttccctcctctccgcccatgaaaatgcctccaaactgagatgctttcagctgagaacagatttgactcacagacattaccaaagaggagcttgtgaatccaggaaaagctccagggggctagctgatctgagcagagagctttcagtgacccattttcctgtctagactctgccttaagctagtggcaactgctggggccccaggtacttgggacatggaaactcgttggatggctgggcagatgtaagcctgtccatgcagtcagccgatcctctgctcaggttcagctggactctgccatctgtgggcccagcatcactctgtaagttccttgaaaggaagaacaaccttagagtatttctgatacaaaatgagggcctctgctcttgatttaattataaaatgtctacgtctttctccagtttctgagccctatgcacattggcttgtgggcttgttcttcctgccaaatgatcagagaggaacattccatttatttgtagtggatttcctctggagggcatgtacccacactaaataccaactgctcttcctcagctgtagtccccaacatcagacttggcacgtggtggacactaacacacaggcactcaatgaatgagtgaaggaaataaaagtcacccctgttggtgagaggtgctatccctgagtctcagtgcaggaccagtggatgaaaggcaaggtaaagaggcccaagataggctggcttcccccgttcaaggtatagtctgcctttaagggagttttagaaccaacatgcaagacattgaaagaaatcttgcaagagccattattgacttagatccaaaacagcctctctcatgtctaaaaaggcacagaattttgcagatctgaggaagagggatgcattacctttttgcttcttttcaattgcttagcgtttctaatcatacttaatccacactaatgtgcgcaattataataaatggtaagatatccccaggccaacgacatcgtggccaatttggcccccctaatctaacccccccatacgggacctcattccccatatctccggcaatcgttcctgggttggnnnnnnnnnnnnnnnntcacaaagaggtttttccaaaaccctctcctgttgtgggccgcccgtgcccccccttcacgggggaacgcggccaattcggcccgccgttatccgtgttcctttcgaaaagaacagcccgcgccgccaattacaacaaagggggcggtggggggtttctcttnnnnnnnnnaacaaaaaaaacgtacccgcgcgcggggngggaaaaaccatagtgagctgtttctctttgtaccacaaacactctcctcaccatatgggggcgggtctctcctccccgaggcggcgcgctgtatatacgctgttnnnnnnnnnntcgctctcttctctaccacagccgagggagaagtgaggctctctcctgatacgcgacgagacgcccgcgctcctagcctcgctctcaacaaccgcgtttctcgcgccgccgtttgcccgcgcacccgactattgtgcggttaacgcccccacacactctcacggcagaaataagacacacccgcgcgccgtgtgcttnttacgcgctctccccccccatatatataacagcgcgcctacttttgctttcgccgaacaaaaccgcaggggcgcgtgtgtatcgcccccgctccgctccaccatagccaatgttaggcagcgcgggcgggaggtcgcgaatatcctcctcgttgatatatatgtcggccggtacatacaggcgtgttttgagtatgagacacacgacctgtcgtgggcctcgcgnaaatttctcgtgtgcccgcggacataacaaataatatatatttctgtgttcgccccaccccgcgcgcgcgacgcaatcgagggcgtcgggtgttttcgacccaccacaagcatgtgcgctctctcccgcccatct

SEQ ID NO: 173323 - DNA, 772 bp, Homo Sapiens
cctaagggattttaaaaccccaccataaatttttgatgtaaagaactttttaaaaatatttagatgggtacccaaaaactaactttacacaaaactattttttgatgtagaatagaatgctgttctataataagaaagtctgtagcaacactggtaatccatttggttttacagaaatactggttggaaacagaatctgataatgagagaaaactcaaatgaatgtcagtgcagttgcttcaaaaaattactgctaccacatgtactatcatcccccaaggccttttacagtctgaaatatcaaaattgaaagcaaaaataggatgaccaaaggactactattttacctcttttcagaactctacaatagtagaaactaaattcccttatggatctcagggggaaataatgtgcctgttgaaggggctcagatgtttggtgtccaggctggcatttttcaggtgagggtttcatactgacaggaggcaggctcctaaaacaaggcggtagcaccagcaccatgactagggctgctttaaaacaaatttctacgacttacgctctttgggcctgatttgttaatgcttatgaggtaatgatattatgtttgagaagctctacttctagtatacctcaatgctcagagagaaagccaacaatacaatcaggaaaccacaatattgacaaaacttagtactaccaccaagattgttcctcttgccttggcactactaaaaaactttgcctttgttactaaagtcatggtgaatcc

SEQ ID NO: 173324 - DNA, 1130 bp, Homo Sapiens
ccacttctgtgagtggagaggacattaagtatttggaatcataagttgcaatgcagtaaaatggtgctggggaaggagccagttagtgtttctgtgagtttgtgttgtgatgcaataagagataagtaatgcagagagaaatgaaccatggaaagtaagaacactgatggtgattcctctgcaaagatgataagaaaaagaaccaataaatcacacaatctttatgtgctttctatatgtatttcttagtagtgataccattgatcctcttactttttttactccattaatactaataattatatactttgctgaggatcaaaacagccaagaaaggaattactgctaaagcagctaagattctcctgaactgtaaaatcaacaggaaatggccactgggagagaaggatttggtattgggtgaggggctttctccctttacctgcctcttcttgcttgctaatagtaagttctttgtgcaccttccaccacttctgagccactactattcaagtagagatttgccccaacacattaactttttccttggagatttatatggtcctgcattttgtcctgtgctcacaatgtgaagtgtcttctgtattcaaatcaaaaaataatatatttaaggtatataacgtgttgaatctcctataatgatggacgaagaggttctcttgtcttagatagaaaagagccttctccaagagcaatgtcaaaactttgggctgtcatcttgagctgtttaccaaaatacagaccattattgaagaaaacacacattatctattgggtgttcccccatctaacattgatagtgcccccaaccaggttgtagcattggccttttaagagagactcactcactcttagtttgtaagaagctgggaatttcccattcttcaagatccctttaaggactgaagacgtggggttgtaacccttagcggggactgcctcttggtttgccaggacctaactgactgaagactgataagcggggcgggtatcgttgccgggccttttattacagtccctacacagggctgtcttgggactgacattaaatttgtgagaaaagaggttctatagacggctttaagaaacaaaggagcgcaaagataccg

SEQ ID NO: 173325 - DNA, 637 bp, Homo Sapiens
ccagagtatcatattcagaaagacaaagatcacagatacatttaggaatcccatgctggtcacagagccaaaataacacattattatgatgtctgacaagcagaagttcctgaacaatattttgaccagtagttattttaatatctgcaagaggttttgcccaagcgagcttttgaagtgctcaccaatcgcaaaagatggcaacaagagtaatgacaaagccaatcatgggaagtttatgactaccctgatataggttcctgtaaccaacataaagcacgacagcaatgcagtacaggaagacagagactgcaaatgtaatggaattgtgcagaagcacagtcatctcctaggaggacttgactttccaatttatatcatacacattaatacctggaggtgactgaaatgatgcctgatttaacctgaatggataaccagaagtagctgtaatagtttcgtcagtaactgtaggaggacaattcacttgaatttctgtttgctcttaaaaactctccacaggtggcaaaagagaagatggaaaccatctactccaggcccttgaggaagctgagcagctctcctgagtaggcttgaggtggatccagaaggcgacatcctcttgtaggaggcacga

SEQ ID NO: 173326 - DNA, 466 bp, Homo Sapiens
ccagtgagctaaagcacgtggccagatcaataaacacaatgatgcggaaggtggaaatcctcgcggcaaacgtcgtttctttgctttatttaaagaaacatgcctcttttcaatgatgcggcataggtgatcaatggcatcacaacactgttgaattatacctaaggacttctcatctgcatgtgctaaggccagactctccatgtatatcaccaaggcttcaaacacaaactgttccaccagagactcttcttccctgaattccctgtagatattattaaaggcaagtgatgctcccagcctcttgaaagcattggggtgaagcgcaaggctataaagtcgcttgaaaagcgatttggtgtttactggactcttctcctgctgctgtggtgttatttgcttaatggaccatttaaggaattctcgaatacaccgaccacaaaaatctcttaaagtactgtcaaca

SEQ ID NO: 173327 - DNA, 621 bp, Homo Sapiens
  misc_feature (553)..(553): n is a, c, g, or t
  misc_feature (577)..(577): n is a, c, g, or t
gaggatctctggcttctacaagagagaacaaatatcagaaatccaacagaagccacagatattggttttggtaatcgatgtggaaaacccaaaggaccaagagatccaccttcagaatggacatgattcaggtagctagaagacactttaagttatactggaaagttcaggtgccactgaaagccagatttatagtattccatctttaatatgtgggactaacagcagtgtagattgttaccttaatattttttgctgggaccatctacctgccttatactacacttaggaaaaagtattacatatggtttattttgaaacttcaagtattattgccttaatgtctcttaaccctgttacacgctgcttgtagacatgttaatatagtaatacctttatgatatattgagtttaaggactactctttttctgttttatcatgtatgcattattttgtatatgtacagggcaagtaggtatataatttggataaagttgcaattgaaaatattattaacaggaaggatgtaaggaaatttctggcatgggtctnaaatctttgtgtactttatttgtnaaattatttgcccgggagttttagaaaatagtttctgaatttta

SEQ ID NO: 173328 - DNA, 1157 bp, Homo Sapiens
  misc_feature (48)..(48): n is a, c, g, or t
  misc_feature (116)..(116): n is a, c, g, or t
  misc_feature (122)..(122): n is a, c, g, or t
  misc_feature (124)..(124): n is a, c, g, or t
  misc_feature (673)..(793): n is a, c, g, or t
  misc_feature (803)..(816): n is a, c, g, or t
  misc_feature (921)..(972): n is a, c, g, or t
cttaattatttttgctggggccattaccctcccttatctacacaaggnaaaaaagtattacatagggtttattttgaactcagggtattattgccttaatgtctcttaccctgttnacacgngncttgtagacatgttaatatagtaatactttattgatatattgagtttaaggactctctttttctgttttatcatgtatgcattattttgtatatgtacagggcaagtaggtatataatttgataaagttgcaattgaaatattattaacagaagatgtaagaaatttctgcatggtctaaatctttgtgtactttatttgtaaattatttgccctggagttttagaaaatagtttctgaattttaaacttgctggattcatgcagccagctttgcaggttatcagagatcaaagattgtaataataattttgtaaattgtaagcaaaaagttatttttatattatatacagtctaattgttcatcctaattgttcctgttttcatctagtcagagattcagtaagtgccttggaacaatattgaattctcttagcttgtgtgtgtttctttaatatttgaactcaagtgggattagaagactatcaaaatacatgtatgtttcaggatatttgacctgtcattaaaaaaaacaaacagttttacagtgnnnnnnnnnnnnnnnnnnnnnnnnnnnnnnnnnnnnnnnnnnnnnnnnnnnnnnnnnnnnnnnnnnnnnnnnnnnnnnnnnnnnnnnnnnnnnnnnnnnnnnnnnnnnnnnnnnnnnnnnnccttgggggnnnnnnnnnnnnnnaaaaaattttttaaacctttttttgggggccgggccccaaaaggaaaagaaaaaggggcaaaattttttccaaggaaaaccgggacaagaaaaggggtgggattnnnnnnnnnnnnnnnnnnnnnnnnnnnnnnnnnnnnnnnnnnnnnnnnnnnngggggttctgggggctttttgggatctttccacgggggcccaagggagctcaattttaaattaccccccgcccgggaatttttgggggaacgggtggaatttattaaactttccgcccaatgggaacccctcccaaaggggttgtggaacctgaattccccgggggatccaccccttggcccctt

SEQ ID NO: 173329 - DNA, 373 bp, Homo Sapiens
ggccactgaaagccagatttatagtattccatctttaatatgtgggactaacagcagtgtagattgttaccttaatattttttgctgggaccatctacctgccttatactacacttaggaaaaagtattacatatggtttattttgaaacttcaagtattattgccttaatgtctcttaaccctgttacacgctgcttgtaggacatgttaatatagtaatacctttatggatatattgagtttaagggactactctttttctgttttatcatgtatggcattattttgtatatgtacaggggcaagtagggtatataatttggattaaagttgccaattggaaatatttatttaaccggaggatgtagggaa

SEQ ID NO: 173330 - DNA, 957 bp, Homo Sapiens
  misc_feature (62)..(62): n is a, c, g, or t
  misc_feature (725)..(734): n is a, c, g, or t
cctggaaacatgatcccccttctcaatttgtcacgtgccccctagccttactgggaaccttntgtcccccaaggtcccctgtgctatcaggaaagcatgtcccatcagaaacactctcggggggcaatggtagcactcaccctgaaactgatgtatgttaaagccacagagatagagctgaggagtcctgtgttcccccgcaaggagcaccccgggatcattttctaggttcatttctctggaacatttgctgtagcatctggtctcacggactctgaggaggaattggaaattggtctcttttgagtgcagagggaactgagacgccagcttaaattggctcttgcagagagttacagaaatagtttcgatgagctagtgacacatcctaaagatgcaaagatcctcctggcggcagtagccttgacaagggccaactcttcacaggatgcagtctgtctgtgcaccaaactcttcaccaaatagaacacttgtgtctctctgtggaatgggggtttctttgtgccttgcttgctttcatagccttccattttaatggcatggctgccttgaagtaacataattctctgtccccaagatttaggaaattcctcttcgttcaccctggctcatggtattccagggtttttatcctggctgtctatgaactagggttttctcctgccctaggaaaaatactgcatcttctggaatctagaataccnnnnnnnnnnggacaaggctcctcttatagccaggcaagcagttgtttagggctagacctgttgtccccgctcgcgtggggtgaacgccccgcagtggatactgtcctcctgtgctctgggcgaggcgtcatagggtgagcacaagtcagcagtgccatggaagtgaacaggcatgtccccgcagaaacaatgcttccctctgaaaaatagagccaggctaggaacctgtacc

SEQ ID NO: 173331 - DNA, 393 bp, Homo Sapiens
  misc_feature (19)..(19): n is a, c, g, or t
gcacttgtgagtgtgtgtngatttgcagggggtccattcactttgggttccatcttgctttaaatttcttcattttgattaagagacctctttttgatctgtattgggctaaccagagccaaatacttttgaagagtttcccagggactagtcatggtaatagcatataattgatctgaatgagatggagagaagaatgaaggggtggtggttctgggtttgatttgagttcacctgtgggcagtgggcagtgggcagtgtcttggtgaaagggaacggatactactttttgcctcaccccaaagtactcactagtaaatatttccttctctctttactcccactttttacgtttgcaggtgccaaagtaatgttccactttttccctttttt

SEQ ID NO: 173332 - DNA, 230 bp, Homo Sapiens
gagctggggcttctgcattctcacagcggtgcctgtcagacaggaagaagtcccgcagaagtggcgtgtgggtcagggccttgcacgatgcagttcattgaagcatgtgttcccaaggttgatcagcccacgcagaactatggtgcagttcgaggtgatctttctccttttcgggttgtgcttcagcagttcaagctcccgtttggttggttcccaagttgaaaacttct

SEQ ID NO: 173333 - DNA, 1074 bp, Homo Sapiens
gaagaaacagatcagaaatgagaaagagacctgctgatttgctgtgtctctattatatgatacttatcatgattttgcaggagtagacattttaactatgagagtcgtgggtttatttgtgagtacgcttcattcatattctctttatcccgaacagtcaccaatactggttatgttgctgtccagtgaataagataaaatatggaatgatctctttctctgaatgggaacacatgttcctccaatctgctgtgtgacttaatcagtgtcattatgattgaggcagaagataccatgaatcagtcagaaagaagagtcttataatacacgtctcacttcccaattgagcattcagctgtagataatgttcctgctggagcatttagtgtcttatgagattccttattgagaggacattctcagactcaaacacgggcttgtaaattctgacctatgcaccacgtaaacaatgcaaatagatttcctatcttccctgggccactgttgtactagattacagtttaggtttcataggtccaggctgtgggttctgcgatgtatgcttctttcctgcttcgcagtagtcaactccctggtggttcagcctcttgaaagaagcttgagagtaagcttccttctgcctcaacaggactgaaaaaccactcaaaatccttccaaaggtgaagcattagcatcccataaaaggctgggtcccaaacattgttactatagtatcttctgtcaggattcagaggcatttaatgagttagagaaatagatgaaataaatcaaaggactaccttcccaactacaataattagtggaaattctaatattaggaacttttaccattgaggaatttaagaatttaaggcaattataggttgaatagccaaagtcaggtatgagcctatgagagctcttatagaaatgtcttcattcagtagaataaagacaacattagagaatacaatagcacttttcacttctaaaattgctatccatgtgcctggtatgctgctttcatttgcaattcaagctcttgtaggaagccagggatcctctagaacacta

SEQ ID NO: 173334 - DNA, 1370 bp, Homo Sapiens
  misc_feature (14)..(14): n is a, c, g, or t
  misc_feature (552)..(552): n is a, c, g, or t
  misc_feature (558)..(558): n is a, c, g, or t
  misc_feature (562)..(562): n is a, c, g, or t
  misc_feature (573)..(573): n is a, c, g, or t
  misc_feature (1039)..(1039): n is a, c, g, or t
  misc_feature (1042)..(1042): n is a, c, g, or t
  misc_feature (1044)..(1044): n is a, c, g, or t
  misc_feature (1046)..(1047): n is a, c, g, or t
  misc_feature (1051)..(1051): n is a, c, g, or t
  misc_feature (1060)..(1094): n is a, c, g, or t
  misc_feature (1101)..(1105): n is a, c, g, or t
  misc_feature (1115)..(1125): n is a, c, g, or t
  misc_feature (1128)..(1134): n is a, c, g, or t
  misc_feature (1138)..(1138): n is a, c, g, or t
  misc_feature (1145)..(1151): n is a, c, g, or t
  misc_feature (1156)..(1160): n is a, c, g, or t
  misc_feature (1172)..(1193): n is a, c, g, or t
  misc_feature (1196)..(1201): n is a, c, g, or t
  misc_feature (1207)..(1214): n is a, c, g, or t
  misc_feature (1237)..(1249): n is a, c, g, or t
  misc_feature (1253)..(1255): n is a, c, g, or t
  misc_feature (1276)..(1276): n is a, c, g, or t
  misc_feature (1288)..(1289): n is a, c, g, or t
  misc_feature (1339)..(1339): n is a, c, g, or t
tgctgcatatgacngggtcaggaaagccaagaagcaagcagcagagaggacccagaaacttgatgagaaaaggaagaaagtgaagcttgacctggaggcccgggagcggcaggcccaggcccaggagagtgaggaggaagaggagagccggagcaccaggacactagagcaagagatcgaacgcctgagagaagagggttcccggcagctggaggaacagcagaggctcatccgggagcagatacgccaggagcgtgaccagaggttgagaggaaaggcagaaaatactgaaggccaaggaacccccaaactaaagctaaaatggaagtgcaagaaggaggatgagtcaaaaggtggctactccaaagacgtcctcctacggcttttgcagaagtatggtgaggttctcaacctggtgctttccagtaagaagccaggcactgctgtggtggagtttgcaaccgtcaaggcagcggagctggctgtccagaatgaagttggcctggtggataaccctctgaagatttcctgggtggagggacagccccaggnaatggnccgntgggggcccgncaagcgcacctccaagggaactgtcaaaagggctcagggcttgtcagagaaggactaccaagagccctcgtcggttgaaaaatggccatggcccgggggggccggaaggggagaatgcggttgtggcccgcccgcgtttgttgccacctgagagaaaagacccgctgacagcgggcggcgccgcgcgcgcggtggagagtgaaaacggcgccggggagggcggagcagagcgggcggcgcccgccgcggcgcagaagggaggcaggagtcggtgtgtttaggggggaatgcgcccacggcgtgacagaaacaagaaaacaaagcagagcgcagtcttcctcttggttgttccctctttgcctccccccgcagtgagagggacaagaagagacaaacggggcgcccacaagaaactagagacaacatatgtgtaacaaccccgcactattggacaaacggccatatntangnannaganacaacaacnnnnnnnnnnnnnnnnnnnnnnnnnnnnnnnnnnnaaggggnnnnnaaggggtggnnnnnnnnnnnccnnnnnnnccangttaatnnnnnnnaacannnnncaccccacgcannnnnnnnnnnnnnnnnnnnnnttnnnnnntgcgtnnnnnnnnatggattgtccgtgagctggctnnnnnnnnnnnnntccnnntagtaacacaaacactctcanggggactcatannacgccgcccgccgaggacgccagtgaagaaaacaatatgtactatttgcnttgttatggcaacacgcaagtctagcacctc

SEQ ID NO: 173335 - DNA, 462 bp, Homo Sapiens
aatccgtaccaaatagaaacaatactattcatcatttcctcaagagaaacaatttctctggtgctaaggtaggtttttatttacgtcctcacaaaagggacaaagggggtatagggaataatgtcttccacatattgtgaacaaatgtaaccatgttttcataggatttgtggattctgtaaaagcagttctgctcaggataaatgcaagttttcagtgtttacgtggtttttttgatctataaataacagttaaaatgtctattggggtccttatttaactctcaaaagggttttagaagtaaatagcagattcaactatccattgaagccacttttactaatatgtgataacatgagcttagagtagactacttttcttactatactccatatcagggtaacccatggcgtgcaattattttatctagaagtagttccaagatgttatggtacggattaa

SEQ ID NO: 173336 - DNA, 242 bp, Homo Sapiens
tcagaggaaataaatcttagtattcggtgtgatagagactaattcatttcttttgatgaagtcccactctttgagtgactttgaagggggagacaaaatgtcaagaaggagtcctgcaggaacaagtgcttaagatggtgtttaatacagcagggagccaagatacagtagtaggacacagtaaagaatgtggagtgtgtagatacaaagaagaattcattttatgatctgccgggtaccga

SEQ ID NO: 173337 - DNA, 915 bp, Homo Sapiens
  misc_feature (853)..(853): n is a, c, g, or t
  misc_feature (903)..(903): n is a, c, g, or t
aggttgaatgaatgatttatatggtccatgtttatgtaagcacttaacttctttaaaaagaaactagttctttcaaaaagagctctgaattctgtctctggttagaaagtgtgaacaattctcagaacttgggacatgatttttcttctctctcacttcttataagcagatgccccttttcagggcattttcaggttgcacaggcagaactaagtgagaaatacggctccagaggccattcagtttgtctgggtccatatgattgtaggagttgggtgtgttagaattggtgaacttgactttaagaaaatctcttactttttcttcaacttcctttaggcctagacttgttccaagtgtctcttcctccaataagacagtcaggactaaggctacatctttgaaggctgcgttttcatggtcacaatatttgtagaagatcaaagtagagcctgcgggaaatgactcaaagcggtgtaccacagctgcattctggccattcttaaatccattgctcagttcttggtctacctctagtttgacagtatcactgtcttgagtagctttatctgtcccatcaatccggatggcacggacactacgaaaagaagaataggcatcagcaatttgttcactcagacacctaagtgcttcttcagcatctcgggcagcagtgagcagtaagatagcaggctgagaccgaggatgggagctattaagatgtttttccaggaatgtttggctccttttccacagcttctcatcttgaccttggtacttattcttaagttgattcatctggttctggaactcttgaacagcagtggtttctacctcaggagtactaaagaancaaaaactcccagaggcaagagcagctatcagaggaagtagcaccaacgnttcctcttgaca

SEQ ID NO: 173338 - DNA, 209 bp, Homo Sapiens
gacctctcatctggcctggtaccaaagaaaaaacaatctgtagttcaagagaagaagcaagaagagggagcagagattcagtgtgaggcagacactggaggcacacacaaaagagacttttctgaaattaaatctcaacagtgccaagggaatgagcttacaagaccatctgcatcttctcaggagaaatcaagtgggacggattaacg

SEQ ID NO: 173339 - DNA, 483 bp, Homo Sapiens
tctccgcgctaatccgtaccatgatgcatttcccttgtactgtaacccaattcctttaatctctacaatagtgtttgcccaatttcatgctgcctgcttcaaagttatattcaatatttggtcaacaatattagtgaaccaacaacaatatctaaattgttccttttcatttatatcctattactttttgttggtatttttccttctttttgctataacataataagctaattcatgcttctgtcttagttttggaaggaattatatcctaacatttacgcaatatcccttttcctaacttaaaataactatgagcttgccactacactagtaaatttgtaatcaacttaaagataatgtcttaaaagtacaattaaacatgtcataacaggagaaaaccctggtaattacgaatagtgccatgcttgctggatttttaaatagtagtataaggctatgaaaactcgccacccagtggtacgg

SEQ ID NO: 173340 - DNA, 595 bp, Homo Sapiens
acaaggaaagatccccaagacatactgttaaggacaaaatagtacacaacaggttagataatgatttacctttcatgtaaaagaacgtggaggggtaagaacatatgttcatatctccttttatttacataaagaaacactgcacagatatataaggaactattaagagtgacacccacaataaggagcaggggttctacagggtggaccagacaggagtggaaataatactcgtcaacatatgcctttcaaaaaaattttttttcatattttaaatttacctttactacctatttatttggttcaaggctccatttcgtccactttgggactaggtaatcaggctttaaactacttacctctgcctgtcagaagtcactaacctcatgacaggaataatttaggttagaggagtagcaaaactattactcaactgtttctttagaaaaggagaaactcataaaacatgggaccctaaaatttgaatattatatgtaagacggggttaaaatgtgttcaaatagtgtcttctaaaaatgtacaaacaacagaggtgtgacagtatgctgaaaaaaatatgaggggggtggaagag

SEQ ID NO: 173341 - DNA, 305 bp, Homo Sapiens
accccgcgtaaccgaccactagttcttgatattaacaagccatataggcatctaaatagtgacaaatcagtttttggcttatttaatagatattatctacactactacatttaaaaatcataaagataaaaatgaatacattaacctatacactgtgttataatctttaacccttcaataattgttcctatgtatttacattatttctacagattgtgttttaaggtgcttgaggcctgtaccccataattttgaagacagtgtttgatgtgtataagctaatttgatagtatgcgtgttgaatt

SEQ ID NO: 173342 - DNA, 1038 bp, Homo Sapiens
  misc_feature (11)..(11): n is a, c, g, or t
ccgtaccacanagacacaaataaatttagaaatgatgtttttctgtctcttaaaaagcaggttctggaagtcaaaattcctaataccaactgcaacacggacctaaagtctacactttaaggtcagctaagttaacagaaacaagaacctcctcgtgaaaagataagaaacccaagctgtcagcagtgcttcacagcatgccaggaaacttcagagaaccacagttaaatacttataccttcagatgacttcatactccaggagacatctagaacaaaatcaccccaaccccccaaaagaagataaaacaaaagtaaatacaaccatacataacaaactttcaaagtagatgcagaaattttttggatccatgtctggaaaaagccaatgtcttaaagtagtatttacagttttatactagtttctacttaaatagtagtagtttaaaatactatttgattctttgggatccattacacacatgtccattaaatctttaagtaatcaaactaatagaaacacattaatgaagataaataataaatatatgcaaatacaggaacatcaaagtaaaaattctcattcaaccaaatcaaggctttaatcgccaaagttgcctttagttctttactgttttgaagaaaatgaaaatagccaaaagcctatgtatcaatatgtctgaagagaggagaggagcagacaatgcaggtatgtaaatgtgaggaacacaggtctgtctgaagccctctcattttatgatgtcacctaaatcaccttgtggaaaagaactagagaccatgctgagaaagcgtgcaagtcatgcagatgaattggggatcaatataagcaatgacaggacaaaggatgtgctctactcaaactgaatgcaatctccaagtactgtaaactggaaacatcggtggctaaatttgcttagaacagatttaaagaaagaatactcttagcccggtgtattatagaacctaatatgtaccaagttcttcaaacaaatgatgtttataaatcccctttttcccc

SEQ ID NO: 173343 - DNA, 643 bp, Homo Sapiens
  misc_feature (566)..(589): n is a, c, g, or t
ccatggtgatagctgattctagaggataccctccgtaccacttcctattttttaaacagcatgatctttatttcctccatttacttagcatttgttcttaggagagtgggttatttgcaaggatgttaatactagttctgtaggtttattattctatcagactgtgtgtcctatagataatggaaccttgggcctttataaccagatctcctgtgaacaaaatttaaaccataacaaatatttgagacttacatttgacatattagatgttacttaccaatacctctgtattttttggttgctcacatgtagacaaacagtcttttatacttcttctctgagaatagttttgggatttttcattagttggatcttcttgcttatcttgttcattttttaattggtctgactttttacatttgaaaccttcattatctttattgagataattctctatgctattaagttgagtattttgctcacatgtcttaggcctttttgagtctttatttgaggacatgctttcatatttgttcaaatattcagacatttccaacacagtaacnnnnnnnnnnnnnnnnnnnnnnnnggaatcatcagactgaagattgccaaagaattttggattaatagtctcaattat

SEQ ID NO: 173344 - DNA, 157 bp, Homo Sapiens
cgatccccgcgttaactccgaccagtaacaaataaagagattgaagaggtaattaaaaacgttccaacgaagaaaaccccaggaccagatggcttcacagctgaattctgccaaacattcaaagaacaattattaccaatacttcttaaattcttcc

SEQ ID NO: 173345 - DNA, 488 bp, Homo Sapiens
gcggaacgtcaactgatgaatgtgaaagaaaaggtgaaattagaaaatcactacttgccatcaatcctggtcataaattaggccaagaaacatcaatgaatgcttaaattagtgaggaaaaggcgcaaggaacaagatgtttataggcgaagtacttcccccacaaaatccatactgactataaagagaaaaaaagattaacctcacagtggagaaacctaaaggacacaccttaaccaagtggtcaaggaaaaactgaaatcatgtaccacctgataggatgcaaacaaaaaacacagaatcacgtatgtgatactcctgctaaaaacataactgcttttaatcatgacgaaacatcaggcaaatccaaataggaggtcattctacaaaataactgacctgtaatattcagaagtatcaaagttatgaaactcagggaaagactgagttactatttgagatttaaaaagacaaaagaggactgggtg

SEQ ID NO: 173346 - DNA, 439 bp, Homo Sapiens
tatcaacatatggtactaggcagggatgatgtaaataatgcaatcaacagatcttgggagaattacttactgactcaagattggccaccacgcctggccaaaagggactttaaaaagctttgttgcaatttctaaaacatcataaggatatattcccaaaaattttcacatacttcatttctatctcttttttctctggccttgccttcctcacaaactcagcctagtatagtgattaaaagcgtgggttttagaatcagtatgacattgcgtagagctcaggctacattattgactaccaacatcaccttgggcaaattactagtcttgaggattatcctgctttgtctctaaacttcacttaatagggtatagtactgtttgtgaaaagtaattgaaattgtgtaaataatttagcagtacctgggacggattaacg

SEQ ID NO: 173347 - DNA, 626 bp, Homo Sapiens
gatttcctcgcgttaacccgccccatattagcaaacactgaaaacagtgaaggagctggggctggtaaggttataataaaatacactgcaatgcagggcactaaataacatgcacttttaaaagttaacccactggaaaaagaaaagttcattttagctctcttgacaacactgctttccttccataataaggtcctttgtatccttaaagccctttccttcatctttttgtcttcatattttctgaaatgtaaagtttcctacatgacacaagacatggtaaaatgtcttgttatttctccctctatgtttattactgtcttgtgtgagattcaaaagaattttccaagtggaaccctgtcctctgctgggtatctcaggacgtagacaggtggcagtgggcaggtacagggacagacaaggagagtccctatactcatcttccctccatctgcagcccagtctgtgttctcttcttccagtgaacatgcttgggtacctaaaggaaaaggcatagctagaaagacggtacagaggctacccagaaaattgcatctcgttatagaaacgtcaggtgtcgtgctctgcaggggaccaactgctaacacagatacacgggcctccgg

SEQ ID NO: 173348 - DNA, 640 bp, Homo Sapiens
  misc_feature (402)..(411): n is a, c, g, or t
cacgaccacgagagttctgcctaatcacctcccagagactctacctcctaatactataacattgggaattagtatggcaacatatgaattttggaggaggggccccatggttttgctaggcataaccctagtggcaactctctgtgttggctccaaccttacgatagcccactgcttgagtcttgagcctgaggctctgcctggcttcattcttcaaaatctatgtgggggtagccatacccccatggtttatgcattttgtacttctttggagatggcaccacatgtaccctgccaaggtttatcatctgtgctgtgtgaagggcaaaccaccatgtcctgtgctgcacctgggcacactggagcctgggtgacaagagcgaaactctggctcaaaacagnnnnnnnnnnttctttgttttcctccgggtcaggaagatattctcctatgttatcttccagaagtttgctttcctttcagatttacattttaatctttctagaatttgttatatttttgcatggtactaaaggtaaaggtcaagattcttccctggccctcttccccaaggatatgtcgattgcctggcaccatttattaaaaagatggttcttttctttattgcactgcagtggtacg

SEQ ID NO: 173349 - DNA, 170 bp, Homo Sapiens
acagcagaagcagctctaccacgaagacgtgcttttcaatcacagcctcgtgcagcgctgtgttgcccttattgttagaagcgttaatggaggccccgtgctgaacaagcggcagcgcacggctgtagactgtgctgaacagaattcaaaaataatggaattgcttcagg

SEQ ID NO: 173350 - DNA, 520 bp, Homo Sapiens
accagggccaggctcctgatggacagtctcagccccccctccaacagaatcagacttcatcgcctgattcttccaatgaaaattccccggcaacccccccagatgagcaaggtcaaggtgatgccccaccacagcttgaagatgaggaacctgcatttccacatactgacttggccaagttggatgacatgatcaacaggcctcgatgggtggttccagttttgccgaaaggggaattagaagtgcttttagaagctgctattgatcttagtaaaaagggccttgatgttaaaagtgaagcatgtcagcgatttttccgtgatgggctaacaatatcattcactaaaattcttacagatgaagcagtgagtggctggaagtttgaaattcataggtgtattattaacaatactcatcgtctggtggagctatgtgtggccaagttgtcccaagactggtttccacttttagaacttcttgccatggccttaaatcctcattgcaaattccatatctacaa

SEQ ID NO: 173351 - DNA, 1043 bp, Homo Sapiens
  misc_feature (484)..(484): n is a, c, g, or t
  misc_feature (825)..(833): n is a, c, g, or t
  misc_feature (976)..(984): n is a, c, g, or t
tcggttaatccgcacaatggtggaggcagcttttggcaggaggcattgctggtgctgtctctcgaacaagcactgcccctttggaccgtgtgaaaatcatgatgcaggttcacggttcaaaatcagacaaaatgaacatatttggtggctttcgacagatggtaaaagaaggaggtatccgctcgctttggaggggaaatggtacaaacgtcatcaaaattgctcctgagacagctgttaaattctgggcatatgaacagtacaagaagttacttactgaagaaggacaaaaaataggaacatttgagagatttatttctggttccatggctggagcaactgcacagacttttatatatccaatggaggttatgaaaaccaggctggctgtaggcaaaactgggcagtactctggaatatatgattgtgccaagaagattttgaaacatgaaggcttgggagctttttacaaaggctatgttcncaatttattaggtatcataccttatgcaggcatagatcttgctgtgtatgagctcttgaagtcctattggctggaatattttgcaaaagattctgtaaaccctggagtcatggtgttgctgggatgcggtgccttatcccagcccctgtgggtcagctggcccgcctaccatttgggctttgggtgaagaacttcgcattgcaggcctccaggcccatggtttagaaggggtccccccaaccagctggaaatattgggtttggcccttccttttcgaacgaaatttatttttccccaaggagaggaattaacccagggacccttttacaagaagggcattnnnnnnnnnaaacctttcctggaaagggtggcctccccctggcttgggaaggccaattccagtttatggtgggggtttattggaaaaattattgaaaacccaaaaccctttagggaggttaaaccccccaaaaaatggaagggcttgcccannnnnnnnngggccttcttagccccggggaatgaaatttgaaaaaacctttttcccccccaaaatcct

SEQ ID NO: 173352 - DNA, 526 bp, Homo Sapiens
  misc_feature (39)..(39): n is a, c, g, or t
tagaaggaaggaaatattaaagataagagcagagatagnatatataatagaaaaccaatagagaaaatcaatgaaaacagaagttggttctttgaaaagatcaataaaactgtcaaacctttagctagatggactaagaattaaagagaaaagactcaaattactaaagtcagaaataaagcagggacattactaccaattctacataaataaaaatgactataagagcatactgtggacagttatacagcaatgaattggataacctagacaaaatggacaaattcctggaaacacaaaatctagcaaaactaaagcatgaagaaatagaaaacctgagtagacctgtaactagtaatgagattgaattagtaatccaaatctcccaacaataaagaatcttagacatgatggcttcactttgaagtctaccaaacacttaaagaacaatactgatccttcaaatcctacttttccaaaaataggagggcacacttcctaactcattctaaggccagcattactc

SEQ ID NO: 173353 - DNA, 485 bp, Homo Sapiens
agacaagcgctaccccggaccactctcaacatttcctagcctattacttttcaaatccatctctgctgctgaagaagcactatccctataccttctcctttctcaaaataatccctttgaaggtgactttctgtttccctaactcatcttatactatacttcacatgaattatcttaatatatttgcatctgcttggcacaaatgtgcataatccacagtttctaccaaatagtctcaggctttcaaacatacaatctatacttaataccaatgaacttacttcatatccctcccagttttaagagtgtgtgatgtactaaatggctgtaaaatgaatggactctcaaatatgccttagttcctaatgtttattatggcttttaaagaaatttagtcagtctatttgagaggaaaaagttctattatctcatctcataaggtcattctaaaaattaaatatgtattttgtggattagcagtgact

SEQ ID NO: 173354 - DNA, 867 bp, Homo Sapiens
  misc_feature (39)..(39): n is a, c, g, or t
  misc_feature (534)..(534): n is a, c, g, or t
  misc_feature (660)..(660): n is a, c, g, or t
  misc_feature (725)..(725): n is a, c, g, or t
  misc_feature (776)..(776): n is a, c, g, or t
catgcagtgtgagtagaaggaagtcaacaatatgtgggnagagcactcggttgtctttacttttaaaagtaatacttggtgctaagaatttcaggattattgtatttacgttcaaatgaagatggcttttgtacttcctgtggacatgtagtaatgtctatattggctcataaaactaacctgaaaaacaaataaatgctttggaaatgtttcagttgctttagaaacattagtgcctgcctggatccccttagttttgaaatatttgccattgttgtttaaatacctatcactgtggtagagcttgcattgatcttttccacaagtattaaactgccaaaatgtgaatatgcaaagcctttctgaatctataataatggtacttctactggggagagtgtaatattttggactgctgttttccattaatgaggagagcaacaggcccctgattatacagttccaaagtaataagatgttaattgtaattcagccagaaagtacatgtctcccattgggaggatttggtgttanataccaaactgctagccctagtattatggagatgaacatgatgatgtaacttgtaatagcagaatagttaatgaatgaaactagttcttataatttatctttatttaaaagcttagcctgccttanaactagagatcaactttctcagctgcaaaagcttctagtctttcaagaagttcatactttatganattgcacagtaagcatttatttttcagaccatttttgaacatcactcctanattaataaagtattcctctgttgctttagtatttattacaattaaaagggttggaaatatagactgttcctttatgcaataaaccacccag

SEQ ID NO: 173355 - DNA, 610 bp, Homo Sapiens
  misc_feature (457)..(457): n is a, c, g, or t
  misc_feature (465)..(465): n is a, c, g, or t
  misc_feature (530)..(530): n is a, c, g, or t
gctaaagacagtgctgcctttacaatgcagtaattgccatctttggggccgaaagacaagctctgtgttgtgcttttcttgaccaccccttatcctgggctctggagcttgtgtttccctgctggcgactgtaccttgggtatttgttgctacctctcctgtttgctcagtaggaccctgtctggtggcattgaggctctggaccagaccatctgtgcagttaaggctctaccctgattgagagaggatagcagacctagaaagagaaaggagttgggcagggcctttgaggattgtgtttttcaggcagggccttgatgatcattgttttttatttaaataagatgtgtgtgctggacagagacctaaaagttgaggtcactaagtcattggaaaggccatcaaggaaacagatggggaagctgatttatgggagctgtaaggcatttagctacantaacaggngtccctgcccaggaaacacatcaaatgtgacccccgctgtgctgatatcatcttcaggctttggnctgcaagatcagaattaatcccactcgggaccccatagtccaaactttggggccacttgatgaacgatggtacggattaa

SEQ ID NO: 173356 - DNA, 1161 bp, Homo Sapiens
tgcagcgacagaacctcctcagctttctgtattgtgctcagggcttcgggtactgcaaccccgttgaaaaagatctgggccaatttgaagagctcatggcccatttcaacactctcccctaggccataattaagtgtcttgacctgattgttgctttcaggtaaacagatgtccttgttactaatcttatcacaaagcttcgttatgattttgcgaacatcctcaaatcccaccaaaagagtcaacctcagggcaatgtggcaaaagacacccagtgtgagaagcagccctcccagaggacattctgtcctgtggtagagctcccaggcctgcttgcaaacactccgggctgcaatacttggcataactgcatccgtcacacgggaactgtggccaaaagtgtgcgttcaaacatcggtgacaatagaggtcccccatttggtgactctggtgtcccatttgctgtctaggccgtgatgcggtggtggcagttctcctgggttgagaacactcacaaaagcatcctcctgcaccaggagctctcctgggagaatatcttttgtggcaacgagacagcgaccttttaaaggatctacgcataagccgatggatgatgaggcattggaaagttgttcattctcctccctcagcgctgcatcctcaagggttttggccagagctgctgggaagctttctgtgagactgtccttttcttgcatcttcattttcagacgatggaggtttctctgcagagtctgagggaggacatctgctagggctggtgtggctgtgaagttcctttcaagatcactgatggtctggcttgcctcctgcagtctccccagggccaccagacattctgctttacgtaacataatcttgggttgcaacctttctggatacccatgtgtctgtgctctgttaatgtctttaagacacgtctcatactgacccaggtggaagagggctgccgagcggttagcatgacacagtgacatgtcctcagtgttaggccttgaatgtgacactcccttagagtacagcactgcagctcctgtgtaatctttctcctgaaattttttgtttccttcttctctgtagaaaagaggagcgtccgagtcctttcccaccaagtaacctttagaaagtctttttagaaac

SEQ ID NO: 173357 - DNA, 373 bp, Homo Sapiens
  misc_feature (209)..(217): n is a, c, g, or t
gagtaagactaaattcatatttgatgcagattcctctctacctcccattctgggaggatttagttttacgtgtttggtgtttaggataatgattgttctgtttttctcaccctactatgtgaatatatattctgttagagatgggcttgttatctgcaatgtggactcaataccatgggcttgagtttggttagttcatcattagagannnnnnnnncagcagttggcttactttatgagaaaggatcatgagtttaattttcccactgatatatttgtgttctcattgctgagatataagtttcttaatgattcgttacctttttctattttcctagactagtattaaaattttgatggcatatgggtttgg

SEQ ID NO: 173358 - DNA, 524 bp, Homo Sapiens
  misc_feature (316)..(356): n is a, c, g, or t
ctagaaaatcaaatctacaattaatttcaggatctataaaggattgaattatgtatacctgtaccattaaaggctctaaatgaaataacacatccttaaataaaaagactagtccccgaagagagggaaaacggtcccttttaagccctgaaacaattcctacaaattccatgccaatgtaaatttaaaagttattgacaggatgaattttccggccacctctttttttataaatgaaagttccagtttctagaatatagtgataatcagctgttagctcattatcaattgaccacacctactcagcttccctagnnnnnnnnnnnnnnnnnnnnnnnnnnnnnnnnnnnnnnnnnaaatgagccaccttttcttatgaaattgaaaactggccattttaagaagcttttctgcctatcaaggtagcaataggtttttaaaaaagaacaagaaacccacttaggtaattaattggatagaaaattgtccgcccagaaactagacaaatggaaaactgccatttt

SEQ ID NO: 173359 - DNA, 798 bp, Homo Sapiens
gattaagtggtaaatgccctcttccaaggcaacaagtaacagaaattatatttgttttaaaagcagtcagtactcttattgattcacttaagaaaactcagcctgagaatgttgatggaaatacctgggcacaagtaattgccttatacccaactttagtagaatgcatcacctgttcttcttcagaagtctgttctgcacttaaagaggcactagttccttttaaggatttcatgcagccaccagcatccagagttcaaaatggagaatcttgaccggctacaatatatttgaaagcaggaagatagtctaaaaaatgtttgctcctaattgagtcttctgtgagaaggacatttcttactgcaaataattcttggcagctgttgttggcctcctttaaattctacttacctgagttcagtaattcatattacaggcttgcacatcaacaaaggctcctgaatgaacagcagtgtaaggctttaataaattaaactgatgggagggataattaacactacagtatacatgctaccatatctccagttggtgatttaaagtgagcttatgtacagtttgtggtgtatgtgttaatgatgtactttttaaaaagaaagaagagatatttcaattcagtcagatttattagtctggtgtttttgcaccctttttcaagtacaaaatcgtactagaattttatgcaagatggtactgtaacattccatattatctataaccagcctttgttaacaaagggaactgatatacttgtgtgtataataaatggtacagttctgt

SEQ ID NO: 173360 - DNA, 462 bp, Homo Sapiens
tcggaatcttgtccatgcactgttgcgaatgctgcagggctgactgtgcagctctctgcgggaacctggtatgggccatgagaatgtactgtacaaccacatcttcaaaatgtccagtagccaagttccaccacttttcacagattggggtagtggcttccaagttgtacctattttggagttagacttgaaaagaaagtgctagcacagtttgtgttgtggatttgctacttccatagtttacttgacatggttcagactgaccaatgcattttttttcagtgacagtctgtagcagttgaagctgtgaatgtgctaggggcaagcatttgtctttgtatgtggtgaattttttcagtgtaacaacattatctgaccaatagtacacacacagacacaaagtttaactggtacttgaaacatacagtatatgttaacgaaataaccaagactcgaaatgag

SEQ ID NO: 173361 - DNA, 936 bp, Homo Sapiens
  misc_feature (66)..(117): n is a, c, g, or t
  misc_feature (276)..(286): n is a, c, g, or t
tcctggccaagaactcagtcatttttctgtgtaccaggttgcctaaatcatgtgcagatggttctnnnnnnnnnnnnnnnnnnnnnnnnnnnnnnnnnnnnnnnnnnnnnnnnnnnncgtgtgcattttgtataatggccagaactttgtcgtgtgacagtattagcactgcctcagttaaaggtttaatttttgtttaaacctagacgtgcaacaaaagttttaccacagtctgcacttgcagaagaaagaaaaaaattcaaaccacatgtttannnnnnnnnnngcctacctcattgttcttaatgcattgagaggtgatttagtttatatgtttttggaagaaaccattaatgtttaatttaatcttaataccaaaacgaccagattgaagtttgacttttattgtcacaaatcagcaggcacaagaactgtccatgaagatgggaaatagccttaaggctgatgcagtttacttacaagtttagaaaccagaatgctttgtttttaccagattcaccattagaggttgatggggcaactgcagcccatgacacaagatctcattgttctcgatgtagaggggttggtagcagacaggtggttacattagaatagtcacacaaactgttcagtgttgcaggaaccttttcttgggggtgggggagtttcccttttctaaaaatgcaatgcactaaaactattttaagaatgtagttaattctgcttattcataaagtgggcatcttctgtgtttttaggtgtaatatcgaaagccctggctttttctcggttttctcacctggctcctcttggttccccggttttttttaaaacccaatttttaacttttatggaataaaattccatggaacttttgggaaataaaaatgggctttggggaaaacccccacaaaagtcggcagaaataagtat

SEQ ID NO: 173362 - DNA, 1186 bp, Homo Sapiens
gggtccggaagccgggacgatgtccgcatgacaaccgacgttggagtttggaggtgcttgccttagagcaagggaaacagctctcattcaaaggaactagaagcctctccctcagtggtagggagacagccaggagcggttttctgggaactgtgggatgtgcccttgggggcccgagaaaacagaagaaagatgctccagaccagtaactacagcctggtgctctctctgcagttcctgctgctgtcctatgacctctttgtcaattccttctcagaactgctccaaaagactccgtgtcatccagcttgtgctcttcatcatccaggatattgcagtcctcttcaacatcatcatcattttcctcatgttcttcaacaccttcgtcttccaggctggcctggtcaacctcctattccataagttcaaagggaccatcatcctgacagctgtgtactttgccctcagcatctcccttcatgtctgggtcatgaacttacgctggaaaaactccaacagcttcatatggacagatggacctcaaatgctgtttgtattccagagactagcagcagtgttgtactgctacttctataaacggacagccgtaagactaggcgatcctcacttctaccaggactctttgtggctgcgcaaggagttcatgcaagttcgaaggtgacctcttgtcacactgatggatacttttccttcctgatagaagccacatttgctgctttgcaggggagaattggccctatgcatgggccaaacagctggactttcccaaggaaggttcagactagctgtgttcagcattcaagaaggaagatcctccctcttgcacaattagagtgtccccatcggtctccagtgcggcatcccttccttgccttctacctctgttccaccccctttccttcctttcctctctgtaccattcattctccctgaccggcctttcttgccgagggttctgtggctcttacccttgtgaagcttttcctttagcctgggacagaaggacctcccagcccccaaaggatctcccagtgaccaaaggatgcgaagagtgatagttacgtgctcctgactgatcacaccgcagacatttagatttttatacccaaggcactttaaaaaaatgttttataaatagagaataaaataaattcttgttccataa

SEQ ID NO: 173363 - DNA, 430 bp, Homo Sapiens
ccacatacacgtacataacttgatgactcagataatttactagtctgtaaattaactgaaacattcaatgaagagcaaataaagtctaatccatcagtaataacaatgaacacttttctcaacttaattgaactcagggagggagagaaagcaacaaagtaattaaacgaaacacgggtaccagaaaatccaggatccatttctgctaaattttccatttcagttcatgcctaaactaatctacaacagaatgtggtagaagtgaaattgtacaatggcctcaggaggccttaaagcttccaccttcccccttttggaatgttcccagcaacacctaaggaagcctggactaaacagatgaatggtgaaaacgtcaaaagaaaggcccagatgagctggcaccagacatttgagtgagagaccttcctag

SEQ ID NO: 173364 - DNA, 522 bp, Homo Sapiens
caatgattacaccacactcccactcagtaaaaagcaattctcaaagggacaaaactctacgatgatgtggcttgaattaaaagaaaaggtctactctctagcagaatgaacggattacatattcctcagaaatattatgcaaatattatcatagagaccgttttgataaggacaaagtggcatagagtttgagattgtggtctccgagaaaaaacaggaatataaatattctctgttgtcaattaaaggcatattgaactcagagaattagcagattaacaaccaggtttgcattacttcatgaaaacaaaacagcagcatgtggagagtaccccactcctaagcaaaggaaggccatgatttctctcagaaaatggtcatggatcctctttaacacacccatcagtgggtgactgaggtcccagagatgtagagcctagtcagaatgatttagggatacacaccttccaaggcaggcattcccaatcaccatgctgtaaaagaaaacatttgataagacac

SEQ ID NO: 173365 - DNA, 489 bp, Homo Sapiens
cataaggataaagcttatttaaatattttaaagttcaactgctattaaatatcacgctgaataaaaagttctaataaaatgagataaatcaaagaattagaaaaaactgacacaaatgttgaatgaaaactggatattttgatccaataaattgttttaagttatgatagctctattttaagaaactatctcagagatacacactgaaatatttatatatgtaattatttggtatctaagactgcttcgaaataacatgggacagggaaataaattaagattggatatgaaataaataagactgaaatagttaaaagtcgatgataaacacatgcagttcattattctattcaatttctgcggctgggtgtagtggctcacgaatgttcagattttttaattcactccgctaaaatcaacagcttacctccactttaaaaacaaggccaacaagtcaattagccttatgaatacctcggaaaatggggt

SEQ ID NO: 173366 - DNA, 133 bp, Homo Sapiens
ccctcgagataaaggaagtattgtttaagaattgatgaactaatttcttaaacaatacctcctttatctcgaatttatatccacatcatatctataccatcatatgttttaaatatgtaaataaaaattaaaa

SEQ ID NO: 173367 - DNA, 114 bp, Homo Sapiens
gatccccatgtgctggggagtgtgcttccattgagtggggatatcagaagaaaaagaggggcttgtgtagtaaaccttactttgccaattcagctgtagagcccaaatgtgatc

SEQ ID NO: 173368 - DNA, 216 bp, Homo Sapiens
gggggccgacatgagtggggaccacctccacaacgattcccagatcgaagcggatttccgattgaatgattctcataaacacaaagataaacacaaagatcgagaacaccggcacaaagaacacaagaaggagaaggaccgggaaaagtccaagcatagcaacagtgaacataaagattctgaaaagaaacacaaagagaaggagaagaccaaaca

SEQ ID NO: 173369 - DNA, 202 bp, Homo Sapiens
tttttcttccctaaagaaaaatgaaaacagtccaagcaaatggtaaaatattaagttgaggttgaaactgaattaattagaatagatttagtttaaacataaagcaagactacagaacatttgtttacaaccagcaacaccatttaaatttatcttactacttacagaaatcctccacaaaaaaatgcccctgacctattgc

SEQ ID NO: 173370 - DNA, 778 bp, Homo Sapiens
ggacttatagctgtggctcagtacatgccgaagatactttatggccaaagcgatagcgaccgaggtaggaggttgcaatgtccactcaagtgcaatgcaaaactctggctcatattcaatttctcagtttcaatccagaatgatcaggtggaccaaactacgaattaacatgcttcctgctacgataatttgtgagccaatttcagaatgctttgttgccagtttaattattggatgggcagcccaccatgtgttcagatgggatattatggtatttttcatgtgtcattgcctggcatggtttatatttgactacattcaactcaggggtgtccagggtggcacactgtgtttttcaaaacttgattatgcagtcgcctggttcatccgcgaatccatgacaatatacatttttttgtctgcattatggggacccaacctataagctggagaactggtcgctacagattaccgctgtggggggtacagcagaggaaatcctaaatgtataactacagctttgtgactgtatataaagggaaaaaaacagaagtattataaattatgtttatataaatggtttttaaaaatctaatacgggcggtcccggccaccacatcagggaaagctggcgggccggcctcggccctccgaaaagcttttctaaaccatttcgttttggccgccggggccccactaaggaaagggaaacatgggccttaccttgtttcccaaggaagacccgggccattgattaaggcgcttggaattccctccc

SEQ ID NO: 173371 - DNA, 637 bp, Homo Sapiens
ggagatagtaggctagtaggacagatgaggagagagttataggagaaggaggggcttattctgcctgagacacttcctctcactaagacagaggaacaaattctgaaacgtgtgcggaggaagattcgaaataaaagatctgctcaagagagccgcaggaaaaagaaggtgtatgtcgggggtttagagagcagggtcttgaaatacacagcccagaatatggagcttcagaacaaagtacagcttctggaggaacagaatttgtcccttctagatcaactgaggaaactccaggccatggtgatcgagatatcaaacaaaaccagcagcagcagcacctgcatcttggtcctactagtctcctgcggcttcttcatagtcgatacgcccgcctgcgggctagtgtctgtacggctctagagagtgagagctgtagaaaagaggggacccagatgactccacagcatatggaggagctggcagagcaggagatggctaggctagtactgacagatgaggagaagagtctattggagaaggaggggcttattctgcctgagacacttcctctcactaagacagtggaacaatactgaacgtgtgcggaggaagatcgaatagaagattgctcagagag

SEQ ID NO: 173372 - DNA, 328 bp, Homo Sapiens
tgtgggtccgaggctgcgatgtatagaagccaggaagttaaacatgtcaaatgctgacttcctgaggtggacttcagccctggctgagccgtgagggttcaaggggggttcataggcctcctctggctgtggaaacggaattgtaatttcgacagtgcttggcaccagacagctgctcaatgaggaacacaactgcatcatggagaatccccagcatcctcaaaccgttaacacctgcaaatgagagctgctttaggcgggcatttgatcgagcttcctggactttatctgtcaatgacttccaggcatcttcaatactttctgcaca

SEQ ID NO: 173373 - DNA, 568 bp, Homo Sapiens
ttaagtctgagaggcagagggcgagcatgtatgttaggaagggaggagagattctcacacatctgggaagctgacaatccatcagcatggccagaaggaaaataaggaggaggagcagaaatagatgaggctggatatagaagcagggctgaagctgtgtcgatggtggtaaagagttgtgattctatccagaacgcaataggtagcattctaaacagagatcttttcaaacaagagtcagcaagtattatctgcaggaggctaaatgttaaatattttaagtttaccaagccatatggtctctctctcaatgactcagctcttccattataccatgaaagtagccagagacattatgtaacacatgtataggctgtgtcctattacaactttacttacaaacgcagactgtgtcagacatggtccatgcatggtagtgtgccacaccctgttttagaaagctcaggtttatgatgtgatggagaatgcctacaagagctcttgttttaaatggtagagtgaacatacactggaattctatcctgcttatctcctggggatcctctag

SEQ ID NO: 173374 - DNA, 1876 bp, Homo Sapiens
  misc_feature (587)..(587): n is a, c, g, or t
  misc_feature (1564)..(1564): n is a, c, g, or t
gctctgcctggtggcgccgggaggctgtttttccactcactggcgcgcagactccatcccactgttttcttctctcttttctggagttagattagtctgaagccgccaccagccccaggcccccgtgcagaagaaaagcgggagggaacggcggaggccgccgctgccctgcaccgccctcctggaggccacttggagagtccggccccgaggaggccatggccacaagtgcccacagctggccccaggcggggtggagcggagctgctgggaggctgctggataggagaggggtcacggctgcggaagaggaggttcttcgggacacccgtggatggacacggcaaggaaacaccaggccaaccacagctggggataaaatagcacaaccacaccctgccgtccagcgcctcccagcctggtgccccttcctagtaccaccagcaaccatcaatcccgtctcctcctgcctcctctcctgcaatccaccccgccacgactatcgccatggcagccctgatccgcagagaacttccgcttcctggtcacttttcttcaagagcaaggatgtgatgattttcaacggncctggtggcactgggcacggtgggcagccaggagctgttctctgtggtggccttccactgcccctgctcgccggcccggaactacctgtacgggctggcggccatcggcgtgcccgccctggtgctcttcatcattggcatcatcctcaacaaccacacctggaacctcgtgggccgaatgccagcaccggaggaccaagaacttgctccgccgcccccaccttcctccttctaagctccatcctgggacgtgcggctgtggcccctgtcacctggtctgtcatctccctgctgcgtggtgaggcttatgtctgtgctctcagtgagttcgtggacccttcctcactcacgggcagggaagagcacttcccatcagcccacgccactgaaatcctggccaggttcccctgcaaggagaaccctgacaacctgtcagacttccgggaggaggtcagccgcacgctcacgcatcagtcccagcctctttggatggctgctcattggcgcgggggccactcctggggttcctgaccaacgtgcctcaagcaattcctgctcaaccactccagctacccgccagggagggccttactgggccggcaactacccgcccccccaatgcgccgaccccagcctggctccccggccggccacgcggcccccaaaggtggtccactatactcgcgggggtgcccttccaccatgtgattaaacgaaccatcggtgggcggccacccagcactagacacttttttagggacccactcttgggggaggggcaggccttgtccccaaaacacctcgcgcgttagtttgctaattgtgcaccgcgcaaaagctttggggagacctggggggccgaaaaaaagttctctctgtccaaacaagctggggcagaaagagggcccactcctctttaacgtgactctacaagtgaggacctcaccggacgatggttgaggcaccattgggcctcnactcccacccccccgggcccggacctccgttaaacctttgcgtgaaatccgccacgtggggagtagaatctccgagggggtgccacactctccgatatggtttctctcccccatgggcgcgtgcgcgctcgcgaaaaacagagaccgcgcggagcccctgcaccgcggccacatggtgagatagagctcgaacaccgaggcgcggcgaggtggctcactatgcacacacaccgtatgtgcgaggacacagccgcaccccgcgcggggtgcggccactccccacacaaaagagagagcgcccgcctcctccac

SEQ ID NO: 173375 - DNA, 386 bp, Homo Sapiens
gagctcggtactcgagagatcatcgtggcacaaagcgagagcaagagaagaaaagctgaggaaattctgaaaagtcagactccaaagggaggagacaagaaggaatcctccaagtcattagtgcgacaagggagcttcactatagaaaaacccagcccaaacatacccatagaacttattccccatataaataaacagacttcctctactccttcttctttagcattaacatctgcaagtagaatacgagaaagaagtgagtctttggatcctgattctagtatggacacaacccttattctaaaagacacagaagcagtaatggcttttctagaagctaaactacgtgaagataataaaactgatgaaggaccagatgatctcct

SEQ ID NO: 173376 - DNA, 964 bp, Homo Sapiens
  misc_feature (738)..(738): n is a, c, g, or t
  misc_feature (763)..(763): n is a, c, g, or t
  misc_feature (791)..(800): n is a, c, g, or t
ggaccgctgctccaccatgtgcctgttggtcaacctggccctgctgtaccctggagccacgctgttcttccaaatcagcatgagtttggatgtggccagtcactggccgcacctccacagttctgtggtccgaggcagtgagagtcacaagatgatcgacttgtcaaaaaaaacggtgcttcggatctactacacctcgaggcctgctctgttcaccttgtgtgctgggaatgagctcttctactgcctcctctacctgttccatttctctgagggacctttagttggctctgtgggactgttccggatgggcctctgggtcactgcccccatcgccttgctgaagtcgctcatcagcgtcatccacctgatcacggccgcccgcaacatggctgccctggacgcagtagatcttgccaagaagaagtgacgctggagccccgggtcctggctgcccacctgccctgggagtcttgctgtgccacacagctccccaccccctgctaggaggtcccagtctcacgccttcctcatgtgttgttctacctgctgggatgggggtcagcctctctttggtgacgtcacgttctctgggatcctgaagacccgggcctcaaatcagggaggatacgcgggaggccccctccatccaggcggtgctcctggggtgccgggaccgggcagggtcacaccctgcctgctcagccctggggcccgagatgctagggaccccttgangaagggaggtggtgtgaaggccacntttcctgaaaaggcggaagtcaaacctnnnnnnnnnngcctaaaaaaaggttggggggcaccatgccccaggaagggaaaaaagccatccccaagcctttccccttgcacccggggtccctctgggccctgcccaaccccggggcccggggcggggaaacttcccctaattttgaacttgggggtttccctttttcaaaaa

SEQ ID NO: 173377 - DNA, 696 bp, Homo Sapiens
ggggatccctggaaggaccccggggccttcaaaatcaggggaagggattacgcggggaggccccccttccattccagggcggtggttccttggggtgcccgggacccggggcagtgttcacaccctgccttgctcaagtccttggggtccgagatgctagggacgcttgagtaaggaaggtggtgtaagggccaggtttcctgaaaggcgggagtcagacctccgcccccagccagagcaagcttggggcaccatgcccaggagggaagaagccatccacagccttccctgtcaccggctcctctgtcctgcctaccctggtcctggcgggacttcactatttgacttggtttcctttcagatattcttggctcagggcctgggttgagggagcttagggaaggacgtccgtctgggtgcttttcctccagtttgctggctggcttctccgtctacccacagtgacctcacagagaggccctcctgccacccatgctcatgtggtgtccccaccgcccacttgtttgatgtcactgactgtctacatgtatttatattcttgatattttctaccctcactagaatgtaaactccatgaaggcacagacttttcttgttctcttctctatccctagagtaagaccaacttgaacctggcatatagtagctgcttaataaatactcgtctgtcaatga

SEQ ID NO: 173378 - DNA, 985 bp, Homo Sapiens
  misc_feature (745)..(745): n is a, c, g, or t
  misc_feature (751)..(751): n is a, c, g, or t
gcctgctctgttcccttgtgtgctgggaatgagctcttctactgcctcctctacctgttccatttcgctgagggacctttagttggctctgtgggactgttccggatgggcctctgggtcactgcccccatcgccttgctgaagtcgctcatcagcgtcatccacctgatcacggccgcccgcaacatggctgccctggacgcagcagaccgcgccaagaagaagtgacgctggagccccgggtcctggctgcccacctgccctgggagtcttgcttgtgccacacagctccccaccccctgctaggaggtcccagtctcacgccttcctcatgtgtagttctacctgctgggatgggggtcagcctctctttggtgacgtcacgttctctgggatcctgaggacccgggcctcaaatcagggaggatacgcgggaggccccctccatccaggcggtgctcctggggtgccgggaccgggcagtgtcacaccctgcctgctcagtcctggggtccgagatgctagggacgcttgagtgagggaggtggtgtgagggccaggtttcctgaaaggcgggagtcagacctccgcccccagccagagcaagcttggggcaccatgcccagaagggaagaagccatccacagccttccctgtcaccggctcctctgtcctgcctaccctgggtctggcgggacttcactatttgacttggtttccttttcaaataatccttggctcaggncctggngttggagggagcctttagggaaggaacggtccgttcttggggtgctttttccctccaattttggctgggctgggcttcctcccggtcttacccaacaagtgaacccttcacagaagaagggccctttcccggccacacccaatggcttcagtgtggggtgggtccccccaaccggcccaaaattgtgggtttggaatgggtccccgtggaactgggcccctaaccatgtgtatt

SEQ ID NO: 173379 - DNA, 1004 bp, Homo Sapiens
tctaggaagagtcggggccacggggtcgagcgcacagtgcatagaaagacgcgacaccccatcaggtacagtatagcacgtaagtggatagtcgttggacttggacagctgtcccgcgtcactacaggtaagacagccggcgggaggcgcccgcacagcctcgcgcagggtgcgctgccagccaccagccagcgccacacgtgggcagccagaagcccgtcccctggaagggttccgctaagttgcgggaggcccgcgggattgcccgagccaaagtctgatcattgcgggggactgtccgcgccttggggcccacagaacggtgaaggtgcagccagtgacgggccacatccaaacccatgctgatttggaagaacagcgtggctccagggtacagcagggccaggttgaccaacaggcacatggtggagcagcggtccgtcagcatgtccagcatggccccaaaccgggttccttgattaagagcgcgagcagcgtgtccatcgaaagcgtccagcaggccgctgagcaggtagaaggaggaggccgtgagggggcagcagggcatgaagtagaaagaaatgatggcgaagacaatccgggcataaccgatgaggttgggcacgaacaggaagatattttcgtctggcatcgcggcgcctcccttgctgccccgggcctgctctggagatgccagtgctgtcccagccccgcagcgcggcctcagcctccggcccggcgcatcggccgcaccacctgcgccctggaccccgccgccccaacctggccccagatgctgaagcccgcagccgtcgggagcatggaccggccccgaggtgcgcgggacgcagggggcgcgcgcagtccgcccttcctacccgcaacctccctcgcctctgccagccccgcaggcgctccgggcctccagctgcggtcgccgctgctccagctgcgcgtggcttccgggaacctcctcctccgcgcccgtagttgcaaaattggag

SEQ ID NO: 173380 - DNA, 466 bp, Homo Sapiens
aggtaggagatacccgcaccctggccggctggctcactgttcttcagagcgggaagggtgcacaaagtttaagattggtggattttggccaagttaaaacttgctggattggcggggtgcagtggctcacacctataatcccagcactttgtctgtcaaattagatttttttcaaaaattattaagcagtaacaagggcacaggaaaataggcaacactctcattcgctggtcatgaggatgtaaactggcaaaacctttttggaggagcattcaggaacagatagcaaagtcttagcaaactgcattattttcagtccagtaattccacttgtaggcacttatcctgagggaaaactgtggatatatctacaaagatgttatgaactcagcattattcattcatagtaggttaaagagtagctttgagatcgtaccttaaaaaactgaaagagtaccgagatcgt

SEQ ID NO: 173381 - DNA, 623 bp, Homo Sapiens
caagaagtgtgaaaagcatcaggatttcagtcttaccaccactgacgaattccattgtctgtgataggtcgcgtgtcaatgaaatgcttttacaaaatccacttttaataaatgtaaaaaggaaagcaggttatacaaggggggaagctacagactgatgagaagagagaggcctgattcaaagggatacctccaagggaagggaagaaaggtccaggaggaagagttctgagttctggttcctctgacatttcctgtggcccaccccattgattcaaatcgaggcctcatcgagaagagtgcatttcatctacaataaatatgtattaggcaaaatatttatatcatttggcatttcaaagaataatggcatatttttattacattaaaaaatgtttttcctcacaagctggttctaagatttcttgaggaatagtgggacgactccagtacagggagcctcctgactcaaaccagatactctcctctggacgactcgctgggtagttctagttacccgtatgtccttccctcccccaaaacaagcactttcaaaggtgatggtgtgtatgtcctaactgctgtattcaccacggagtcaacgagcgtgggcatcctattcc

SEQ ID NO: 173382 - DNA, 635 bp, Homo Sapiens
tcgactcgcacccgagatcatcgtggataaaaaagatgagtggataaaaaagcaagtgagtattcacaacagcatgacaaacaacacaggtatactcacatatatggcatttgataatcagagacagcactttagctgcctttcttcactgcctagagaaatgggcagcaatcaaggcattcaaaggtctacctcctttccttcttccaaccataaaaccaacctaactcaaaagaaaggtattttaaatctttatagataaaaatgaatagagtgacaaaatacatcatttgttttttctttattcattatcaagatggtggctatgaagaactaaatgaatcaggtttgtaaagttaacagatgctaataatgtcatattgtgatgcaaagatgagtgcttttatcctcagttcccttgataattgtgttatcaaacacatattgtgttcaatgttttagtgtgcttaagtacacttaagagcaacgttaatatctaatatcagccaccaagataaaaggctaaaactcctgtcaaaactactacacatactgaaaattcttttccctcctgttttcatctatttgaatataatttgtaataaaaatccatggccaggcacaatggttcacaa

SEQ ID NO: 173383 - DNA, 789 bp, Homo Sapiens
ggagattgagcatgctctgggtcttggcccagccaaacagtgtcctcttcgagagtttctcaccgtgtacatcaaaaacatctttctcaatcaagtcttggctgagatcaacaaggagattgaaggagtcactaaaacatctgaccctttgaagattctggccaacgcagacaccatgaaggtgctgggagtgcagcggcctctcctacagagcacaatcattgtggagaagacagttcaagacctcctgaacctgatgcatgactagagtgcatattcagatcaattcctcaacatggtgtgcggaaagctccaggagtacaaggacacctgcactgcagcttacaggggtattgtccagtcagaagaaaaacttgtcatcagtgcatcctgggcaaaagatgatgatatcagcagactcttgaaatctctaccaaactggatgaatatggctcaacccaaacagctgaggccaaaaagagaggaggaagaagatttcataagggcagcttttggcaaggagtctgaagttcttattgggaacctgggtgataaattaatccctccacaagacatccttcgtgacgtcagtgacctcaaagccttggccaacatgcatgaaagcctggaatggttggcaagtcgaacaaagtcagctttctccaatctttctacatcccagatgctttctcctgctcaagacagccacacgaacacggatctccccccagtgtcagagcagatcatgcagactctcagtgaaccttgccaaatcgttccaggatatgg

SEQ ID NO: 173384 - DNA, 861 bp, Homo Sapiens
gtgcacagctttgcccatctctggggcacgaacaagtccaagtcccaacatagtcttaggttggctggctgtgcccatcgagttgggacaaggtcttccccagaggagaaggggccaggcccacccagccgggatcagtctgtgagcaccaccaactccccatcgctcttctcttcgccctccgagtcctcgtcctcgctgtaccggtacatctcgccatcagccaccgagtgcctgtcatctgtgccctcaccctcctctctgaggctgcaggtgttgacgatcacaggcatgttggggtccaggctacgagggacatagtgctccaccagtggctgtgccagcggcatgcctgctgcccgagggtacaggacatctgaggagctcatctgcacctggccagcctgcccggggatcacgtagctctggcgggcatcctgacgccgggtcctcatcagggccttgtactctcccacgcgcagccgcttgccctccacgatgcaggtgcgcttgggccgcggcttgtacttgtagtcaggatacttctccaggtgctgccggctcagccgcgcctgttcctcatagtagggctgcttctcctggttggtcatggacttccagcgagatccaaggatcttgctgatgctggagttgtgcatgtctgggaaggcttgcaggatcttcctccgctcatccttggcccacaccatgaaggcgttcatgggcctcttgatgtggctgctgtttcgggactcggggaagtggcgggagccatccatgtcgcagctcagcatggcttcctccagtgggtgcacacagccgtcctccagccgctccttggctggggatgagtccaggctg

SEQ ID NO: 173385 - DNA, 461 bp, Homo Sapiens
  misc_feature (329)..(345): n is a, c, g, or t
ttactgccgattcgctgagcgaggctttacaccattaaatggcgggtaacatgagaactattcctatggcgcgggatcacgaagcagatgggatcacagccgaggacatgtaccacataattgtaacaacacaagcagtcactcttcaccccacttcacagctttgacgatgaggaatccatcttttctttaaccaaaggacgcccatggggcagatctgaatgcaacggtctaccttacctttcatgatagcaacttaaggaatagcacataagaattttcttaattcatacaaagtttataatcaaatagaattactactgttattnnnnnnnnnnnnnnnnngtcctctcccaatcttaagacaaaaggctttcttagaaactggtgtggatctaatgccatccaagtattattggcggcgtttgtatgctgaactggaaggatatcctccaggcatc

SEQ ID NO: 173386 - DNA, 628 bp, Homo Sapiens
  misc_feature (597)..(597): n is a, c, g, or t
gggtgcctggactaggttgtatatacaattcttgcatgaggttacatatacagatttacaagtctaaggcaatggagcattcatttagagcaactaacacttaagcactattatcaaaggaacttacaacatacagtgaaaataattttagcaggatttgatatcaactaacaggcatatgtagcaactgaccaaattcaaagactcagttggagctatcaaccaatctgaaagatcagttccagaaaacatgcgaaatggcttgctaagcagaataatttttaaaatatactcctgttggcatagtgcttgcatcttataatttccctaggacttgctgagcaccaattattcaccaggctcacttcttggaaggggcacacctttaattcatttgttgatctcccaaaaattgttcacaggaggtttcaacatatgcttgatgaaattaatctgattacttgtagagctctacacattttaattcagtgactttctaaggtcactgctctagctcaaatcagagcggacattctgtgaactgaaccctactataagccaggcaccatgcagcagtgtgatgatggatggggatgntgtaacccaaggcagatgtggtaagagggac

SEQ ID NO: 173387 - DNA, 642 bp, Homo Sapiens
cagtttgcaaagggacagaattcgtctcacttattcactgcttattgtgtgcctctcgtgttttttcttcttgtgggtcggtgtatttgatgctggttagtagagacaaagaagaaggacaaacaggataaaggtggatctttggtgtggaccctctgcactgcgaaagaagccacatcaccgccaatgtggaaaatatgcaaagtgccgttaggaagaaggaaggatatgtgtgcagcatatgaagtgccttgaatacgattaacttcccttcatgagtagtaaatagtagataactctgatcaaaaaagggattcatgtgatttatcaagctgagcaactgcgcgtctgcagagaagctggaggtcaatcttgaaatctagggcaagaggagcactaggcaattgccaggactaagaagttaatcatacccttggactgcttccatctgtctcagagtgacagcgctgctctcagcgagcaggcatgctttatagcagcagatcaggaattaatattttctgtgaaacctcaagcatcatttgcagtaacttgggttttataaaaatggaacataattttatatgaataaatcacgttcagctagaaatacgagaggctgcaaaaaattatgcttgactt

SEQ ID NO: 173388 - DNA, 204 bp, Homo Sapiens
gaacacacatactagacttacacagccaacaaatctggtccctcttcaattttattttatatcagttaatggcggctctattcatacagcagcgcaggccaaaaactttatagtcccctttgattcctctcctttcctggcctcaacatccagtccactaacaagtcctcagctctctcccaacaaaatctaatccaagtcttg

SEQ ID NO: 173389 - DNA, 818 bp, Homo Sapiens
  misc_feature (782)..(782): n is a, c, g, or t
  misc_feature (788)..(789): n is a, c, g, or t
aaattagacagacacacccaggccaccactcttgtttgtcagatatttggaagatacctaagatctagagccaaatgtttaaattgcaagggcgtttcagatacttttgatccatatcttgatataacattggagataaaggctgctcagagtgtcaacaaggcattggagcagtttgtgaagccggaacagcttgatggagaaaactcgtacaagtgcagcaagtgtaaaagatggttccagcttcaaagaggttcactatccatagatcctctaatgtccttacactttctctgaaacgttttgcaaattttaccggtggaaaaattgctaaggatgtgaaataccctgagtatcttgatattcggccatatatgtctcaacccaacggagagccaattgtctacgtcttgtatgcagtgctggtccacactggttttaattgccatgctggccattacttctgctacataaaagctagcaatggcctctggtatcaaatgaatgactccattgtatctaccagtgatattagatcggtactcagccaacaagcctatgtgctcttttatatcaggtcccatgatgtgaaaaatggaggtgaacttactcatcccacccatagccccggccagtcctctccccgcccgtcatcagtcagcgggttgtcaccaacaaacaggctgcgccaggctttatcggaccacagcttccctcttacatgataaagaatcccctcacttaaatgggactggaccattgaaagacacgccaagcagttncatgtnnagtcctaacggggaatttcagtgtcaaca

SEQ ID NO: 173390 - DNA, 484 bp, Homo Sapiens
  misc_feature (15)..(15): n is a, c, g, or t
  misc_feature (25)..(25): n is a, c, g, or t
cctcttcagacattntcaacattanattccctctctatcagtgtcatctctccaagagaccaaaactacctctcctctggggaaagaaatgatagttatcaccagcctgccagcatttacctctcttcatgatgatattgccaagcacatgtttagtctcaggtgagggttttcagactgttgattctacaggagcatgcatgctcaggctcctggcagctggcttagattggggtgtggcctgctcgacagcaggacatatttacaagcataaaagtactcaggatcccagaaataataaagcagatagggcatcgatcatttggaagttttatttaatctggagacatatccatgatccaaacaaccatagacttgggatgcagcccccctcgtctctccctgagctctcagtttcaatcatgcataaaataaggtgactgtaaggaataaatgaaataacacatgatccacgattatctgg

SEQ ID NO: 173391 - DNA, 633 bp, Homo Sapiens
  misc_feature (597)..(597): n is a, c, g, or t
cacaatctatgatggggaaataaataggaacatgtataggaagagactagaacgggcctggaaggcagagatcttatcactagagagccggaaagagttactggtactgaaactagaagaagcagaaaaagaggcagaattgcaccttacctacctcaagtcaactcccccaacactggagacagttcgttccaaacaggagtgggagacgagactgaatggagttcggataatgaaaaagaatgttcgtgaccaatttaatagtcatatccagttagtgaggaacggagccaagctgagcagccttcctcaaatccctactcccactttacctccacccccatcagagacagacttcatgcttcaggtgtttcaacccagtccctctctggctcctcggatgcccttctccattgggcaggtcacaatgcccatggttatgcccagtgcagatccccgctccttgtctttcccaatcctgaaaactgccccttcccagcccagccagccttcctcaccccttcctggctaacatggcagaaatagccctggcttgggttcccctgtcagaccccacggtccacacatgccccctgncgactccaatcacactccttaatgataacggggacc

SEQ ID NO: 173392 - DNA, 1602 bp, Homo Sapiens
  misc_feature (637)..(637): n is a, c, g, or t
  misc_feature (652)..(653): n is a, c, g, or t
  misc_feature (657)..(657): n is a, c, g, or t
  misc_feature (672)..(673): n is a, c, g, or t
  misc_feature (722)..(722): n is a, c, g, or t
  misc_feature (1278)..(1342): n is a, c, g, or t
  misc_feature (1487)..(1487): n is a, c, g, or t
ggctgaagcctgtgtggtatagtcccaaagttttcattgaaggtgctgatgcagagacttcttcgaagggtgagatggttacatttataaagtggggcaacctcaacattacaaaaatacacaaaaatgcagatggaaaaatcatatctcttgatgcaaagttgaatttggaaaacaaagactacaagaaaaccactaaggtcacttggcttgcagagactacacatgctcttcctattccagtaatctgtgtcacttatgagcacttgatcacaaagccagtgctaggaaaagacgaggactttaagcagtatgtcaacaagaacagtaagcatgaagagctaatgctaggggatccctgccttaaggatttgaaaaaaggagatattatacaactccagagaagaggattcttcatatgtgatcaaccttatgaacctgttagcccatatagttgcaaggaagccccgtgtgttttgatatacattcctgatgggcacacaaaggaaatgccaacatcagggtcaaaggaaaagaccaaagtagaagccacaaaaaatgagacctctgctccttttaaaggaaagaccaacaccttctctgaataaataattgtactacatcgtgaggattcctntggtcctttacaatnnagangtggctgttcaaggnnagatgtggttcgtggatattaaaagccaaagaaagcaccacaaggaagnatgtagatgccagctgtaaaacagcttttgtctttgaaagctgaatataaggagaaaactggccaggaatataaacctggaaaccctcctgctgaaataggacagaatatttcttctaattcctcagcaagtattctggaaagtaaatctctgtatgatgaagttgctgcacaaggggaggtggttcgtaagctaaaagctgaaaaatcccctaaggctaaaataaatgaagctgtagaatgcttactgtccctgaaggctcagtataaagaaaaaactgggaaggagtacatacctggtcagcccccattatctcaaagttcggattcaagcccaaccagaaattctgaacctgctggtttagaaacaccagaagcgaaagtactttttgacaaagtagcttctcaaggggaagtagttcggaaacttaaaactgaaaaagcccctaaggatcaagtagatatagctgttcaagaactccttcagctaaaggcacagtacaagtctttgataggagtagagtataagcctgtgtcggccactggagctgaggacnnnnnnnnnnnnnnnnnnnnnnnnnnnnnnnnnnnnnnnnnnnnnnnnnnnnnnnnnnnnnnnnntgatggccaaaggaaagacccttctaaaaaccaaggaggtgggctctcatcaagtggagcaggagaagggcaggggcctaagaaacagaccaggttgggtcttgaggcaaaaaaagaagaaaatcttgctgattggtattctcangtcatcacaaagtcagaaatgattgaataccatgacataagtggctggtatattcttcgtccctgggcctatgccatttgggaagccatcaaggacttttttgatgctgaatcaa

SEQ ID NO: 173393 - DNA, 619 bp, Homo Sapiens
agatcatcgtggagtccttgtaggagtcctcgttgagggtgtcaagctcggcgatggcgtcgtcgaacgcggtcttggccaagtagcacgcttgctctggggcgttctggatctcatagtagaagacggagtagttaagagccagccctaatcggatggggtgggtgggctgcatgtgctctttgctgatctcgtgggcttcgctgtaggccttctcagaggactccgccaccgtcgcccttttctctccggtggccacttcagccaggtagcggtagtagtcccctttcatcttcaggtagaacactttgctctcgtactgggtctcgctgcaattcttgatcaggtagttatccagcaggctcagcacaccctggcatacagcctccaactccttctctatcttctcccggtacgcacggaccgtctcaatcttcttctcattgccgtctgcagatgtcttctgctcaatgctactgagtgaccctccaggaagagcggcgtgcccccacaacgttcttgtaggccacagacagaaggtttcgttcctcattcgacagtggcctcattcagctctgtcacgttcttcatggccgcggccatgttcgtcgtagcgctc

SEQ ID NO: 173394 - DNA, 699 bp, Homo Sapiens
tagaggatcccgagcgcctagcaacttccctagagagggaacatgtgctggatttagccagtcctgtagttttccatacctgaaatcaaaacgggccatgcttcacatctacccacgatgaataggggtcctttcatttagagtaagcggagctgactgaattctgagcaaataagtattttgtgagaaacattatttttcattttaaaaataagtgtctaatactgtgtattcatatagcctttatatcccaatacgtgcttatctgttggtataccttagagaaataacccaccatcaatgagaagaaggaaaggcaggaggaaaaaagtttatataacactttaaaatggtagattatttgtggccatttgaatttactgatttgaagttcttaaagatgctgagccatgccttacatagttattttagaatctaaagttgttctgtatgagcataacgtttctgttctttttcttctttaaaccctgaaagtgatagatgggaaggaggaaccagatatttggcatggtctgacaaaaattaacttgtcttagtagcaggatatgctcacaactggagtgtaccaatgcattgtacatccatggatatgtaaaagtacaatcagaacttgagttactcttctgggtgtacatactgattctcaggacaatgaaacgtgtcccattacccgcattc

SEQ ID NO: 173395 - DNA, 262 bp, Homo Sapiens
acctgtgtatcacagtaaataaatcttcagttgtgcgtgaagccacaaacacgtcatcatcatcctctgcaatccattcagctgttttatcactgattaaacttttttcttcggtgcctggttccacagaactccccagagggcttgcctccctttcactgtcagcctgaggagttgaagtcacccttcgaccaagtgattgcagtcatcgccgtggcagacacttgtgtcttcctccggggtgggaagtgctaggcgctcg

SEQ ID NO: 173396 - DNA, 826 bp, Homo Sapiens
gggcggcgaagagcagccacgcagtatcgatacacaaaggggcgatatgtaaagcagggcaaattaggggctgcaggtcgggggaaccacacaaccagagagtataggatgcttctttatatcagtcaacaacagccagttacggttgctgaggattcatgtgaacttggagctaatggttcggcccaataactatagcaccttttatgatgaccagagacagaactggtccatcatgtgtgagtcggaaaaggctgctgtggagtacaataagcaggtgtgcattgctaagtgcaacagtacctcttccctggatgcagtgctctcccaggacctcatggtggcagacggccctgctgtagaagtgggagattcttgggaagtggcctataccggctggctctttcagaatcatgtgcggggccaggttttcgactccactgctaacaaagataagtagcttcgcttgaagttaggatcaggcaaacacgtcatcaagggctgggaggatggaatgctgggcatgaaccacggaggaaagcgattgcttattgtccctccagcctgtgctgttggctcagaaggggtaataggctggactcaagcaacggactcgatcctggtgttcgaggctggaggtcaggcgggtgaagtttgccagagattctggctctgatggtcacagtgttagttcccgcgattctgcagctccgtctcccatccctggtgctgacaacctctctgctgatcctgttcgtgtcaccaaccacatcaatacctttcaaatcaggggagccagctcttacgtaccaaatctaacttcgtg

SEQ ID NO: 173397 - DNA, 971 bp, Homo Sapiens
  misc_feature (936)..(936): n is a, c, g, or t
agagaatattataagtgaagaaattcaaaagtcaagaataatatacagtagataaacatatacatcaaaagtctaaaaaacaagctgtgacacgggacctagaactgaaacaaaatttgagaaaaacttacttaaaagcatatgtatcctgtaagctctacaaataattatagaagcagagatttctgcactcaactgttatgactaatacaaccaaaaacttcacttaatggcatttagtgtaatggtgccgatatccttggtgtattaattcctcgacttatttcctttttctttttcaaattcagctatctgattaaatatatccagtaaattctgaggtaaattttacttaacactgctttctgagtgttctttgctacttagtgcatcttcttctggaacctctgttttgatatcctccccataattgtcctctctttcatattctccttgatttgtatttaaacggtatctttgctcatgtctactgaaatcacgtgatccagagtgagcgtattttttgtatctctcaactgacttccaagagtattctgagcttgctggtgaggtagaatgcctcacagaacctggttcccaccttctatagtgctcttttcttccctctatatccttttcaaatctcctataaccataaatcttggcctctgaattcctacagaaggaatctgaggaatttcttctagctggaaaaatgtctttctgatttatatggcttttctgttttgctactacctgcttgggttttatagctgttataaaaatctcttggatcttcagacctacctccaaaatcatccggtatttcaagtgaagatgaagagagagggcatctatctttctcttttatctgtgtcttttcatactgtaacctatcctgcttccccagtagtttctccacttcttgtttatggntaagaaaagatgctgaagtattagctggaagcagg

SEQ ID NO: 173398 - DNA, 622 bp, Homo Sapiens; identical to SEQ ID NO: 13831

SEQ ID NO: 173399 - DNA, 472 bp, Homo Sapiens
gctgaggatcccctacagcagctatccaagctcgaaaatgaacatgaaaaagccatacatgtattatttctcctaaaacctaaggcattatctgttggtttggcttgctgctcctattttgtagtcttgatagtagatgcttcttcagcgtaagagtagctatgatattcctttttatcttttcagtacatagtgctgaaaaatctgcaacttcttggatcatatttaatgaattatagtataatgcttgcaggcccagtacaagcatatatattgtgcctcttacagcctttggaatacattgtttccattttttaaatatcttctatatccatatagtattcaaattattaatgctcatgtaccaaggttttgctataaaagttttgtctgtatgaataatgtggctttagtaaataatcatttttcaactgtaaacttattctgaaataaagtaaaattctaattgttt

SEQ ID NO: 173400 - DNA, 751 bp, Homo Sapiens
gcggtgtatgttccgagtgtggagggacccttctgagttgtaagactatgaacccaaagtttaaggtcttaaagttttgctgtcatgtggatggcaagggcactcctctgatgtgcgcagaagatccagtcatcagatcctagatcgtgaaggggttggctgtcctctgtgaaccataaaaggctttctttaggcaggtgaaaatacacttcagacaataataatctacctgtaatacacatcaaccctctggcatggaagagcttttatcacaatcagacaaacatgcactgaaaatgcacaactgaatgaaatccctttataaaatgtataacatggcccatcaggtaaccaaatgcacctgaagtttggattgtattcctaggaatataggttcgacaaaccaaacattgataataaactattttagcaatttagagatcaccacagcaatatatttaatttggatcattttctctttccatgatgagttatggaatgcagaacttttaataacaaaagttttaaggacttaagacggaaaggtggccatcctggttcttcataagtctgtgcttaattaacattagacttacatcctcttgaataccagctgtttcttcaaattaggtgcatggcactggtaactgatgagtaatagtcatttggcttaaccatggagttattaaatattttctaacattcaatttgtgattactgaatctgcaatatcctgactcatttgttctgg

SEQ ID NO: 173401 - DNA, 281 bp, Homo Sapiens
agcttagtgggaatattgtttttaccatgacagtctacttaaccaatatttgtattctcatcatcactaaaacaaaaattttatcttcagtgttacatgtttttaaacaattcacaacatacacagtaatatgagatgttttactttgaacagagttaactttcaaaagctttattttgattccatgaattggatgaaagaaatcaagcagttaatgtgatgatggtttttctatggaagaggtctcatgatacgtgataaacttgcatcagttgtctctc

SEQ ID NO: 173402 - DNA, 472 bp, Homo Sapiens
cagtcggacccaacacacagttatccaagagacatttggaataaaagacaacctgaatctacatggtgtaattatccagaatggtaatctctaagagcataataagatgattatatatagtatacattcagaaagagaataataagggtttcagagaggaaccacgaaagcaaatggagaaaaaacggaaagcgtatatgaatattctttactattattgcatctgtaatgtaaattgaacattttataaaaataaatctatgagcaacatatgaatgagaaaaagcaaagaccaagaaccgtagttgttaatcaaagagcagggacatgcaggggtctatattaattccgctgcctgaatctcactagtgagactccttttaccactcccagagggtacataacacttgaaatgtccatactaaagctgcttgttatgccttttacatcttcatctaaactcatattcctt

SEQ ID NO: 173403 - DNA, 358 bp, Homo Sapiens
tgaagtgtttccagtcactgttcttataggctttgttctccaaattgtgtttttagtgtataatgggatttgaattattttttctcatgtgtgaatttactatgttcaggtcattaacttttcagtggaagatttcctagtcatcatattcataaagtttctctccagcatgaattttctgatatgtaatgaggtatgacttgtaaagaaaaccctacccacattcagtacaaacagaaaattactcttcctcatgaattatctgatgcatacgtaaatgtttgagtgtatgttttcgtatattttctgaatacacagtatgattcactttttaaaaattaatttaaaatgcattctt

SEQ ID NO: 173404 - DNA, 461 bp, Homo Sapiens
  misc_feature (185)..(258): n is a, c, g, or t
agaaaaatgggctagatttaaaagggcatgtcactgaaggctacctaaatatccaattaatatttgaaaaggtgtttccttactaatttcatcagtaatcgggggatgaaaagcaaaaacattactacgcactctgcaaatggactcagatgtgaaagactagaaatcccacgtataggcaagannnnnnnnnnnnnnnnnnnnnnnnnnnnnnnnnnnnnnnnnnnnnnnnnnnnnnnnnnnnnnnnnnnnnnnnnntattatctactgaagtttaatgtaatactatgacccagcaattctaggtatatatcctcagaaatgtatgcacacgtggaccaaaacacatatacaagagtttatggtagtatcacttatgatagccccaagtcggcgtataaacccaaatgttcaacaatcagacagacaaattttggtatattcatacactgtatagctgc

SEQ ID NO: 173405 - DNA, 315 bp, Homo Sapiens
ttagctcattgatctctacatctgtggcacagctattagaaccgggaacttccctgggaattctcttcacttctctcctgttttggatactctaatttctggatgttgttttgctggagtgcattttccaataattttttgagagaggatacatgggaggtatatgttagacccagaccttgaatatcttcagtgatgtctttatacgatgaccggtttgactgggtatagaattagaattgtaggttggaaataatttttccactgggtattgaaagcacttcatcttctagctcttggaatagctggtgtagt

SEQ ID NO: 173406 - DNA, 1452 bp, Homo Sapiens
cgcatggctttagaccagattccctggtgcagaagggctataagagtagcacgagtggaacagactgagactccagaaatgatggaggcacgatgtagaaagatggcacatatatccaagtatgatagagtggtgaggagggaaatctgtaggatcattaccaagggtacacagacttacagttgtgctggaaggtgatccctctgagaactacagtaagtatcttcttagcctcaaagaaaaagaggaagattcttctggccatactcgtgcatatggtgtgtgctttgttgatacttcactgggaaagtttttcaaaggtcagttttcagatgatcgccattgttcgagatttaggactctagtggcacactatcccccagtacaagttttatttgaaaaaggaaatctctcaaaggaaactaaaacaattctaaagagttcattgtcctgttctcttcaggaaggtctgatacccggctcccagttttgggatgcatccaaaactttgagaactctccttgaggaagaatattttagggaaaagctaagtgatggcattggggtgatgttaccccaggtgcttaaaggtatgacttcagagtctgattccattgggttgacaccaggagagaaaagtgaattggccctctctgctctaggtggttgtgtcttctacctcaaaaaatgccttattgatcaggagcttttatcaatggctaattttgaagaatatattccctggattctgacacagtcagcactacaagatctggtgctatcttcaccaaagcctatcaacgaatggtgctagatgcagtgacattaaacaacttggagatttttctgaatggaacaaatggttctactgaaggaaccctactagagagggttgatacttgccatactcctttggtaagcggctcctaaagcaatggctttgtgccccactctgtaaccattatgctattaatgatcgtctagatgccatagaagacctcatggttgtgcctgacaaaatctccgaagttgtagagcttctaaagaagcttccagatcttgagaggctactcagtaaaattcataatgttgggtctcccctgaagagtcagaaccacccagacagcagggctataatgtatgaagaaactacatacagcaagaagaagattattgattttctttctgctcttggaaggattcaaagtaatgtgtaaaattatagggatcatggaagaagttgctgatggttttaagtctaaaatccttaagcaggtcatctctctgcagacaaaaaatcctgaaggtcgtattcctgaattgactgtagaactgaaccgatgggatacaggctttgagcatgaaaaggctcgaaagactggacttattactcccaaagcaggctttgactctgattatgaccaagctctgctgacataagagaaaatgaac

SEQ ID NO: 173407 - DNA, 1000 bp, Homo Sapiens
cagcagctattcctagggagggtggctgcgtgtttccggaagacgtggcggctctcgcctgggctgtttcccggcttcatttctcccgactcagcttcccaccctgggctttccgaggtgctgtcgccgctgtccccaccactgcagccatgatctccttaacggacacgcagaaaattggaatgggattaacaggatttggagtgtttttcctgttctttggaatgattctcttttttgacaaaacactactggctattggaaatgttttatttgtagccggcttggcttttgtaattggtttagaaagaacattcagattcttcttccaaaaacataaaatgaaagctacaggtttttttctgggtggtgtatttgtagtccttattggttggcctttgataggcatgatcttcgaaatttatggattttttctcttgttcaggggcttctttcctgtcgttgttggctttattagaagagtgccagtccttggatccctcctaaatttacctggaattagatcatttgtagataaagttggagaaagcaacaatatggtataacaacaagtgaatttgaagactcatttaaaatattgtgttatttataaagtcatttgaagaatattcagcacaaaattaaattacatgaaaatagcttgtaatggttctttacaggaattaaaaacgtatagcctacaaagtaccaccagcaaattagcaaagaagcagtgaaaaccgggcttctactcaagtgaaactaagaaaaagtccagccagccaaactggaaagaggtgaaaaccctggttaatgatggctaaaaaaactcttgaaaggctatttgggtttgtttttcccacaatggggcgaaaactccacccatcctttaaaaaaactgcggggggccccgggtccccttttcctttttaaactttggaaagggctctcaggaaccatccccatagggcatttttggctttttttaaaaaatcgcccc

SEQ ID NO: 173408 - DNA, 544 bp, Homo Sapiens
gagagccattgttggcaaccccaggtgttgacttaatattctctggctctaaggaggctttcaggatataggtatttcctactttgctctttctctctgcattcatgttatctttcaaacctggttctttgacaactgttgaagagtcaaaattcacttctgagtgtcctctattttcttcatgagcatgaaacttgggttcttcttcacccaagttgccaatattattagtgttgcatggaacttggttttctgcatcagattccttgtgtactctgtaggaatagtcactatattgcaggagatgccccattcccttttcctgggctttttgaatcttggctatagtcacatatttttactcccttgacttggggtaccatagctttcaaatggttgcaatatacctgcgccttcctctggggtgccatcttctgggacaaagttcatgaatttggatttgatattcacattattatcttggcaactctcagcaccagcatatctccctctgcttggatagtgtgtagttgaagatcctcta

SEQ ID NO: 173409 - DNA, 816 bp, Homo Sapiens
  misc_feature (74)..(74): n is a, c, g, or t
ggaaataaccaaggccagccccgttagccaaagggtcgctccaagcgtacagggagatgggccatactttgcantacggttgtcaggattaagttactcatttcccagtaccaagccccctgcagggtacatggagagatctataagtgctacgtttctttctactgtcatctgccatggtctttcccaatccagtggaataggaagtgctccaaggcatgctcctacaaagctagaaattgtagtgatctggagactattctcccatatggatgtaactccatttctactgaacactcttagccatgctttgaggtttggtcctaacaaacataagcaaggcacagtagtaaaagtagacaaaataactgcaaataaaaatgtttccaacgccaactctatcagtggtgctccatacagaacaaaaattacatgaaaggagaaacaagacataagaaagtagatacagcatttcaaaaatccagttaccttgtgtgataatgaacttcttttagaggatgtatttggtttcactactaaatatagtactagattgacagcagttacaaaaccagaacagatgcacaaccatgtcaagtgtgtttccaatactgagaagttctccaagaagagtgatggaatgaagacacttaggataattgaaaatatgcagtaaaagatgggtatacagtagtctcttgatatcgttatctttcatggtgttttcttggatggctagctaactctccctcccgcggaagggaagcggggaactactgcctcctaccatcaggtacgacgggcggcccaggcccc

SEQ ID NO: 173410 - DNA, 832 bp, Homo Sapiens
ccacgcgtacggaccgtctgaggcctttatcttacccaatgaccgatgtcttccttatatgcttctcgggtggtaaatccagcctcatttcaaacatgtgaaagaggagtgggtaccggaacttaaggaatacgcaccaaatgtaccctttttattaataggaactcagattgatctccgagatgaccccaaaactttagcaagactgaatgatatgaaagaaaaacctatatgtgtggaacaaggacagaaactagcaaaagagataggagcatgctgctatgtggaatgttcagctttaacccagaagggattgaagactgtttttgatgaggctatcatagccattttaactccaaagaaacacactgtaaaaaaaagaataggatcaagatgtataaactgttgtttaattacgtgagaaacatcttcagtggccaaggaaactgtccatttctctcagaaagcaaatgaaatgctacagctatacccagaccttttataggtaatgaagcagttcaaaacttgaaagaaaacaaaacctgtcctcagaattctataaagtgtattaacgaagtgttccttaacaggtttaagaagcagtaaaggcagcatctgaagccacaatctattataaatactgtatttcaactagaaggtacaatctctcaggggttacatagtttaaaaaagctaccaatcacatcatgttggtaactaacgtaaagagacagagctgttaattggcaactgcttgagttttgagcaatacacacttttctgcccagccctttacagaatcggcaccaaggaaatatctcccttggctccg

SEQ ID NO: 173411 - DNA, 346 bp, Homo Sapiens
caactacagcagctattccaagtagtctgcgtctccatagagtttgcctggccaaacaaacgggcatgtatgtaaagaacgtttatctcacaggatgatgcgttcacaaagacatcctccttcctgctgtacttttcatcatccacacagccaggtcgtttgagggctatttctatgaatctgctaaggtcacctgctctgaacaacacagtttagactaattcttgggcttgtgactctttctgacaacactacagaaagctgtacagaacagactctcacctccaccctcctacacatgagtgcacagtatggcactttcactgctagatctcgtgtcatcgca

SEQ ID NO: 173412 - DNA, 456 bp, Homo Sapiens
tattctaacagtgatgtaatcatctatgtaggatgtggtgaaagaggaaatgagatgtctgaagtcctccgggacttcccagagctcacaatggaggttgatggtaaggtagagtcaattatgaagaggacagctttggtagccaatacctccaatatgcctgttgctgctagagaagcctctatttatactggaatcacactgtcagagtacttccgtgacatgggctatcatgtcagtatgatggctgaccctacctctagatgggctgaggcccttagagaaatctctggtcgtttagctgaaatgcctgcagatagtggatatccagcctatcttggtgcccgtctggcctcgttttatgaacgagcaggcagggtgaaatgtcttggaaatcctgaaagagaagggagtgtcagcattgtaggagcagcttctccacctggtggtgatttt

SEQ ID NO: 173413 - DNA, 751 bp, Homo Sapiens
  misc_feature (24)..(24): n is a, c, g, or t
  misc_feature (86)..(86): n is a, c, g, or t
aactcaacgccatgcttggggcanccagtacagcaggaggcagtaaagaggtgaagcatattgcctggctggcagaacaggcaaanctagatggtggaagacagcaatggagacctgtcctcatggctgtgactgagaaggatttgctgctctatgactgtatgccgtggacaagagatgcctgggcgtcaccatgccacagctacccacttgttgccaccaggttggttcattctggctccggatgtcgatccccctcccttggatctgaccttacatttgctaccaggacaggctctcgacagggcattgagatgcatctcttcagggtggagacacatcgggatctgtcatcctggaccaggatacttgttcagggttgccatgctgctgctgagctgatcaaggaagtctctctaggctgcatgttaaatggccaagaggtgaggcttactattcactatgaaaatgggttcaccatctcaagggaaaatggaggctccagcagcatattgtaccgctacccctttgaaaggctgaagatgtctgctgatgatggcatccgaaatctatacttggatcttggtggtcccgagggagaactgaccatggacctgcactcttgtccgaagccgattgtattcgtgttgcacacgtttttatcggccaaagtcactcgtatgggactgcttgtatgagcaacaaaaaatcagaaaagagccttgactgtcacaagaaatatttccacctc

SEQ ID NO: 173414 - DNA, 471 bp, Homo Sapiens
  misc_feature (20)..(20): n is a, c, g, or t
  misc_feature (29)..(29): n is a, c, g, or t
gctctcaacagggcattganaagccaccnctccagggtggaaaacacatcgggaactgtccaccccggaccccggaaaacttgtttcagggttgcccatgctgcctgcctgagctgaatcaaggaagtctctcctaggctgcatgttaaaatggcccaagaggtgaggcttactattcactatgaaaatgggttcaccatctcaagggaaaatggaggctccagcagcatattgtaccgctacccctttgaaaggctgaagatgtctgctgatgatggcatccgaaatctatacttggattttggtggtcccgagggagaactgaccatggacctgcactcttgtccgaagccgattgtatttgtgttgcacacgtttttatcggccaaagtcactcgtatgggactgcttgtatgagcaacaaaaaatcagaaaagagccttgactgtcacaagaaatatttccacctca

SEQ ID NO: 173415 - DNA, 540 bp, Homo Sapiens
gcttccaggaattcaaaacaatttattaattttacacttagatattggtaatgcacacagagagaggaaatctaaaagttatttagagcacctccatgattttgtgttgaatgttataaattttattttaaaatagctcaaaactatcttgcattttaatattttaaaataaaatctataatatcaaaatcttgagcatttaaaaaactgtaaaaaccatgattcaagtcaataattctgtgctttgagatttgattggtcaagcatgatttcatttgtctatgaagaatctactcagttcctttctggctttttcaatgctttcaaaagtgatcattcctcttggcagctgcaatttactcttttctgtttccagtatgtcctcagcttcacctttcattctttctaaaagggttccatagcccaagtcatactggtaggtgaggataaagcttaatggaacaatcgggaccaggaaggctggcttcttttttttaatcgctccagctgttaaagagatggctgcaaggccaaaaaaag

SEQ ID NO: 173416 - DNA, 518 bp, Homo Sapiens
ggggtccagtgggcattgctctggtccgaggctgctgctcttgacctctgctctgcggctgttttccattggagtagaggctcctcctgtcctgtcctgcctgtggagggaagcaaaccttcccctggaccagagagaggagaaagcggagacaggtagcaacgctgtggactggtgatgacaggctcttcagctccctgcaagtgaccgggcctggggaacagggcatggcacaggcacacaggaccccccagcccagggctgcccccagccagccccgtgtgttcaagctggttctcctgggaagtggctccgtgggtaagtccagcttggctcttcggtacgtgaagaacgacttcaagagtatcctgcctacggtgggctgattccttcctcaaggctcagcagtggctgaaggacctggaggaggagctgcacccaggagaagtcctggtgatgctggtgggcaacaagacggacctcagccaggacggaggactcaagagtcacatatagca

SEQ ID NO: 173417 - DNA, 551 bp, Homo Sapiens
ccagcctcacatacctaggatgagcagaagtacctggagcatcattctcttctaccacatctgaatgtaacttaaatttgctcaaagaagcaaaatattttttaaagttattaataattgctattttagtagtctttgcttgacttttttgggggggattagcaaagcagaaaactggctgctgggttctgtagttttaaaaaatctatatttttagtcataatgagaagtctattttcaccaattatggaaacatacagtggagcaagtaaaccacttattccagctataatattatgaagaacatttcccatgcatctacaagcttgagaaataggattttcacagtggggaagtgggttacaatattggaataggaaaatttgatgctgtaatttgggtcctgtatttttccaaacaactgtgcttcttcagcactaatatttctgggatttaaatagtaatgtttaaattatggtaaatgtaatttaaaacatctcaattaagtctgtctatcaatatggttcttcaagcatgttttagacctagaa

SEQ ID NO: 173418 - DNA, 320 bp, Homo Sapiens
aaggatccccctgatatcaccaatcaaccaggggagccactaagctgactaacaactgtcccctcacccaccagctatttccccagggtagagtgggcaattctcaccttcaaagagtccccgcctgcccaggcctttggcacagaggctgagtggacagtcaggagagaggcgagaggcaaggcgaagcctgtgtccctgtttcagttgcactggggttggagcccagggtaggggtttccagcttccccaggctccggccttgtcagtctctttgcatgtgtggatttttctgtgtgtgtttctgtttgggtttttgt

SEQ ID NO: 173419 - DNA, 672 bp, Homo Sapiens
  misc_feature (32)..(32): n is a, c, g, or t
agcctcagctggatgagaggctgagatgggtngccagcttgtataccagtccctgaactgagctgtttacaggactggggaggctccacccagaaggctttcatttgtactctgctgggagtgactgggaaaaactccttccctgctgctgagtggagagaggcctcatccggctttgacccaccatccgttgcagaagcctccaggagcagcaatcctaagagtgggaggcagccaagacccccttccttcaaaacctcccggaaagtggtttcaggccctctagttgccatgaccaatttgtgtgtgtgtttaatttttgcttcaagctctgtagcaggacctgccccacgcacacccctacccctctgtgaggagctgtgggaagtgtgggtttgtctccagaacagaagagaatgatggatattctggctctggggccctctccaccaccactcacagtagccttgctgaagccatcacagatgggagaaggccatgccagccacgttcgccgaggggcgccagcctgaagctgccaggccctgaggttcagaccctggaccccatagctggaggcctgtggtgccagaagcccagattagggtggctgtccatccctggatagctatttgcacgaatcatggacataaatccaagttgaagaagatc

SEQ ID NO: 173420 - DNA, 634 bp, Homo Sapiens
  misc_feature (553)..(592): n is a, c, g, or t
aactcgcgcctcttccatctgccggaatacacctggcgtctaccctgtggaggggttcgaaatccaaatcagagctcccaagtgatggaccctcccacagccaggcctacagaaccagagtctccaaaaaatgaccgtgagggcctcagtgagaccagattgtgtcatttggctccaccttcatcttgcagagccagctgatctcagattgccaagaaactagaagccacttgcacggtgtggccagagcctcagctggatgagaggctgagatgggtggccagcttgtataccagtccctgaactgagctgtttacaggactggggaggctccacccagaaggctttcatttgtactctgctgggagtgactgggaaaaactccttccctgctgctgagtgggagagaggcctcatccggctttgacccaccatccgttgcagaagcctccagggagcagcaatcctaagagtggggagggcagccaagacccccttcctttcaaaacctcccggaagtgggtttcagggccctttagtttgccatgaccannnnnnnnnnnnnnnnnnnnnnnnnnnnnnnnnnnnnnnnagcaggacctgccccaagggaaaaccttacccttttgtgagt

SEQ ID NO: 173421 - DNA, 357 bp, Homo Sapiens
ctggtataccaatcaaccaccataagaagcagtggaaatccatggcactgcccaaagagggggagaatggctttggcattcacagccaggacactcctgccgtccttctgactgtgcagatctcagggtagtgtcctggtttggaatccatcagccctctgatgctcacaagtttgtgcaaatgatgaaactgaaaagactgagaagaaaacggaaaagaaaaggcataagatcttccctttccaagctgtcaacaaacaacaagcagctcctctattaaggatacccattgttgtgggggtcagatagtcagcaggactggatgttggtcctctctgttgattgggttgacgtcag

SEQ ID NO: 173422 - DNA, 755 bp, Homo Sapiens
agattggatatttctgctgagaaagtataatgcgaatcagtccagatcaggcacagcagtttgcccaaatgttagttcaagatgaagagcctcttgctgacatcacacagattgtagatgtctttatggaatacaatctaattcagcagtgtactgcattcttgcttgatgctctgaagaataatcgcccatctgaaggtcctttacagacgcggttacttgagatgaaccttatgcatgcgcctcaagttgcagatgctattctaggcaatcagatgttcacacattatgaccgggctcatattgctcaactgtgtgaaaaggctggcctactgcagcgtgcattagaacatttcactgatttatatgatataaaacgtgcagtggttcacacccatcttcttaaccctgagtggttagtcaactactttggttccttatcagtagaagactccctagaatgtctcagagccatgctgtctgccaacatccgtcagaatctgcagatttgtgttcaggtggcttctaaatatcatgaacaactgtcaactcagtctctgattgaactttttgaatctttcaagagttttgaaggtctcttttattttctgggatccattgttaactttagccaggacccagatgtgcactttaaatatattcaggcagcttgcaagactgggcaaatcaaagaagtagaaagaatctgtagagaaagcaactgctacgaatatctagatgaccggggatcctta

SEQ ID NO: 173423 - DNA, 529 bp, Homo Sapiens
  misc_feature (280)..(280): n is a, c, g, or t
  misc_feature (300)..(300): n is a, c, g, or t
  misc_feature (384)..(384): n is a, c, g, or t
  misc_feature (413)..(413): n is a, c, g, or t
ttagcatcaatcccgtttgtagaatttggatcaggtataggactgaatgcctcagtactgacttaatgtttagagatcaaagagcgaccctgtgcagcagacatcggattgctaagaagatcattaatcatttttaaaatgtgatcactccagatttactattcaatggtcattggctatttgcctgtgtgttaattacggtgaggaaactttctatctgttgctttcaacaaagcttatacactgaagaagagcacacagactgttctgtcacctcacnattcacacactctccgcctnctctaggtttgagctccatgttctgcgtttcacgtcttgcttagtgatgggcagagagcaaagtcgttaaaagtatactgcccnttaccacgattctcgtaaacacaacaccnatacaccctggtacttcaacgcagagtcacagtgtggggccagatagcttctgtaggtaagtaggactgagagagaaagtcctggttacctaattccttttcagaggcctcatttg

SEQ ID NO: 173424 - DNA, 437 bp, Homo Sapiens
ccctgtttccaacaccctcttgcccaccaccagtgtactagaaaagattcaagcatccacatgaaacagtttaggtcattttgaatcttgatgtaaacgaagttgcataaagttcaaaaactctattcctcagtcttcccttagtcttgtggagatgttccgttttaccaagatgcctaagatttaaagaaaccaaaaataaccctttcctggaatacagtgctaatcggtgttttcacaatgcagtggttctcagtggagacggtatcaaatcagttaccctcagaagaacctcactgtcacattaatgggcctggagtgaggtgcactactgaaatttactaagcctgagcaaggatgctaaaaaccttacaaaatgaagagttgtcccatcgacgtgagtgcagctgaaaacataataactgagatgagaactt

SEQ ID NO: 173425 - DNA, 536 bp, Homo Sapiens
gcgacagcgtcggcagggtcagcttccccagcctggtctgcttcctgatgcggcttgaagccatggcaaagaccttccgcaacctctctaaggatggaaaaggactctacctgacagaaatggagtgggatgagccctggtcatgtacaactgaagcaaagaggaaagcagacccatggctcagacctcctggtgaccattctctatgtgccaatataccttcgaagtatacagttcttcacgcagccgacctgcgatcaatatcacctaaaactcgattgttttggtaaacagtatttaatctcccattcatgtaccttgaagtcaagagacagacactgtctccataaataatgttgtagcataaatatttcctgatgaacgcttgatgctttctaatgatcgcaaatgaatactgcagagatcatagttaatttgacccaattcatatttccttgagttctcctttcactcctttttaagaacagacatttgatatttcagttttattgtgtctgttccaatctgtctataaa

SEQ ID NO: 173426 - DNA, 851 bp, Homo Sapiens
gcggccctgagtgagattgttaggtagaatctattggggatgtatcaagttagaagtaaaaaagatcagaaccagtttatttcttctgaacccactgctttacattcatcagagccccagcactccctgataaattcaactgtggaaaacagagtaagtgaaatagaacaaaaccatctccacaattatgccctttcttatacaggcagtgataacatcatcatggcctcaaaagatgtcttcggccctaatattcgaggtgtagacaaaggcctacagtggcatcaccagtgcccaaagtgtaccagggtgtttcgtcacctggagaactacgccaaccatttaaaaatgcacaaactctttatgtgtctactctgcggcaagactttcactcagaaaggcaaccttcatcgacacatgcgtgtgcatgccggaattaaacctttccagtgtaaaatctgtgggaaaaccttttctcagaagtgttccttacaggatcatcttaaccttcacagtggagataagccccataaatgtaactattgtgatatggtttttgcacataaaccagttttgaggaaacaccttaaacagctgcatggcaaaaacagctttgataatgccaatgagagaaatgtacaagacctcacagtggattttgattcttttgcatgtacaacagtcacagactctaaagggtgtcagccacaacccgatgcaacacaggtcctggatgcaggttaactggcccaagctgtcctgaacttaagaatgatagtacttgtgggaattgagtaggggcttcatgctccaactcgaactgaatgacaatggggcaatagtcttagtct

SEQ ID NO: 173427 - DNA, 850 bp, Homo Sapiens
  misc_feature (768)..(768): n is a, c, g, or t
  misc_feature (770)..(773): n is a, c, g, or t
ggtggggaggaactacacagtcgtgattagaatttatctgatggttttgtattataacttgtaagacctgccagaatgctagtcccgagagtgtcagacaaggaagaaatccctgggcctcttccccttacccggcccttagatttcatggagcagccacttagcattgaattgcactaccctgagctaaacgtgtctgtgctttctaagataagagcttgatccctttcttctatcttaagacagcacctcctgaaaagaatcgaagttgtcacaactctcaattattttttaaatactgcatagattgagttttggtttattaccaacccttcccagaattgcgttggatctaaaactactagatctcatcccattcccatgtaaattaccacagaccgcagtaccggggctggagcggagtgaagctgtctgctgtgagaggagtggccatgtgagggcatggagtcattagtctcacaaacacactttggactgaagaggatcatttctttttgttcgtgaggtcactgtccaggcctctcatatcatgaccagacggcggggtctccatctttctttcactcctgtgggccctggctgctttacacaatctgttctataagggtcaggtgtttttcaggttgggaacgatcctaaatactcaaaattggttttcaagttaacaagttctttttaccgtcctttaatgccaaaattgaattaataaaataatctttttgtaccacaaaaacaccacacaaaaanannnnacatggtgggccgccttcggccccttcaaaagttttcttaaaccatttccttgggggcccggccccccttaagtaaa

SEQ ID NO: 173428 - DNA, 876 bp, Homo Sapiens
ttattattgacagattgtggaacagcatgttgaactgtaatatcaatatgtacatatctttccccacgtctgtttcactggttgttcatttgtctgtttcttaaagtcaggtgctctgtcagactaacctagagagctgttatggtagacgaaagttatcatatgttgtgtggcatgaaatcaagaatacacctatgaagttagtccatatactttgcaactccttagaagtactttgttccttaattaaggaagtagtccttgcacttctaatcttacatagcatccatacttagaatttggcatatcatctgggattttgccaatatacgtcaaagccctttaagagtcatggtaaggagatgggtgaaggaaaatttagcaacaggtaattgaagtcctatgggatatttcatgtttaaatagatattctatattaaacactaatttaaatgtaataaaggccaaaggcctctgtatgaaattggatttaaactttcttattttagggaataaaacattattgatcaaacagtatctgttctaacctaaaattataggtagggcaggctaagtgaacagcattgagtattttctgaatccctcatgataatttatagccacatactgcttcctttgacttcaggaatgatcagttttcataatggccactgggcctgcttagattgcagtattcattatctgcatctaatttgggtagtttccacaatcgtatttgatgaaagaaacttcagtccccattattacctgtgtcttgtgccagagctgcctagcatacatcagtatgtaatgtaaagacatatgaggcaaggaaaaaagtgatttaacttacctcatcaggaatgtgcccctaac

SEQ ID NO: 173429 - DNA, 800 bp, Homo Sapiens
tgaggttatttccttaggataatgatgtaatccagagaatctcttcagctttacatgtttccagtaaagatgtgccgtcctcattgtcctgtcttcctgcgtctgggtctatgtgtggatcattaattgaaagtaaagcacggggtgattttttacctcagcatgaacataaagataatatacaagatgcagtgactatacatgaagaaatacagaacagtgttgttctaggtggggaaccattcaaagagaatgatcttttgaaacaggaaaaatgtaaaagcatactccttcagtcattaattgaagggatggaagacagaaagatagatcctgaccagacagtaatcagagctgagtctttggatggtggtgacaccagttctacagttgtagaatctcaagaggggctttctggcactcatctcccagagtcttctgattgttgtgaaggttttattaatactttttcaagcaatgatatggatgggcaagacttagattactttaatattgatgaaggcgcaaaaagtggcccactaattagtgatgctgaacttgatgcctttctgacagaacagtatcttcagaccactaacataaagtcttttgaagaaaatgtaaatgactctaaatcgcaaatgaatcagatagatatgaaaggcttagatgatggaaacatcaataatatatatttcaatgcagaagcaggagctattggggaaagtcatggtattaatataatttgtgaaacagttgataaacaaaatacaatagaaaatggcctttcttaaggaaaa

SEQ ID NO: 173430 - DNA, 315 bp, Homo Sapiens
tatattccttaaggataatgatgtaatccaagattcctcttcagctttacatgtttccagtaaagatgtgccgtcctcattgtcctgtcttcctgcgtctgggtctatgtgtggatcattaattgaaagtaaagcacggggtgattttttacctcagcatgaacataaagataatatacaagatgcagtgactatacatgaagaagtacagaacagtgttgttctaggtggggaaccattcaaagagaatgatcttttgaaacaggaaaaatgtaaaagcatactccttcagtcattaattgaagggatggaaga

SEQ ID NO: 173431 - DNA, 309 bp, Homo Sapiens
attatgattgcgattgatccaaacaggctctgtgctcacctttatgtcctgggaggttttatgatgtgtttctttactattcctcgtgactgtaagaggcggggtttccgagacgaatgtttgaagtgggactgggtggcctcgtgatgaaggtcaaagctcgaggactcctgaactggatccagaggcaccatcccccttgcgagcatctcaggtccatgaacttgacctgggacctgttgtcctgataaatcaagctccaagtctgctagacaggtcgcgtaccgatctccaatatcgagtcgtggt

SEQ ID NO: 173432 - DNA, 719 bp, Homo Sapiens
tgtgctgtgcagacttgttcctgagatgtttctgaacctgtttccaaaacctatagattctaacaagcttcaagacttttccttccgcctgtggcattgtggggaagacgtgttcctatggatggataggtggttgtcacgccaaaaactgctttaaggttagtcaacatctttgccacagaaagcatatcaagagatgattcttcaatggattctatctgtcccagacaggacaaagagttcagtcagacacagctggctgcttctccacagcagaggtgggtgaaaagtgggtagaggtgatgtactcctgtactactgccaggaggtctcagatttggcagcctattccttgggagagttcaggttcacatttcaaattacacagtagggatggatcctgtcaattcttgcttacaagcctttgaagattttctattgttttccaaacagcattttaaaatccttaatatgaaccaaaggccttaaacaaagaggtctccaccatttacactactcttttccaacactatcctccaagttccccaactcctaccatattttagacctcagttaaatgggttcctccagttttccctgaccaacgagcccacataggttaggcagccctgagatgctttcatagcactccatactattcctatggcacatctaccctaactataattatttttatttcatgcttaaggaagacaatc

SEQ ID NO: 173433 - DNA, 455 bp, Homo Sapiens
caggccctctgtaaatgtttgctattaatgcaatgctgagatcccagtgaacagaatctggcttagaagaaatggatatccacggtgcccgagcctaatcttacatcatggattcgtaagtggcatttatggaggtagaacatgagctagagcacgcggtcacacattgtcttcagcaaacatctggtcaggcaccagatgcaacgtgcaagcactgccctacatgctgggacgcaactgtagtaggaatgaaataacgcaagcattactcaatgcaggcagtgcgggcactgtacagaaaggtacacgagataggaatcttcacatccattgtctctgggaggaaactgaggctatgagaaacggagaactgccggaccatttgacatctacgtatcccctcaccccatcaagcctacacagcctctctgtatcatcctctaagcaaataacat

SEQ ID NO: 173434 - DNA, 1097 bp, Homo Sapiens
tttgacagatggcagaaactagactagccttagggactcgttcaagataatagctttaatccctggttggcaagttctcaaaatttttaaaggtagaaggaataactggtttcctatctactgacttcattgccatagttacaaacatactgttcaaataggtaacagaatgcattgtagaagtaggcaggcttaatatcttttctttttaaaaaggagttttgttgatttctaacaccattaagtgtaagtctgaatgtgagaaaagatatcccaaaatcgaatccagttaccctcaaagcatctcagaactagaaagggatttcaaaggagggtaacaatcagctttaccactaggcagaaacccatgggcagcctttaaataacaaaaagagcttattaaaacagatactttaaatctctgcagtaatggaatagttcatatagttcaacagtaatggaacaaaagctgaatcatctaaaattgttaaacccactcataacttctatttagcattggaatgcacttcgatctgacctatggagatgatgggtttattattgtagaaattcctgtgaacatgacttaaaacgaactacaggtctgtccagcatccctaagtctgccagtgccttaactctagcctacactatgacccagggtgctgataaagggcagcacttgctaccatgcaaagcaccagcttagtaaagctgcctcctaatgatgaacaccttccttgtagagtaacagatttcatctgaactaagtgaggtgacaatttgtagtataaacaaaagacttaatggaacagaaagctccagtctccaaaaggtcttaaaaacaggacttgccatgactacttaaatgctggcaacagaataaattccaactttaacaaaacaaaagaactgatacactattgtgaaagcattccttttggtaagcacaaaataaactttttatcaaaagtatttcataaatttctacttttttactgtatgttttggtaacataaagcatcagtaaataaacattacacccatttggcacatggatagaaggaatatcatgatcctatatatcattatcctat

SEQ ID NO: 173435 - DNA, 755 bp, Homo Sapiens
tatgacagattgtctcagcacccaggaaaataccgtaaagtccaaaaggataatcacgagaaaacaggattataccaactgacatgttttaatagcagatgctgaattctcgatattgcgcttattgactcaaggggaacacttagcaagacggaaaacacatctccctccacctgagcgtttagtaacatcagccaatctcacgcatttctcctagaagagctgagggaaagcatcccttcccttcctcaccttgactgagtgcctatgggagattgggttgatcaaagggtcaaagtagaaagctggcaagtcaggatcctcacttttgatgaatacaacattgcgagtatggtaccaggtgaggtggacatggtgtggaagattgtggtacaagtaaggaaaagcaatcttgtactcagtgcggataggctgccggatgataatcttgttaatatcagtgaattcatgccagtcttcatcctgtaggttgatgtctcggaacaagaggttcaaatttggggcctccagggaatggccatattgagtgccttggacgtaaagaaggccttcaaatcaaacaggtagaagtagttgtcatccaccaagtctgtcaggagctgattagccaggcggtagagagtcgacatcataggtagtgtgaactgccagcgctggtaagtggagccatttacatacttcctgctgtccggacagcacagaggagggacagcacacaggaggcagcacgaggg

SEQ ID NO: 173436 - DNA, 496 bp, Homo Sapiens
ggtgtgggatgacattactactctgttgatatagattattagattgtaaaccagaatctaccctgtgcatgaaagtatcaccaatgactgtgatgtttctaaatcataaattactgcactaccagtgttgaaagaggttaccatatgagctggatcacagcctataaagtcaactgatgtaggtattccatgctttttatctccattgtaagtgcaaatacatggcaatttttcttgtggattccataacctaacagtgccatctgctgaacaagacagtaattgatttttttatgccactataagcaagaccccaaactgcatctgtatgaccaactaaagtgccagctagaacattaggctcatatgtatcatatggatctacactgggactcggcatattccaccactggatggttgcatcaataccaccactaaaacactgttctccattagaactaatagctaatgacagaacagggccgatgtgggccct

SEQ ID NO: 173437 - DNA, 319 bp, Homo Sapiens
taaaagtatacatgaaaggaaattcagttttgaacaccacattgaggcttacatgtacagaaacttaaccttggaattgttgaaacagaagtcctgaaagcccagagttcatctatcccactcttcactgtcagtctgccctctgaggccttctcaccaagggtctcatccagcttctctgcttgattacctctagtgatgaggagctcactctcttaccagggcacttccgttccatatttgtgcaggtcttaacgtgtttaaaagctccttcgtctgttgaagagaaatgtgtttctttcatcttctacccattgaa

SEQ ID NO: 173438 - DNA, 1113 bp, Homo Sapiens
  misc_feature (156)..(164): n is a, c, g, or t
  misc_feature (895)..(895): n is a, c, g, or t
attgtaaagtatctctgctttatccattgctgaattcgataggatgttgaaatgctggtcaccaaaaaaggaaactgagcaaattcatttcaacaacatcaaaacttcagcttctcatagtaaaaagctgaatgttactaatatttttcatatctnnnnnnnnnttcttagcaatgaaattgctgttaaaacacaaatttcaatcaaatacttttgtgtatagaaaatatgtatagtaggtagatagaaaagtataaaatgtttgttgaagtatcttattttagaatgaatggagaaatgccaaagatgaatccttcactgcattatgaaaatatttcacatgttctcttggactttatataaatctgtaatagattttagaattgaaaaattctttgtgaaggtcttctaaaagtgttccaatttatctcaaaatctccatatataggatcagcttaaaacataaagaaaaccttgaatttctcaaatgtttgagatgttcaagacagtctcttaatccgttaatgcttttggaaacaattgacaaaatagggcaggcagctcatctcatgtcctgaagttggaatttaaataattcctatttgcaaattaaaatgacagtgttggaatttggaggcagtagttgagcatattctctagtatatagctacacctttaataaaatgaaggaatgtcttcaatcatattttagtgggctatttataaatagtcttgaagtcaatttagtttatttatttaaaagataatgcatcctgaaagggatcatttatgaataacaatctgaagtcttttcataaaaaaaattaataaactttagttgtacatttagccagtgttatttgaagtatgtaacttttaaaatattaagtgtccntgtatgattagaatatgtgaatgagtaacttattttgtatcaggaatgttttggtactgtgttttcactcaaaccactgacttaacagatactgctgtgtataacatgtactaaatattacagttattgtgcataacagattgttcctcttatatttgtgtgtatacaggcaattcatgttttaatgtaaataaataccattttgcagtttgtttttt

SEQ ID NO: 173439 - DNA, 324 bp, Homo Sapiens
  misc_feature (21)..(21): n is a, c, g, or t
gaggtgatctagaggatcccnatggattttggtatctccaagagtgaaaggttttaatctcattagtatcagctaaccttagtatcagctaacatctgtatctcaaatgaggtatagctatcttttcttttagaattatttccaaacaaaaggaaaatatttatgaaaggactgtcaaaaatgtgcagctgtgaaatatgttcttctcttgtcttattattgttccttttatttcctgataaaatgaagtccctgacattacaggaaatctacttagcaacctcgtaagtgagaacaagtctgaaagcagataaaattaattat

SEQ ID NO: 173440 - DNA, 757 bp, Homo Sapiens
gggggaagaggtagctcacgcgatagaaacgtgttcgctgcccagaagaagggaaggcgcgagtgaggaaaggaggtactgtagatgccctccaaatccttggttatggaatatttggctcatcccagtacactcggcttggctgttggagttgcttgtggcatgtgcctgggctggagccttcgagtatgctttgggacgctccccaaaagcaagacgagcaagacacacacagatactgaaagtgaagcaagcatcttgggagacagcggggagtacaagatgattcttgtggttcgaaatgacttaaagatgggaaaagggaaagtggctgcccagtgctctcatgctgctgtttcagcctacaagcagattcaaagaagaaatcctgaaatgctcaaacaatgggaatactgtggccagcccaaggtggtggtcaaagctcctgatgaagaaaccctgattgcattattggcccatgcaaaaatgctgggactgactgtaagtttaattcaagatgctggacgtactcagattgcaccaggctctcaaactgtcctagggattgggccaggaccagcagacctaattgacaaagtcactggtcacctaaaactttactaggtggactttgatatgacaacaacccctccatcacaagtgtttgaagcctgtcagattctaacaacaaaagctgaatttcttcacccaacttaaatggttcttgagatgaaaattaaacctattcccatgtgca

SEQ ID NO: 173441 - DNA, 1650 bp, Homo Sapiens
  misc_feature (941)..(1024): n is a, c, g, or t
  misc_feature (1135)..(1135): n is a, c, g, or t
  misc_feature (1193)..(1193): n is a, c, g, or t
  misc_feature (1202)..(1202): n is a, c, g, or t
  misc_feature (1390)..(1390): n is a, c, g, or t
ggggacaactcttctgtccagcctaggtgctcagtgcgtgatagccagccggaagatggatgttttgaaagctaccgcagaacaaatttcttctcaaactggaaataaggttcatgcaattcagtgtgatgtgagggatcctgatatggttcaaaacactgtgtcagaactgatcaaagttgcaggacatcctaatattgtgataaacaatgcagcagggaattttatttctcctactgaaagactttctcctaatgcttggaaaaccataactgacatagttctaaatggcacagccttcgtgacactagaaattggaaaacaactaattaaagcacagaaaggagcagcatttctttctattactactatctatgctgagactggttcaggttttgtagtaccaagtgcttctgccaaagcaggtgtggaagccatgagcaagtctcttgcagctgaatggggtaaatatggaatgcgattcaatgtgattcaaccagggcctataaaaaccaaaggtgcctttagccgtctggacccaactggaacatttgagaaagaaatgattggcagaattccctgtggtcgcctggggactgtagaagaactcgcaaatcttgctgctttcctttgtagtgattatgcttcttggattaatggagcagtcattaaatttgacggtggagaggaagtacttatttcaggggaattcaacgacctgagaaaggtcaccaaggagcagtgggacaccatagaagaactcatcaggaagacaaaaggttcctaagaccactttggccttcatcttggttacagaaaagggaatagaaatgaaacaaattatctctcatcttttgactatttcaagtctaataaattcttaattaacgcgtatgccctccccggactgcctgcccccccgtccgcaggcaaggcccagnnnnnnnnnnnnnnnnnnnnnnnnnnnnnnnnnnnnnnnnnnnnnnnnnnnnnnnnnnnnnnnnnnnnnnnnnnnnnnnnnnnnaatggaactacccgcccgtgcgatgataccgcttcgaacagaggccgcacccctcgcccctatcactctctctctaaacacaatatcatctttataggctacgaaccgccncgtgaatatgcgccccaccaaatgccccccgccggcgcgcgtttctccccccccgctncatggtccnccgtgaagctacgccatcatctgtgcgcgccagcgacccgcccccgtccgcgtgcccccgcccatcacgagtgaatgcagccacccccccgcggtacgccctgtccatcgaggatggaaagacggtcggggcggccaactccgtgacctctatcgcgacccccgaatctgacaccgcaacaaaacccntcatgcctcgcggtggggagccggccagtgacaccatggcgatgctccctcttttctctagcccgactcaacttgtttccaccgctcacggcacctcccgtgtatgtaacacgcgcccccagtgcacccggcccggcgtgatcgcgtactccggaaccaagacggtgagtgataccacaacaccggtccggccatgcagataatccaaacagagtacttcgcgggaacaacgcgtcccctcacctcttccgtccccctgt

SEQ ID NO: 173442 - DNA, 1410 bp, Homo Sapiens
  misc_feature (1184)..(1195): n is a, c, g, or t
cccatagcacttcctgtacgagtcattgttaaagacgccctcttctgttcttgtttatcagacatccttcgcttcatttattcaggtgcttttcagtgggaagaattggaagaagatatcaggaagaagttgaaagattctggggatgtttcaaatgtaatcgagaaagttaaatgcattttaaaaacaccaggaaagattaattgcctaaggaattgcaaaacctatcaagccagaaaacctttgtggttttataacacttccctcaagtttttccttaataagccgatgcttgccgatgttgtcttcgaaattcaaggtacgacagtgccagcccacagggccatcctggtggcccgttgtgaagtgatggcagccatgtttaatggtaattacatggaagcaaagagtgtcctgattcccgtttatggtgtttccaaagagactttcttgtcatttttagaatacctgtacacagactcctgctgcccagctggcatattccaggccatgtgtctcctgatctgtgccgagatgtaccaagtgtccagactgcagcacatctgtgagctgttcatcattacccagctgcagagcatgccaagcagggaactggcatccatgaaccttgatatagttgacctgcttaaaaaggccaagtttcaccactctgattgcctttcaacctggctacttcatttcattgctactaactacctcatcttcagtcaaaagcctgaatttcaggatctttcagtggaagaacgcagttttgttgaaaagcacagatggccgtcgaatatgtacttgaagcagcttgcggaatacaggaagtatattcactcccggaaatgtcgttgcttagtaatgtaacctggagcttttatacactacatttcttttttattattatgaagaatgggatacctccaggttccagtaaaattcttctgaccgaaaccaatgtgggtgttagaaaaattaccatatagcttaatatgtttattagttctctttggaaaaaaactaccactgtggtcttaaaagggaacaaaatataccataggctaaaactaaggctttcactctagaatgcaaagctgttttgcagctgttttcccttaaagatgtcctgttgctttagtgatatttagacccctctcagttaagaaatgcttagattnnnnnnnnnnnnttacgtaggattaatacagaaatttaatcatgtctgattaattgctctattaaaataaggggcatttaaagacccagcataaccatttgtataatgagaaatctaggggaaaaccaatcagtccaacatgagattttaggaatagaaatttgccggccatttggaaagtgaaatgccacttagttctcaattgatgacagtgtttgaatcatcat

SEQ ID NO: 173443 - DNA, 683 bp, Homo Sapiens
  misc_feature (579)..(579): n is a, c, g, or t
  misc_feature (587)..(587): n is a, c, g, or t
  misc_feature (592)..(592): n is a, c, g, or t
  misc_feature (604)..(604): n is a, c, g, or t
  misc_feature (616)..(616): n is a, c, g, or t
  misc_feature (620)..(620): n is a, c, g, or t
  misc_feature (641)..(641): n is a, c, g, or t
  misc_feature (671)..(671): n is a, c, g, or t
aatagtttaatcatggcaatctaactcccaagctaacactaagagaatgaaatcttttcagaatatgagttttaaaaacttacaaaaacagggtattcaaatagcaatgtgatttactaccatgatttctgtgacatatcaatcatgaaataaatgcctacttatagacaatttccgctccgaattatatagcctcctctctgacaaagtgttacgccataaatttcactaaaagacaatgaataagaagtgctctaacagcagtagtttcaataaattagcattactgttatatgtgctgagacataattctcttctattaaggaacttaaaaactggccaccattttttcaatatacaaacataattatctagactctaaaatatcttcccaactgaaatactgatcattacataatacagtcaacagttttaacttttaggcacaactcataactttagtgacaaataactcatccatacagatatcagcacctcagggtaagaaaatttggggcctaatgtagggggtcaaactaaaaggccaatccagccacagtcctttcattcaagtactgnctatggcntcttncacactgaaatngcagagctgagnagcngccacagagaccatctggccngcaaacccaaaacagtttgcagaaagtttnccaatgcctgag

SEQ ID NO: 173444 - DNA, 787 bp, Homo Sapiens
  misc_feature (624)..(639): n is a, c, g, or t
ggcagagtacatatattcttgctgtacaatgcctgtgatgttgaggagggttcttttttaaagtgtatgcttgagtaactgactctatggagtctataaatgcactgacttcttgtttgtaccccaaaatgatcgaattgttaagtacaaaattaagctaattaaccaatttgtaaccattttttcactcataaacagctactcaatactagacaattttgttttttatgtatgtgtatgtacgtaaatacatacatattaatttacattagagagaaaaataaatggtttgtttctgaagttagtttcttaagtgagttttcaggtgtctctgaaaaatttataacaatcatgtattatatgtgctgtaacatcatgtacgttacctccatctattttaggatattttcctcacctatatattatagggagaataatttagatacacatgctcagagctgagatatttctctgataaatcaggtaacaaaatgtatttgattgatggaattttgaagtaaatgtgtttttatccatcagtttctgagtaacaaagagcaccaagttttaatttaaataggagatttaacactaggggatcagggagtttagtatgaagagttnnnnnnnnnnnnnnnncagtgtaagctgttgaaatggcaagtgaattatttttaatgatgtaataaaatattttttaaatttttgacataagtgatcatttaatgaaaaaaactcaccaaaatgtctccctttgaaattgtatttgataatggggggaacttat

SEQ ID NO: 173445 - DNA, 1086 bp, Homo Sapiens
  misc_feature (143)..(188): n is a, c, g, or t
  misc_feature (677)..(783): n is a, c, g, or t
  misc_feature (1046)..(1046): n is a, c, g, or t
ccctacaccttcctgtacgacagggagtattctggcctctgaaaggaggtgctgagctgaacagggccatctgttcatcacacacacccccttcctccccctcatcacccataatcgtgggccccttgggcctcttgcccacnnnnnnnnnnnnnnnnnnnnnnnnnnnnnnnnnnnnnnnnnnnnnncatgtgagtatgtttgcaaaataataaaggatattggagacctgttttagaaggagcctaggctgaatttgattccaagagagcttaggatgacagcacccctgagctgggcaaaggtactcaggacctcataggagtcttaggcagttacctgaaactgccttcattcactcatttgtgtattcattcatttatgtattcatcagacacataccgaacaccctctatttgtcaggctctgtgcttggaatacagagttgaatcagacatgatctctaccctcctagtaaggagatacagtgggttcatgaatgactatagttagctgaatgtcatatgtactttgaatttgagaagtgggtgatcccctctaggcttcctggaggtcacatttaagctagaccttgacaaattggtaggatttggtcaggcactaggagtggagcatgagctctggggacagacagttatgggttctggtcccacttnnnnnnnnnnnnnnnnnnnnnnnnnnnnnnnnnnnnnnnnnnnnnnnnnnnnnnnnnnnnnnnnnnnnnnnnnnnnnnnnnnnnnnnnnnnnnnnnnnnnnnnnnnntaatgatgtcaagctcctcactggaggccttatcccttcgtggagcccactaggtgccgacccctcagaatataaccctcatgcctggacccctgagagcttctgatcccagctattagggacagaagaagcctccaaatctggaaggtgctgaattgcctgttgactgggaaagtttcagggcactgatggggtctacctggtaagcggagggcctgaggaaacctgtagcttcaatcatgtctggtaacgggttgctgagnccaatctggcggtgaggaatagggggaggatccgggcaat

SEQ ID NO: 173446 - DNA, 798 bp, Homo Sapiens
tgctaagccttcaaaatccagtgtgtatctcacgtttatagcacatctcaattcagactcaccagccacatttaaagtgctcagtagccacatgtgaccagcagctaccaacctggcaacacaggtctaaagaatctctttaggttgtttatattttagtatttctctcaggtgatttgtgtcttttgccatctctgtcttcctgccttagcctgcaattgcaatccgtatgggaccatgaagcagcagagcagctgtaaccccgtgacggggcagtgtgaatgtttgcctcacgtgactggccaggactgtggtgcttgtgaccctggattctacaatctgcagagtgggcaaggctgtgagaggtgtgactgccatgccttgggctccaccaatgggcagtgtgacatccgcaccggccagtgtgagtgccagcccggcatcactggtcagcactgtgagcgctgtgaggtcaaccactttgggtttggacctgaaggctgcaaaccctgtgactgtcatcctgagggatctctttcacttcagtgcaaagatgatggtcgctgtgaatgcagagaaggctttgtgggaaatcgctgtgaccagtgtgaagaaaactatttctacaatcggtcttggcctggctgccaggaatgtccagcttgttaccggctggtaaaggataaggtttgctgatcatagagtgaagctccaggaattagagagtctcatagcaaaccttggaactggggatgaaatggtgacagatcaagccttcgaggatagactaaaggaaca

SEQ ID NO: 173447 - DNA, 540 bp, Homo Sapiens
ctctagcacttcctgtaccggtggtagctgatcaaagaaccataacatttacatcatcaaaaaatgaagaactacaaggaaatgattccaaaattactccttcctcaaaagagttggcatctcagaagggaagtgtaagtgagacaattgtcattgatgatgaagaggacatggaaacaaatcaagggcaagagaaaaattcctccaattttattgaacgaagacctcctgagactaaaaacagaaccaatgatgtggatttctccacttccagtttttcaagaagtaaggtaaatgcaggaatgggtaatagtggtatcaccacagaaccagactctgaaattcagattgctaatgttacaactttagaaacaggtgtaagctctgtgaatgatggccaattagaaaatactgacgggcgagatatgaacttaatgattacacatgtaacatcactgcagaataccaacttgggagatgtctctaacggactgcagtcaagtaattttggtgttaatatacaaacatacaccccatctt

SEQ ID NO: 173448 - DNA, 620 bp, Homo Sapiens
ccctagcacttcctgtactggtagggaaagtaataaagttacaaactccttgccttttttcttgcagtttgtcttttgtttgataaggtattgtactgttgacacttcttgggctctgtgcacctacatagataaaatgaatctactcgcttcatttgacacccctccaactgcttctgttgtttaacccaacagaaaaccaacaaccaaagaaacttttacaggtggaaaaggactttggagggttttcctcgtctcagcaaattaaccctattaactagggaggtaggagataaagatagattctcttacacattaacttcccaggtaagagagggaaggcacagaggagatgctagaaaccttaagtaaggtggtaactataaaaaagtgctttttcagtcactctctttttttgttgtgttatccaagagacttctaatcatttgcctcgcatcagtcttatgaaagatttacattgttgctgctttatggctacaatgagtcgataccaaacattaattgcataataatagcatcacacgttgtaaagagctttgcagcatgtaaagcattcctacctcatttcatttgatccatctaacaacttatagtggcag

SEQ ID NO: 173449 - DNA, 889 bp, Homo Sapiens
  misc_feature (437)..(536): n is a, c, g, or t
  misc_feature (545)..(724): n is a, c, g, or t
  misc_feature (765)..(765): n is a, c, g, or t
tctgtacagctggtatatttgatactatgttcctcctgagggtgatgcacgcatatcatctctttcaaaggagagatgatagagagaactgatagagagaactgaacgaatgaagaagactatggcatcacaagtgtcaatccggaggataaaagactatgatgccaactttaaaataaaggacttccctgaaaaagctaaggatatctttattgaagctcacctttgtctaaataagttgggcccatgagatgtgtgctctgtatattccggaggtacaatttgccagtgtttccacaatggaaccaattgctttacagtctgttccacatgatcattgtaataaggtttcaccattacccaatgtgcctttaaatacagttttaccacttaattgaaggtacacattccaactgtggaagaaattgcagccagcnnnnnnnnnnnnnnnnnnnnnnnnnnnnnnnnnnnnnnnnnnnnnnnnnnnnnnnnnnnnnnnnnnnnnnnnnnnnnnnnnnnnnnnnnnnnnnnnnnnngagacagannnnnnnnnnnnnnnnnnnnnnnnnnnnnnnnnnnnnnnnnnnnnnnnnnnnnnnnnnnnnnnnnnnnnnnnnnnnnnnnnnnnnnnnnnnnnnnnnnnnnnnnnnnnnnnnnnnnnnnnnnnnnnnnnnnnnnnnnnnnnnnnnnnnnnnnnnnnnnnnnnnnnnnnnnnnnnnnnnnnatttttgcttatagtatatacttacgaaaaagttgaatcgntttgcttatattttttgtttgcttttgaaattacacagcatcttttgtgtgtcaataaattggggttctgctgtatttttaatagatacttggtctggtatacagaatatcaggagaatcaacc

SEQ ID NO: 173450 - DNA, 620 bp, Homo Sapiens
tggttcatcatacttgaacagcgaacttgaccaacatgagagggctctaaagattccacaaagctccagcggacggtcttatatttgatgtcccaagtcatgtctggaaaacagtgttcagttaccaaggtatgaagtcggtcatggtctgagttatttagacaaaggtgagcttcaataaagatatccttagctttttcagggaagtcctttattttaaagttggcatcatagtcttttatcctccggattgacacttgtgatgccatagtcttcttcattcgttcagttctctctatcagtccctcctttgaaagagatgatatgcgtgcatcaccctcaggaggaacataggcatcaaatataccagctgtacaggccagatgtatggaacggtccgatttttctggaggaataaccaatcctgctttccgggcatgttgcataaactccttttctgttttaaatttaggttgataaataggaggtgtgaaacgttttttagttcttactggaactatagctgcggactgagtcaccagaactggctgccgaaaccaccagcccaaaacctcgataaacaagagaacccttgaggtatttgagggctcggggtcctc

SEQ ID NO: 173451 - DNA, 338 bp, Homo Sapiens
cctgtacaagtggcagcagcagcagagatagtagcagtagcactagtagtggtagtgagggtaggaaggttgtagggaaggttgtagggagcgagaagtagaggtcgagctagaaataaaacaagcaagagtagaagtcgaagcagtagcagtagcagttctagtagcagttcaaccagtagcagcagtggaagtagttccagcagtggaagtagtagcagtcgcagtagttccagtagcagctccagtacaagtggcagcagcagcagatgatagtatgcagtagcactagtcagtagtagtgagagtaggagttctaggggtaaggaagatgctag

SEQ ID NO: 173452 - DNA, 251 bp, Homo Sapiens
aactcgccctattacttcttacttcaagcaaatgcacctttaccaggaaattttcctttcccagttctttacctccttaggtgcacccagaaatattctctttcagtctccttatcactcctttgttcatatgaaacttactagcaactatcgtaacttaccaaattatttcctatggcagtacattaagggtaaaagtcacattgtttatctttgtatccattattacacaatgtcacctgtacaggaag

SEQ ID NO: 173453 - DNA, 665 bp, Homo Sapiens
tcattactgattcagtatgtacacgatccagtgatatgataggtttcaccttatgaaatgcaatgactcatgtactaatttggtatttatgaagaaatatgggacctggtaacagcttttaaaaagctgagtatgactgagtcaataaaaacaattttacacaataataaaacaccagatattggtaaatgttgatattaatatatattagtatgatattagtaaacttttttttgcatagaaaagtccgtttataaaaaggcccaatttcctcacttccaccctgagaggtaggtagatagatgaggcaattaagtgtcagagtttgtgacttactcagtgccacagaactagaaagcaggaaatctgggagcacagcttaggaattctgcctgatcccgggttctctccaggatatcatgctgcataagacttagggtacagtaaatcctctgagctgtaggaagaaaaaagtgcagcccaagatgtaactattattgttttcctgacaagatgtaaccgtattgttttagatgtggaatataataaaaatacaaagcatcatcattattttatcagtattagggaatgtgcaaattgggttggacagaacatttcagtgtaatagaaattttccctcctggtttttatggggaacgagggtg

SEQ ID NO: 173454 - DNA, 518 bp, Homo Sapiens
  misc_feature (17)..(17): n is a, c, g, or t
  misc_feature (51)..(51): n is a, c, g, or t
gtgccccacttgtgaanggggtgtatggagaactgcaaaggggtacctgcntggagggctccctgtctggactaatcccgggatcccaatattactgcccttctgaaactccccctttagggtaacccatcatgtatggccccacgagggtgatagtaattccgtgagactgaagttgccttagagtacttctttgacccaaggaatacccacagacaccctaccgatagaacagtggctcagatcttacttgctcctgcttacgaagtattcccaatcactggtcatctgaccctacttgaacactcctgaacagtcatgttttttaaaatcttcctttatatcaagtcagagagtatacttctataaatttcactcatggatgttaggaaatctagtcatcttccctgtgattgccctgttaagtatttaaccatagctatcatgtgtttcccaaatcttctctagattaaatatcttcagtatcagcaaaagaaatagtaagaagtgtaggcggg

SEQ ID NO: 173455 - DNA, 477 bp, Homo Sapiens
cacttatgttatatcacttagctagccaacacataacactttcagtacttttgtcacatatagcattttgttacataatacggtttattatgaatgtatagagtgtttcagagagaagacatttgtgatttttagagttccgtaattgaggtgatactacataatatgccaatttacataactgagaaaattaacagtgtagctgtattggtgagattattgctataaatgatgaagttaggacctctgaccagattcatattatttaagctttttcatttcaccttctttgatattttttacctcctagacatagaattacgtggtcctctctaaaatatgtctgtctactcagtccatatcaggcaatgtgctgtgctctggggataccaaggaaaacgatatgttctgccttcaagaaattcccagtctggtagaggtagcaagcaagtacacaagttacaatccagtgtgata

SEQ ID NO: 173456 - DNA, 713 bp, Homo Sapiens
  misc_feature (59)..(94): n is a, c, g, or t
  misc_feature (106)..(174): n is a, c, g, or t
tacagtcttggcgaacaaggactctggagccacacagtcatttcagtaagttccttaannnnnnnnnnnnnnnnnnnnnnnnnnnnnnnnnnnncctcacacggtnnnnnnnnnnnnnnnnnnnnnnnnnnnnnnnnnnnnnnnnnnnnnnnnnnnnnnnnnnnnnnnnnnnnnattttcgttactacagtagtagtaaaaataattagtatgactaagtagagacgatggtgcatatctcttctccctccccattcaggggcataacctaggtagcttgaaatcaacaaagtgggagtatttacacctgggaaattagcaaatactacaaatatgggcctttgcttccacagatccttctgataaaaggttaccagtgtatcactgaaagcaactcttggataagaagtggtaaccactagcagccagtagaggctcaataggaaattaaccacctttctttagcaaataaaataaatgctgaggacaagtcttattatcagcaaaaatttaacatcttatgtagataacctgtggacaagctgggggaaaagtgttggataagagtaacaggtaggagaatctatgaactcattattaaagagaaatgggaagatgtcttatagagggagatttcccattgtatgtcacagagttttctgcctttggtatttcataaaagaacttgaaaaagtaaaatataaaattgtaac

SEQ ID NO: 173457 - DNA, 368 bp, Homo Sapiens
atggactaccttctttaccatcacagagtctctcatcccttactagacacatgaggtctcacactggatacgagctatttgagaagccatataaatgtaaggagtgtgagaaagcctttagttatctcaaatcctttcaaagacatgaaaggagtcacactggagaaaaaccctataaactgtaaacaatgtggaaaaaccttcatatatcaccagccctttcaaagacatgagcggactcacattggagaaaaaccctatgaatgtaagcatgtggaaaagctcttagttgttccagttcgcttcgagttcatgaaaggattcacactggagaaaagccctatgaatgtaaacaatgtgggaaagcc

SEQ ID NO: 173458 - DNA, 243 bp, Homo Sapiens
aggtcagagctaagaaacacaatgtaggttcatgtacaacactggttcatagaaaacacaattttatcacttaaaacttttcatttatttctgggatgtttgtttatgccatgctgttctttgtctctccataaatgagcaaccaaaaatctgctcttattattagccattggtctaaaattaatgatagcttaaatatctaaaaataaaccaagccccttctaagtacaggagtgctagggt

SEQ ID NO: 173459 - DNA, 555 bp, Homo Sapiens
ccctagcacttcctgtacaggatttacgatgagaccatctccacttgagctggcctgaataggtactggtcctcataaccaaaagttttgcctaaaattaaactatagcttaaatctaaaaccagagtccctagaatctaggataagatgtagatatacaagacccctagcaaaataagaatcttcaactaccaacaatttggtctggaaggtgctgccttcacctagggtaatgtgaacccaagggctggagtcggccataggaaatggacaaggccaggtatagcgaatggctttgctcctgtagagaaccgtcactcggtcagacacagcctccaactgcttagtgagagcatgcatgatgacatcattctccacgatatagcccatgtcatctaaattatccttatcaaacattatcagggcctctgagcaggcgtcccacacctgcattcgccgaaaggctctgtatctcatgttgcagatatggtcccaggcaccaaaactactgagaagcgttgcagagccaggggaaatggagctgaccctgttgcc

SEQ ID NO: 173460 - DNA, 506 bp, Homo Sapiens
cggaagattcgtcatgcataagatccggccccacatggcaacttcttcgtaagacacctatggcaagcacattctggccaagctggagaagtactacatgaagaacggtgttgacttagggcccatctgtggcccccctaatggtatcatctgaggcagtgtcacccgctgttccctcattcccgctgacctcactggcccactggcaaatccaaccgagcaaccagaaatgttctagtgtagagtctgagacgggcaagtggttgctccaggattactccctcctccaaaaaaggaatcaaatccacgagtggaaaagcctttgtaaatttaattttattacacataacatgtactattttttttaattgactaattgccctgctgttttactggtgtataggatacttgtacataggtaaccaatgtacatgggaggccacatattttgttcactgttgtatctatatttcacatgtggaaactttcagggtggttggtttaac

SEQ ID NO: 173461 - DNA, 382 bp, Homo Sapiens
  misc_feature (117)..(129): n is a, c, g, or t
ccctagacttcctgtacatattttacatgtcaaatacatagtccaagagtatataaaataaatacatgcatcattaccttattacctctaagaatatcatgtacaagatgggcactnnnnnnnnnnnnnagtacttatgacagcatttcaggtggaagcagtcttatatacaaaaacaatccagtttctctgctatgttaagtatataatttaaggaaatttcagagattactgaccaaaaaaatcttagtccattgaagatagaaagtgtcaatttgtgggatttaaaatgtttcctttataaaagaacacccagaatatgtaacctctgtacaaagaaaaaaatataaaaattctggatgatcatgtttgatcacactac

SEQ ID NO: 173462 - DNA, 1023 bp, Homo Sapiens
cccccccaaaggtttctgggttccccagccggtgttttctggagggtccattacggtgttccccttccccggggcccccaggattcagaatactttgggaagtccagagccggcggggtacaaaagggcgggcagctttcccatttccacaggggaagaaaagaaaattgtcccaaaaaaccccaaatattcaccatgaccaggagttgccagtgaaggagaaggtagttgctgtagaaaaatgccacggctgcgcaaatagactgaacaaacttgaagatgccaaatgctgggggcgctgtcttcagaatacagaaagccccaagatactaagcagctgggtattaaagcagctgtctccaaggcccaacagaaaactgcagagaatggcaacttctttgctggatttgatgtaagcactgctgtcagttcctttaacaggagcaatcggggcatctccaggcatgttgagaaatattagataaaaagctatgaagtgcaccaggatgcccaacagcacaactggatttctaccaaaacgattgttcttgctcagcaggccgaagaggcttccacctaaaatttctccaatgccgatgaaaatgccagaaagtccaataaggcttttctctcctgctccaaatttatttgtagcaccaatacaggttccatatacaccagagaagaaagttaattccagacctgtataagcagttgtaatactaagaaggagcatctccttggtgacacataacttaaaagactttttaaaagcatctactgcctttgtcagattgttctgggcagactcgttgacttccatgtcctggtcatcagaagactcatcttctcctaggacattttcagaatctggtttccgaatgagaaagaatagaactgtccccacaaggctaatcaccgttagggcaataaacactgttcttcggtcactctctgatatctgagttttcccttgccaggcaaaatatatgtagagatttccaaagaacaagctagactgcc

SEQ ID NO: 173463 - DNA, 604 bp, Homo Sapiens
ttctagtcgagacacctcagaatccgtcacatgacgactaatgagatcctggttcaggccttcctcactggagacttcatcagagacatgtggtattgtcctttggtagtctttgctaggaccattcctcagtgttcctgtgttccagcctgtctctttctggtcgaatagtttcacactgaggttcatggttttgtattccatcttcaccgcttttaacagtcttcttcccatcaagggatacatagccattgtcagtttcagttgatttatcaattgaactctttgctttctttgatcctgataaaaagaaagcagcatgccagagatctctgaagacagtgccaacgctgcgagaggtgcttgtaccgtggttctgaactgctccctcttgtgtgttatctgtggtactagaaccatctccttccctatgtacttccaaatgggctgcttttcttaatttccttcttcttttaccccctgtacttagaggaggtttgggtgttcttgtggaaacaatcgtgcaatgcacagttcccaggagcagcatcagcatatcggcccaatacccctgtcagaggtatgtgagcgcgtgcacagtttc

SEQ ID NO: 173464 - DNA, 234 bp, Homo Sapiens
ccctagcaaccttccttaccttgactctaggctggcaatgttctacatctgaactaaaataagaaacaattactcaactagtgagaatataggggttggaaaataagcaaatgaaaagatgttcaacagcactagccattggggaattgcaaattgaagccgtgatgagataccaacattattagatatgcctattaaaatggccaggattaagccactcaagtttatggaatt

SEQ ID NO: 173465 - DNA, 274 bp, Homo Sapiens
  misc_feature (196)..(204): n is a, c, g, or t
ccccatgcaattattataacatcaagataatggacccatgtgatgttctgcagaatgtcaaggcaatcaagttccttgaggactagattatgacaagaaaattaacatagccctaaagctattatgttgaaggtgtactgtagtccttgccatggaaagactacagtactttgatgccatcactaatggatattgnnnnnnnnngcatttatcaactcagtagcaatatattcagtaccagagtccatgctaatctgtacaggaagtgctaggg

SEQ ID NO: 173466 - DNA, 874 bp, Homo Sapiens
tccctatgacttcctgtacgatttactttgggccctgacagacaaagaggtgtgctccacctgcgtgcaggacttcagcaactgttctgggcacctgggccacattgagctcccactcacagtgtataaccctctcctcttcgataagctgtacctgctgcttcggggctcttgtttaaactgccacatgctgacttgtccccggtgccgtgattcacctcttgctctgccagctgagggttctggaagtcggggccctacaagcagtctacgagcttgagagaattctgaacaggtttctggaagaaaatgccgatccctctgcctctgaaattcgggaggaattagaacaatacacaactgaaattgtgcagaacaacctcctggggtcccaggtcgcacatgttaagaacgtgtgtgagagcaagagcaagctcattgctctcttctggaaggcacatatgaatgctaagcgctgtccccactgcaagaccgggcgatccgttgtccgaaaggaacacaacagcaagttgactatcacagttccaaccatggcgcacaggacagctggccagaaggactctgagcccctgggaattgaggaagctcagataggaaaacgaggatacttaacacccaccagtgcccgcgaacacctttctgccctgtggaagaatgaaggattctttctgaactactcttttatcgggaatggatgatgatggtacggaatacagattcaatcccagtgtgttctttctagatttcttggtggtaccgtccctcaaggtatcgcccagtcagtcgctaggagaccaaatgtttactaatggaccagacggtgaacttgcaggctgtacaggaaggttgtagg

SEQ ID NO: 173467 - DNA, 463 bp, Homo Sapiens
  misc_feature (367)..(367): n is a, c, g, or t
cctgttcctcttcatactcctgctgaattcgtgccctctgttctgcaagccgtctttcttctttttcttctgcaattctcagtctctctcgctctgcttcctctctttgtttcttttcctcaatctggaaacgaagaaaattcttgtataattcttgctgtttaatctgaagttcagttggaggctcaccaaatacatttccccgagcaaaaggagagctctgtgtttgcatatgacctgagcttttatttgcagcatcttctaggttctcagcatttgaagtggctaaatttgggtctagagatacaacagcccttttatcttcatatgttcttgcatctggggttatggtaggcatctatatttngtctgtgcatcctattcaaatcagttatcagatttccttttggcatccccgagaggagcaccacctccaccttttccccggggattatatgttctc

SEQ ID NO: 173468 - DNA, 826 bp, Homo Sapiens
aaattattcccacataatgcactgggcttatttttaagcattgatgttagattgattaatgttgccgaatactcacagttacttatgaatgctgatcaattaagtcttatcatttgaaagcaaaccatctgtacaaaacatgacaattcagaattaagtggttatattctgctatgcaatcatcagatcatgaggaataagaatgagacaatctttactacgatgttcagacttatcatgatggaccccacttcagagaagttaatggctcttgagatttccaggcaaatttcatctgctcatatctggtttctgtgcatcaggagtgagactgaagttctagggcgtggcttgtctgtcgaggcccctctctactggaatgaatgaatgtaaagaatgggtgttaagaggtccctggagctgccttcaacataaggggtcctagagggtgcaagactcatcaagaaccagtttaccccatgcaataggactgctaaagccagagaaatggacaaagcccagttggaactgaatttgaatctcataaagctacaggtgcatctgagagcaggctcagtggtgaagatcaagatagcccggtaaaggcctgtttgggctttttagcctcagccacatgggatacctctcagttcctgccattaacaatattcatggaaaatacagcactgtgtctttcacattgctccaatctgggaaggtttatgcctctgagctcaggatagtggggaaccacattcttaaatctgtggttttaaacaaaacgagaactttcttaccactggggattctacttgtgctggtacta

SEQ ID NO: 173469 - DNA, 336 bp, Homo Sapiens
gaatagggtcttctgccacatgtaacacaaggagtttcaactactatgtaatagtgtcatctccattcttttcagaatctacaaagttgtgtagcaattcctgctctgtacacatctcttccttttagctctgaatcctgttaatgcaaggaagtaaccaagttttccttggcactcgtggccaagaacataacctccatcccacagtcagggcaacaggtccgtattgcaggtttcctggccatagtcaaaatagacagctttgtctgtacgccaactcgtaaattcgcccagtggatctcgagacgacgcaactcgcctagtagataaaaaggc

SEQ ID NO: 173470 - DNA, 382 bp, Homo Sapiens
tatatgatacaaatgctttcaggctgcttaccttaccgtgtagtggtaactattcacttcttaatttatgacctcaatcaatttaattgtctagaatgtaaaaagtctttaagacataagaattcctcaaagaagccatacattttttaaggtgggggattgacttttattccaaggaacaacatcagttcactgttgttggaagacatggacaatcatttttcatcccaagaacactttaaggaaacattttacaagtatgcttgaaagaatgtcactaactggtccagaattttatcttcttgatttttccagatttctctatgtttttgagaaagatgttaatgttttgccatggtaaaagatttcaaacctcattttt

SEQ ID NO: 173471 - DNA, 1057 bp, Homo Sapiens
gggggcgtagccggagccggcgacgtgaggcgggcgttgctcgcgcgacaagtagttgctgggacagcgaaatggaggggtgtgtgtctaacctaatggtctgcaacctggcctacagcgggaagctggaagagttgaaggagagtattctggccgataaatccctggctactagaactgaccaggacagcagaactgcattgcactgggcatgctcagctggacatacagaaattgttgaatttttgttgcaacttggagtgccagtgaatgataaagacgatgcaggttggtctcctcttcatattgcggcttctgctggccgggatgagattgtaaaagcccttctgggaaaaggtgctcaagtgaatgctgtcaatcaaaatggctgtactcccttacattatgcagcttcgaaaaacaggcatgagatcgctgtcatgttactggaaggcggggctaatccagatgctaaggaccattatgaggctacagcaatgcaccggggcagcagccaagggtaacttgaagatgattcatatccttctgtactacaaagcatccacaaacatccaagacactgagggtaacactcctctacacttagcctgtgatgaggagagagtggaaaaagcaaaactgctggtgtcccaaggagcaagtatttacattgagaataaagaagaaaagacaccccctgcaagtggccaaaggtggcctgggtttaatactcaagagaatggtggaaggttaaacagcttggatttattcttactttgtatgttgcgttgttgtccccagtgtcctacaaactaatgtatttgtgcacaagacatcatctatgaatgatgaagttttctcaccttcaaagtcttataaacatgttgactcttgttcctgctgagttacttgttcgaagcttacagcttgttttccaggcatcgaataactgttgagattgttctactgttgtcgtatattcttctatattgaattctggttaatttggagtaactaattctgtggctgttgtgagtcttcagcaccctccctaaga

SEQ ID NO: 173472 - DNA, 898 bp, Homo Sapiens
gttattcgatgccctgaaaaccaagctgtaagctttcgaaacaaggtaactcagccaggaccaagagtcaacatgtttataggacctttgaaaggtgagaaactttcagcaattcatagatgatgtcttggtgcacaaatacattaagtttgtaggacactgggggacaacaaacacgaacatacaagagtaaagaataaatccaagctggtttaaccttccaccattctcttgagtattaaacccaggccacctttggccacttgcaggggtgtcttttcttcgtttattctcaatgtaaatacttgctccttgggacaccagcagttttgcttcttccactctctcctcatcacaggctaagtgtagaggagtgttaccctcagtgtcttggatgtttgtggatgctttgtagtacagaaggatatgaatcatcttcaagttacccttggctgctgcccggtgcattgctgtagcctcataatggtccttagcatctggattagccccgccttccagtaacatgacagcgatctcatgcctgtttttcgaagctgcataatgtaagggagtacagccattttgattgacagcattcacttgagcaccttttcccagaagggcttttacaatctcatcccggccagcagaagccgcaatatgaagaggagaccaacctgcatcgtctttatcattcactggcactccaagttgcaacaaaaattcaacaatttctgtatgtccagctgagcatgcccagtgcaatgcagttctgctgtcctggtcagttctagtagccagggatttatcggccagaatactctccttcaactcttccagcttcccgctgtaggccaggttgcagaccattaggttagacacacacccctccatttcg

SEQ ID NO: 173473 - DNA, 996 bp, Homo Sapiens
ggtaccggcccggaattcccgggatatcgtcgaacccacgcgtccgagcagtttaagcaggatccacgcccaacaacatgtcttcactctgttttcaatgtgcatacaggagatgagttgctttcctatgaggaatatggtcatcttcagataaatgcagtgtcactctatctcctttaccttgtggaaaagatttcctcaggactccagattatctacaacactgatgaggtctcttttatgcaaaaccttgtattttgtgtggaaagagtttaccgtgtgcctgactttggtgtctgggaaagaggaagcaaatataataatggcagcacagagctacattcgagctcggttggtttagcaaaagcagctctagaagcaattaatggattcaacctttttggcaaccaggctgttcgtggtcagttatatttgtggatctcgatgctcacaatcgcaacaggcaaactttgtgctcgctgttacccagagaatcaagatcacataatacagatgctgccctgctcccctgcatcagttatcctgcatttgccctggatgatgaagttctttttagccagacacttgataaagtggttagaaaattaaaaggaaaatatggatttaaacgtttcttgagagatgggtatagaacatcattggaagatcccaacagatgctactacaagccagcttgaaattaaagctatttgatggcattgaatgttgaatttccctattttctccttatattggatgatgaaggggctttaaaaggcaaatctcaagccaaatacacggaaatatagggagctttggagccacgaactgaactataccccgaagggaaccctctggtgcacagacactaatgtggccgggatgtgtgaaataaaaaaacacgggggtgtatgcatacactgtgcgtgttgacaatgctctgtggggcacacgtttatcacacagcgggggagtaacaaagagaacagcacgcat

SEQ ID NO: 173474 - DNA, 586 bp, Homo Sapiens
ccctacaaccttcctgtacctaagaggtggggagaggcttgaaagaggagatgctcttcaactgattctttaaggatgagaacaagtatacgaggtagaagaggtggtggtagaagagatggtggcagtgcttgctggtaaagacacagttataattaatgtagatgatcggcaggaacctaggaaggaaagataaagccaacttgtaaagggcctcctcagccttgtaaatgagcttaacaatgggagccatctaaagtttttaaaaagagaactgtcagattttaaaaggagaactgatgagttttacttttgagaaactgctctgggtggggaaagatttgaaggactaattctctgttactggagagggaccctgagaagctgagccaagatcaaatgccataggaatgtaaagtggcacatagaaggtgaggggagaggtatgatgacttcagagaggattgactggtgcctttgagacaagcgcaagggattaggcgtggctgcgtgattcttttcgacaggcagaatcttgtctttgaggtacctcgctggaactcatgatggtatttacgcaatctat

SEQ ID NO: 173475 - DNA, 653 bp, Homo Sapiens
  misc_feature (536)..(589): n is a, c, g, or t
aaagatggccactgaagatgacagcccacgttcctagggcaggttgcagaaggagcaatatggaccttattctcaaataactatggttgtgtgttttgatgtctggtgtgtccctgaggaactgactcaagggcttgtctttatttcacatgccttggaacttactcaggacagaagaagcctcccaggtggcctttgtcaaaagtacttaaaggcaaatatattagccccagccatgaggggtaagggataatacaggagcaactaacacagagaacaaaaaaacctgtgaaaaaataaacttggaaatgagatattcgagggaaaaggggctttttaaaattcctgggcatgctgacggctaggtgtatgctctgaaaagatctgagggaaccttaagctttcacctctagatgaactttgggctccatgaaacaggaagaaaaggctacgagcagagctgttaatggcctcactaagtgttgaaggagtgccccaacaaagtgccaatctgcaaagtctgggagagtttgggnnnnnnnnnnnnnnnnnnnnnnnnnnnnnnnnnnnnnnnnnnnnnnnnnnnnnnggctccaggcatctaggggaatctctgttaaataactagatgtactaacgctaacaaggagact

SEQ ID NO: 173476 - DNA, 381 bp, Homo Sapiens
ccctacaccattcctgtacttctgatccaaaaaatatttaaagctggatatagttaagcctgtaaacctaacttccactttacaggaaataaagcaatgagttaaattacagcatgtagaaaatggacaaatccagaatgtaggatattctctaaaatgacttgcttgttactttcaaaaaatattcatgtaataggggaaaaaacatacataggtgaaaagagagataacagatatacagtacttgaatacggattgatcctgatttggagaggaaaaaacagctctgaaagctgtcttggagaagttgaaatttcaatataaactgactacattcagtgacattaaggagttatctttcatttttcttaggtgtggtaa

SEQ ID NO: 173477 - DNA, 398 bp, Homo Sapiens
atagcaacttccttacccattcactgtatctgttaatttctgaactggctgaatcagagttactgaggctttgggaccctgtttatttgtacacttacccatatcctcactctcagcaaggcaagagaggtctcatgtgaattcagattgtgacagtgaattccctaactccaaatttggttgagtttgaaaattttgcactaggggttacttctgcaactagctaatgctaaacactgttattacaggaaggcagctcaaagaatgtcatctaaagttcagcagcaggaatacaacactaatgaccctccacgttggtttggctatgatagggaaggaaaccctgttacagagcttgacaacataacatcatctaaaggagccttagaattaacagt

SEQ ID NO: 173478 - DNA, 825 bp, Homo Sapiens
  misc_feature (705)..(705): n is a, c, g, or t
  misc_feature (716)..(716): n is a, c, g, or t
  misc_feature (751)..(751): n is a, c, g, or t
  misc_feature (758)..(758): n is a, c, g, or t
  misc_feature (764)..(764): n is a, c, g, or t
ggggggaccgtctctgccaagcgcctgttggtaggaacctgcttggtcgcgtctgagggggcttgtaggtggctctggctgaaacaggcgcctgcgagagtctgtaggagggaaaccgccatggacgatcagggttgccctcggtgtaagaccaccaaatatcggaacccctccttgaagctgatggtgaatgtgtgcggacacactctctgtgaaagttgtgtagatttactgtttgtgagaggagctggaaactgccctgagtgtggtactccactcagaaagagcaacttcagggtacaactctttgaagatcccactgttgacaaggaggttgagatcaggaaaaaagtgctaaagatatacaataaaagggaagaagattttcctagtctaagagaatacaatgatttcttggaagaagtggaagaaattgttttcaacttgaccaacaatgtggatttggacaacaccaaaaagaaaatggagatataccaaaaggaaaacaaagatgttattcagaaaaataaattaaagctgactcgagaacaggaagaactggaagaagctttagaagtggaacgacaggaaaatgaacaaagaagattatttatacaaaaagaagaacaactgcagcagattctaaaaaggaagaataagcaggctttttttagatgagctggaagagttctggatctccctggntgctctgcttnttggctcagcataaagatagatctacccaattaanaaatgcnaacttngagaaaccccaacccggtaaaaacccagtggaacgtttttccacagggccatcaaaaatgg

SEQ ID NO: 173479 - DNA, 314 bp, Homo Sapiens
accctgtacactgtagcaaatcaagttcctagccagtgaccttgaccaaaagatgaaaagtatctctctcgcctcttgccatcaattgcattccaaattcttggatcagtctctaggagaacaggttgttaagaatttgttgttcgcagccaaagtcttgtatttactggaactttattgtgaggataagcaaagtaagataaaagaagacctggaagaacaagaagctttagaagatggtgtggcctgtgcagatgagaaggcggagtctgacggagaagagaaggaagaggtaaggaaggttgcagggggta

SEQ ID NO: 173480 - DNA, 894 bp, Homo Sapiens
ggctggaccagcggctgccgagctcttggccgccacggtgtccaccggctttagccggtcgtccgccattaacgaggaggatgggtcttcagaagagggggttgtgattaatgccggaaaggatagcaccagcagagagcttcccagtgcgactcccaatacagcggggagttccagcacgaggtttatagccaatagtcaggagcctgaaatcaggctgacttcaagcctgccgcgctcccccgggaggtctactgaggacctgccaggctcgcaggccaccctgagccagtggtccacacctgggtctaccccgagccggtggccgtcaccctcacccacagccatgccatctcctgaggatctgcggctggtgctgatgccctggggcccgtggcactgccactgcaagtcgggcaccatgagccggagccggtctgggaagctgcacggcctttccgggcgccttcgagttggggcgctgagccagctccgcacggagcacaagccttgcacctatcaacaatgtccctgcaaccgacttcgggaagagtgccccctggacacaagtctctgtactgacaccaactgtgcctctcagagcaccaccagtaccaggaccaccactacccccttccccaccatccacctcagaagcagtcccagcctgccacccgccagcccctgcccagccctggctttttggaaacgggtcaggattggcctggaggatatttggaatagcctctcttcagtgttcacagagatgcaaccaatagacagaaaccagaggtaatggccacttcatcccacatgaggagatgtcagtatctcaaccctctcttgcccctttcaatcctagcaccccactagatatttttagtacaggaaaaa

SEQ ID NO: 173481 - DNA, 212 bp, Homo Sapiens
ccctacaaccttccttactaacccttctacccctggaaagatgtctcatctaaaagctcccaacaatgaccagcacaaagtgctgatattatgtgacttgaggagaaggaaggggagatatatatagttttaataaaaccctcatgcacaattaaacttgagtaaaagcctggagaatgctaaaagtagtaatgagtacagaaggttactag

SEQ ID NO: 173482 - DNA, 485 bp, Homo Sapiens
aacttcaatttttaataatggaaacacttttgccattctagaaactattttaggggagaaaaatcttccctacaaaaataaacttaaatccatcaaaattataaatattataactttttacttctgccatttaaaatgctctcctgcaataccaccccttcatttaacatccttcctgtaccatcacatattgaagagaaaacagtattacagcaaagcttagatagtttaacataatgatttgtacaatgattcttaaaaaatctttggccttagtggcctttttttcttcacttacacattaaaaatgctgctgcagtaaccagtgtttgggaaaggacatcagtcttcaagaaccataaactgacagaatttcaatacagtaggtttccaaattgcaatttgtagtgcacatgacagtaagcgaggttttgggtaaatatagatgaggatgcctattcagacaatctacttcaagtaaaaaa

SEQ ID NO: 173483 - DNA, 1219 bp, Homo Sapiens
  misc_feature (557)..(573): n is a, c, g, or t
  misc_feature (842)..(842): n is a, c, g, or t
  misc_feature (1040)..(1051): n is a, c, g, or t
  misc_feature (1061)..(1061): n is a, c, g, or t
  misc_feature (1119)..(1177): n is a, c, g, or t
cggggatggccacagactgccggtcagtgtcagcaggcggtgggttagggtccgcaggcccagaccaggccgccgacaccaataagctacaaggaggagctttaccgctgcctgtactactactgcctgcgctacttcccagcctgcggcgtagggcgcagcaagggcctgacgcttagcgagcaggcgctgcgcaccaagcggctgtcgcctggagggcacgttcaggcagaagctcctcagtggccacaagtccgctagctccggctacagcccttgccgcacactcgcgtcacctgagcctgtgatgccgaacgacctgcgcacccccacgttctgcaaccccaactgtccctccgcgtctacgacgacagaatccatgatcggggccaacaccaaagtctttgagcgccgcttcaaagcggagatgggtgccaacagcctcgttcgcgccccctcccttcgcgctggtttacggctaacgctacacggaccccaacgcgggagcccccacaccctttcttctcagcggccgtccgatctttccacgcctcctnnnnnnnnnnnnnnnnnttggtccatggaggcgttacgtcacgcgtgcgtgcccagtgtgctcgttcggccgccgctgtgtaaagtatcccgcgcgccctcgccccacacaaggcgccccccccgccgtccttattcatagggcgtggttcggcgctcgcggctctttttagtattagttcgcggtgcggggggagaagccgtagagctctgctgcattcgtccgtccccacggcgactcccacttgacgcgccccatagctacacaccctcgacactgtgcggcnagacagttactcgcggcccgttttgctgccccgtgccgctcccctataggaggtgttattcgcccgccgctcttatggccgccccctcgttctctcagcgccgtattctcgccgcatctcccctggagtcgtatcgcgggttttagaggagcgcctcattaatcgctctcgccccgtgccctctctacgctttatctnnnnnnnnnnnngggcgagacncgactcgcttctggcgctctgtccccgccctactgcaaccccgcgtgtgtggggcggnnnnnnnnnnnnnnnnnnnnnnnnnnnnnnnnnnnnnnnnnnnnnnnnnnnnnnnnnnngaagcgctcgccgcccattactcacggatcccgacgccgccg

SEQ ID NO: 173484 - DNA, 1919 bp, Homo Sapiens
  misc_feature (35)..(35): n is a, c, g, or t
  misc_feature (1460)..(1460): n is a, c, g, or t
tttcgggagtaggacacatgccacccaggagcccncatggagatgagaggccaaggccggctagggcgcagcactgtcctgccttcacgctggttactatggtactgtactgaaaagcgctatggctgcttctgaaactcaactgctgctggcatgagtggcttcctctgcctccactcaatcgcagagtgcgtccttggatgtccctgatacacaatggctaaaagaacaaggagaggagataaccaagtttcagcctcaaaaagatgacccaccagcattcaacctcttccctatgtggagggcgctaggtccaagtgagaccacggcacattcgatgctgtttatcaacacccgacgctggtgacttctgatgccatccttgaagacacagtgttctggctgatggaggctctgctggcttctcagagccacagaaacggggcaatcttcttggctgtgatctgaaaaaacccacatacgttctgtacggaaacagactgtttaatagtgggagggaaaacccaacatgaaatataaaacaagtaatcatgcgccttgtgagttttggtttctgttgtttctttctgggtgtatgtgttttgatggcaacgtcggtctgaacaggcctgctccagcatttctcggggaagaaactgaggatgcggttggtccccagggatcgaaaggcctgctgacacgccctcagcttcgccagccaccaaaaccctggacagacgagttatttgacccaaagctgaaccctcctgtgcctgatccaaaaccagagaatccgctactctgggtcccaaaaccagaagtctgttgggacagtgatccgaaagtgggggcattctgactcgcgagcgtgccgaaggatgtggtgttgctgctgctcccaaacctgcgccgaatcctcctgcgctggcagctgcagtgccctctccgaacactttgcctcccgtcgagcccagagggcttgtaaaggctggggctgaaccgaatgctggcacccctccaaacccaggggatcccccaaaagtaggagggctgccaaacactggagcagcaccgaagccacctgttttgtttggagaggaaaacccaaagccttgggatgccacacttcctcctccagagctgaaagtgccagtgggtttctgctctccaaacgacgagctggcaaatccaccaaatgtcttggccccactgttttccaaataggttagaggtatttgaggtagctgtggatccaaagcccccactggccgagctgaatgggtttttgttggctgcatcctgactgggttttcctcgcaaggccactgaagaaacctccccctcttccagtgtttccagacccaaacacgctaccactggaagaggatgattgctggccaaagactattccaccagtactggctgcttgaccaaacacagaaccagtattactagacccnaaacctgaagcttggcaaaagctgaacccagaggttgctgctgttgtggtggcagctgaggtaccaccaaagacagagcctccctgtccaaagccaggactctgcccaaaagcaggagcgttgctttggccaaacagcccccctcctgtgttgggagaagactgtccaaatgagaaggaactggagctactggtacttgaggcggcaccaaagacacttccactggtggatgtgggagtggaggaagcaggctgaccgaaggcaggcacggaactgaacccaggctgactgaaggaaaagacacttgcagcactgctcgccgactgcccaaagactgaggcctgcccgaaggttgtctgtccaaagacccctggggctgtggtaccaaaagctgggctgctaaaccctgagctgctgacctgtggtgtggcagctgctgtgctggctgtgctaccagtc

SEQ ID NO: 173485 - DNA, 566 bp, Homo Sapiens
acttcttacccgtacaccttccttctcccctctctacaaccctctctcctcagcgcttcttctttcttggtttgatcctgactgctgtcatggcgtgccctctggagaaggccctggatgtgatggtgtccaccttccacaagtactcgggcaaagagggtgacaagttcaagctcaacaagtcagaactaaaggagctgctgacccgggagctgcccagcttcttggggaaaaggacagatgaagctgctttccagaagctgatgagcaacttggacagcaacagggacaacgaggtggacttccaagagtactgtgtcttcctgtcctgcatcgccatgatgtgtaacgaattctttgaaggcttcccagataagcagcccaggaagaaatgaaaactcctctgatgtggttggggggtctgccagctggggccctccctgtcgccagtgggcactattttctttccaccctggctccttcagacacgtgcttgatgctgagcaagttcaataaagattcttggaagtttaaaacgcgattaaataatatgagatgaaagcttg

SEQ ID NO: 173486 - DNA, 305 bp, Homo Sapiens
tatagcaccttcctgtacaccagtattaatagctagctaagatttcattattgactgtcctttgccttaagagctggctatgcactgagtaattttaaagcatacaagatcagcagacaaacagatcagttcccgagagtcctggtttttttctctttattcacctgggttagtggctcagtctgtacttaggttgataactaacaatctgttctctcacttggaatttggcatccttttgctctcttgaaaacaaaacatgattaagtacaatgtaggatctggaggagaacagagaacatatt

SEQ ID NO: 173487 - DNA, 483 bp, Homo Sapiens
  misc_feature (88)..(88): n is a, c, g, or t
ctacatatgaagactgacggacggagagaagagccatcagattgacatctaactaattgactagggagatcaaatctctagggttgangtgtactgttcgtgctccatatgtcctcgagttacgcagctcgtagttcgaaactctctgtgcccagttaaactgtaacaaggtggtgaatcatcgtttccagtggtagcttgacctgagatgatacctgaccaccacttctgggaaggcccagaatagacagaagagagagaacatactagagttgctagcccctaagagttgaacgaaatgggcaaagcccagctgaaataacaggaaacacatgaaaaatgccacgattgtaatgtctgtgaggagagagcaaggcagttcttcaggggaggggtcattgtcattcgaagatgtggctgtgggcttcaccagggaggagtggcagtttttggaccagtctcagaaggtcttgtacaggaagg

SEQ ID NO: 173488 - DNA, 1309 bp, Homo Sapiens; identical to SEQ ID NO: 5056
  misc_feature (458)..(603): n is a, c, g, or t
  misc_feature (615)..(627): n is a, c, g, or t
  misc_feature (665)..(724): n is a, c, g, or t
  misc_feature (882)..(894): n is a, c, g, or t

SEQ ID NO: 173489 - DNA, 1398 bp, Homo Sapiens
  misc_feature (67)..(67): n is a, c, g, or t
  misc_feature (118)..(118): n is a, c, g, or t
aggagacttgaaatttggaaacctggtttcaaattggagccagcttggagtgggccaagccagcccncctgggggcccccagattggccaagtgaagcagggggacagggaggaaccnccgggggcaaaggcagaccagaatgaggcttggacccccctacttgggggcacagaatgaggtaagaaaacatttcaaataaagcagcaccgttcccgctcactcgggggctcccacccctttatacttcataaaccctcgctcagggaataaagtggagggtagttttgatatgtgactcttacttcccatcttcccctataccattccctaaagtcaggagattctggaggtctttctctgacttctaacaataaaaggactgctcctgttgtcaagaagatccaaaggggaccgagtggaaaggactatccctttcgagcggcagacagaaagtggtgacagtctggatgttcaccatagcagagctctgactgcccaaccaaagaaaacagggacattcaacaggattctgcacacagtcagatgagataatccagtcctgctccttggctcctagcactaatccattcacattattgagggcagctgaaagtgccctctgggctcagttttcaaaccacagcctcctgcacagccatgatgctcttctatacttcagtcctgcccccagggtgggaggcagatagtgacctgacttaaggaccaagtcacacccatggactggctaggtaaccagtaactcagagtaggaaatgaccgccctactaaacttatatccacagcataatacatccagacatgaatcttgaagtttgagaaatcatgcatagttgcagaggtccctgctacctccccaggggatcataaccgaatcctcaacctgtctggacaaccaagttgtccatttgccaagcctatgccaccaggttggagggcaaggaagagggctctgctcagccaaatgctaggccttgtcctcaagtcagctgaatcattgtagtctggacttttgggaaacacgtggttttgaccttttcttcttgctggagtcaaggctacagagcttccctatcaaacttgataattctttttcttggatttcccaaactgaaactgttagtatccagatcttgcacctgacatttacttgtctcagagaagcccataacagaggttcagatatcaaaggagcagtcccactgcaggccactgatcacggcctgacgaactgtaacgtccaaactgtccaggaagcccttgacatcaggcagacagaaaggctgaggaaccaaaaattttatgtgctgggcacacaactgctcacctgtgcactcgcggggcactacaggatcttgcgcacatcctggtgtgtttag

SEQ ID NO: 173490 - DNA, 986 bp, Homo Sapiens
  misc_feature (797)..(797): n is a, c, g, or t
  misc_feature (969)..(969): n is a, c, g, or t
cgccttatcactctgtacaaccctttatcaagcctcacttgagctatgatgactaattcactgctgaccacaaataagttacatgaacaagcccagagccgatgtaggacgtgataacacttacagtgtgactatcaggggtgatccagtgcaaagcccccgcatcacagtcaactacagatactaacacgcagtcagtggattaactggcgatgactcgtaccaactagaccaagtacacaagatacagtgtatctaacacatgctaaatgatcacgatcagctattgttcctctgcaaatctaccaatatactagcatatcgtgcatcatctactgttacgcttatagaacaatgtcctacgttgagatgagagaatagattgacccttttaaagggttgtcaatgcatttcaaaagagaaaaagttcatgactgggccaattccacttctacatatacaggtattcctataagctccctagaatgcattatatagggatgttgattgtattagttcattttcacgctgctgacaaagagacgtacctgagactcagaagaaaaagaggtttaattggacttacagttccacatggctggggaggcctcagaatcatggcaggaggtgaaaggcacttcttacatggtggcggcaagagaaaatgaggaagatgcaaaagcagaaatccctgataaaaccatcagatcttgtgagacttattcactaccacaacaatagtatgggggaaactgcccccatgattcaaattatctccctcccacaacacgcggganttatgggagtacaattcaagaggcgatttgggtggggacacagccaaaccatatcagtgtatatgtaggcacattttctttgtgggatgtgggatccttgagggtgggaggaaggagcaagggactgattattttgagttggtggtagagcctgggtcgtcaggaaagaccncataggggtgcagcata

SEQ ID NO: 173491 - DNA, 232 bp, Homo Sapiens
cggttcgtctgatctgaggcagatagggcaggtgtaaatataacccagcagatgaccctaataatcaaggtgaggatgaatctgaagaagccgagcaagtgagagaagaaaatttgccagatgaaaatgaagagcaaaaacaaagtaatcaaaagcaagagaatacagaagtggaggaacatttggtgatggcaggaaatccagaccagcaggaggacaatgttgatgaaca

SEQ ID NO: 173492 - DNA, 1511 bp, Homo Sapiens
caaaagtgcactcttctatatctacaagaaaaactatgaagatgaagattcattgaagacgcttcgttatgggaagataatgattatgacagatcaggaccaagatggttcccacatcaaaggcttgctgattaattttatccatcacaactggccctctcttctgcgacatcgttttctggaggaatttatcactcccattgtaaaggtatctaaaaacaagcaagaaatggcattttacagccttcctgaatttgaagagtggaagagttctactccaaatcataaaaaatggaaagtcaaatattacaaaggtttgggcaccagcacatcaaaggaagctaaagaatactttgcagatatgaaaagacatcgtatccagttcaaatattctggtcctgaagatgatgctgctatcagcctggcctttagcaaaaaacagatagatgatcgaaaggaatggttaactaatttcatggaagatagaagacaacgaaagttacttgggcttcctgaagattacttggatggacaaactaccacatatctgacatataatgacttcatcaacaaaggaacttatcttgttctcaaattctgataacgagagatctatcccttctatggtggatggtttgaaaccatggtcagagaaatgttttgtttacttgcttcaaacggaatgacaagcgagaagtaaaggttgcccaattagctggatcagtggctgaaatgtcttcttatcatcatggtgagatgtcactaatgatgaccattatcaatttggctcagaattttgtgggtagcaataatctaaacctcttgcagcccattggtcagtttggtaccaggctacatggtggcaaggattctgctagtccacgatacatctttacaatgctcagctctttggctcgattgttatttccaccaaaagatgatcacacgttgaagtttttatatgatgacaaccagcgtgttgagcctgaatggtacattcctattattcccatggtgctgataaatggtgctgaaggaatcggtactgggtggtcctgcaaaatccccaactttgatgtgcgtgaaattgtaaataacatcaggcgtatgatggatggagaagaacctttgccaatgcttccaagttacaagaacttcaagggtactattgaagaactggctccaaatcaatatgtgattagtggtgaagtagctattcttaattctacaaccattgaaatctcagagcttcccgtcagaacatggacccagacatacaaagaacaagttctagaacccatgttgaatggcaccgagaagacacctcctctcataacagactatagggaataccatacagataccactgtgaaattgttgtgaagatgactgaagaaaaactggcagaggcagagcagagttggactacacaaagtcttcaaactccaaactagtctcacatgcactctatggtgcttttgaccacgtagggctgttaaaagaaatatgac

SEQ ID NO: 173493 - DNA, 1843 bp, Homo Sapiens
ggctggtacggtccgggagttagggatatcgctttgatgtgcgtgaacatgtaaataacatcaggcgtttgatggatggagaagaacctttgccaatgcttccaagttacaagaacttcaagggtactattgaagaactggctccaaatcaatatgtgattagtggtgaagtagctattcttaattctacaaccattgaaatctcagagcttcccgtcagaacatggacccagacatacaaagaacaagttctagaacccatgttgaatggcaccgagaagacacctcctctcataacagactatagggaataccatacagataccactgtgaaatttgttgtgaagatgactgaagaaaaactggcagaggcagagagagttggactacacaaagtcttcaaactccaaactagtctcacatgcaactctatggtgctttttgaccacgtaggctgtttaaagaaatatgacacggtgttggatattctaagagacttttttgaactcagacttaaatattatggattaagaaaagaatggctcctaggaatgcttggtgctgaatctgctaaactgaataatcaggctcgctttatcttagagaaaatagatggcaaaataatcattgaaaataagcctaagaaagaattaattaaagttctgattcagaggggatatgattcggatcctgtgaaggcctggaaagaagcccagcaaaaggttccagatgaagaagaaaatgaagagagtgacaacgaaaaggaaactgaaaagagtgactccgtaacagattctggaccaaccttcaactatcttcttgatatgcccctttggtatttaaccaaggaaaagaaagatgaactctgcaggctaagaaatgaaaaagaacaagagctggacacattaaaaagaaagagtccatcagatttgtggaaagaagacttggctacatttattgaagaattggaggctgttgaagccaaggaaaaacaagatgaacaagtcggacttcctgggaaaggggggaaggccaaggggaaaaaaacacaaatggctgaagttttgccttctccgcgtggtcaaagagtcattccacgaataaccatagaaatgaacgcagaggcgacccaaagacgagtacccacaagtagaccttgctcggccggcctcaggccctccaaaaaggttttccaagacccatcccgcttggacgcgccgggacccaattaggtaaagcgcaaccctgggccctaccctcggtttccctaaggaaaatccctgggcccagggaataagtgcgcttgcgaatcccctcacccaaattaaaataaccgccccgggccggtcaaacccgaaagccggtttcctgaacataaattatcccacaaatgcggcgcgtcccctcggaagagaccactctgacccgtgaacccctgtattctaacccccgtggacctctcccacacccctgaacccccccctcattattccaaaaattatattgtaccccctagcaacttgtgtcaacatctcattaaggcgcaatatacagtggggtagccaaaatctccattttaagcgccagtcttctttgtcccaggaacccttgtggaaatatcttctttccccgctcaaaagcccggaatatggcattacacaccccctcgcaaattcccggcccccacgccggggcccttcacactccccccgctttggtgcgccaagcacctttggccgcttaataaagaaaatgtttgtgcccactcacagggcgtgtgaataaacactgaggcgccggggcgataataagaatagagcgggggcgccctatctctatctgg

SEQ ID NO: 173494 - DNA, 468 bp, Homo Sapiens
atccttgtgcacgggtcgtggtttgtatcgttcgtcgtgagctgtgaacccctgcgcgactacagctggaatatctagttgtggcctttctgtgtagctgcttggattcctcacagcatgatggctggattccatgggggacatcttgagagagattaggatgaagttctgttgcccttttctaacctagccttgttagatacacagtgtcatttctgttgtattctgtttatcaagggagtcccaaaggcctacccaatttcaacgagaaagggaacatagactgtacctcttgaaggggttagtggcaaagtttggaagagcatgcaggaccagaaatggtgttattggtctcactggaatttatggtctctgatcattcctgatgccattcatgcagttctggtgtggatggtgtcatccctttgcaaccctagaaagtaaaatggagggagcattttctccctc

SEQ ID NO: 173495 - DNA, 706 bp, Homo Sapiens
tgctctgaatctgaagtcgttagctccgttttaggctgtgagatggcaggcattccagcattacatctgactgatgcggctatgggcctagactgagatctgaaacaggctgttagggaaattctggtcaatcttgaagtctcaacctctttgctctctaaattgtccaccatcaacgaaccccctccaaggtttgctggaaacactgttagcctgtaagtagcagatactccctcctctgtttggtccagtaacctgtaatgtcactattctttttacttcttgttgccgctcccctcctctcccaagctcctcaaaagccaaacataaaacttccagaaatacaggtctagaaacatactcttactagtaaatccaaccctaagtctattttcttgactcttccattactgttaagatcttaaataagtaagactatgggcaagtcgttctaagaaggggtttgtgctagttttcctcctcatgctttcttgcctggtcacgtacttaactacctaaaagtttagctatggctactttctttctcacagaaattaaattattaaagcatttagcctttaacttcatcatagtattatttcattagcagtatttctacatttcttttactcacttctgtgtaaacactagtctctgtctcttacagattatgctataggaggcgcagtcagggattcagagcgtc

SEQ ID NO: 173496 - DNA, 671 bp, Homo Sapiens
cggcgatcacgagcaacactcagttggcacggaaggtcagagttgcgccttcgatctgtagaggctaagagaacggatcgccaacctgaatatccagctggccctgcttgacagtgaggcctggcctggggtgctggactcagagagggaccggctgatccttatcaacgagaaggaggagctgctgaaggagatgcgcttcatcagcccccgcaagtggacccagggggaggtggagcagctggagatggcccggaagcggctggaaaaggacctgcaggcagcccgggacacccagagcaaggcgctgacggagaggttaaagttaaacagtaagaggaaccagcttgtgagagaactggaggaagccacccggcaggtggcaactctgcactcccagctgaaaagtctctcaagcagcatgcagtccctgtcctcaggcagcagccccggatccctcacgtccagccggggctccctggttgcatccagcctggactcctccacttcagccagcttcactgacctctactatgacccctttgagcagctggactcagagctgcagagcaaggtggagttcctgctcctggagggggccaccggcttccggccctcgggctgcatcaccaccatccacgaggatgaggtggccaagacccagaaggcag

SEQ ID NO: 173497 - DNA, 1152 bp, Homo Sapiens
  misc_feature (129)..(204): n is a, c, g, or t
ggggccgcgggccggggagcgctctgggtggccagctgtgggcccgggccgtcgtgggctccggcttgcgtgcggagatgagcgggtccctcggccgagctgcggcggctctgctccgctgggggcgcnnnnnnnnnnnnnnnnnnnnnnnnnnnnnnnnnnnnnnnnnnnnnnnnnnnnnnnnnnnnnnnnnnnnnnnnnnnnagcagttggacgcgctggtgaagaaggacaaggtggtggtcttcctcaaggggacgccggagcagccccagtgcggcttcagcaacgccgtggtgcagatcctgcggctgcacggcgtccgcgattacgcggcctacaacgtgctggacgacccggagctccgacaaggcattaaagactattccaactggcccaccatcccgcaagtgtacctcaatggcgagtttgtagggggctgtgacattcttctgcagatgcaccagaatggggacttggtggaagaactgaaaaagctggggatccactccgcccttttagatgaaaagaaagaccaagactccaagtgagggcggccaagtcctcgctgagcagagagggagccgttcatgtcagagactcactgccagaaaagccttacccattttggttttcactattgagaccgcaactgcttgcactgatcattttggttcgtgagcagttggtgattttagttggtctggtgttcgggctaagaatattttattgtggacttaattacaaccactgcactgtaatgattcaatgctgtattatgatatttgctgtaaacaaaattcattctctatatggtcacttattctttgcctgattcagaagttaaataggagctttggaatcattattcatgacccctctgcaaatgtgtcagtctccaaagagagtatctccccccaaattttgtgtagcttcttttgttatggaaaatggtggacacaaaaaagaaactgtgataactggggcgttgttttttaaaataaactccagcacagggatgctgtgcatgcctgagttgattccgaagtgcatatgtctgtaaggatttggagtgcctgcagtgttttatgtgtgagaagtaaaggtgagtctcatattcttctattaaatttgccacaagaattgccgtcg

SEQ ID NO: 173498 - DNA, 480 bp, Homo Sapiens
tcactctagagtatccccacagcataaactatttcccagataacttttctttcttcaaaatctgcttctgtgtttcctcatctgtaggtggcacagcatacatctgatttcccaagccagaaacctcatagttattcttgactccaggaagaaatattattgagtttttaaaaactcagcttattgactcattgttttatataataaaatgcaacagttttaagtgtatatttcaatgagttttaatacatttatgtacttgtgtcactatcctcatagatagagacaaaacatttctatcacaccggcaatttcctatgtgtcccatcccaatcaatcctttcccctttgctggctccaaacaatgactctttcctatctttttagaaagattagaattgcttttctagagttccagtaatggaatcatacagtgtctaagtctgtttgtggtgctgtaacaaaatacctggggtaccg

SEQ ID NO: 173499 - DNA, 329 bp, Homo Sapiens
agcataaactattagggaggggcatttcaaatattagggcagtggttctcaaacttgagcatgctccagagggcttattaaacacagatgctgggcccctctcccagagtttctgagttgagagtgaggtagggtgggtttccctgctgataatttgcatttctaacaagctcccaggtgatgctgctggtccagagacaacactttgagaaacactctcttatgagatatatactcactatatatagccaatataaatcctgaattttcaaggataggtcctatatcttttcattttattatttatagtaaagcttattttttaaaat

SEQ ID NO: 173500 - DNA, 525 bp, Homo Sapiens
acagcataaactatttatgaaataataactcagatacagagattacttcctattggccttacatatgaatataaagaaatacatattatgaacatgagcatacttattttataattatgtaaatgtttgtgtaatgttatatataagtgcaataaagtcatgcttatacatggtctcaattcatgcttctaaaaaccactcaatgtagtcattatcatatgttaataaataatctctgaaaatgtgcttctagtagttgcacaatatcccatcataaagattgtcatgctgtttttaagtcatacttttgagtatataagttatatctgatatttttctgctacatatatactattataaatctaatagtagctgattttttgtcaacacatatgattgtttcctcacaatagtacaagagttgggtgtaactttatttccttccaacatttatttaggttcagcgggtacatgtgcaggtttattatatgggaaaaatgtgtgtcaatgggatttggtgtacag

SEQ ID NO: 173501 - DNA, 194 bp, Homo Sapiens
actctagagtgatccccaggaatccacctggctgggaaaacatgtgaaaggtgttcagtcttcttagtatattggtaaaatgcaaattagaaccaaatgaggtaacattattcaagaattaacagtactaatgttgataaagatatggagcaatagtttatgctgtaatagtttatgctgtaatagtttatgct

SEQ ID NO: 173502 - DNA, 207 bp, Homo Sapiens
acagcataaactattgacatcctgaactttattatcattcctttatagggtttccacatttgtatgtatttgtaaacaaaatatagtcattttatgtttttgaaattcataagcatgaaataagcaatcaatacaatttgcaaagaagtttatatatgtgtacacatagagataattaacaacataattaatatatgggtaccgagc

SEQ ID NO: 173503 - DNA, 335 bp, Homo Sapiens
tcgactagaggatcttacttcactgatataacttgcttttaattttaatacccagtatatatactttgagatgttcaaatagctaggcaatctgaattcaaatgatacacaagcatacccttagaggggcaaaaaaagtaagtgccaccgaaaaagcaataactgacaccagtaagactataaatatccagttgaaggcacgtggaagcatttactactctgccgtcaaagattctccacttagttcaggatcaggaatagaatcagctccaggaactgtggagtcggtttcaatcactgaggcttcctcattctcagtctcttgtttctcctct

SEQ ID NO: 173504 - DNA, 700 bp, Homo Sapiens
tcgactctagaggatcagggctcggggagacgactcctcttactatcatctgccagcccatgcagccgctgagggtcaacagccagcccggcccccagaagcgatgcctttttgtgtgtcggcatggtgagaggatggatgttgtgtttgggaagtactggctgtcccagtgcttcgatgccaaaggccgctacatacgcaccaacctgaacatgcctcatagtttacctcagcggagtggtggtttccgagattacgagaaagatgctcccatcactgtgtttggatgcatccaagcaagactagtgggtaactatcctggagtgactgcactccaggcatttcttgcctcctccttcaaaacactggtaccatggatatgcaagacacttcctgtggctttctataactttcctacaagtttcctcaattcaaaaggaacttactacacaaccattaagtttaggacactgtgctcagacctgggttggttgaccaaagtgaatgaggtgtggtccttattgaggagcacgtgatccagtaatggcgtgggctactgtgctcactcttggatgtagcagacaggtcagcttctagtttcatagacagcagcatctgccaaacatggctgtcggaagaggacaagagtgaagaagatggatcctggacttgctgaacattgtaagggccaaactgatct

SEQ ID NO: 173505 - DNA, 395 bp, Homo Sapiens
tcgactctagaggatcttgctattgggggtggcacagacgggattaaagaagctcaatcctggggtcacctcggtaggatcctccagtttgaaggagccttcggaatcctgggtccgttcaacagtgcccaagctatccttgccttgctggcggttccgacactttgtggggtcacagcaacagtccacaccacagtctgacttttgcttcctgcacccacactgcttgtttccacaccagcccttgcaggaacacccttggatgttcttcctggacaccttaactaattttgttggcttccattcctcgtcatccccctcatcatcatcaccatcaccatcctcatgctcattcacagaatgctctgaacatattttagatcctctagagtcga

SEQ ID NO: 173506 - DNA, 921 bp, Homo Sapiens
  misc_feature (632)..(679): n is a, c, g, or t
  misc_feature (853)..(853): n is a, c, g, or t
  misc_feature (862)..(862): n is a, c, g, or t
  misc_feature (869)..(869): n is a, c, g, or t
  misc_feature (875)..(875): n is a, c, g, or t
aggggactttggttctgcgtccatcatggcacctgccaactccttcgtgggcaccccatactggatggcacccgaggtgatcctggccatggatgaggggcagtacgatggcaaagtggacgtctggtccttggggataacctgcatcgagctggctgaacggaaaccaccgctctttaacatgaatgcgatgagtgccttataccacattgcacagaacgaatcccccgtgctccagtcaggacactggtctgagtacttccggaattttgtcgactcctgtcttcagaaaatccctcaagacagaccaacctcagaggttctcctgaagcaccgctttgtgctccgggagcggccacccacagtcatcatggacctgatccagaggaccaaggatgccgtgcgggagctggacaacctgcagtaccgcaagatgaagaagatcctgttccaagaggcacccaacggccctggtgccgaggccccagaggaggaagaggaggccgagccctacatgcaccgggccgggactctgaccagcctcgagagtagccactcagtgcccagcatgtccatcagcgcctccagccagagcagctccgtcaacagcctagcagatgcctcagacaacnnnnnnnnnnnnnnnnnnnnnnnnnnnnnnnnnnnnnnnnnnnnnnnnccctgaagcccgggagatggccatgatgcaggagggggagcacacagtcacctctcacagctccattatccaccggctgccgggctctgacaacctatatgatgacccctaccagccagagataacccccagccctctccagccgcctgcagccccagctcccacttccaccanctcttccgnccgccgncggggnctaactgccgtaaaccgagaccacttttgtccaccatccgaacccg

SEQ ID NO: 173507 - DNA, 414 bp, Homo Sapiens
ggtcactctagaggatcccctggatcctgcccatgtatcctcagcctcttcctccggccgcccccacgccctgcctgagatcagaccctacattaatatcaccatcctgaaggggcttccttcctcggctccaccctgtgggatgtaatgggcggccccggctctgtcctggctgtctgcccctcctcatcctcctcctgcccctggctacctcttgggcatctgcagcggtgaattggcacttcccagttcacatgcttctacaacatccagagccaacatctcctgtgtctggagccaagatggggctctgcaggacacttcctgccaagtccatgcctggccgaacagacggcggtggaaccaaacctgtgagctgctccccgtgagtcaagcatcctgggcctgaaacct

SEQ ID NO: 173508 - DNA, 1032 bp, Homo Sapiens
  misc_feature (84)..(122): n is a, c, g, or t
  misc_feature (395)..(395): n is a, c, g, or t
  misc_feature (784)..(796): n is a, c, g, or t
atggacgagatggagttcacctgaggccgagagcaacatgaatgacctggtatctgagtaccagcagtaccaggacgccacggnnnnnnnnnnnnnnnnnnnnnnnnnnnnnnnnnnnnnnntggcctaggctgctcccatcgcttcccacctgtcccctcgaggcgttctgacactttgagtccgcgtaggccccctcagtctctgacaccctagcagccccgtctttcgcctctcaaggtctgatctccccctctgtaccctagtctatatcgctttggagctcgctttatcctctggctacttcgatctcctgacgcctggcttgccccattgagagcccgtaatttatctttaacaccgcacttgagctactatccaaccttgacattccncaggaggagccccgcttcaccccttctcactctggaaaccgcacctttaactttgcagaccttccttcacccctgacttctgcttcacctttgacctctgccccccatgaatcccattttacctctagacctataagttctggtttatgtttgacccctccctctgagctgcacttcaccgctgaccttgcctcacctttaaccccccacctgagccccagctcctacctctgaccccaacttctctttgatctctgaatctcctctgactccaacttctctttcaccctctatgagtcccattttacttctacacctgcaagtcctggtttatattggacccctccctccgagctgcagttcacctttgaacttgcctcacctttcannnnnnnnnnnnnacagcgtcagctcctacctctgaccccagcttctctctgattcccacaggccccatgcatcctccctgcctcactcccctcagcccctgccgaccttagcttatctgggagagaaacaaggcctggtgcctgtgaggaagagaggtcacccctaccctccctccccgcttgcctgcctcacctcaataaataaatcaattgtcgtcatgcgaaacacacacagaccaccacaaccc

SEQ ID NO: 173509 - DNA, 420 bp, Homo Sapiens
  misc_feature (17)..(17): n is a, c, g, or t
  misc_feature (67)..(67): n is a, c, g, or t
gcaaaacccagcggccnacccctcagccccgggcccccagagcctcagggcaccccagtgttttaanggaacccatttggaggacagtcctgagaagtaggaaccttcaagctgtgattctatctcggctcagacttttggttggaaaaagatcttcatggccccaaatcccctgagacatgccttgtagaatgattttgtgatgttgtgatgcttgtggagcatcgcgtaaggcttcttgcttatttaaactgtgcaaggtaaaaatcaagcctttggagccacagaaccagctcaagtacatgccaatgttgtttaagaaacagttatgatcctaaactttttggataatcttttatatttctgacctttgaatttaatcattgttcttagattaaaataaaatatgctattgaaact

SEQ ID NO: 173510 - DNA, 1369 bp, Homo Sapiens
gtgactggaggccctgggaacaaaagcaagggaagaaggaatgagaagtacgatatggtgacagactgtggctacacaatctctcaagtgagatcaatgaagattctgaagcgatttggtggcccagctggtctatggaccaaggatccactggggcaaacagagaagatctacgtgttagatgggacacagaatgacacagcctttgtcttcccaaggctgcgtgacttcacccttgccatggctgcccggaaagcttcccgagtccgggtgcccttcccctgggtaggcacagggcagctggtatatggtggctttctttattttgctcggaggcctcctggaagacctggtggaggtggtgagatggagaacactttgcagctaatcaaaatccacctggcaaaccgaacagtggtggacagctcagtaatcccagcagaggggctgaaccccccctacggcttgacagcagacacctacatcgaccaggcagcagaagaggaaggtctttgggctgtctatgccacccgggagaatgacaggcacttgtgtctgcccaagttagatccacagacactggacacagagcagcagtgggacacaccatgtcccagagagaatgctgaggctgccctttgtcatctgtgggaccctctatgtcgtctaaaacacccgtcctgccagtcgggcccgcatccagtgctcctttgatgccagcggcaccctgacccctgaacgggcagcactcccttattttccccgcagatatggtgcccatgccagcctccgctataacccccgagaacgccagctctatgcctgggatgatggctaccagattgtctataagctggagatgaggaagaaagaggaggaggtttgaggagctagccttgttttttgcatctttctcactcccatacatttatattatatccccactaaatttcttgttcctcattcttcaaatgtggggccagttgtggctcaaatcctctataatttttagccaatggcaatcaaaatctttcagctcctttgtttcatacggaactccagatcctgagtaatccttttagagcccgaagagtcaaaaccctcaatgttccctcctgctctcctgccccatgtcaacaaatttcaggctaaggatgacccagacccagggctctaaccttgtatgcgggcaggcccagggagcaggcagcagtgttcttcccctcagagtgacttggggagggagaaataggaggagacgtccagctctgtcctctcttcctcactcctcccttcagtgtcctgaggaacaggactttctccacattgttttgtattgcaacattttgcattaaaaggaaaatccaca

SEQ ID NO: 173511 - DNA, 559 bp, Homo Sapiens
tcgactctagaggatctaattacttgtttaatttacttgttccctcaagacacaggctgaggagatcaagccaacgttattatatcaagttctcagaaaggacaggcactgctcggtagcattttgtaagctgttgtctctaagtgatcaaatcaaattagtgcccacgccccaccaccctgagaagccagatgaggcagagactggagcagcagagtatgaagggagtgagacctcagttgcactctcagactgcagcctagggcacctatggccacagcgagtccccgaagctagtttgagccgagtttccttaactgtaaaatacggttgataaggaccaggatgcaggccaggtgagaaggtcacagaagacttggggaaaggcacagagttctgccaaagcaagtaccgacacaaaatgtaaactcagacatttggatgtggtggtgctcattttaaatgtggtcacatggatgatcaatgtttaattaatctttctaaattatcaagatactcatgcacacgcatacacatatgcattccccagtcaaaagaa

SEQ ID NO: 173512 - DNA, 319 bp, Homo Sapiens
tcactctagaggatccccaaaagggcctctgaggactagatcatgcagtcactgtgtatggggggatggtatgtttattgcatctccaccagcacccccagatccatggttaagagagctgaccggagcaggaacaggagactttgtcaccctctgactcctggtggccaggggcacagtgaaaagggtaggcagcttgcaggaagcaagccttatttgggcttttttttcccagcatgttgcttttgaaaactccagccagtcctctctttgcaccacagtgcagggctttcaaaatgactacacattgaaactgtgt

SEQ ID NO: 173513 - DNA, 818 bp, Homo Sapiens
atcaagaaagttcatgttacagaggaaagaggccgaaaaccagctttcaaatggaccggcccagaaatcagtccaaataccagtggctccagcccagtcattcattttactccctctgatttggaggtgagacggtcttcaaaagagaactgtgccaaaaacctcttttccacacgtgggaaaccaaactttactcgacacccatctcttatcaaattggtaaagagtatagaaagtgatcggagaaagataaattctgcgcccagtagccctatcaagaccaacaaagctgagagttctcagaattctgcacccttcccaagtaaaatggctcagcttgcagctatttgtaaaatgcagttagaagagcaatcaagtgaatccagacagaaagtgaaagtacagctggcaagatctggaccctgcaaaccagtagcccctctggaccccccagtgaatgctgagatggagctgacagcaccgtccctcatccagcccctgggaatggttcccctgatccccagccccttgtcatcagcagtgcccctgatcctacctcaggccccttcaggcccatcctatgccatctacctgcagcccactcaagcccaccaaagtgtgacgccaccccaaggcctgagcccaacggtgtgcaccaccactcttctaaagctactggctcaaaagactccacagatgccaccactgagaaggcagccaatgatacctcaaaggccagtgcctctaccaggcctggaagcttgctgcagcacagagaggcaaggggcaagagccgaaccaggagccagtggagaaag

SEQ ID NO: 173514 - DNA, 231 bp, Homo Sapiens
atatcacgatcacaaccagtggctccacggtgacccccctcctccatcccggggaccaacccacaccgccagagtgctgaccaccaccaccacaactgtggccaactggttctatggcaacaccctcctctagcacacagaccagtggtactcccccatcactgaccaccacgccaactacgatcacggccaccgcctattttacaccaaccccgtgatcgtggggtgtaa

SEQ ID NO: 173515 - DNA, 579 bp, Homo Sapiens
tcgactctagaggcctgggatccatcctggttgatgtcaccaatgctggccacagataaaccaaaggcagagccacctggggccatgaagaaggagtgaggggtgaacacggaaggaggttcccgcctggttcatgaagacatagatggcaccccctacttcctctttcctctcgaagtagtagggggcgcccaccaggagggtcctgccacccatcattgttcaggtctgccaggggcaatggcggctgccaaaattagggcgccccaacctgcgagccctccagcacctgcctcctccgcaggtctccgcctgcctccttggctcagcaagaacaccgcgcccatatgtcgctgccgtggggcacctgtcacaatggtgatgtttttggggtgcaggatgaagctgcctacctgcatcgtgtacccaatatagaggtttccttggtcctctgggtccttgtaactatactcagataagtcccactccttgcgctgaatcatgtagctgtttcctttccagttgtaggcaccgggggcgccgaagtacacagtgttcatgggtgaatcaccgcatgac

SEQ ID NO: 173516 - DNA, 427 bp, Homo Sapiens
tttcagggagatttcacatattgggaaacagcctcacgagctttctacaaacatcttttgtccttaagtcttcccatttcagtaattggctgtaccactcatccagcagctttcaaagttagaaacctggcaatcttcctttaacatccatttccctttccctcattcccccatatccaatcatgtgtattggaggtttttccacctctaaacttgagaacccatttactttttctccatctcctcttgccatcacactagtccaagtgaagtgtttcatcatctcatttgcagcatcctttagtttaccctagattatcaatttttgtccccctcccaattcagtctctatctcatgagctaacatgagtttattaagtgttcattctgaccatgccattccttgctcaagatcctctagagtcga

SEQ ID NO: 173517 - DNA, 556 bp, Homo Sapiens
tttcccttgaggagaggcctcttgctgccctccgctcggaatacataggcatactttttttctctccccgatcccccactccctacccccgttctcgcggccttgtgacagacaactctgatcgctctgggggccgcgatctcccctccgtaatcttcctggacgccttccctctcgttttctggcttctccacctctagatgtgctgctttccccaaggcattaccttcgccacccccaccacacgttctctggctccccgtggcgtgtgccacagcgtgtctgagatagcctcgttgaatgtgtagggttcgagcctggagttgagccagattgtgtcgttttacttgccttgggcgtggagaacgatcttgtgagaatatcttcaaaggcagaaaaatattccctttatgaattctctttccctctgcgtgtaagtcgggaatgtgaagaggagtgtaggaaagagccctggttcaagtaggtaaatcgcatgagagggaaagttaaactgttgggaaagccccttctatgctaattgatcctctagagtcga

SEQ ID NO: 173518 - DNA, 366 bp, Homo Sapiens
ggacaagtactggcacgaagactgcctcaagtgtgcctgctgtgactgccgcctgggcgaggtgggctccaccctctacaccaaggccaacctcatcctgtgccgacgcgactacctgaggctctttggcaccacagggaactgtgctgcttgcagcaagctgatcccagccttcgagatggtgatgcgggcccgggacaacgtgtatcacctcgactgcttcgcctgccagctctgcaaccagagattttgtgtgggagacaaattcttcctgaagaacaacatgatcttgtgtcagatggactatgaggaagggcagctcaatggcacctttgaatcccaagttgcatgcccaagttgcatgcc

SEQ ID NO: 173519 - DNA, 666 bp, Homo Sapiens
agcatgcagctggcaggcatgtagttacaaatcacctttggtcatcatcttcttcttgagtcacaggtctgaaaggcaatgtagtttgtcctctttcaggatcagacattcggagaattcttatcagtttactggatggaagtgaactcatgctttgaggtgtgagcaagataaactgtctaaaacgctgggaatctgccatcttcagtatcaagtccatggcaattctcctattaaccatatccatgtagacatcaaattcatccaggcatctgaaaggagattctgcgatggaccacagggaaagaataaaacacactgtggagaaagaacgttcacctccagacaaggctctcatgtcattgaaagcagctttatttccttctccaggctgaactgatatacttagagtttcattcttgtggtcaaaattcatttttccacaataggcccgctgagatagtaagttgtcaaagtataatttgcatcgtaaagtcaaacaccttctaaattgttgatatgtcttgaatctgtgctccatgatttctcccagtaatttaataaacttttttaaagtcctcactttactatccagatcaagataggtctctcttgcttcttggtactgcctcattatttcctctcgatctccaagcttgatgcgct

SEQ ID NO: 173520 - DNA, 714 bp, Homo Sapiens
ggtaccacaagttactattgcttgagccccctgtgccaatggccccagactcgtgccacctggtaagcgttggctggttcacactctcattggagtacgtgtaattcggggtggcggaatactgagtctgaggctgattcatggcaccctgggctgcccccatggctgcgttctgggctgcctgctgcacatttggattcttccaggcccctgtgttccatctcctcctgcaacattgctgaaactccccccacttccccggtaaaatttatgaaccatgctaagggcgatgaaggaaaagacggccatcactgtgaacatgacagtgggaattagcatcaccaccgccgagccaatgttcgttccgaagaaggtgatggtagcaatccagccgcagacgccccagcctgggatgcccacggcctggatgatgctgatgaccaactgagccatgaaggtaaagaagaatgccatgaaactgaaggagctgtcagtcctgcggcagaggaggtggctcccgtcacctgggcagaggacaaaggcttccctgccttcaaggcccccaagcccttccaagtttaagtgcataatgcacagaagacatttaaaggcctcaattgagaggtcagaatgggttagttctacccatacatctttgcaagtttccacgtggtagacttgtggataacaacatacacagggaaggatttccaa

SEQ ID NO: 173521 - DNA, 414 bp, Homo Sapiens
catatttacttgagctcggtaccccaggcatgcgagctggtagctcgcatgacgatgtggcttgagccccctggtgccaatggcccctgctctgtacacctggttaggctgtggcgtggttcacagcctcattggagtacgtgtaattgggggtggcggaatactgagtctgaggctgattcatggcaccctgggctgccgccctatggctggcgattctgggctcgcctgctgtcacatgtggtattcttccaggccccgtggtggtacacgtcctcccgaaaattgctgaaactccccccacttccccggtaaaatttatgaaccatgctgagggcgatgaaggaaaagacggccatcactgtgaacatgacagtgggaattagcatcaccaccgccgagccaatgttcgtt

SEQ ID NO: 173522 - DNA, 735 bp, Homo Sapiens
taggcatgcaacgctatggggcagtttaatttacttcactaactgctatattctatagctttagacttcatatttcttatccacctttgtctaggctcacgatctttgggcaagggagctttgtcaccgtggttgggctagaacaaatattgagaagtttaccaacacagatgttgagaagtttattgaaaggcactgacattagcagaataagtgatggacattagttgaaccccttcagtgtctatgtgttttattgtattgtctttaactcgttcttgaagcacagatttcagcgagcctttcagctattcagtgccagcggttttccccactcaggaaagatggtgtgagccatacacacagcaggattagacggggagagtttcagctgcagcttctagtttaagaccaaagcccttcctcccgctgctgcatctgtctgagaggggaagctcttgttttccaagctggaaccgtttatgaggaaaactgagcagggtggcaaaatggaaaaggaacaattttctagtttttcctacgcgtgatattgacgcgtgctttttctttgatttgaggtacagcatgtaaataacaaatttccatattcaaaatgatcatattagagtgactgagtgaccttttgattttgaagcagactaaaatctgaccagaccacaatgaaaagtataaaattagaaacttaaattccgcttgccaaggctagaatgcact

SEQ ID NO: 173523 - DNA, 655 bp, Homo Sapiens
  misc_feature (22)..(22): n is a, c, g, or t
  misc_feature (24)..(24): n is a, c, g, or t
  misc_feature (500)..(500): n is a, c, g, or t
  misc_feature (598)..(598): n is a, c, g, or t
gggtccagtgcagtggcttgcntncaaaagaaggcagcagacaaagtcgtcttccttctttccaatgacgtcaacagtgtgtgcgatggtacctgtggcaagagcgagggcagtcccagtgagaactctcaagacctcttcccccttgcctttaaccttttctgcagtgatctaagaagccagattcatctgcacaaatacgtggtggtctactttagagagattgatacaaaagacgattacaatgctctcagtgtctgccccaagtaccacctcatgaaggatgccactgctttctgtgcagaacttctccatgtcaagcagcaggtgtcagcaggaaaaagatcacaagcctgccacgatggctgctgctccttgtagcccacccatgagaagcaagagaccttaaaggcttcctatcccaccaattacagggaaaaaacgtgtgatgatcctgaagcttactatgcagcctacaaacagccttagtaattaaaacnttttataccaataaaattttcaaatattgctaactaatgtagcattaactaacgattggaaactacatttacaacttcaaagctgttttatacatagnaatcaattacagttttaattgaaaactataaccattttgataatgcaacaataagaa

SEQ ID NO: 173524 - DNA, 513 bp, Homo Sapiens
agcttgcacgtcctgtatcggacatactcggcaccagctatcaacgccatccaggatggatcttttgaaagtcccaaaaaggaaaaaaagatcgcacaggaggtggcggtccagagctataggcaaagatgctaaaggaacactgcaggtcccgaaacctttttctggcccagtaagactacactcctccaatcctaatttgtcaacactagattttggagaagagaaaaattattctgatggctctgaaacctcatcagagttttctaaaatgcaagaagatctgtgtcatattgcccataaagtttacttcactttaaggtcagcttttaatatcatgtcagcggagagagagaaactgaagcagctgatggagcaggatgcctcctcctccccgtctgctcaggtcattggtctgaagaacgccctgtcatccgccctagcacaaaacacagatcttaaagaacgcttacgcagaatccatgccgagtctctgctcctcgaatcccccgc

SEQ ID NO: 173525 - DNA, 1432 bp, Homo Sapiens
tcgaattacagattgagcacataccagaggaagctcagaagaagctcatctcacaagttcagaagaggaatttcataggaacatattattccagattatcatctccctgaagactgtgctgtagaaaaataagatcccagctttgcgggaactcatgcactatctcaggaaggtgatgcaggattaccgagatgagctctaacggacttctttgcagttgacaaacagctggcatcagagcttgagtatgacatgaagaagtaccaggaacagctggtccaggcacgcaggagctagcaaaacatgcagatgtggcccggacggctggaggtgctgaggtggcacctgtggcacaggttcgccctgtgtttagtaacacagtgccagttcctgctggccaagaaaaccctgccatgtcacctgccgtgagccagccctgcacacccagggcaagtgctggccatgtagcagtatcatctcctacacctgaaacagggccattgcagaggttgctgcccaaagccaggcccatgtccctgagcaccattgcaatcctgaattctgtcaagaaagccgtggagtcaaagagcaggcatcggagtcggagcttaggagtgctgcctttcactttaaattctggaagcccagaaaaaacgtgcagtcaggtgtcttcagtacagtttggagcaagagtcgaatggcgagattgagcacgtgaccaagcgggccatcagcacccccgagaagagcatcagtgatgtcacgtttggagcaggggtcagttacatcgggacaccacggactccgtcgtcagccaaagagaaaattgaaggccggagtcaaggaaatgacatcttatgtttatcactgcctgataaaccgcccccacagcctcagcagtggaatgtgcggtctcccgccaggaataaagacactccagcctgcagcaggaggtccctccgaaagacccctctgaaaacagccaactaaacagcgcctcccaccagtgtccaggcaggcaggagcccttgaggaagcagtctcgtgtcctccgtgtgaaggcagctggatcacttcccgcagtccttgggcagcgctttgctgtggaacacgagagctcctcctcaaggggcctggcactcaccttctattctgtatgatgtatttggttaaacactgtcaaataatagagatgtgccagatttagattttcttaccctaatctggtttaatattgtaactttattccatttgaaaagtgtcaagcccattcagataaagctataatctgggtctttaaggaacacaattttaaaaacttgcagctttcttttatatacactcaagcctctgtttaacttgaattcctttatagtacattattttccccatctggtaatgacgaaattttgattctaaatattttcctatt

SEQ ID NO: 173526 - DNA, 1101 bp, Homo Sapiens
gggggcggggacgcagcggctccctcccggaaagcgagcgtatctcccgagccgttgccactgacagccgcgggcgctcccatctgagtaagagccagcccgtccgcggcctctccagccccgggttcgcgctctcgactctcctgcctgcccagctgcgcggcggagcggagcgaggcgcggcctgcgagtccccggcagcccccgacccctccctcggcgctgcgtgtaggccgcgccctcaggcccagtccgcggtgccccggcgggtgatgccaaatacagccatgaagaaaaaggtgctgctgatggggaagagcgggtcggggaagaccagcatgaggtcgataatcttcgccaattacattgctcgcgacacccggcgcctgggggccaccattgacgtggaacactcccacgtccgattcctagggaacctggtgctgaacctgtgggactgtggcggtcaggacaccttcatggaaaattacttcaccagccagcgagacaatatcttccgtaacgtggaagttttgatttacgtgtttgacgtggagagccgcgaactggaaaaggacatgcattattaccagtcgtgtctggaggccatcctccagaactctcctgacgccaaaatcttctgcctggtgcacaaaatggatctggttcaggaggatcagcgtgacctgatttttaaagagcgagaggaagacctgaggcgtctgtctcgcccccctggagtgtgcttgtttcgaacgtccatctgggatgagacgctctacaaagcctggtccagcatcgtctaccagctgattcccaaacggttcagcagctggagattgaacctcagagaatttttgcccaaatcattgaggccgattgaagttctgctgttcgaaagaagctacgattcttggggttatatccccactaccaggtgcgaatgagcagcgcgaaggtccaccgggttggacgaacgaatccgcacccatcattcaaacaaggttctgcgtgagcttgaggtaatttggccggtttccttccaaagcattgaagttagaggatccacttccggagcgttctcggcatttcactacatta

SEQ ID NO: 173527 - DNA, 880 bp, Homo Sapiens
gggtccatccactgctctccagcttctcaaagtgtttccgggcattgcgaatgttgatccagagtgaccgcagtaagggatcgacggatctgacatgaccaccatcacgtacgtatttgaggtgaagatgtcgatgaaagctagcgaagttggaattcctaacttccatgctctggaaggaaggcggccaatttgactgcagctcagcttgaactgtttgatgatgttgctgatcttctcaaaccggtggacgtcgcgctgctctttgcactggtagtgggaaataaccaagaatgtagctctttcgaacagcagaacttcatcggcctcaatgatttgggcaaaattcctgaggttcatctccagctgctgaacgttgggaatcagctggtagacgatgctggaccaggctttgtagagcgtctcatcccagatggacgttcgaaaacaagcacactccagcgggcgagacagacgcctcaggtcttcctctcgctctttaaaaatcaggtcacgctgatcctcctgaaccagatccattttgtgcaccaggcagaagattttggcgtcaggagagttctggaggatggcctccagacacgactggtaataatgcatgtccttttccagttcgcggctctccacgtcaaacacgtaaatcaaaacttccacgttacggaagatattgtctcgctggctggtgaagtaattttccatgaaggtgtcctgaccgccacagtcccacaggttcagcaccaggttccctaggaatcggacgtgggagtgttccacgtcaatggtggcccccaggcgccgggtgtcgcgagcaatgtaattggcgaagattatcgacctcatgctggtcttccccgacccgctc

SEQ ID NO: 173528 - DNA, 199 bp, Homo Sapiens
catcaagcttggaatgtcaccagccaacccctcactacattctccggttccagatgcttctcattcccctcgagctggaacaagttctcaaacaatgccaacaaacatgcctccacctcgtaaactacctcagcgctcttgggcggcatccatacctaccatcctcactcacggtaccgagctcgattgtatcatgtaa

SEQ ID NO: 173529 - DNA, 554 bp, Homo Sapiens
aagttacatgattacaatcgagcctgtacccaggcatgcagctgggttgatcccaattctctgggactagtggcgagaaaagtggatctgtgaacagggccaggaaccataaaggaatcaatacttcactgggcaatttttgctcttcacaagaaatatcctaggatccttacaactcacactggagcctgaaatctaaaaacagacagggccttccattcatgagagtctgcggtttcccacaaaagatgaagagaaaaaactaacccaacatcctacataccaggtgagacttttctctgaagtaccaccaatgtagctgtggccagctttttccaaagtcctcccattcactcaggaggcaccgtggtttccaaagggaaaccttctactgaagcactgaccctgatcctcccttactcattttgcttggggacctcctaaactactcagaacttccacagcctgcaatagtacccactccctgtacccatgacaccttcaacttctcctctttatgtatttccatattcagcctgaccatcgcatcactc

SEQ ID NO: 173530 - DNA, 680 bp, Homo Sapiens
tcataaagaaggcaacataatgtgatggctagatacaagggctttggagccagagagtacgtaggttcaagtcccatatctgctactccctaggtaagttatttagcttcctgtgcttcacttcccccatctgtgtagtggggaaaatatagcactcttgcatagggtgactgtgaggggtaaattagtgcgtctaaaggacctggaacaccgttgtgcacatacagaagtagtcagtgttctaaatgtagcagaaggagtcaaaacatttaccactgtggggtcagatcacagccaaaatgctgtttccccagtcttcagaaaacctatcaaagaagaagcatgccctcaccctcctttcctctagcactctctctagctgccctgtgctctctctgcctctcaccatctgcttgtactagatagcagcccagacctgggctcaggtctaggcagtaggtctctgccctgcccttgagtcaggaataacacacactcccgctgggacacaggacagctatcagggttagccacacactgtgggtggccccggcagaatctgcaaaaagaacattctggtgagaaaggaactcaagtctcctgcatttgagcaaggcagctgcctgtgcaaaccgttggccctagatttccagaaggcaaaactattacaagctggcatg

SEQ ID NO: 173531 - DNA, 318 bp, Homo Sapiens
atgcaatgcttgggttatctttgagacataaaacaaaaatgtcaagcaagcattggatacccagaactcagaggagtgtgggtagaagacgaaatttcgggagtcattggactacagatgatgtagcataaggagagaaaaaagaggaacaaggaaggagaaaagtccaaataaagccttgaggatgttcaggttagagaaggaggcgactgcaaaggatgcgaggctgaaagagtcagaaaggcagaaggaaaactaagaagccaaggaagtgaccaaaacacttcaaaagaacaccaagcttggggtaccgagctc

SEQ ID NO: 173532 - DNA, 474 bp, Homo Sapiens
attacgactcgagctagtacccaggcagcagctggtcagagactagtcccagattcaagacagtgttaccttcagcaacaaccactgtttcaacctctgccacttctctctctgcaacagtaatggtctctaaattcacttctccagcaactagttccatggaagcaacttctatcagggaaccatcaacaaccatcctcacaacagagaccacgaatggcccaggttctatggctgtggcttctaccaacatcccaattggaaagggctacattactgaaggaagattggacacaagccatctgcccattggaaccacagcttcctctgagacatctatggattttaccatggccaaagaaagtgtctcaatgtcagtatctccatctcagtccatggatgctgctggctcaagcactccaggaaggacaagccaattcgttgacacattttctgatgatgtctatcatttaa

SEQ ID NO: 173533 - DNA, 444 bp, Homo Sapiens
aagcttctcagcgagcagcaggaagcaaaggcattgaatgtagaatgggatacggaccaacaaaaaacaaattatattaatgagaacatggaacagaatgaacagaaagagcagaagtcaagtgagctcatgaaagaagttccaggatatgactataagaacaaactcatcttcgcaatatctgtgactgtcatactaataattttgattataattttttgttttatagaggtaaagacaataattaattcaggttttcaaaatacaatcctgtgtttgtgtggattcagaatccacaaactgaaaaccaacgtcactttcccacttgacattcttcttctgtcatttaaggctgaggtgtgctttgttcttttactgcaatgtatattccaggattgttaaaggatcctcgcttccaggaggtctctgtgaaataaaaccagc

SEQ ID NO: 173534 - DNA, 901 bp, Homo Sapiens
gcgatggcaattccaaacctgatatcttgattatacttttacagaaattaatggaggaaggaaatgtgatgtacaaaaaagggagaatgaaagaggcagcccagaggtaccagtatgccttaagaaagtttcctcagagaaggattcggagaggacatgagacccttcaatgaattaagggtttccctctatctcaatttgtcgcgatgccgaagaaaaaccaatgactttggcatggcagaggaatttgcttccaaggctctcgaatagaagcccaagtcctatgaagccttttatgccagagcaagagcgaagagaaatagcaggcaattcgtggcagctctggctgacctgcaagaggctgtgaaactctgtcccaccaatcaggaagtcaagaggcttctggcccgcgtagaagaggagtgcaaacaactccagaggagtcaacagcaaaaacagcagggcccgctaccagctccactcaacgactccgagaacgaagaggacaccccaacccctggcttaagtgaccactttcactctgaggagactgaagaggaagaaacttctccccaggaagaatctgtttccccaactcccaggtcccagccatcctcatctgtcccttcctcatacatctgaaaccttcaagaagggttacagtccaaaggaagtccggtatcgccacagaacagggcaggaatcggcaagtccctgagagagcctgtggcccagaccagggctgctcctgcagccctccaatgcaggcccagatcgtaaaaaccagccagcacctgggctctggccagtcggcagtgagaaatggcagtatgaaagttcagatctctttcagaaccctcctccagccagcttggtaccgagctcgattgtatcatgtcaa

SEQ ID NO: 173535 - DNA, 590 bp, Homo Sapiens
  misc_feature (342)..(358): n is a, c, g, or t
tggactggtcatttgtggccgtcccggactaagcagttattaatacatggcagcgtttgcctgttggcgttggggaaagaacagtccccagagaggggaaagggcctgccaggcagtttcaggcaggtctctgtccgagtaatagagctggatggttctggacatccgtgggtctttaccgtgggaatctgtgagggccagcctgatgagcaccatgtgctgtgttgtgtgtggattggagaattcatggtgtccttggtggagcgtcagtagctatagattatattctccacaagctctggtttttggaatagacaaagaccatattggatacatcataannnnnnnnnnnnnnnnngggtccaggggttttaattggggcactgaaagaagataaggaaactaagttttaaagtgattggagtgactgtgaaatgacttggactgaataggacataataaggcaattacattaaaattaaaattagacattagatgaaattatcgagtgcaacccagctaccattcattcaagaactagtctcctcaactatttttttgttctttttaatcttcagaggaaagaaata

SEQ ID NO: 173536 - DNA, 430 bp, Homo Sapiens
agcttggcagatacctagccagtgatggaccagggtttcgggccagctctctcccttcaccaggtgttctgggaggctgaacttggggacagtcaagtgcaaaggaaagtgcatggggaggatcttgttgttccgcagcacacagcaaaccaccaccgtcttggtctggatgttcacaaacttatagcggtgcccctcacggatgaagtggaggtcgtatgggtttctcggtggatggtcttggcacagtcacattcacaggaagcctggttttctccacaatgttgcggatgatgtgttcgccctcattgcatctgaagttccaggggaacttcgggtgctaaatctgcccttgcacctggaactggaaggctaatgctttcgttggtccggtgacttcatacaaatgaggcacggcattttgcctctt

SEQ ID NO: 173537 - DNA, 169 bp, Homo Sapiens
tcgagcggccgcccgggcaggtacctatgaaatttaacatattgcaacaagataaaaatcacagtatacaattgaaattttggttcaaagtgctcagatgcctagatattgttggataaaagaaacataagactacgcttggatcatgtagcctcgccgcgaccacact

SEQ ID NO: 173538 - DNA, 160 bp, Homo Sapiens
aatcgagctctgtacccatgcagcttggatggcaaaagaagggcatgtctagaacaagattaaaaaggcctattaggaaatccttgtggaaatcatgtacctgtcaaggcaggcatggttgacagtatttgaatatctaatagtaaaagcctatcgtata

SEQ ID NO: 173539 - DNA, 212 bp, Homo Sapiens
ggcatagcagcttggggccaaaacaaacagggcccctcccagaaccctgcacccttcaatgttctgtcaagttccagttccccattagtacataccatgttttgtgtgcacatgtgtgtgcaaatgtgtccacattacatttgtgcacaactgtgtacgacaaagtgtaagcgtttttgtgggagtcctctcatgcacacataattcactat

SEQ ID NO: 173540 - DNA, 525 bp, Homo Sapiens
acgactcgagctgagtacctgcaagcttggggcgtcagatagtaaatctaccaataactatagtaaaaagaaagcagaataaagtttagaatgaactgatagtagtgtgttccagcaaaagatagaaacattaggaaaaatgcatgcataagtagtcttgtaatatttttaaataagcatgtccttgatgagactcttgatagagttttgaacatccctattgagagaatggaaagaggaagtcttgtgtaggcattcaggatccctgggctcctcatagacagagctacactcccatttgccttaaccttacctcacctggctagtggttactgcatgttagcactggggactggacatggctgtattgacagcctgtaattcagttggtctttataatttgattacttgagttttagctggtaggtgagttcttagcttgtgaacctttcgagggttgggagatttccacatgtgactgtcttacagagtcacatggaaacagaaaagacccaagcttgcatg

SEQ ID NO: 173541 - DNA, 645 bp, Homo Sapiens
caggcctgcagctaggggaaagggtaaataggaacagccccactggcaggccattttggcagttaccacacatctgagggccttgctagcccagcagtgccatgtctggtgtgcaggaaggcagtgccatgtaagatgacagcaacagggacccagcccaaacccaaccatcacaaggggtggctgagacatggaggattccagataatgagggctggggtggggggttcctggaagatggcccagacacaggaagagacacaagctcatacccccgcctgcatggatattcatatgtaaatgcatttttaaaactggtaaagggtacatcacaagttacattcttaaccattttttaaagtgcacagttcagtgccactaagcatagttacactaagcacattcacacagcatattcacactaagcgtattcacagcgtattcacactaagcatattcacaccgagcatattcacaccgagcatattcacactaagcgtattcacactaagcattttcacactgagcatattcacacaaagcatattcacacaaagcatattcacaccgagcatattacaagcatattcacaccaagcatattcacaccgagcatattcacaccaagctgccagcttgcatggt

SEQ ID NO: 173542 - DNA, 511 bp, Homo Sapiens
  misc_feature (235)..(312): n is a, c, g, or t
gcttggtgtgaatatgctcggtgtgaatatgcttggtgtgaatatgcttgtaatatgctcggtgtgaatatgctttgtgtgaatatgctttgtgtgaatatgctcagtgtgaaaatgcttagtgtgaatacgcttagtgtgaatatgctcggtgtgaatatgctcggtgtgaatatgcttagtgtgaatacgctgtgaatacgcttagtgtgaatatgctgtgtgaatatgcttnnnnnnnnnnnnnnnnnnnnnnnnnnnnnnnnnnnnnnnnnnnnnnnnnnnnnnnnnnnnnnnnnnnnnnnnnnnnnncagttttaaaaatgcatttacatatgaatatccatgcaggcgggggtatgagcttgtgtctcttcctgtgtctgggccatcttccaggaaccccccaacccagacctcattatctggaatcctccatgtctcagacaccccttgtgatggttgggtttgggctgggtccctgttgctgtcatcttacatggcactgtct

SEQ ID NO: 173543 - DNA, 353 bp, Homo Sapiens
gacctgtcctgtccacccacacgtgaagggacaaagaaaccaccatacagatacactatggaatatgcttcagccatacagctttgggaaatcctgtcatccacagccatgtggagaaacaccaagaaacccagaggatattaggtccaaggaaatgagcctggtagaggaagtcccacaccttttaatctcaggcatggagattccaaaaactttatctcctgtccatctacagatgaagggatcaagaaactgtaagtgtatatgcacaaagaatactctcttggccactctaaaataactacaaccatgtcactttggagcaacaaagccatctgcggcctccatcttgg

SEQ ID NO: 173544 - DNA, 360 bp, Homo Sapiens
attaggaaaccctggtagctctacctcctattatactgcgacatctgtccccacatctcctgcaaactccccagcccaggctgccctcctctttcacttggactttgcagtggtatcccaggcagattcctggccaccaattctttccctgtcccttatttcatgctccacacagcagtctaagtgatataatgtcttgcaattaaaagttgaatcgtgtcgcttctcagcttaaaacctggattatcgtcccaatgctgccgggatcaagtggaaaatcctcagaacagctggcatggcaatggaggatcaggctctgtctctccatcaaactccccttgcagcccctccctgcctact

SEQ ID NO: 173545 - DNA, 443 bp, Homo Sapiens
acaagaaatgggataaatggattggtgagatcaaagaagaagaaaagaatgaaaagttggagggagatgcagctattaaacagattatttcaggcagatctattcagatggttctgatgaagtgaaacgtgaccatgaacaaagtcctttatggagtcgggtggtacagttttgagtaccaactggtctgatgtaggttaaaggaaagttgaaatcaatcctcctgatgatatggaatggaaaaagtactaaataaattaatttgctctcatcgtattgtgtatattcacctaatgcccattgtgtattgatattgcattcttgaattttgaacactgaatatctttttgaaagattatacttcttgacctctttgtgctttagaattattttccttcaagtgttcaagtctaatgaagaatgaagatcacatttatactctg

SEQ ID NO: 173546 - DNA, 408 bp, Homo Sapiens
gatatcatcttcgaatccgaggttacagtggatagaaactgcctagaggttcttccaacaaaaatgtcttatgcgtgccaatctagaaagaatgtaatgaacatgcaaacaccggcaaataaaaacaaggggaagaacagcccgtgctgccagaagaaactgaaaattcaaaaccagggccatctgctcatgatcttgctgcacaattaaaaagtagcttactagcagaaataggacttactgaaagtgaagggccacctctcacatctttcaggccacagtgtagctttatgggaatggttatttcccatgatatgctgctaggacgttggcgcctttctttagaactgttcggcagggtattcatggaagatgttggagcagaacctggatcaatcctaactgaat

SEQ ID NO: 173547 - DNA, 379 bp, Homo Sapiens
gctctcatcttctgtaatccctatctttaaattccatacaagatcccatctctctgcccctaaaatcctgatcagtcctagatcggtgtctacctctgaaatctgaatgtggcgtatccctgtccctaaagtctagatcagtagtacctgaacctcggcctctaaagtctacttgtgttccgtctttgtctctaaagtccaaatcagatacatctctattcctaaaatcagaacgggactgttctctggccctaaaatccaaatctgataaatcccttcccctaaaatctgcatgggatccatcccggcctctaaaatctaaatcataagtgccccggcccctgaagtcagatggaggagcatccctacctctgaagtc

SEQ ID NO: 173548 - DNA, 361 bp, Homo Sapiens
ctcccaaatggatcccacagagtgaagatatgagttaaatgctttagctctagggatttaaaatacatagaaagcaagttacttctactggaagttaaacttaaagaattctcatggttatgtcatctctcactgcagtaccgagtgtgctacttggcttccctctctccttccatctactgccttgccctatcatttacagaggcattaatgccggtttcaaactaataataattctttttcttctgtgctgcaaatacccaatcactgtggttaaataccatgtataacataaacagggtcaagaatgccagctgccagaagagtcatgtttaaattagcattaaccagcaagcccttc

SEQ ID NO: 173549 - DNA, 380 bp, Homo Sapiens
  misc_feature (353)..(353): n is a, c, g, or t
gtaataataaccacggtgcagagctattagaattaatatttatgctgcccgccatgaaatactcatggggacagagaaaggcgggccgtaagacaagaattaatatacactgggctcggctcacccgctggcatgatgtttaaagacggttgacaagcctccatatgaatccgccagtcacttcccgcagtactagcggagtggagggggtggagacgggtccgggctgctgacagctacacagattgagtttctgacagcccttaaaaaacctaaacggcccccacctatttccccttcttccattgcccaaagcgctgtgttctgccaccgttcatccgatctccccttcnatcatgctgaaattaccaagcttgcat

SEQ ID NO: 173550 - DNA, 349 bp, Homo Sapiens
taccctccatggctattgtcgaacggaaggtgaggaaaagttaaaggaatttatcagagaaagggaaaaaagaaaaacaatattaataaaggcataagacaaatcccccataaaaacacatgagcagaacaaaaaggagctagtttccaagcctgcccaccagctctcactcactgttgccagggtgtggctactgtgccacctgctcactgccccagcatactgcatagagaggtctgccatgcaccatgctcagttacaaaacaaatgcagggaacatgcaaagcccgaggaacaatccagcagcagtgcaggtcaacagaatgagagctcttcaaaaagaaaggag

SEQ ID NO: 173551 - DNA, 342 bp, Homo Sapiens
aaaagcttcctgagacctcctcagaagcagatgctggcactatgtttcctgtgtagtctgcagaaccatgattcaattaaacctcttttcttataaattacccagtctcagttattcctgcatagcgatgcaagaatggcctaacacagtgtattcgcaggctcataatgtaatatacatgaaagcaacagcacaaaggatgaaagcaagtgaatggaaccatgctgttgcaaaaggtgatatattttttgaaaatcctcaatagaggaattaaaatgcaatgctaaaaaacattcattagcccaaaagaaaacagaaaagaattaacaaaaaacagatgag

SEQ ID NO: 173552 - DNA, 643 bp, Homo Sapiens
tctcctcttctgaatccttgggacgtcgtctggctccactgcctcagtggttaggtcttgactacacactggagaatacgcacatgcccttcggcggatatggccttgcctccaaggtgacggcctctgactaaatatagctcatgtccaagaaggcagtccttatttggaccccttgtgaaaaggatgggaagcatgaattaggagctgccattgctttgggttcgcatttaaagtcttcggtgcagggttttacttgaggctttgtccgctcaaccgccattatggggatcaattggcacgtgaaggaggagtaaagctatatttccaggaactgaaaatctcagcctgagcatatcggctagtaaagatgattatttggctcttttggctgtttctgcccttaggatgaccgcagtagttatctatctggtggctttagggtctggtcagtttactgtgcccatgatgaaatcccacaagtaacttagtggtatgagaggacaaacccaggatcttgatgagtgctgaaggttagctgttacaccagttagtagtagaccgaagttcagagcctgcagtctggcttccacattatggttggattctgttttaggcgggtatagaaaatcagaaaacgaac

SEQ ID NO: 173553 - DNA, 689 bp, Homo Sapiens
gtcccaagaataacccgagctcttgctctgaggaaagtcctataattctttctgaaaaaccctctcctctgacactctctcagaagaccccgccttccccatatactcttttggagactttactcagctttctcctcaactgagatctctgaagagtttttcctaaaaacatccctctgtcatcccactccaggaccagtctcagaagaccacaccttcctcagacacttttttagagaattttctcccaaattgccctccatcagccacccactcccagcgcttcctgagacttcctcagaactttccctcagattccacttctgacatccccaagaaacattatttaggaccctatcagatttacccactaactttagaattgctatttacaccctctcatttccgccattctctttcctctcgaagtcaactcagagaccattctcagggggcccccttctgcccattatccctatcagaggtcacgcaacattctccagactcgtagcccaagagcctatacgtttcccttgtaaagattcttgagaggacacctttccccgcccccttgaaatcccagtgctccgagatctttctttcagaccatttttcttaggtgccatgctcatagacccctcttcccttcagagatcaagagacaccttaacaccctccttagagactta

SEQ ID NO: 173554 - DNA, 143 bp, Homo Sapiens
gccaatttcctcaaaggttaagcactgcttaaattaagtttaattcataaaatgatctaattactctttctgggagattttctttagggcttctcccatcaatagaaacaaaaattttcgttaagaagggatagaagatgaga

SEQ ID NO: 173555 - DNA, 906 bp, Homo Sapiens
  misc_feature (65)..(65): n is a, c, g, or t
aggaccttgaatgagtgattgataaagtttctacccatacacgccagccaccccactcatattgnactgcatggtaaagcaggattctgaatatggcgtataccatttctgttatcttttgctcatctgaattcttcggattaaaatagcagagagaaagcatccattcttgccacacagagcattgtagcaagctcctcctgttttctctactgttattaaaaagtttaatcatgtcagaaagaaaggctctgcgaacctccatgctctctgggcactggggagaatttcgaagtagggtcgcaattacttttagtatctgagggttttgtatcttcactgaagaatcaggatctggatgctgtttatgtatcacctgagtaccaatctgttctataagaatctcaaacagcacattatatgtggtcattgtgattaaatttgtctgaagcatgagcctttcagctagcaatgaaaacaatccatgtccaagcatgacttctgctttcctctttggggccagatgttttaaaaaataacccattgccttaagagcttgtaccctgattccttcacttttcgatgccagaagtttgtagataacacgtaacccattcctttggtcaaaagcaggaatcatagagttagggtgttctgacattaatgcaacaagcagctgtaggacatccattagattgtcatcctcatgcatagtcagtaggtaattaagaatggcctgtaattcatcttcctttactccagaatccttcatcactaattgcttaatgaacatcaacaagcaatgtctcgtagagaaagcatttctttattgattaggtacgcggtccatctaatccttttggggtgatacccacttcgatcttgaggacttcagaagatgacgac

SEQ ID NO: 173556 - DNA, 714 bp, Homo Sapiens
  misc_feature (48)..(48): n is a, c, g, or t
gagaggacaagatccacaaccagccttcttccgatttttgggagaaanccgctgaggtcaccctcatccccttcagattggggaactccctcagagggtgaaattttcactggctttatgattcaccccttctttgagagctaaactgagtacatgggaaaggtagggaaggtgttttaaggagaaatggccgacataccacttggggtggcaaatggctattagaaaagaagatctgagggtcccaagtacccccagtgagaaaggcactgctggtgcaaaataactaccaatgtgtgtacaacctctcgtcccctcaccgcgactcaggctggttgcatgagtattttccttggctcaattctcacataggacactcctgaatgatccattgggagactccagggaaacagaagtggggctgcagtatctccacagaacactctgcatctgagccacttttcagcattctcttttctctccaccattctgtgtaaaagggtctcaccctgtgcttaccacttagcctccaatacgggaaagtgctctctccaacttcgttttccaaaaacagctcatatgtcatattctatttcgtggaccctcagcttagtcaagtccacttgaatctttagaaaggatgtcttagtgttataaagcaatctctttaagaagtgcaagtcatctgacatgggagtggcagaagttgtcaaa

SEQ ID NO: 173557 - DNA, 598 bp, Homo Sapiens
gcatgtagcttggctatggtgtggcagacctgaaagaactcgggagtcgaggccagcatggagcctccgaaccacacggcgtagcgctgcatgtgatgcgtgaccacctggacctccacaggcttcggcttgatcctcccgccgctgagctcctcgctgagcctcagcctagcatccaccactctcttcaaatccctctgcagtcggcgtccgaaatccctgaacatggtggagcctcctgagagtacgacattcttatacagcgggcgccgcacatcgatggggcagttctgtattacttcatcaacaacatctgagatggactcccttggcaaattccttgactatatcggggcaaatgtaacagtatttctccttaatggcttttgcggtctccagtgactgctcaggagggattcccacctccctctcccttagcagctgttgaatgaaatacgtaatatctctacctgcaatcgggatgtttgatgcagcttccaattacataaccttctgccactgggataacatgggtgactccatctccgctgtcaatgactatccccgttaacgtacgttcacccacttgtcgagatgt

SEQ ID NO: 173558 - DNA, 460 bp, Homo Sapiens
atgcagcttgcggcaagtaggtacaaaatgtttccggagacagtgaaaacctgttcaaagctgaagagtacattctcggagactttgctttctaagaataaggaccaaaggaggaaatacagctattcttaatagagaagtgaaggatcactacacattgatagtgaaagcacttgaaaaaaatactaatgtggaggtgcgaacaaaggtcagggtgcaggtgctggatacaaatgacttgagaccgttattctcacccacctcatacagtgtttctttacctgaaaacacagctataaggaccagtatcgcaagagtcagcgccacggatgcagacataggaaccaacggggaattttactacagttttaaagatcgaacagatatgtttgctattcacccaaccagtggtgtgatagtgttaactggtagacttgattacctagagaccaagcttgca

SEQ ID NO: 173559 - DNA, 665 bp, Homo Sapiens
atgtcaagcttggtcccaggcgttcaccatgcctagagtgctgctgctatcaccactgtctcccctccctgccagtggctaggtagaggtaggggagaagggtcatcttggacatgctgcaaatacagcatttgctggtgttgacaccctcctggggctgtggtggcagactgctgtgtcaggagcccatttcctgggagtagcagagggagcccaggtcctcaagacagcctgagatggcagcccatacacctcagcaggggtaccttgccccttttctccagtgcggttcagcattgaggttgtctattcccagtcggtgataaaacctgagctgtttttctcgtaggttccccctcctttccccaacttgggggagtagtgggagggaacagggaaggatcactgagggggcagggggataccccggggatcggtgacctggccctcttgcaggttcttcaccagttgtgcaagccagcgtttcgtggtggtgtcatcttttagcacctgggcgaaggttgtgtctttcagctggtcaggggggcactgtctgagtgcttcacgtgcctctggggttatctgaaagtcgcaggtaacatcttcactacatgcttcagcagacgggcagaaggctctttggatagctgcaggaccatataccc

SEQ ID NO: 173560 - DNA, 356 bp, Homo Sapiens
gatatgtgtcctctgcagataaggagggtctactaaataatgaaaaatatttatgatactgatgtgttggtcataatttcatttgcttgtgtatttcctcatttcttttacagtattgtagtgccttagaagatctgtagacctctctatcatactctttctcttagtcgatctcatggttggtgaatttaatctgtaaactgatgactctcaaacttccatctccatttaggatcttttagctccatacttgtttagtgcaactatcttcttggcatcatcacatggatgtctactaggtatttcaaactcattatattcattattgaactattttttcttccttagatcttctc

SEQ ID NO: 173561 - DNA, 329 bp, Homo Sapiens
tggccattactgaaactgcagttcctaaatgagtaagttttaacttgatgtcttctatggactgcagataatttgaataaatactttcaaacttgaaaagtagcttttggtatgaatttgaacagtcctccaggttggccatgattgcagcccagccttggtgttgatgatgttcatcatgtacaagaccttcacaaaaagaacaaagtttcttggcaacttcatacatttccaatgcaagctgtgtccttgaagcaacagtatgaaaaactgcaggcatcgtaagagattcttcaacttttatttccatgtattttctcaagcgtgca

SEQ ID NO: 173562 - DNA, 275 bp, Homo Sapiens
aaacaaatgcagcgatgtgtctgtgtcatctggcctcgagaaaggttcttcatcctctgaatctgagagacgtgcaggacaacgttccagatttgttttcagtactaatggttcatctctttttttctgttcatccattttccttttccctgtttctgtatcctctggtaacagcttgtggatttgatcttcagagggtttttcctcttgtaacttttcttctctcagctttctcaagctttcatattcctcacgaagtcccaagctgcatgcct

SEQ ID NO: 173563 - DNA, 469 bp, Homo Sapiens
ccacttactcactgtattcagccctgaaccaggagtaaccctggtggtagtggctagtgtttagttcttgtcattgcaaatggtaacagggttctcagctgcattgtgagtcatcatgactcctgttggcacttaaccaatcatgtcctgggactcagagaaacaatgtaggagaaagagaaattaatttttcctctctcttcttaaccctctctcccagaccaattgctactcctttgggaactgtggctgctcagtggtctgggagataaaacatctagatacaaccagataatgtagcatctttacttgccatcaacaaactaattgaactcatgaactccactcctgctgtataatggtagggtggggactgtcatttgtccaaattagtaaaacatcattacatacagacatggctgagaacacaggctcaagagacaggtggtctgattttaatccaagctga

SEQ ID NO: 173564 - DNA, 321 bp, Homo Sapiens
  misc_feature (213)..(213): n is a, c, g, or t
  misc_feature (262)..(262): n is a, c, g, or t
  misc_feature (294)..(294): n is a, c, g, or t
tgaaacgcagctggaccctggctgagtgaaatacgggcgcggtgaccttctgagaccagcacagaccagcagagggaatgtgagcagggttctggcagggcccagggaagacacctggctggtctgaagtggctcatgaggctgagtgtagcagtgggcgccagactgagggagctggactgcggtggaggaggtggccagagagtcccttcnaggggagaagctgagagtgaaacaggaacaggggatgctccgtgctccnagaagagccccagacggtgagggaggtacgcngggcagcactgtgggctccgggctggc

SEQ ID NO: 173565 - DNA, 2092 bp, Homo Sapiens
  misc_feature (1573)..(1585): n is a, c, g, or t
  misc_feature (1688)..(1696): n is a, c, g, or t
  misc_feature (1736)..(1744): n is a, c, g, or t
  misc_feature (1781)..(1781): n is a, c, g, or t
  misc_feature (1867)..(1867): n is a, c, g, or t
gttggagagactatggcgctcaacaagaatcactcggagggcggcggagtgatcgtcaataacaccgagagcatcctaatgtcctatgatcacgtggaactcacattcaatgacatgaagaacgtgccagaagccttcaaagggaccaagaaaggcactgtctaccttaccccttaccgggtcatctttctgtccaagggcaaggatgccatgcagtccttcatgatgccattttatctcatgaaagactgtgagatcaagcagcccgtatttggtgcaaactacatcaagggaacagtgaaggcggaagcgggaggtggctgggaaggctctgcttcctacaagttgactttcacggcagggggcgccattgagttcggacagcggatgctccaggtggcatctcaagcctccagaggtgaagtccccagtggagcctatggctactcttacatgcccagcggggcctatgtctatcccccgccagtcgccaatggaatgtacccctgccctcctggctacccctatccaccgcccccacctgagttctatccaggaccccccatgatggacggggccatgggatacgtgcagcccccaccaccgccctaccctgggcccatggaacctccggtcagcggccccgatgtcccctccactcctgcagccgaagccaaggccgcagaagcagccgccagcgcctattacaacccagggcaatcctcacaacgtctacatgcccacgagccagccgccgccacctccctactacccaccggaagataagaagacccagtaggccctcctgcctccctgcctcccaccctcatctctctaccctacccctcccatcggggctgtgctggggcttggggaggggagggggcgccttgttctccctccaggtctgatcataaacaattaccaggaactagcattgtgggacattagacccccccgcctcgggagaggtgccgcccagcttcccatgccagcccggagcccacagtgctgcccaacgtacctccctcaccgtctggggctcttctgggagcacggaccatcccctgttcctgtttcactctcacctcctcccctcgaagggactctctggccacctcctccaccgcagtccaactccctcagtctggcacccactgctacactccgcctcctgagccacttcacaccagcaaggagtcttacccgtcccctgcctagaccctgctcaccttcacccatgctggcccctgcgctggtccttaaacaggcgcggtcgccccgaattcacactttaaccgaggtcccagtttgcgaagctactagaccacccctttctacttccccctttaccccgcccccctgtcggcacactggcttggcaaggccccacgcccttgttgagtgcactattttcggcaagaagccgcgcagaaaattggacgcccctcctctccaaatacgcatattgagggcctgaggaacaaagagacggcgcgtgttctgcggcgccccatcaagacctcacataagcgggcccttttgggcccagtttaagtgcgccataatgctnnnnnnnnnnnnngagagtactgggggtaaccacctgtatatttttctcccacttaagacggcgcccccctctacgatccgggggaagataatatatgcggccccctttcactcgnnnnnnnnnttttcagacaattcttatctacgattacccccccgccccnnnnnnnnncatgcaaccgcaaagcgggcccggcccgcgatgtcanaccggcgccccacctgtgcgcatcaaaatatatccccccagatccacagcagggcatccgttgcgggtttttagtgcgctcttcgnaaattttgacgcgatgcgcgagattttgacctagcggcgcctgggaagagagcataccgccccgctgcccttttaaaggtctccccccccgccagattaacacacaggccccacacgagcttagaacactgcgcggtagacccacgcagacttgtacatattcgacgccgcccataaagccccatgagcggcgcagtaaactatcagtcgtaaacacacgttgcc

SEQ ID NO: 173566 - DNA, 390 bp, Homo Sapiens
  misc_feature (15)..(15): n is a, c, g, or t
agttgcggcacaggngggaccctgcttggagagactatggcgctcaacaagaatcactcggagggcggcggagtgatcgccaatggaatgtacccctgccctcctggctacccctatccaccgcccccacctgagttctatccaggaccccccatgatggacggggccatgggatacgtgcagcccccaccaccgccctaccctgggcccatggaacctccggtcagcggccccgatgtcccctccactcctgcagccgaagccaaggccgcagaagcagccgccagcgcctattacaacccagggcaatcctcacaacgtctacatgcccacgagccagccgccgccacctccctactacccaccggaagataaggaaggacccagtag

SEQ ID NO: 173567 - DNA, 807 bp, Homo Sapiens
tggattctcactactgcacagaccctgccaagttcatttcagtactgtgtacctccctggccaccatgctgcacgtggaactgccccacatcaacctcctttccaagatggacctcattgagcattatgggaagctggccttcaacctggactactacacagaggttctggacctctcctacctgcttgaccacctggcttctgaccctttcttccgccactaccgccagctcaatgagaagctagtgcagctcatcgaagactatagccttgtctcctttatccctctcaacatccaggacaaggagagcatccagcgagtcctgcaggctgtggataaagccaatggatactgtttcagagcccaagagcagcgaagcttggaagccatgatgtctgccgcaatgggagccgacttccatttctcttccacactgggcatccaggagaagtacctggcaccctcgaaccagtcagtggagcaggaagccatgcagctgtagcaacaaggtggaccctggagagcaggatgcataatccagcactggggaaagtggaggctcctgatgcaggctgcagacccaagagcaagtcctcccagccagagctggcgggctggcaaggggatattcagctctgcaaaggacttctggccaaaaagccagacatggtgccaagcagaacaccccccatactgtcagtggtgtccgtgagctctgggccctgccaccagaaagtcgagcactggtcctagtcaggctgtgatgaaatgtgctacaatacaagagtttattttcttacaaatta

SEQ ID NO: 173568 - DNA, 536 bp, Homo Sapiens
caggcatgcaactatggggggaagaactgagaggcgcataccccggctgtggcggcatgctgctctgggctgggaccgccttccaggtgacccagggaacgggaccggagcttcatgcctgcaaagagtctgagtaccactatgagtacacggcgtgtgacagcacgggttccaggtggagggtcgccgtgccgcataccccgggcctgtgcaccagcctgcctgaccccgtcaagggcaccgagtgctccttctcctgcaacgccggggagtttctggatatgaaggaccagtcatgtaagccatgcgctgagggccgctactccctcggcacaggcattcggtttgatgagtgggatgagctgccccatggctttgccagcctctcagccaacatggagccggatgacagtgctgctgagtccaccgggaactgtacttcgtccaagtgggttccccggggcgactacatcgcctccaacacggacgaatgcacagccacactgatgtacgccgtcaacctgaagcaatctggg

SEQ ID NO: 173569 - DNA, 537 bp, Homo Sapiens
tcaagattcgagacgcttatcagatgctgaatgaaacaaggtaattataaaacaatgaccctataactaccagtggataaaatcttacccccaccatctcactggcccaagagctccatctttgatgctgatgaaagaaaagtccaagcttctgacaaggcttctaaagagcaaccaccccgaggaccttcaggctgcaaaccggttaatcaagaatttggtcaaggaggaacaagaaaaatcggagaaggtgtccaagagggtcagtgcggtggaggaagtgcgaagccatgtgaaggtgctgcaggagatgctgagcatgtaccgcaggccagggcaggccccgcccgaccaggaggccctgcaggtcgtgtatgagaggtgtgaaaagctgcggcccacgctgttccggttggcgagtgacaccactgatgacgatgatgcactcgcggaaattctccaggcaaatgacctcctcacccaaggagttctgctgtacaaacaggtgatggagggccgggtcacctttggaaacag

SEQ ID NO: 173570 - DNA, 183 bp, Homo Sapiens
ggcatgcaatcttggaagcctcatcaaaattctccacaagatctaggaaaaggaaaagagtagaaattcttaaaaaagccaaatctacaaataattatcagatattaaaaggggatgaaggaaagacattcatttgccaatgatgataaatactgtgtcatagccccagcttgcaatgccctg

SEQ ID NO: 173571 - DNA, 718 bp, Homo Sapiens
caggcatgcagctgggcccaggactggaagtctgaacctggggtggagaatgggagtatcagttgacagtgtgtgctgttggccaggtttaggcacgaagggggtagtgctctcattggagaattttaagacaagaataggattgatgaaggcggtttgctttttactgtcatcatgctccagcaagtctaaacagtgtcattggtagaatattcctctctgcctggggcagactgtcccacagtcccccgccttggtatgccactggggcatatatttgtcttagaggtgtgtgtgtatgctggggagtgagggaggttccccatgatggcaggtagcagggctggccatttcatggacatcctgccctctgggtctgttacagtccaacttggtggcaaggacagagggcctggaccagcaggtggactggaactggtaagaaaagagcttgggtgctccagagatagccccaccataaagacagtgggtttcagggtccctgtcaaggaatggaacggctcctgaccccaaagtccagatgtttggctggtcagtcgggtgcaagtttatgcccttgggaacagagttttgcctcactctgtgagggctgtaggcctatggtcgaaagggaaggggcttctgtctcctggggctcacctctgtgcagagaaacctcttcctacccagaccattctaggtaaaagccaagcttgca

SEQ ID NO: 173572 - DNA, 174 bp, Homo Sapiens
aagtgaaacgcagctgtgagatggtccataccgatcctaaaacctcccaatcatgttcctggctgcagcatgggggtgggagggtgtggtctcctggactcttccacgttgggatgatccaggatttgggatcaagaaacttcatgttgtgagtcatttgagggaaagagcctg

SEQ ID NO: 173573 - DNA, 447 bp, Homo Sapiens
aaggatgggtttcagaagtgctggaaccaagaacaatctagaatgcttttagagaaggaggccacacaggggcacatctgcacaccaaggaaggaggaagaacgccactgccaggagctagcagtgagtaggggttgggatccaaggaagtggtaggtaaatcatgcactcttactctggggccgagatgtcttacaaaatgtggaaagcagggtcaggattcagaaggcagcctccgatgaggctgagcagtctttagaggaaggaagatgaaaagaaagaagctgggatgagagagtttggcctcagagagggaatgggaaagggcaggggggctcactagcttagttagcagaaggctgtgaaagtgatgagggccagaaagccaagaagcatggagacttcctaggctcctcctcatcacaaacaagaagggaaatggcccaa

SEQ ID NO: 173574 - DNA, 1003 bp, Homo Sapiens
tattagagatcttgtggatgttcggctgtatagggtggaaccaactgtgccacgtccactcacaccctgtttctgccaagcgttcctccaaagccgtctcgaaggtgggcaggaagggtctctgagcctccagtgatggcagatctccttgagagctcagtgagccccgctgggagttctggagatgatgactgggaggcgtcagggtagggaaggctctgtattgcacttcgtccccttctggacaagtcagccccagcagaagagccacctgctgccccatctccagaaatgaagagctttaatattcagaccacccagatgaaatgtcatggcaaatttgataaaaaccaagagggagtgaaactgacgctgggggagggaagggtcaagtcgagggaaggtgaaaccaaaaggcactgagcatgcgtggtggggcagggaaggacaccatcactccagagacagtatggtaacaaagggacaggaatggtccaggccagcttcaggctcttcaggaagccagagagatgtccaagtctaccaaaccgagttctccaagggcttttcaagaaatgggatttgcttgcaagatgaatgagggaggaggtcccatggcttctaagagatcaacccaagtcttccaatactcactgctaagtcccacctgggtcccccagagccaggaagctccctggtggcaggtccccctcttgccctcacggccctggagcgcttgaaggtgctggtccctgggaaggaggagcgaggaggaggagctggatggaatgtgtctgtagaggaggagctggatggaatgtgtctgtagaggaggagctgggtggaatgtccctgtagaagaggaactcggtcagaggaggagctggatggaatgtgtctgcagaggaggagctggatggaatgtgtctgtagaggaggagctggatggaatgtgtctgcagaggaggagctggatggaatgtgtctgtagaggaggagctgg

SEQ ID NO: 173575 - DNA, 671 bp, Homo Sapiens
acccgcactcgcgacacgggctggaccacagggcttggggccgatggcgcctcctcggggtaatcttgcacacctggccgtagcgccagcaacatgaaactgcaggttctgtctctgcttctgcagctcagcaatgtcgttctgcagggcctgactcctcatcctgcacctcatgtgctctccgcctggagcttctctgtgagctcccggcgtcgcctccggcactctgctgcagccagcttgttcctctcccgccggatgcgacgccttctcctcctcttcaggagacagctgctcatctctcctctgcggcccacggtggtgccaatggtcttgatcacgccaggtcttgggagggccatgtgtccagggacagaggccaggcccggcagggggctgtagggctgcgagcgagggtatgggttggcacatggcaggtgatcactgtgggctgcaccatccactgcaggtcctggctggtcgtgatggcgttgatggtggggatgaatgcactgcctgagccaggcatatctaccacggaatttcatgctggccgtcgccgccgctggagtaggactcggcgtgcgcaggagagccgctgctgccccgggacgaggtgtcaaagttcccgggataatcctggtacatgatccgcggtgggggccggagag

SEQ ID NO: 173576 - DNA, 703 bp, Homo Sapiens
  misc_feature (482)..(482): n is a, c, g, or t
  misc_feature (495)..(495): n is a, c, g, or t
  misc_feature (498)..(498): n is a, c, g, or t
  misc_feature (500)..(500): n is a, c, g, or t
  misc_feature (520)..(520): n is a, c, g, or t
  misc_feature (524)..(524): n is a, c, g, or t
  misc_feature (554)..(554): n is a, c, g, or t
  misc_feature (570)..(570): n is a, c, g, or t
  misc_feature (586)..(586): n is a, c, g, or t
  misc_feature (588)..(588): n is a, c, g, or t
  misc_feature (596)..(596): n is a, c, g, or t
  misc_feature (600)..(608): n is a, c, g, or t
  misc_feature (612)..(612): n is a, c, g, or t
  misc_feature (620)..(620): n is a, c, g, or t
  misc_feature (625)..(625): n is a, c, g, or t
  misc_feature (633)..(633): n is a, c, g, or t
  misc_feature (650)..(650): n is a, c, g, or t
  misc_feature (672)..(672): n is a, c, g, or t
  misc_feature (676)..(676): n is a, c, g, or t
tcagccaatcaaatgagcttcttccatctgcagtctgtgtcagtgtgaagtcatgctgctgctgggtggcccttatctgccctgccactggccagcgagctgagagggacccttcctgggtacgggtctggagagtgccctgggaggcctgggtctccacaaacatcggagtgagaacagtacttcggaaacgccaatcagaatcaatggtatattcctgaaattcgcattctgacagaggatgctcgaacatggggtttggataatctgggctcatgctggtcatttcgagcagaaaatttgttgctaaacttaaaaagtgcacttctatcttaagagaatataaaggaatttagtgccagcaacccggcccaaggtattttgaaagggtaacctagtttcattggcttcaagaaaatttcgaattaattaatttgaagtccaagggagcacttaaaccgaaggtggggtcccgagcctcnaaattcgtaaatnatngnccataagcttgttttccttnggtngaaaattggtattcccgttacaaatttccncaccaacaataccaanccccggaaccttaaangngttaaaancctnnnnnnnnncttnatgaaggngagcntaccttcncatttaattggggttgngcttaactttgcccctttttcnagcnggggaaaacctttcttgcccaccttgc

SEQ ID NO: 173577 - DNA, 758 bp, Homo Sapiens
taccaggcatgcagctggctgggatccagctttgaaaagggactaggtttgccaccccagctgctgatttccatgatattctcaaagtcttctttcatcaaataatatgtgtccataagtgcaacaacatcctgtactccgtctactccttgtgaggtcaagggctgtacaagtgcatcccttagaagcgacagataatccatgtttacagtccttttgctggagtaagttctgagactcatatgcaaggccaggtcctgaacaatacgatcatgtttgcctgtagacgagtgcttccccagccagcttgggaaggtgggaaactgggtcatgtaccccctcatcaactctccaggaagaacactggcataaatggcctgcgcaggcagaagactccagttttgcttactccggatctggctgtccactaggtcaccatcgcatatgctgtctgctgctctgcttaaaagcatcaggtgctttttcatgtcaccccctgctgctacaggcttcacgcgtatgtaattttcctggacgaagaggggtgctattgaataatcatgaaaaaagagatctgacttgtccacaagtgacatgtgagcagtctcctctccagctgcaaacactttccgggcaacatcaaatgggcccattttgatatcctttttggctctgtgagaatcagctttggcctggtcataggttaatgctttacttcgtgcacaccacatactcagattatgtaaaacctgtctgcc

SEQ ID NO: 173578 - DNA, 453 bp, Homo Sapiens
catgcaacttgggatgatcacttggttaatattcaggctatcttgacagtctccacacccgtgatgcaatgtcccaggccagcctgcaggcctgatagaaactccacaaacctgcctatcacggggaagaggccttatccttcgccacataacctggctcgcctctgggttatgggtggggaatcagtaagtcctactgctgttcaggccctgaccccagttcccaggaaagcacaaggctagtgccaccagaggtccaggccctttgctggaggctccatcaactccactaccagtgggctaccagcagctccactagggttcctagaggaggcagcccagctgcagaagaggacaggaggatctacggtgtggcagcagccctgtcttagatcactggtggcctgcaaagaaggctggtccttaacacacaaggttcccccaaggcctctg

SEQ ID NO: 173579 - DNA, 227 bp, Homo Sapiens
caaatatgtcacatatctgattgaatttccagaggcttctttcttgtacgaccgggtacaaacaaggaatgctgcatttctaagatgatttgcttaacttttaaaattcctttctataatcactgctgcattctggcattagttccccatttgagatttaccttccagttaaactgtagtactacagttttatcctgttcaacatttctattacaaactgaaatact

SEQ ID NO: 173580 - DNA, 836 bp, Homo Sapiens
caggcatgcacgcttaggtgacgaaagctacttcttttctactcctttaaatattaggtagatcataaataacagatattattatggattctacctgcaaagtgtgtcttagcagatatgtgatgaatgggagtggacaagccattcaggaaacaggaggacttgggcttcctcttgaagctcaggtttgaccactgggttgttttctatgtctacaggtttaaatggctgagattcagttctctaatcacaactctccttttatctagaagaatttacaaagcttgaggtaatgactttgggaagaaatgatgtgtagtgagactatcactaagaatttaaatgtgattttttagacttatatggagaataagacatataaatccacttgataaattataagatctataaaaaagacataggatattaaatttttcttcagtttcaagtatgatagaatcatacagctgaagaaaacatcaccattctagatttttattaaaaaataaacaaacattagtcctactttttgtctctaacgcttcatgaatttatgtgtcagccttgtgcaggggctgtgctaatctctgcattgttcctattttagtacatgggctactgaaacaagcagagtcctacttcttaaacttcctcttccttacacgtaaaaagcccaccagtcaaggtcttttaattttggtgtacactatcactgaatgccatttataaattctaattttaaagagacccttaattttcaaaggaggactttgatagcacttagttttcagaaaagatgacttgcaattctaacttagaccctagctgcaatgcct

SEQ ID NO: 173581 - DNA, 374 bp, Homo Sapiens
aggcatcacttggatttcatgacgttatgaaaggtaggccttgaaaaagaacgtaagcttaaaacctttgccccactttcttcgatctgcctgaataagatttaaacaaacactgccaagggtaatagaccccagataaaggcttattagcatttggcttatgttgagtgcacagctcactgccttctgcttttcccatctgttttatttctggaggtaaacaaagtgctgaagagaaatccttgtgtacagtccttgtgtacagtactttagccagaaatacgttacactgactttaggcaggtgtgtgaattgtacaaaaccagacatgctattcagaggccttttgcaaaatacgttgcgcttcttagagc

SEQ ID NO: 173582 - DNA, 413 bp, Homo Sapiens
tgggcagtgggtgatgagatgggcactgtccgagtagccagcaccatgactgatggagccaatactatgattgagcacgatgacacgttgccatcacaactgggcaccatggtgatcaatgcagaggatgaggaagaggaaggaactatgaaaagaagggatgagaccatgcagcctgcgaaaccatcctttcttgaatattttgaacaaaaagaaaaggaaaaccagatcaacagctttggcaagagtgtacttggtccactgaaaaattcttcagattggaaaataccacaggatggagactacgagtttcttaagagttggacagtggaggaccttcagaagaggctcttggccctggaccccatgatagagcaggagattgaagagatccggcagaagtaccagtccaa

SEQ ID NO: 173583 - DNA, 1103 bp, Homo Sapiens
gggttctactgaagtgggcaaaatccccgagaagcagcggtgtccccagcctctcactcggagccgatatggggagtaaagtggcggacctgctgtactggaaggacacgaggacgtcaggagtggtcttcacaggcctgatggtctccctcctctgcctcctgcactttagcatcgtgtccgtggccgcgcacttggctctgttgctgctctgcggcaccatctctctcagggtttaccgcaaagtgctgcaggccgtgcaccggggggatggagccaaccctttccaggcctacctggatgtggacctcaccctgactcgggagcagacggaacgtttgtcccaccagatcacctcccgcgtggtctcggcggccacgcagctgcggcacttcttcctggtagaagacctcgtggattccctcaagctggccctcctcttctacatcttgaccttcgtgggtgccatcttcaatggtttgactcttctcattctgggagtgattggtctattcaccatccccctgctgtaccggcagcaccaggctcagatcgaccaatatgtggggttggtgaccaatcagttgagccacatcaaagctaagatccgagctaaaatcccagggaccggagccctggcctctgcagcagccgcagtctccggatccaaagccaaagccgaatgagaacggtgtctctgcccgaaggacgcctgcccccagcccccgcagccctctggccccctccatctcttgtccgttcccacccacccccctcactcgcccgagccttttcccggtgggtgtcaggatcactcccactagggactctgcgctaattacctgagcgaccaggactacatttcccaaaaggctctgctccaaggagcccaggaaagacgaggcaccttggccgcggggcctgctgggacttgtagttgcctagacagggcaccaccctgcacttccggaacccgccgctggagggccgtgaggcgttggtgtctcctggatgctactaaccccaacgccggggctttgcatggggcccaggggaggcctgagcttggatttacactgtaataaagactcctgtggaaaacc

SEQ ID NO: 173584 - DNA, 1189 bp, Homo Sapiens
  misc_feature (1138)..(1138): n is a, c, g, or t
agaaggccagtgatggactgccactttcaagtagcctccagtttcttgaagatgaactcgagtcttctcctcttcctgatctcactgaggaccaacctttcgacattcttcagaaatccttgcaagaggccaatatcactgaacagacattggcagaagaggcatatttggatgccagtataggttcaagccaacagtttgcacaagctcagcttcatccttcttcatcagcatcctttactcaggcttctaatgtttctaattactcaggtcagacgctgcagcctataggggtgacgcatgtgcctgttggagcatcgtttgcaagcaatacagtgggtgtacaacatggctttatgcaacatgtggggatcagtgttcccagccagcatttgtctaatagcagtcagattagtggttctggtcaaatacagttaattgggtcatttggtaatcatccttccatgatgactattaataacctagatggatctcaaatcatattaaagggcagcgggcagcaagccccatcaaatgtgagtggagggctcctggttcatagacagactcctaatggcaactccttgtttgggaactctagttccagtccagtagcacagcctgttaccgttccatttaacagcacaaattttcaaacatctttacctgtgcataacatcatcatacaaaggggtcttgcaccaaattcaaataaagtcccaattaatatacagccaaagcctatccagatgggtcagcaaaatacatacaatgtgaacaatttgggaattcagcagcaccacgtacaacaagggatctcttttgcttctgcaagctcaccccagggctcagtagttggtccacacatgtctgtgaacattgtaaaccaacagaacacaagaaagccagtcacctcacaggcagtgagcagcactgggggcagtattgttattcattcccccatgggccaacctcacgcaccccaaagtcagttccttatacctacaagcctttctgtcagttccaactcggtacaccacgtccagactataaatgggcaacttcttcaaactcaaccctctcagctcatttctggccaagtggcctcagagcatgtcatgttgaacagaaactcttncaacatgctcaggaccaaccaaccatatactgggcccgatgcttaacaacc

SEQ ID NO: 173585 - DNA, 471 bp, Homo Sapiens
agtgcatcaatgcttggggaggagtgagatgaagcctgcctatatggtatctgtgcactagtgggaggagctggggaggaggagatggagcctgcctatagatatctgtgcactaggggaggagctggggaggaggagatgaagcctgcctataggtatctgtgcactaggagaggagctggggaggaggagatggaccctgcctatagtgtatcttgtgcactaggggaggagctggggaggtgaagattgcctttggctatctgtgtacttggggtagagctggtgctgaggagatggagccttgctatgggtatctgtgcactagggatggagctggggccgaggagatggagccttgctatgcgtatctgtgcactaggggaggagctggtgaggaggagatggagcttgactatcggtatctgtgccctaggggaggagctggggaggaggagatggcgcctgcct

SEQ ID NO: 173586 - DNA, 185 bp, Homo Sapiens
cccttctgcttggagacatcagtctacctttgctctaggccagaaatggccaaaacattccattcctgtacctgtgcatgcattatgagagatccttaaactaatggtaaagggtaaaaaatgcatcggtggttagggacattcttattttctcttgtagagtgggggcagcaaacttctacatt

SEQ ID NO: 173587 - DNA, 355 bp, Homo Sapiens
tcgtttagggagttagttaaaagattgagaaacagaagggacatgcagatcgtctcacaggaaaaaatcccgaagagtggttgaaagtaagcccctcattgtatcacaaaagaaattctctatatctgattcttagagttttgattgagaataagtaatgaatgttagtaaatttcttctgagcattaatctccctctctcaaccacccaggaatctgcccaacctctatttttagcgcttagcttatcttaccttgtgttgcaattatgtgcgtctaggactttctcttcttgtacgcagaaggtttagttagagtactagccttgaattagtttatcatctctgtaaaaactc

SEQ ID NO: 173588 - DNA, 540 bp, Homo Sapiens
aagcttggcccagccagcaccaccacccccaaaacgaacaaaacaagagacagcagttttcagttacaatcttgggaaagatcaggagctttggaaaacgcgtggtaaacatgtctgtttctccttctacctccactcaacctgagctgcacccggacactttaaaggaggcatgtgtccagaggctgcatccagggatgcccagagggagcctgccctgctaggcctcctctcagagggcgcatcccaggcagaggagactggcctgggtgatcgttacctccacggcccagtagagtgtggaaaaacatgaggtgcccacagacaatggctgccagcgagtaaaggggaaagaaaccctgaggtaccatgattcttttctcttacttcctcaaatgctactgatctctccccaagtacaggctcaacagaaaaatacagtggtttgaggaccccaagaagtcagcacacaggccaggggccagctccaggctgggtctgtctctcccaccttgggaaacccagcgctaaaacaatttt

SEQ ID NO: 173589 - DNA, 900 bp, Homo Sapiens
  misc_feature (830)..(830): n is a, c, g, or t
  misc_feature (846)..(846): n is a, c, g, or t
  misc_feature (851)..(851): n is a, c, g, or t
acccgaaccacctccaataacacctatgaggtggagaaaactctgggcgtcgaggccgcccggacaacgatcatcaatgaaatccagtacaccatggtgaaccacggcatgagcatcgacaggaggcacgtgatgctgctctccgacctcatgacctacaagggtgaagtcctgggcatcactaggtttggcctggccaagatgaaggagagtgtgctgatgctggcctcctttgagaagacggctgaccatctctttgacgctgcctacttcgggcagacaggactctgtgtgtggggtgtctgagtgcatcatcatgggaatcccaatgaacattggaaccgggctcttcaagctgcttcacaaggctgacagggacccgaaccctcccaagaggcccctgatcttcgacacaaatgaattccacatcccccttgtcacatagtccaaagaaagaggggaccatgcctgaccttgactccttgtcctgtctccagctgatgtataaagagttttgtgctccctgggacgggggtcctgaggtccccacctatgccagcaatcagagaagccctcttggcatccccaggagcagcttctcctctgatagggtgcagctcacaccagtgaccctgactgtgccacgctgctcgggagagctgagggttttattgtttgcttgcttgaaacctaatctatagacggccccacagctcgtgcacacactgcttccctggacttaaagcccagccaggtgtcatggtccatcccagctcactgcatacatccatcggctccccatggtgtcttcacacctgacgatgagccangcctgaccccacacangccanggcacattcttggattttcattccttgggcatgctggaatctcttaatg

SEQ ID NO: 173590 - DNA, 302 bp, Homo Sapiens
gattatctccccttagttggcatttccaaagggaaagaaagggaaccctgtttatttcagtcagacatggctttgggtatcagtgaaacgaagctctgacagcagctccacctgcagaaggccaggcgcactcctgcagctcatcagaatgcaagcaggaaagcaggccagcaagcgagcatcagtcctgcacccacatccattagccaagtgattacatctccatcagccctggggtgtaataaagcaattgtaatcgggcattgttacaggatcaatgtttcctggtttaaaaataaaca

SEQ ID NO: 173591 - DNA, 610 bp, Homo Sapiens
atactgatacagtcgagctcggtaccgtctcatctgctgaatcacaacgggaatcggcaaacatcaggaaaacatttgatcatccaagcctagtgtgaaatggctttaccgcaaagtgaagatgcaatgaccggggacacagacaaatatcttgggccacaggaccttaaggaattgggtgatgattccctgcctggagagggttcctggaaataatctcggagcgcgttctgccagcctccgctccttcagttcggataggtcttacaccttgaacagaagctcctatgcacgggacagcatgatgattgaagaactccttgtgccatccaaagagcagcatctaacattcacaagggaatttgattcagattctcttagacattacagctgggctgcagacaccttagacaatgtcaatcttgtttcaggccccattcattctgggtttctggttagctttatggtggacgcgagagggggctccatgagaggaagccgtcatcacgggatgagaatcatcattcctccacgcaagtgtactgcccccactcgaatcaactgccgtttggtaaagagacataaattggacaaaccacacaccggacgg

SEQ ID NO: 173592 - DNA, 290 bp, Homo Sapiens
cagaagagagagctagtctcctccttgtcccagatgatgtgtcacctgttactgacgaaactggtcatatcattcatcaggggtcccctcttgtgtgttctcattcttcccgatacctcagcagcatcctttctaccacccccagcacagggcccgcctcagcctaagcccaggggtaactgagcctcaccaccaagacgtgtctgaggctctgcaaatgggatgaagcactgagccaacaggcgagatggacacacacaagccacagtccttctgggacagactctctg

SEQ ID NO: 173593 - DNA, 371 bp, Homo Sapiens
tgtcagccctaaagtgagggtgtcacacagaagcataccattgtctctgcccccagcatcagcaccagggctcagaaattttgtccaggggaagaagcaagccttataaaagagagtgctgaatgtctcctcaaaggaactgacttcatttgcacagaatatggagaagttcatgcctaagggtgcaggttgtgatgaaaggcacttggggtgacattaacacagtcattggagatataggttaacccaaaggccagctactttgctaggaggaatgggataactgagctagattgctagagtgaaaggaggaaagtggtagctgggaggaactatcccttcaaaagatagatcgcagtcagaagatgacg

SEQ ID NO: 173594 - DNA, 374 bp, Homo Sapiens
tagaagttaaccagaagaacaaagtgttagcagaaaagacaagattgatcaatatgactacatattaaagaaaaaggcacatctaagcaacaaaaactgcaatggtattaaaagccaaatacaagacttagaagatatttgcaatatttataacacattacaaaacactaatatctagaatgtatgcagaattcccaaaagtcaacaacaaaaagacaaacagccataaaaaagaatgcattcatgtcctttgcagggacttggatgaagctggaaccatcattctcagcaaataacacaggaacgaaaaccaacacagcatgttctcattcagaagtgggagttgaacaatgagaacatatgatacagaagat

SEQ ID NO: 173595 - DNA, 364 bp, Homo Sapiens
  misc_feature (26)..(26): n is a, c, g, or t
tctcatcttctgatcccatatcatcntgctgcacgttgagcacaagtggtggtttactacttgagtctgctttccgtgggcaagggggtgtccccttcagctgtgtcattgttgatgaggctggacagtcttgtgaaattgagactcttactccactcatccatcgctgcaataagctcatcctagtaggagatcctaagcagctccctccgacagtcatctctatgaaagcacaggagtatggctacgaccagtcaatgatggctcgcttctgcagactgctggaagagaatgtagaacacaacatgatcagcaggctgcccattctacagctcactgttcagtacaggatgcatccagacat

SEQ ID NO: 173596 - DNA, 493 bp, Homo Sapiens
gtctcatctcgatccaatacacgtgcaccagcaaacacggattagcaagttccattgatgtgcttgtgatgagatcctgcaaggcttttgcattgtttgaccgctccttgtatgggaaagaagacaacgacacgctggtccgctgtcctctcacagacccagaagtgaccaattattccctcaaggggtgccaggggaagcctcttcccaaggacttgaggtttattcctgaccccaaggcgggcatcatgatcaaaagtgtgaaacgcgcctaccatcggctctgtctgcattgttctgtggaccaggagggcaagtcagtgctgtcggaaaaattcatcctgaaagtgaggccagccttcaaagctgtgcctgttgtgtctgtgtccaaagcaagctatcttcttagggaaggggaagaattcacagtgacgcgcacaataaaagatgtgtctagttctgtgtactcaacgtggaaaagagaaaacagtca

SEQ ID NO: 173597 - DNA, 304 bp, Homo Sapiens
tctcatcttcgaatcctttgcttgataaaactcaattcatttcaaatgaaactcaattgattgctagattaatttaaacttaattcgtactaaagtctttcttttaacagttcctaccttgttgagttgtcgtgggaatcaagtggaaacttctttttcacatggaaagggcttagcatagcctggcacgtgctgagtgttcagtgcacactggttatgatgatcacagttagtgtctccatctttggtctgttcagcgctacagtgtttgggggccagctaggcagtgctgcagctgcagctc

SEQ ID NO: 173598 - DNA, 722 bp, Homo Sapiens
gagttctggagctataatcctcctgcttgttctatctgctgactctcgtttgtggtacaaagccatttcctcatgtgtcatttttaatcataaattcatcttcagttgggcttatttcttctgtaagaatcccttgaggtctaaggtatggacgtacctctcagagtcttttcctgtttcactagcttgaagcctgtttgtatattaatttctgagccatataatataaacccagttcccaaatgtaagcaaagtatagatcttgtgcttcaatttctcaggcaaacttttttcattttctctttgcatagagctcaagcaaatcaagacaagatttcttgtcgtctccttgtgtaatagggaagattttctttttctagcccaccctttcacctagagtgcagcacatcaaaaatctcaaccttatgcagaaatcttagttccgattcctttttgcatatggtaaaactcaacctgctaggaagagaacacctgaaataacccatctctacactcctcactctgctccagggcaatacagcataggttcaagggcttacagttttggtcggtagttccatttttgtttttggaaacaagattttcctatctttcctgtatattcaagaatgcatttaaaagaactgtcattctttattatgcagcttttgggcttacagttttggtttgtagttccatttttgtttttggaaactggggag

SEQ ID NO: 173599 - DNA, 176 bp, Homo Sapiens
gttaaatctctttcactttaacttgtgagctggttttcccagttctttgtaaatggtatttcattaagggttcataacgtgttgcaaattatattgggagatgattagtagagctcaaccttaagataaagcaattttcatgtgtaaattaggatgcagaagatgagacggtactc

SEQ ID NO: 173600 - DNA, 615 bp, Homo Sapiens
ctcaaggtgattagctactaggtagtggaattctagtgggtctagatctggacttgatggctgagttcttactaatataccttgctactttggaagaggaatagagtttcaacatgtgttgggcagaatattcaaagctaaagaaatagcttgcacaaggtagggagatgggaaagtgaagtgtctgtggtgatgaactgaagagtattgaaagtggacaataagactagaaaggtaaattaaagccagattttggaggcctttcaaagctgttcacaatgtttaaactttaatctgtagatgaggggagccatcaaaggatttttcaactagggagtgacactaggtttcaggtttgcttcattagcagtatggagtatgtgtttggaatctccacaggggtcagtacagaacaggatgacactgctaggagttggttctcaatatgtttcttcatttggtatattgaaatcagtaaaagtaaaatattttggaaatctcaggtttcctgtatttcaatttttttatgatgttatttggttagaactccccaaggcattttatttcatatcatgtttctcagcccatttgatatcttccccaaggtttttccca

SEQ ID NO: 173601 - DNA, 590 bp, Homo Sapiens
  misc_feature (438)..(457): n is a, c, g, or t
gactagagaatgtcagggaacacatgtgtatatttaaacaacttcactttgcatttaaaaactcgaaggacagcgaaggtgaaatcaattcacgggccacctagactttccagcctaggactagagctgtagcaatgatctgttgtgctgtacaagaaaagagaaagaggtgttcatttgagaacagatgtttttatacatcagagtaaaagctgtattgaagagcaggctgaatcccttccatatagaatgaaatatgagcttgaccccagtccttatcttcagttacctccataccaactggtggcatgttggatttagcatgtagaataatttcccatctcttatttttcccaagggttaatgggcaatccttctggggaccctggccttacatggtggaaactgaaattttttggatcctgggggtttcctaannnnnnnnnnnnnnnnnnnnccctccccctttcccaaaaaggttccccttaaaaaaggttaaagggggccaaaaacccctttgtggggaaaaagaggagaagcccccacgggggcctaaaaaggtttcttttagagggcgaaaaaacaagggg

SEQ ID NO: 173602 - DNA, 892 bp, Homo Sapiens
ggggtggaggaagatggctgccgcctgggggtcgtccctaacggccgcgacgcagagagcggtcactccctggccgaggggcaggctcctcacggcctccctgggaccccaggcgcgtcgggaggcgtcgtcctccagccccgaggccggcgaagggcagatccgcctcacagacagttgcgtccagaggcttttggaaatcaccgaagggtcagaattcctcaggctgcaagtggagggaggtggatgctccggattccaatacaaattttcactggatacagttatcaaccccgacgacagggtatttgaacagggtggggcaagagtggtggttgactctgatagcttggccttcgtgaaaggggcccaggtggacttcagccaagaactgatccgaagctcatttcaagggttgaacaatcctcaagcacaacaaggcttgctcctgggggggcatctttcccctatcaaactttgatgggatggactgggggactcctggggatggtcccccagtctggcacccaatttggaacgaaccttgcgaattagtgagaagttccagaaagctttaccttccgaattcatggtcccctcctcaatttttactttccccgcaagacccaggaaagtggatatggcctttgccccctatttatttcttcccgaaacgcggaaagaattttcactcccttgggcttttaatttttttcccatccacattccaggggctcaaaggccgcaatcccccccagaaaggcctggcttacccctccagagattaactccaccgtggggttgaaaaacttccctcaactcaatcccgggcttagagccccctcccctggagctactcacaaaaatattgggaaaatatcacctttttccg

SEQ ID NO: 173603 - DNA, 310 bp, Homo Sapiens
tagcatgcaagcttggcgtcataattcacaaagtgttttgacatataaatgaggtgaacaaacacaggaaagtgctaggtttcctgggggtataatagatgctctataattagcagtaaatattcttgtttaagtcactttttggctacaagtaagagattagaaatatccagcataaagagatggcattaactctgcatgtaaagaaaacacatgtatacccaggctgtacaactgcctctgaaattaagaggaattgtgtttatttcatagttatctctggtacttcactgttattttattttcaccc

SEQ ID NO: 173604 - DNA, 418 bp, Homo Sapiens
tctcatcttctgatccaacagaattcatactggagagaaaccctacatttgtgaagaatgtggcaaagcctttacctactcctcaacccttattaaacacaagagaattcatatggaagtgagaccttacaaatgtgaagaatgtggcaaaacctttaagtggttcccagacctgactaatcataagagaattcacactggcagagaaaccctacaaatgtgaagaatgtggcaaaacctttacctgctcctcaaaccttattaaacacaagagaagtcatactggaagacagaccttacaaatgcaaagaatgtggcaaaacctttaagtggttcccagaccttactaaacataagataattcatactggagataaaccttacaaatgtaatgaatgtggaaaagcttttacgtgga

SEQ ID NO: 173605 - DNA, 656 bp, Homo Sapiens
tctcctcttctgaatctgctcctgagctaggtaggaaacatgagcggcaccaacttggatgggaacgatgagtttgatgagcagttgcgaatgcaagaattgtacggagacggcaaggatggtgacacccagaccgatgccggcggagaacccgattctctcgggcagcagccgacggacactccctacgagtgggacctggacaaaaaggcttggttccccaagattactgaagaattcattgctacatatcaggccaattatggcttctctaacgatggcgcatctagttctaccgcaaatgttgaagatgtccatgctaggactgcagaggaacctccacaagaaaaagccccggaacccactgatgccagaaagaagggagaaaaaagaaaggctgagtcaggatggtttcatgttgaagaagacagaaatacaaatgtatacgtgtctggtttgcctccagatattacagtggatgaatttatacaacttatgtccaagtttggcattattatgagagatcctcagacagaagaatttaaggtcaaactttacaagataatcaaggaaatcttaaaggagacggtctttgctgttatttgaaaagagaatctgtggaacttgcattaaaacttttggatcagaagatgaga

SEQ ID NO: 173606 - DNA, 954 bp, Homo Sapiens
ggctgttcagagtgacatcgtaatcagtcaactcagttgacatttggagtataggcaccatatttgctgaactagcaactaagaaaccacttttccatggggattcagaaattgatcaactcttcaggattttcagagctttgggcactcccaataatgaagtgtggccagaagtggaatctttacaggactataagaatacatttcccaaatggaaaccaggaagcctagcatcccatgtcaaaaacttggatgaaaatggcttggatttgctctcgaaaatgttaatctatgatccagccaaacgaatttctggcaaaatggcactgaatcatccatattttaatgatttggacaatcagattaagaagatgtagctttctgacaaaaagtttccatatgttatatcaacagatagttgtgtttttattgttaactcttgtctatttttgtcttatatatatttctttgttatcaaacttcagctgtacttcgtcttctaatttcaaaaatataacttaaaaatgtaaatattctatatgaatttaaatataattctgtaaatgtgtgtaggtctcactgtaacaactatttgttactataataaaactataatattgatgtcaggaatcaggaaaaaaatttgagttggcttaaatcatctcagtccttatggcagttttattttcctgtagttggaactactaaaatttaggaaaatgctaagttcaagtttcgtaatgctttgaagtatttttatgctctgaatgttttaaatgttctcatcagtttcttgccatgttgttaactatacaacctggctaaagatgaatatttttctactggtattttaatttttgacctaaatgtttaagcattcggaatgagaaaactatacagatttgagaaatgatgctaaatttataggagtctgagctaactgcggggatcctc

SEQ ID NO: 173607 - DNA, 1156 bp, Homo Sapiens
ggggcacttggcttcaaagctggctcttggaaattgagcggagagcgacgcggttgttgtagctgccgctgcggccgccgcggaataataagccgggatctaccatacccattgactaactatggaagattataccaaaatagagaaaattggagaaggtacctatggagttgtgtataagggtagacacaaaactacaggtcaagtggtagccatgaaaaaaatcagactagaaagtgaagaggaaggggttcctagtactgcaattcgggaaatttctctattaaaggaacttcgtcatccaaatatagtcagtcttcaggatgtgcttatgcaggattccaggttatatctcatctttgagtttctttccatggatctgaagaaatacttggattctatccctcctggtcagtacatggattcttcacttgttaagagttatttataccaaatcctacaggggattgtgttttgtcactctagaagagttcttcacagagacttaaaacctcaaaatctcttgattgatgacaaaggaacaattaaactggctgattttggccttgccagagcttttggaatacctatcagagtatatacacatgaggtagtaacactctggtacagatctccagaagtattgctggggtcagctcgttactcaactccagttgacatttggagtataggcaccatatttgctgaactagcaactaagaaaccacttttccatggggattcagaaattgatcaactcttcaggattttcagagctttgggcactcccacataatgaagtgtggacagaagtggaatctttacaggactataagaatacatttcccaaatggaaaacaggaagcctagcatcccatgtcaaaaacttggatgaaaatggcttggatatgctctcgaaaatgttaatctatgatccagccaaacgaatttctggcaaaatggcactgaatcatccatatataaatgatttggcacaatcagattaagaagatgtagcctttctgacaaaaagtttccatatgttatgtcaacagataggtgggtttttattggtaactcctggccaattttggcctatatatatttcttttggaaacaaaacttccagctggtacttcggcctttcaaatttttc

SEQ ID NO: 173608 - DNA, 845 bp, Homo Sapiens
  misc_feature (557)..(599): n is a, c, g, or t
tatgatcgagatttccgtgataggggtgagttgaggattcgagagtatccagaaagaggagatacatggcgggaaaagcgagattatgttcctgacagaatggactgggaaagagaacggttgtcagacagatggtacccatctgatgtggatagacattcccccatggcggaacatatgccctcctcacatcattcctcagaaatgatggggtccgatgcaagcttagactctgaccaaggccttggaggggtaatggttctcagtcagaggcagcatgaaatcattttgaaagctgcacaagaactgaaaatgcttcgggaacagaaagaacagcttcaaaagatgaaagacttcgggtctgagccacagatggctgaccatctaccacctcaggaatcaggattgcagaatacatcttcaagacctggaatgtatccgcctccagggtcgtatagacctccccctcctatgggcaaaccaccaggttcaattgtaagaccctctgctccaccagcaagatcatctgttcctgtgaccaggccacctgtcccaannnnnnnnnnnnnnnnnnnnnnnnnnnnnnnnnnnnnnnnnnnagtgataaagccacaaacttcagctgtagaacaggaacgatgggatgaagattctttctatgggctctgggatacaaatgatgaacaaggactgaattcagaatttaagtcagaaactgcagcaattccatctgctccagtattaccacccccacctgttcactcttccattcccccttctggcccagtgcctatgggtatgccaccaatgtcaagccaccaccagtacaacagactggtgattat

SEQ ID NO: 173609 - DNA, 322 bp, Homo Sapiens
  misc_feature (12)..(12): n is a, c, g, or t
agctgcatgccnaggttatctagaggatcccgtctcctcttctgaaccccagcccctctcaaaccccctcatctcatgatagtgacacccgagatgggcctgaagaaggtgctgaagaagagccccctcaggtgttggagataaagcccccaccctctgctgtcacacagcgcaacaaacagccttggcatccagatgaagatgatgaagagtttactgccaacgaagaggaagcggaggatgaagaggatactatagcagctgaggaacagttggaaggggaggtggatcatgccatggagctgagcgagttggctcgaga

SEQ ID NO: 173610 - DNA, 551 bp, Homo Sapiens
aaaagaatctctaaggtcaggatgccatttgctcaggtggagaggatgaacctgagagagcaaatcaagattttgaccatgttaagtttggaacacctgttagatagccaagtgaagatgttgcagaagaagttggagtctggagttccgatgagaggtggaggctggcaatagaaattggagaggcatcaggatcaaattgccatttaaaaacagagaactagatgagatgaatcacctagggagtaagtattaatggagaatgagctctggagcacctggaacctttggaaataagaggatgaggagaatctggcaaaggaaactgagaaagagaaaccaatgacaaagggtagatgattctagggagaaaaccaatagggtccacctaggagagcaagaagagaggtgctgttgccctttcacatgcctccaagggtcaagtggtgccactggatttgaaaagtagcagaaggtcattgattactttagagagagcagcttgcaaagtcataagtcagcagctggacaatattggattcaaatgagac

SEQ ID NO: 173611 - DNA, 468 bp, Homo Sapiens
tctatcttccatcccctctcagagcttgatgcaaattaagaattagaccttaggtgaattctcagcataaccttgaatggctatattgatgtattacaagggttaggacaatcctttgatctgacatggagagatataatgttactgctaaatcaggcactaaccccaaatgagagaagtgccgccatagctgcagcccgagagtttggtgatctctggcgtctcagtcagttcaatgataggatgacaacagaggaaagagaatgattccccacaggccagcaggcagttcccagtgtagaccctcattgggacgcaaaatcagaagatggagattggtgccgcagacatttgctaacttgcatgctagaaggactaaggaaaactaggaagaagactttgaattattcaatgatgtccactataacacagggaaaggaagaaaatcctactgccttcctggagaga

SEQ ID NO: 173612 - DNA, 794 bp, Homo Sapiens
  misc_feature (429)..(429): n is a, c, g, or t
  misc_feature (464)..(465): n is a, c, g, or t
gggggaagcggctcctgtcagttgttctcaggtgtttgggcttgttgttccgtatactcagtgggttcgcggccgccggcccagtgaggctgggttcgaggagctggagcgggaaactggagcttaaattctggcggcgagatggacattctgaaatcagagatccttcggaagcggcagctggtggaggacaggaacctgctggtggaaaataaaaaaatttcaagcgtagtgagctcgccaaaaaagaagaggaagcatattttgaaagatgtggctacaagatacagccaaaagaggaggaccagaaaccattaacttcatcgaatccagtgttagaacttgaactggcagaggaaaaattacctatgacgctttctaggcaagaggtcatcagaagattgagagaaagaggagaaccaatcaganctatttggagagactgattatgaatgcttttcaanncgtttaaggaaaaatagagatcctcaccaccagaaagtaacaagggattgaggaatgatttgaaagcagccttggataaaattgatcagcagtacctcaatgaaatccccggcggtcaggagcctggaaaggaagacacccaaaatgatctgaaaggtcctgaggaaaacccccccatttgaaaagttagaggggctttggagaatcccttagggaaaggggttgattcttaaaaaattgggacctcatcaccaaattcccggaaaaatcttcccggctggaattttaaagaatcccataacggggtatttattaaattcctgggttcc

SEQ ID NO: 173613 - DNA, 778 bp, Homo Sapiens
ctcttctgaatcgtggagttttagcttcctcctttgaagtgtctcgccacctggaattctacctcctctggactcacaaactgctcatgttgcacggacagaagctgaagtccagagccgggacgctgctgcctgtcattcagttcctccagaagagcatacagcggcacctggacgacctgtcgaaactctgtagctggaaccactataacatgcagtactgcactagcagtttccaagcacgcggggcacaaaacgctccctagacccgctgggaagtgaggaggaggcagaagcatctgaagatgacagcctgcatctgcttggaggaggaggctagagactcagaagaagagatgctggcctaagagccagccggttgcagcgtaggattgtgccggctaagacctgccagggagatgggacccttgtgccacctgggccagcaaagaggaggggtccagagaacagctgaaatactgtcactagtggtagtgacttgcttttcctgtgcacacatgtagcccatcaggacagcgagccgacgggtcacgccaggggccggcacgcactggcacctggccccaggagcggggccgtgtgaacggtgatgaatgttgaaaatgcgtctcagagaggtattcacatgaactttgtatgagacttatttatatttttaacataaaggtttgataaagaacttagggattaaaaaaaagatggagttttctaacgtgaggatgaagtctacacttcagattaaaaagggttatgttgt

SEQ ID NO: 173614 - DNA, 1446 bp, Homo Sapiens
ttactgccaccggctacgttgtggtgacctcatccatggacgggaccgtgcgagcctttgaccttcacaggtaccgaaacttccgcaccttcacctctccacgccccacccagttctcctgtgtggcggtggatgcgagcggtgagatcgtctctgcaggggcgcaggactcctttgagattttcgtgtggtccatgcagacaggcaggctccttgatgttttgtctggacacgaagggcccatcagtggtctgtgttttaacccaatgaagtccgtcctggccagtgcctcctgggacaagacggtgcgcctatgggacatgtttgacagctggaggaccaaggagacgctggccctgacctctgatgctctggctgtgacttttcgccctgatggtgcggagctggctgtggccacactgaactcacagatcaccttctgggaccctgagaacgcggtgcagacgggctccattgagggcaggcatgacctcaagactggcaggaaggagctggacaagattacagccaagcacgcggccaaggggaaggccttcaccgccctgtgctactctgcagacggccacagcatcctggcgggaggcatgtccaagttcgtgtgcatctaccacgtccgtgagcagattctcatgaagaggttcgagatctcttgcaacctgtctctggacgccatggaggaatttttgaaccgaagaaaaatgacagagtttggcaacctggcactaattgatcaggatgctgggcaggaggatggagtcgcgataccactgccaggcgtcaggaaaggtgacatgagttctcggcacttcaaacctgagatcagggtgacctcactccgcttctctcccactgggcgctgctgggcggccaccaccacggagggactcctcatctactccctggacacccgcgtgctctttgacccgtttgagctggacaccagcgtcacccccgggagggtgcgcgaggcactgcgccagcaggacttcaccagggccatcctcatggccctccggctcaacgagagcaaactggtgcaggaggccctggaggcggtgcccaggggcgagattgaagtggtcacctcctcccttcctgaactgtatgtggagaaagtgctggagtttttagcttcctcctttgaagtgtctcgccacctggaattctacctcctctggactcacaaactgctcatggttgccggacagaaactgaagtccaggagccgggacgctgctgcctgtcattcagttcctcccgaaagagcatccagcgggcacctggacgacctggtcgaaaacttctgtagctggaaaccactataacatggcagtaccgcacttagccagttttccaaagcagcgggggcacaaaaacgctcccctaaaaccccctgggaaaattgaaggaggaaggcaaaaacct

SEQ ID NO: 173615 - DNA, 196 bp, Homo Sapiens
tgtctgtgagttgggttgcctccctagccctatttaggccccatctccatgatcgatgctaggtaaatgtcttcttaagaaatagagccagcccctcaaatccagatcttgggaaccaaatggcatgcacgctagaaggggcactccctgcttctctttctacatagcgttggagaggtattttcccactgtgtga

SEQ ID NO: 173616 - DNA, 260 bp, Homo Sapiens
gatccgcaagcagcgcgagctgcaggagcgcatccagagcagggtgggccagcggggcagtgggctgtccatgtcggccgcccgcagcgagcacgaggtgtcagagatcatcgatggcctctcagagcaggagaacctggagaagcagatgcgccagctggccgtgatcccgcccatgctgtacgacgctgaccagcagcgcatcaagttcatcaacatgaacgggcttatggccgaccccagaaggtgacaaagccgcc

SEQ ID NO: 173617 - DNA, 534 bp, Homo Sapiens
  misc_feature (282)..(334): n is a, c, g, or t
ctcacatgcttaaagagcataaagatcacaggtgaaggccaattagaacactgatgagggtctgtgtccgctgtgtacacattgtcttgataaacatcttaacaggaaacaaggttcaagagcagagaaccagtctgactagaattcaccaggctggaatttcccaatcctagcaagcctgagggtactgcaggagaccaggctgtatttcagtacttatttcaaccacataagacagacactcccagagcggccgtctatagacctacccccaggaatgcnnnnnnnnnnnnnnnnnnnnnnnnnnnnnnnnnnnnnnnnnnnnnnnnnnnnngtgatattctcttactcacacgtccatctgtaggccctctgcaagaagaaaaacatggctgtattctgcccaaccctgcaggcagtcagatcttatggttatcttccctcattccctgaaaatcgctgttattctgttctttttcagggtgcactgatttcatattgttcacacacccatgttttacaatcagatttgat

SEQ ID NO: 173618 - DNA, 273 bp, Homo Sapiens
tgtgaagcacacccctacttacacggttaagaatagccactgctacaggaaccagaatagcctgtttatctacttcattatcctactaccacacactctcaaaggatttctcaagacagtttgcaagaaataacaaaatctatccttactctacaatcccaaatagactctttggcagcagtgaatatccaaaaccgccaaggcctagacatcctcactgctgagaaaggaggaccttgcaccttcttaggggaagaatgttgcttttacact

SEQ ID NO: 173619 - DNA, 1601 bp, Homo Sapiens
  misc_feature (71)..(93): n is a, c, g, or t
  misc_feature (491)..(491): n is a, c, g, or t
  misc_feature (536)..(536): n is a, c, g, or t
  misc_feature (678)..(678): n is a, c, g, or t
cgccccacgcgtgtagtaatcagccttaggagatctcaaccctacgcagattttatctcctctagtgtgcnnnnnnnnnnnnnnnnnnnnnnnactgtagcgggaggagcctacccgctctccccccgcgggtagcgtggtagcagcaacataaggccgggcgatggggatttgtttcgtgccgtgggaggcgggtgagtcaccgcacacaacatttagtaggggggctccgatgagctcggtgctcgccgctccatacgtcggccgcagtgccactgcgctcctaccctagtacgtacgtcatcgcgtgtgccgcgagttctgcgcgcgcgtaggcgtctatcgttgcacttcgtcgcgtccggcgacgtcgctgcctatcgctcgtaccgtccggaccgatacccaccaccaaacgatagtcgaacgccaccacagcccgcttgtggtccagattggcgatgcgaggccgccggtgcaatacggcgtcngcccacagtccggccgcctttcagccgaggtccgggtgtgccgtnccaaaaggcgctttgtgccagcaggagatgcggcgctcgggatggcccccttatccggttcacgtgtcggggggagcctttgcgggccgctcggcggtagataaccattccaggcccgtgatcccgagggcagggtgtgcgnaggggcgtcgcagacacggttagagcttgtacgcggaggcctgtattaactatcgcgaggccgaggccgggtgtggaggtcggccggtgtgccacccgcccccgggggggcggccttgtgcctaaatttgtgggggtgcaggaatacccccatccgtggtaggctacggcacagggggcccctatggctccggccctaagggaccaacccggtccctcggccccgatggtgtccggttgcgcctacacagaccgccggggcggcgcccacgggatcttttaggaaggcttcgccggcgacccgacgcggggcggcacgccctgatgaccgtacctcatatccggggtgggggacattttcttctgggtcagctcatggggaaggtcaccaatccgagggcggaatatctacctcttggaccagacacttgaggggggacctgggcaacgttggtgttcctctctgagataagattcgcaaacctgcccgatgccatgccatagagcagtctaagttcatcagtgcccaagccaccagttacattccaagagcttacagcgtatcaggtcagcagtagaagcccactgccagaggggagttcgttgcctgacctgctcctccacaccgtgatgcggttaagcgcgtaccgctgcaacttatggtcgtcacagaacagataaaccgtcacctggtcccactcggccctgctgagccaggcgaccacgatgccgtgggccaagagtggcaacgaccctttccctttaacgcactttccgtaccacgcactccacacgagatccatcccctgggaacctagacctggcccggccccggattcccacgacatactgagctcaacaacaggctctgtgccgcgccgctccgcacagccttcagctcagcgtgctaccctcactcccccc

SEQ ID NO: 173620 - DNA, 624 bp, Homo Sapiens
tctcctcttctgtatcacatcagttctatcaccaagtcttctaagtactctctccaaaatttacccccaatatattgaattcctctccatttctacagctcctgtgaggaataactaacagtggatatagttggattgcttggttcttgaaagttcacttgttccctcccatccctagggctgaattattgtaaccaaggaagtgagaattcagaaaggtaagtatcagggtaaacttagacgattgtaatactgaaatgcttactcccagagttgtatccccatgactctctaccctactcatcagtagagatacaaaagctaggtgatgctaggctgtagccccttgttcctgcagtgttcctttgtagctgatgtgcctggtctccctggggagtatgaattcagaggggaacatctgcatttcctgtctggagtgtagtcactataagagaaaagtaacaaaccgaacaacatggagcaggtaaagcaaaattattggaatagtcagaataaaatttagctataagcatattacatattctcgaaaaaatagagcatgctagaaacatgaagcaagaaggagaaaccataaagaacaacaaacaggagctaagtggggat

SEQ ID NO: 173621 - DNA, 424 bp, Homo Sapiens
taaaccaatttaaaaaatgattacaactactggtaaatgacatggatgaatctcacaatgttgaccagttactaagtgagtcaaggagggaataagagttgtgactaggaagtagcagaggcagtttgtgactggagaccagtaatgttctatttactgatccagttgtgaagagatgggtgtttctactacaacgttaaactatgaatatctggattatgtactactttgtatgcatatttttgtttcacaatgtgaaataaaaagggtattataaactttatgccagtaagtttgaaggtgtataagaaagaaaccaattcctggaaaaaatgcaacttgccaaaatgacataggaagagatacaaaatctgaatcttcttaaatctatttttaaaactgggccgggcccagtggctcacac

SEQ ID NO: 173622 - DNA, 261 bp, Homo Sapiens
cccgtctcatcttctgatccatttatcagcaggagaagaacttaatacatattctaccatgctcacaccaaggcctccactttctgatcgcggagacagtattgcatttacttcactgtttccatgaaaaccctgtccagatcttctctgtaccataataggctgggacattgaatggtgagaagctccccatgcagtctctctccattcatcatccccaagaaatatgcctttttggtccatctttctgttgaatcattc

SEQ ID NO: 173623 - DNA, 867 bp, Homo Sapiens
acccacgcgtcgcggacgcgtgggtcgacccacgcgtcggcgggagctccgcgtgtagctacgccggccgcctggctttgagacaacgtgattctccgcagctggtcgcctacccgtgatgttctgcccacgtcgagacctgagctgaaatggcagacgatctcggagacgagtggtgggagaaccagccgactggagcaggcagcagcccagaagcatcagatggtgaaggagaaggagacacagaagtgatgcagcaggagacagttccagttcctgtaccttcagagaaaaccaaacagcctaaagaatgttttttgatacaaccaaaggaaagaaaagagaataccaccaagaccaggaaaagaagaaagaagaaaattactgatgttcttgcaaaatcagaaccaaaaccagggttacctgaagacctacagaagctgatgaaggactattatagcagcagacgcttggtgattgaattagaagaactgaacctgccagactcctgtttcctcaaggccaatgatttgactcacagtctttcctcatacctaaaagaaatttgtcctaagtgggtaaaacttaggaagaaccacagtgagaagaaatcggtcctgatgctgatcatctgcagctcggccgtccgagccctggagctcattaggtcgatgacagcattcagaggagacggcaaagttataaaattatttgcaaagcacataaaggtccaggcgcaggtaaagttgctggaaaaagcgtgtgggtgcacctggggtgtaggaacctccggggagaattaaagaacttgttaaacaaggttggccttaatttgagccccttaaaatttctggtttttgactggaa

SEQ ID NO: 173624 - DNA, 516 bp, Homo Sapiens
tctcctcttcttatccttagaactacccactgcagcatgatcaagtgacctgttgactcttggcaggtttatcatgtccaaaaccaaaccaaacctaactactgactctggagttctttgcaacatgaaagcctacatttttaggttgggcaccttcaacatgactccaggtctcattctcccaaccgtagttgaataaaacccacagcctcctagaactcaaaggcacctgagcttggagccacatttgttataaagctgagtaaaaggacacccaggccgcatggatgagctgaggaccctgtgcagacacgtccatggagcttctagcacaggcctctctccatgctgcctcctttcttccctttatttttataagctgtccgtttctaaaatgttttttcttttgcacttgggcctcttttcctttccaattcaggaaaaggctttaagtgcctagtatcttgttctatggcacagatctcttgggcatgaggagaaggaaagcacttaaaa

SEQ ID NO: 173625 - DNA, 495 bp, Homo Sapiens
  misc_feature (80)..(80): n is a, c, g, or t
  misc_feature (130)..(130): n is a, c, g, or t
  misc_feature (148)..(148): n is a, c, g, or t
tctcatcttcgatcgttcaaatgcagcaccattaagtaacacaaaaaaagcatctgggaagactgtatctactgcgtaanagcaggagtgaaacaaccagaaaggagtcaggttaaagcaagaagtatcngtatgtcactgaaacctngagtaccactaaggagaatagaaggtgcagccgaaatagcggacaaattgaagtggtacctgaagtatcagtgtcttcaagtcattcttcagtgtcatcttgtcttgaaatgaaggatgaagatggattagattctaagcataagtgtaataatccgggagaaatagatgtgccatctcatgaattaaattgttcacttctttcagagacttgtgttactattggagaaaagaaaaatgaagctttgatggaatgtaaagccaagcctgttggtagtccattgtttaagttttcagataaagaagaacatgaacaaaatgattccatttcaggtaaaacgggtgaga

SEQ ID NO: 173626 - DNA, 981 bp, Homo Sapiens
  misc_feature (900)..(908): n is a, c, g, or t
ttggtaatccatgcttaaaagtgctgaggctatccaaatttcacttttccagtggccccgttgttcatcttctatctggttccctactttctgccctctatgaaaaagcaaaataaaagctcaccacttccgtcaaacatgtctgtaattctataagcaaaacaaaatacaaatttccactctttctcattgcaaaccaaactgaaaagttaataagtgacttaacgtgtggcagtttagtgcaacttaaatggaagtgtcaccatgatccttgtatttgaactctgtacaacgaattacatatggtaagtatatacaatatttctgtacattgccagagacattttagggcagtaattgtattaaaaccacatctactgtaaataatgttaggttcttttcatctcaaaccactttattcttgtctacttactcgttatttgcatgatagtttgtgaattatcaaaataccacttaactctttttaaaatattaataatatttatgcaagttgattgttaatctgttataaaaggtttcacgcaaaggaaaaaaataaggactataattctatatacatctctataaacctgttgtgctatggggttgtagacctaccagactgtgagccagtttattaaaagaatactgtactttttcctttaaaaactatttttgtgactttacaaggtaaaaatttacaaaatatgtgacagctttttatttttgatacagttacatcatatacaggcattctgtgctttgccagcaatccaatctgataggtctccactcagggctgaatataatttataattcatcccccaccccccaaatatacacaagaaccctaaaaaatttacaaatggatgaataaagtcaataaatagttttgctttnnnnnnnnnttgaagattcatagttgagttgtgttttgataattcacacacaaaaaaattcttttcacatggttaaattatc

SEQ ID NO: 173627 - DNA, 443 bp, Homo Sapiens
  misc_feature (192)..(304): n is a, c, g, or t
tctcatcttctcgaatccccaggtcttgcataaaatctgcccagggaagatggcccataaatgctggataaattgaacgaatgtataaaagaagcaagcctacctacagtcctctacacaatactcactctctcctccatctttcccaatgttcatcctttttccagagtaacctgaaaaccacacacctannnnnnnnnnnnnnnnnnnnnnnnnnnnnnnnnnnnnnnnnnnnnnnnnnnnnnnnnnnnnnnnnnnnnnnnnnnnnnnnnnnnnnnnnnnnnnnnnnnnnnnnnnnnnnnnntcttcaaacttatcgttcaaaacccacttcctctacccagctctcaccattcccagaggactgtcctccatctactcccctcctcctttctgagggaaaactgccttctgtaaatctctactcatcacaccatcctgtc

SEQ ID NO: 173628 - DNA, 360 bp, Homo Sapiens
tctcctcttctgtaatcgctgaaatgaaagagcagatggaaaaagtggaggcagatctaactagatccaaatctcttcgtgagaaacaatcaaaggagttgttatggcaactggaggacatcagacagcggtatgaacaacagatagtagagctgaagctggagcatgaacaggagaagacgcacctattacagcagcataacgcagaagaaggatagcctagtccgagaccatgaacgggaaattgaaaacctggaaaaacagcttcgcgctgccaatatggagcacgaaaatcaaattcaggagttcaagaaacgagatgcacaggttattgccgacatggaggcccaggttcacaag

SEQ ID NO: 173629 - DNA, 1299 bp, Homo Sapiens
aggagatgcaccactggataaccccgctgcagaggtccaaaggggacaccagagtggagggccaggaattcatcgtgagaggatggttgcacaaagaggtgaagaacagtccaaagatgtcttcactgaaactgaagaaacggtggtttgtactcacccacaattccctggattactacaagagttcagagaagaacgcgctcaaactggggaccctggtcctcaacagcctctgctctgtcgtccccccagatgagaagatattcaaagagacaggctactggaacgtcaccgtgtacgggcgcaagcactgttaccggctctacaccaagctgctcaacgaggccacccggtggtccagtgccattcaaaacgtgactgacaccaaggccccgatcgacacccccacccagcagctgattcaagatatcaaggagaactgcctgaactcggatgtggtggaacagatttacaagcggaacccgatccttcgatacacccatcaccccttgcactccccgctcctgccccttccgtatggggacataaatctcaacttgctcaaaagacaaaggctataccacccttcaggatgaggccatcaagatattcaattccctgcagcaactggagtccatgtctgacccaattccaataatccaggcatcctacagacagggcatgacctgcgacctctgcgggacgagctgtactgacagcttatcaaacagaccaacaaagtgccccaccccggcagtgtgggcaacctgtacagctggcagatcctgacatgcctgagctgcaccttcctgccgagtcgagggattctcaagtatctcaagttccatctgaaaaggatacgggaacagtttccaggaaccgagatggaaaaatacgctctcttcacttacgaatctcttaagaaaaccaaatgccgagagtttgtgccttcccgagatgaaatagaagctctgatccacaggcaggaaatgacatccacggtctattgccatggcggcggctcctgcaagatcaccatcaactcccacaccaccgctggggaggtggtggagaagctgatccgaggcctggccatggaggacagcaggaacatgtttgctttgtttgaatacaacggccacgtcgacaaagccattgaaagtcgaaccgtcgtagctgatgtcttagccaagtttgaaaagctggctgccacatccgaggtggggacctgccatggcaaattctacttcaaactttactgcttcctggacacagacaaccgtgccaaaagacagtgtg

SEQ ID NO: 173630 - DNA, 360 bp, Homo Sapiens
tctcatcttctgatcgcactggataggttcctgcagagacaactcggactatatctctcaggttcagcttcacagaagatgtgcagaatgtacgtctcatctattgtaggctccttgtctcccaccgcaatccagtagccttcaacctggataagccgacctccttttggctctggaataggctgcttcagcagactcttgacattgccagggacaatgtgttgacagatgagcgtctgaactattgggtgtgatgccctgtcaagctgtgttaagaaacccaaacaaaaaccctcatagagtgagcgctgaatgtggccacatggattggaggctgcaaatcgcagggcccggcacaga

SEQ ID NO: 173631 - DNA, 1114 bp, Homo Sapiens
tcatcttctgatcgaagaaagggtagtggcagtgaacaagaaggtgaagatgaggagggtggtgagagaaagaagaaaaagaggagaagacatccaaagggagaagaaggatctgatgatgatgaaacagaaaatggccccaaaccaaaaaaacgacgtccaccaaaagcagagaagaaaaaggctcccaagccagaacgtctgcctccatcaatgaagggaaaaataaaatccaaagccataatttcatcaagtgatgactcttcggatgaggataaacttaaaattgctgatgaaggacatcccaggaacagcaacagcaacagtgactcagacgaggacgaacaacgaaagaaatgtgcctcatcagagagtgattccgatgagaaccagaacaagtctggcagcgaggccggcagtccccggaggccacgaagacagcggtcagatcaggactcagacagtgaccagccatccagaaagagaaggccctccggttctgagcagtctgacaatgaatctgtgcagtcagggagaagccactcaggagtttctgagaacgactctcgcccagcttctccaagtgccgaatcagatcacgaatcggagagaggatctgataatgagggttctggccaaggctctggaaatgaatcggaaccagagggatccaacaatgaggcctcagatagaggctcagaacatgggtcagatgatagtgactaggttttatttcatcaataagcttcatctctggaggaaacttttttaatatatgaaagctgtgaaaaaaatggttccgatgtttagtcaattgcgaaaatttttcttaaggcaattttccttttcaacaactttggatattactaaggcccccagagaaattttccctgggcttaaaactccattatttttgaggcctcccccgggcaaaatggagacttaattctttggggggaaacaatttccccccccattacaaatgggaaaaaactggccgtcacaaaattaaacccccggaaggcgttaaattcattcccccacacaaaagggctttgtacctggcaaactcggggggcaagaaagggcctcccttccgtctcctccgcaatgg

SEQ ID NO: 173632 - DNA, 459 bp, Homo Sapiens
gtctcatcttcgaatcctctataaaatatgaaaagagaaaattttaaatttgggttgctggaatattgagactcagagaatttgaaactttttccataaccatagtaaggctaagatttattaagtactcagatacatctcatgtcacatggttggttttcagctaagacaggattggaagcagagtttcctgaatttcaggctctatttttcctcacctacaatgaactattttgcctgtgcacataatgggtttctgttaggaatgaaatatattttgtcctgaatctgtttacatttcaggaaaagcagatcagttctggaccagagcttgtcatattcgagataaaatctctcttccaaatatccctcccttgcacatttgatttctgattggcttccctcccttttctcctccttcttctccggtttttatttctattgtccagatcacatgtg

SEQ ID NO: 173633 - DNA, 900 bp, Homo Sapiens
ggtcctgagaaaactcccctttctggctcatgcgctgtatgtccaggcccccaccgtcaccatagaggggttcctccaggccctgtctctggcagtggacaagcagtttgaagagagaaagaagcttgcagcttacatctgatcctgggcttccccatctggtgcttttcccatggagaacacacaaccagtaagtgaggttgccccacacagccgtctcccagggaatcccttctgcaaaccaaacgttacttagactgcaagctagaaagccaccaaggccaggctttgttaaaagaagtgtattctatttatgttgttttaaaatgcatactgagagacaaacatcttgtcattttcactgtttgtaaaagataattcagattgtttgtctccttgtgaagaaccatcgaaacctgtttgttcccagcccacccccagtggatgggatgcataatgccagcaagttttgtttaacagcaaaaaaggaagattaatgcaggtgttatagaagccagaagagaaactgtgtcaccctaaagaagcatataatcatagcattaaaaatgcacacattactccaggtggaaggtggcaattgctttctgatatcagctcgtttgatttagtgcaaaaatgttttcaagactatttaatggatgtaaaaaagcctatttctacattataccaactgagaaaaaaatggtcggtaaagtgttctttcataataaataatcagacatggtcccatttgcaggaaaagtgcagactctgagtgttccagggaaacacatgctggacatcccttgtaactcggtatgggcgcccctgcattgctgggatgtttctgcccgcggttttgtttgcgcaataccgttatcacatatctaatgaggatcc

SEQ ID NO: 173634 - DNA, 865 bp, Homo Sapiens
gcttcattgaaaacaacgtgtcaaaattgagccttcttttgaatgacatttcaaggaagagcgagggcctcagcggccgggtcctgagaaaactcccctttctggctcatgcgctgtatgtccaggcccccaccgtcaccatagaggggttcctccaggccctgtctctggcagtggacaagcagtttgaagagagaaagaagcttgcagcttacatctgatcctgggcttccccatctggtgcttttcccatggagaacacacaaccagtaagtgaggttgccccacacagccgtctcccagggaatcccttctgcaaaccaaacgttacttagactgcaagctagaaagccaccaaggccaggctttgttaaaagaagtgtattctatttatgttgttttaaaatgcatactgagagacaaacatcttgtcattttcactgtttgtaaaagataattcagattgtttgtctccttgtgaagaaccatcgaaacctgtttgttcccagcccacccccagtggatgggatgcataatgccagcaagtttcgtttaacagcaaaaaaggacagattaatgcaggtgtcatagaagccagaagagaaacctgtgtcaccctaaagaagcatatgatcatagcattaaaaatgcacacattactccaggtggcaaggtggcaacttgctttctgatatccgactccgtggatttaagtggcaaaaatgtttttccaagaactatttaactggattgtcacagaaaggcctatttactacatttataaccaactggaggaaacacaactggttcggtacaagtggttcctttccctcactaaacgtaacttcggaccatgggtccccat

SEQ ID NO: 173635 - DNA, 430 bp, Homo Sapiens
acggatagcggatctgcttcaattcttcctccagtgtgatgtacagtttccttgcagtgcccaagggctctagagctcatcccacccaaaccaaagaatgctggtcaagtgggaaggagtccctgttctcagctgtagagggtgtggggagcactccgagtgccgtatctcagaacatctaagaacagtctaggaaaacacactccatttgtggttctccagagaatcagcacttggaatcctttgccaccgcgtaccccaggctctgaatcctgactgcgagattacacctgccagttcaccatcgactgtgtcacacggctcagcacagctcccaggccaacccatcctgatttccatctacttctaaactgcatcactctactcctcacagcaacaactcaaattccctaatgactaatctgttctt

SEQ ID NO: 173636 - DNA, 523 bp, Homo Sapiens
tctcatcttcgaatccgttgtaataattagagatttagatataacccagtatctcgatgctaccccgctggttgggatcttcactgatattcttgaatgcactggatttgataatatgccaaacttcatacccccacatcgaaatcacggctgcaagaactatatgaactccatgctgtaaaaggtaaaggtgacctttggctagccacatactggaccttaccccactgacgtcttccagaacattccaagggttttcctcaaggaacatttttgagctagaaattaaaatgggttctctggcagactgcaccccttgagtcaaagttaacagtattcctttgaatgcaataatagaggcttttctgcgttaagggagaaggaatgaccaattgaacttacacattccccaggcaggtccctttgccggcccctacaggctggggtggcccctcctgtcctcagggatcagactcccagactggttagttctgcatgtttccatcaacttcaaggttattcc

SEQ ID NO: 173637 - DNA, 827 bp, Homo Sapiens
  misc_feature (568)..(568): n is a, c, g, or t
  misc_feature (768)..(768): n is a, c, g, or t
gggcacgtcgcttttgctgtaccggggaccacgcgtctcatccatggcttccgcggactcgcgccggctggcagatggcggcggtgccgggggcaccttccagccctacctagacaccttgcggcaggagctgcagcagacggacccaacgctgttgtcagtagtggtggcggttcttgcggtgctgctgacgctagtcttctggaagttaatccggagcagaaggagcagtcagagagctgttcttcttgttggcctttgtgattccgggaaaacgttgctctttgtcaggttgttaacaggcctttatagagacactcagacgtccattactgacagctgtgctgtatacagagtcaacaataacaggggcaatagtctgaccttgattgaccttcccggccatgagagtttgaggcttcagttcttagagcggtttaagtcttcagccagggctattgtgtttgttgtggatagtgcagcattccagcgagaggtgaaagatgtggctgagtttctatatcaagtcctcattgacagtatgggtctgaagaatacaccatcattncttaatagcctgcaataagcaagatattgcaatggcaaaatcagcaaagttaattcaacagcagctggagaaagaactcaacaccttacgaggtacccggtctgctgcccccagcacactggacagttccagcactgcccctgctcagctggggaaagaaagcaaaaagtttgaattctcccagttgcccctcaagtggnattccctgaagtgcactgcccagggttgggaaaaggggacctggggctcttgctgaaac

SEQ ID NO: 173638 - DNA, 667 bp, Homo Sapiens
aggtgacagtagcaggaacaaggaagggtaatgtttccatgacagacacttgcttcccttgggacaagtcccagaagaactacctgaagcaccaaagctcccaccccagcctggtggcagaggaagcaggtggcaccaactcaccaaagggacttgggagccaccttctcactctgtggaagtactttagtgagagctgactggcaagataaaaaccctgaaattcccagaagttacagatgccttaaagactttctttggaagatcattgcctgtactattccttttttgtgtggcataaataatatattaacctgttacaactgacaacattggttttctgcagctacggagtcttgagtcgagactgctcgccttgatgacttgctcttttttggcagatgtgtggagttggctgttacgacatccctgtgtgatcccagaggaggggcactagctgggcagaaactgcaggcacacatttgggtggatcacctggcttcccagccttcggggtggtgctcagtgtggggtgatggtatcatagaggaccacggcgcttatcagcattgtttctttggagtctgtgtaatggaatgtatttttcaaatactgatatttgcattttctgtaacaattccttataataaaatgaagtaaaattgtg

SEQ ID NO: 173639 - DNA, 477 bp, Homo Sapiens
cctgcttctgatgaaagctctggtatcgagactttagtggaggagctctgctccagactgaaagaccttcagagtaagcaagaagagaagattcacaaaaagttagaggggtctccctctccagaggcagaagcaggaagcgcttcctgcttctgccaccaggaataagggaaaagacgagcaggaggctctcaagagggatccaagagaagaggctgcttttttgacctctgactcatgtgtctgccgcaggggttttgaacctaaattgccaccgaattatagcaaaccggcagctcaaacatttaagcttcaaaaggagctaaaaacaaaggttctttccttttttgagatggggaaattaaagacaggaaggtcagtgtcgctgtgaatcagggccaagaccagcacaaacccccatttctcagttcctgccgctttcagagaacactgcccttctccaccagcctcttcagc

SEQ ID NO: 173640 - DNA, 391 bp, Homo Sapiens
cacccaagtcttaatcatccactttctctccaaacctgctgcctcctccccccactgaattaatcctgcctgacaaactgtctgcaataagtaatacaaaaatgcccaggggttaataccacaactgtaaatgtaatcttggaagcgcagtaatgaattaaatggcatgtggtttcatggtgtgagtgtcaacagtattccaaagatttttcattctcttcatgctgaaggctcaactaaccacatcagtatctgcagcctgacattggtctaaaatcatttattttccaaagtctgtaataaccgcacatattgtttgctcagcaaaatgatttattataaaaatttacactctctcacgtttttatgagctgacgaaacagcttccact

SEQ ID NO: 173641 - DNA, 1771 bp, Homo Sapiens
gggagagctgagtggagcccggctgcggatctgggaagcgcctcttcacggcactgggatccgcatctgcctgggatcatcaagccctagaagctgggtttctttaaattagggctgccgttttctgtttctccctgggctgcggaaagccagaagattttatctagcttatacaaggctgctggtgttccctctttttttccacgagggtgtttttggctgcaattgcatgaaatcccaatggtgtagaccagtggcgatggatctaggagtttaccaactgagacatttttcaatttctttcttgtcatccttgctggggactgaaaacgcttctgtgagacttgataatagctcctctggtgcaagtgtggtagctattgacaacaaaatcgagcaagctatggatctagtgaaaagccatttgatgtatgcggtcagagaagaagtggaggtcctcaaagagcaaatcaaagaactaatagagaaaaattcccagctggagcaggagaacaatctgctgaagacactggccagtcctgagcagcttgcccagtttcaggcccagctgcagactggctccccccctgccaccacccagccacagggcaccacacagccccccgcccagccagcatcgcagggctcaggaccaaccgcatagctgcctatgcccccgcagaactggctgctgcgtgtgaactgaacagacggaggaagatgtgctagggagaatctgcctccaacagtcacccatttcattgctcgctgcgaaagagacgtgagactgacatatgccattatctcttttccagtattaaacactcatatgcgtatggcttggagaaatttcttagttgggtgaattaaaggttaatccgagaattagcatggatataccgggacctcatgcagcttggcagatatctgagaaatggtttaattcatgctcaggagctgtgtgcctttccatcccttccggctccctacccctcacttccaagggttctctctcctgcttgcgcttagtgtcctacatggggttgtgaagcgatggagctcctcactggactcgcctctctcctctcctccccccaggaggaacttgaaaggagggtaaaaagactaaaatgagggggaacagagttcactgtacaaatttgacaactgtcaccaaaattcataaaaaacaatagtactgtgcctctttcttctcaaacaatggatgacacaaaactatgagagtgacaaaatggtgacaggtagctgggacctaggctatcttaccatgaaggttgttttgcttattgtatatttgtgtatgtagtgtaactattttgtacaatagaggactgtaactactatttaggttgtacagattgaaatttagttgtttcattggctgtctgaggaggtgtggacttttatatatagatctacataaaaactgctacatgacaaaaaccacacctaaagaaattttaagaatttggcacagttactcactttgtgtaatctgaaatctagctgctgaatacgctgaagtaaatccttgttcactgaagtctttcaattgagctggttgaatactttgaaaaatgctcagttctaactaatgaaatggatttcccagtaggggtttctgcatatcacctgtatagtagttatatgcatatgtttctgtgcatgttctctacacaattgtaaggtgtcactgtatttaactgttgcacttgtcaactttcaataaagcatataaatgttgataaaa

SEQ ID NO: 173642 - DNA, 944 bp, Homo Sapiens
  misc_feature (858)..(873): n is a, c, g, or t
aggaggccttcaccgacattaagaactactacaacgacatcaccctcaacaacctggccctcatcaactccctcaaggagcagatggaggacatgcggaagaaggaggaccacctggagagggagatggcagaggtgtctgggcagaacaagcgcctggcagaccctctccagaaggctcgggaggagatgagcgagatgcagaaacagctcgcaaactacgagagggacaagcagatcctgctttgcacaaaagcccgtttgaaagtcagggagaaagagctgaaagacctgcagtgggagcatgaagtgttagagcagcgattcaccaaggtgcagcaggagcgggacgagctctatcggaagttcaccgcagccatccaggaggtgcagcagaagacagggttcaagaacctcgtgctagaacgcaagctgcaggctctgagcgccgctgtggagaagaaggaggtgcagttcaacgaggtcctggctgcctctaacctggaccctgcagccctgacgctggtgtcccgcaagctggaggatgttcttgagtcgaagaacagcaccatcaaggacctgcagtatgagctggcccaggtctgtaaggcccataacgacctgctgcgcacgtatgaggcaaagctgctggccttcgggatccctctggacaacgtgggctttcagcccttggaaacagctgtgatcggacagacgctgggccagggccccgccgggactggtggggcacccccacgtaactgccccccctggggggggcaccaccccaaagaaaccaaccctagggacccctcggggatggaaaccccctttttcccccccaaggaacggccagggnnnnnnnnnnnnnnnnattcctcccccccaaattggaaagcttttttcccacagggttctcttggccaccccctccttttccccggg

SEQ ID NO: 173643 - DNA, 713 bp, Homo Sapiens
agaaaagggaccagatggaaaagccatcgtggaattttgtccaatcttgctcgtcataccaaagccgtcaatgttgtgcgtttttctccaactggggaaattttagcatcgggaggagatgatgctgtcatcctattgtggaaggtgaatgataacaaggagccggagcagatcgcttttcaggatgaggacgaggcccagctgaacaaggagaactggacggttgtgaagactctgcggggccacttagaagatgtgtatgatatttgctgggcaactgatgggaatttaatggcttctgcctctgtggataacacagccatcatatgggatgtcagcaaaggacaaaagatatcaatttttaatgaacataaaagttatgtccaaggagtaacctgggaccctttgggtcaatatgttgctactctgagctgtgacagggtgctgcgagtatacagtatacagaagaagcgtgtggctttcaatgtttcgaagatgctgtctggaactaggggctgaagggagaggcaagaagctaccggatgtttcacgacgacagcaatgaagtctttcttccggagactgagtttcactcccgacggatctttgcttctcacgccagctgggatgtgtggaatctggtgaacatgtcatgaattccacttatgtggctccaggaagaatcttaaaagggccatcggtcatcttccatg

SEQ ID NO: 173644 - DNA, 944 bp, Homo Sapiens
caagcatggtggaaaaaagggctagtcctgccacctcacctaaacctagtgttgcttgtagccagttagcattacttctgtcaagcgaagcccatttgcagcagtattctcgagaacacgctttaaaaacgcaaaatgcaaatcaagcagcaagtgaaagacttgctgctatggccagattgcaagaaaatggccagaaggatgttggcagttaccagctcccaaaaggaatgtcaagccatcttaatggtcaggcaagaacatcatcaagcagactgatggctagcaaaagtagtgctacagtgtttcaaaatccaatgggtatcattccttcttcccctaaaaatgcaggttataagaactcactggaaagaaacaatataaaacaagctgctaacaatagtttgcttttacatcttcttaaaagccagactatacctaagccaatgaatggacacagtcacagtgagagaggaagcatttttgaggaaagtagtacacctacaactattgatgaatattcagataacaatcctagttttacagatgacagcagtggtgatgaaagttcttattccaactgtgttcccatagacttgtcttgcaaacaccgaactgaaaaatcagaatctgaccaacctgtttccctggataacttcactcaatccttgctaaacacttgggatccaaaagtcccagatgtagatatcaaagaagatcaagatacctcaaagaattctaagctaaactcacaccagaaagtaacacttcttcaattgctacttggccataagaatgaagaaaatgtagaaaaaaacaccagccctcagggagtacacaatgatgtgagcaagttcaatacacaaaattatgcaaggacttctgtgatagaaagccccagtacaaatcggactactccagtgagcactccaccttttacttac

SEQ ID NO: 173645 - DNA, 807 bp, Homo Sapiens
cagcatgtcaactggttcctcatgctctgtttggtgtggaaattcacatgtgccctcacactgaggaagcaattgcttaaaatcactttccaataacagctgataaaatattttgcaggtttgtcatgcaaggtttatttattaggtggctattcaaagtttgtatagcaaccacttaagcagaactaaattaatattcactgagcactgtaacgatggaagagggcttttcctaagggttgggttgggagttgtgcttctgtgaaattaacatctctcactcattgccaagattctctgcttaaaaatattagttttctgtgctgttgccaaaatagcaatttaagcaaatgtagtgccagaatgacacatgagcctcggactcagggaacagttccactgactgtggagtacaactattgcattcttttccaaaattcagactgatgtaaaagactgaaatacaatgttcttaaggatctgataaacatggctgggatgaaaagaaaactgagagggaagagtgcttttcacagtgcaattcatagcagcgttcaaaaacttggttatgaattgacttgaaggtggacagagcttaagactggaaaaattatctataattggggtttaacaaagagcatgggaaaagaaacacttggtttcagcacctggattctacatacagtagggaaactgtgtgaagggttgacttttaaattcatcttgaataatcttttaaaagtttaaatttgtccaagaacaatactaagcgatatcccgggaatctccggagccgtaccagcctgg

SEQ ID NO: 173646 - DNA, 1010 bp, Homo Sapiens
  misc_feature (30)..(30): n is a, c, g, or t
  misc_feature (38)..(38): n is a, c, g, or t
  misc_feature (131)..(131): n is a, c, g, or t
ggaaccactgtaaacgagggaaagagggcntttccccntaagggttggggttgggaagttgtgccttctgtgaaaattaacatcccctcactcattggcccaagattcccctgccttaaaaatattagttntcctgtgctgttgcccaaaatagcaatttaagccaaatgtagtgcccagaatgacacatgagcctcggactcagggaacagtttccactgactgtggagtacaactattgcattcttttccaaaattcagactgatgtaaaagactgaaatacaatgttcttaaggatctgataaacatggctggggatgaaaagaaaactgagagggaagagtgcttttcacagtgcaattcatagcagcgttcaaaaacttggttatgaattgacttgaaggtggacagagcttaagactggaaaaattatctataattggggtttaacaaagagcatgggaaaagaaacacttggtttcagcacctggattctacatacagtagggaaactgtgtgaagggttgacttttaaattcatcttgaataatcttttaaaagtttaaatttgtccaagaacaaaactaagaaaataataaaaaatggatgcaatggatgcttcaacacatctgagagatgtgcattcataacacaatatgtcaatccatactcttgagaaagcaagtgattagaaacaaatattgttgcaaccttataatttctgctttaatggcaatcaagtttaaaaaatgtacaattccacttatccatactattcctttataaaaggcagatttcaggtaagcttctaaatgcatgcgtaatgtagaggctaatattttctggcagtcccttggttcctgaaatttgaacttcatatgtgttttaaacttttgtcaaaatagtcatgaaagatatgttatttttgcataatgaggtaatatatcaggggcgggcactcataagacagtataaatccacttgtctaaacttgcatgaggctgtgtgc

SEQ ID NO: 173647 - DNA, 610 bp, Homo Sapiens
tatgacagcacgggcattgtcatctgagaaatccagaccctcactcactttaccacgacaaactgctaccaggagagctccatctttctctcctttgtatttgattgcgtcatagtacacctgcagtaattcatcaaaatttgttttttctcctccctgtggttctacaatgactgtcttcaccaactccagattatgccataaaccagtagagagccaacgttcttttaatttttctaataacttgtaagatggcaagaaacacaaaattccttggctcacagtctggcacacagataacaaaagtgctcccacttcatcttggaactcaaatgtttcagtattctggaaggtagcacagagattccgacccttggggcctgacccaatggtaccaacccaaacctgtgaatttttaatgatatgattagcctccagctggatagtaaatgtaacaccaagttctgacgaaaaggatttcattggtgataatgtaccagatgtcaaaacaatggtctgaactttgccattaatatctgaaaaggccacagctggatttaagcaccaaaagtttagcacatgaactgcagttttctgtcgtgaacgtttc

SEQ ID NO: 173648 - DNA, 525 bp, Homo Sapiens
tgtggagcaagtactatttgctcaagaatttttttccgtcaaattgtgaacttttgattcttgcattgtaattggctgtgtccataagaaatcatttattcttcaggcttagacattcatggatatgcttttctttcattaggaacattttgctggtgatgaggaagcatttagctgaataagtttaaagccctttatacagagaattctacaagtttgcaaatattttaacaatattaaatgtgcaatagaacttttataaaataattagaacagagattttacagttaaggtttcaaattgtggcaggtggtactgttgatcccagggtactttctgggattgctcacatttctctaatgtactgcacttgatgccagtaggaaagaagcttaagtgtcttcagtacaagattgatagagcccttggcattttattatcacattcttagttctcagggtgggacttcaattactgctgcagagcagtagtggttaaaaataagatattggaatttattaaaag

SEQ ID NO: 173649 - DNA, 452 bp, Homo Sapiens
gcatagctggttcccgacatgcataactgtgataaaaggacattacaaaacgatggacagtgattgtaataattataatagtcaatcccttatggatgcttttagctgttcactggataatgaaaacagacaaactgatcaatttagttttagtataaatgagtccactgaaaaagatatgaattcagagaaacaaatggatccattgaatagaccgaaaacagaggggagatctgttaaccatctgtgtcctacttcatctgatagtctagccagtgtctgttccccttcacaattaaaggatgacggaagtataggtagagacccctccatgtctgcgattacaagtttaacggttgattcagtaatctcatcccagggaacagatggatgtcctgctgttaaaaagcaagagaactatataccagatgaggacctcactggcaaaatca

SEQ ID NO: 173650 - DNA, 415 bp, Homo Sapiens
cagaaatattctttttgtgtcaacccacggataagcaccaagtaactcagatctctgctgtttcctgcaagcccaggcctggctttggtaaccgacctatgccttccattgtttctgccctcaatccaagtcctgcattcagcctcacttctcccatgaattaattaccatgcaactctttgctgccactaagtatagacgaaaagacatatttttttctcagcactgtgtaggccagtaatgtaacagcagcatctctaacacttactgaaagaagattatttgccaagtgctttttcatatgtttatgtgtggtaaccccctttcaaccatcacaaaacctgatgggctagggaagtgagtcctgtcatttttcctggtgagttaaacaaccagcctaaaggtccactgctag

SEQ ID NO: 173651 - DNA, 610 bp, Homo Sapiens
aggctactaggggaagaaaaaatagatcctctgtcaagacccctgaaccagttgtgcccacagcccctgagctacagccttccacctccacagaccaacctgtcacccccaagcccacatctcggaccactaggatgaagaaaaaataggtcctctgtcaagacccctgaaacagttgtccccacagcccctgagctccagatttccacctccacagaccaacctgtcacccctaagcccacatctcggaccactaggagcaggacaaatatgtcctctgtgaagaaccctgaatcaattgtccctatagcccctgagctccaaccttccacctccacaaaccagcctgtcacccctgagcccacatctcgggccactaggagaagaaaaaatagatcctctggcaagacccctgaaacagttgtccccacagcccctaagctcgagcctaccacctccacagaccaacctgtcactcctgagcccacatctcaggccaccaggggcaggacaaataggtcctctgtgaagacgcctgaaacagttgtccccacagcccctgagctccagccttccacctccacagaacaggctgttacccctgagccta

SEQ ID NO: 173652 - DNA, 662 bp, Homo Sapiens
gaagaccgggtcctctgcctccacagtagatggcgaatcctctatgcgggactggcaaatggcactgtggtcaccttcaacataaagaacaacaagcgacttgagatctttgaatgccatggccctcgggcagtcagctgtcttgctacagctcaggaaggtgcccgaaaactgctggtcgtggggtcttatgactgcacaattagtgtacgcgatgcccggaatggactgctcctcagaactctggagggccatagcaaaaccattctttgcatgaaggtggtgaatgatctcgtgttcagtggctccagtgatcagtcagtccatgctcacaacattcacactggtgagctcgtgcggatctataaaggtcacaatcatgcagtgactgtggtgaatatcctaggaaaagtgatggtgactgcttgcctggataaatttgttcgtgtctatgaattacagtctcatgatcgattacaagtttatggaggacacaaagacatgattatgtgtatgaccatccataaaagcatgatttacactggctgttatgatggcagtattcaggccgtgaggcttaatctgatgcagaattaccgctgttgggaaaggctccagtggttcttacttgatccaaaaaaatgtcaagaattaatctagga

SEQ ID NO: 173653 - DNA, 316 bp, Homo Sapiens
cttgaggccagagggtcaaggctgcagggagctataattgggcctgtaaatagccactgtactccaagctgagcaacacagtaagacactgtctctaaaaataattaaagtaaaataaaaataaggaaagctcctgtgacatcaacctgatccagaattggggacagcgctactgcgggttcaatgtactgccatgtttaccctgtctcatcagttctatcagcacactgaccccactcgagaccaactacaagactaaggctggaagtggttgagtagcagaagtgttatgtattctatcttcccaagggaaccc

SEQ ID NO: 173654 - DNA, 554 bp, Homo Sapiens
gagcagccaacagacggtgtcatatggtgtcccaacatggacaggcacattctacaggcacagtcccaagggcatataccttctacttgtccaagcacagtctcagccccatggggttatatccaccctcaaggtgtgcagggaagacagcagacagcccctcctcaacaggacagtgcagtattcactttcacagacatcaacctccagtgaggccactactgcacagccagtgagtcaacctcaagctccacaaatcttgcctcaagtatcagctggaaaacagagtactcagggagtctctcaggttgctcctgcagagccagttgcagtagcacagccccaagctacccagccgaccactttggcttcctctgtagacagtgcacattcagatgttgcttcaggtatgagtgatggcaatgagaacgtcccatcttccagtggaaggcatgaaggaagaactacaaaacggcattaccgaaaatctgtaaggagtcgctctcgacatgaaaaaacttcacgcccaaaattaagaattttgaatgtttcaa

SEQ ID NO: 173655 - DNA, 848 bp, Homo Sapiens
ggttagcacccagattcacactcctatgcctggaagggggacatctttgaagaagaggaattagggctgtggacactgtcttgaggatgtggacttccttagtgagctccacattacttgatggtaaccacttcaaaaggatcagaatccacgtaatgaaaaaggtccctctagaggatggagctgatgtgaagctgccaatggatgaaaagcctcagaaagcaactcaaaggactcaaagcaacggacaacacaagagttgtcttcagcccagtgacacctctgatgtcccctggaagcttagtgctaacctgggactgcctgacttcctttagcctggacccttgctactaccttgaactgtgggatctaacctctctttttctgtttaactctttgctactgccattgaccctgctgcaggatttgtgtcattttcctgcctggttgctgagactccattttgctgccacacacagagatgtaagaggcaggctttaattgccaaagcacagtttgagcagtacaaaacaacatggtgtatatctcaaattgcctgacatgaagaggagtctaacggtgaagtctcactcttcatcagcatcatctcttacatgttcattatcatccgctcctatccttgcatgtccaaacccttaaacattttaggataactctccggggcgctttgaaagcggtgactaggccgcccccaaactcccccttggattgacaagggacgtatcccgcgtgtgcaccggtccgactatcgccgagactgatcacgcgcccactaccgccgcgcctactgtcgttcgattgctcgacacttccgcaggcagccgccg

SEQ ID NO: 173656 - DNA, 431 bp, Homo Sapiens
  misc_feature (21)..(21): n is a, c, g, or t
gcataaatataagactgtatntggtgtgcctgttttgtttctttggtagagtttattaggtgaatcttctaaaactttccttctgttggatcccagtgacgtggaagtcatcagaaccccacggtacttggagtacctctctgcaccaagatagctggctgattttctgctcagtcacaattttacttgaaagcaagaattgtcctagctccttttccattattccaaaacgtttaacgttcaaagcagggtctcattaaaaaagaaactactggttgatataattgagatattacaatttcagaataaacatttgattaaaaataaggaaatcctcagttcataccgtattaaaagagaattggtaacttgaatgtgtgtaattttttggaacctgtctaaaacccaaatacccctgcgaatagtaattc

SEQ ID NO: 173657 - DNA, 843 bp, Homo Sapiens
  misc_feature (203)..(212): n is a, c, g, or t
ggtgggagagtccttgtatgccatagtattgtgcaagcataaaggcatcacaagtggtcgggctcagctactctggttcctacagactttcttctttgggatagcgtctctcaccatcttgattgcttacaaacggaagcgccaaaaacaaacttgaagttgtctgaaagcttgctctacacttttacattcatcctcacccnnnnnnnnnngtggggtagaggaggtgcagtaatttactcagtgatctttctactttctagaaactgtccttcaaagctctttaagaccccctcgttagtcagttttttctcttatatgctctggttgagcttgaatagaccagttgttacttaagaaagaaacagagaaagattttagcttttcaatcctatttggcagaggacttcagctaccttcttacagtctttggctgtgttggtaccctcgtgtgctctgagctaagccacatactaaactgactttttggtttgtatacccttgctcccgccttctgatgaaaacaccttaccctcacaaccaccatctttcctctcctttccaaagctctttccaccttgctgcactaagataaagtgacacttccactatatgtcaattccacacacatttattaggtacctgtgaagtaagatcctatcctctcaaacttcaatttctcatgctacagagaaagataaggaaggatgaggcaagtgccgggaatgggggcaggctggagcagttcacacaggcataggagggcacgctggaggaaccggggagggggagacttgcaggagttgcctttccctggatggctggcagccgggaagttgttcc

SEQ ID NO: 173658 - DNA, 624 bp, Homo Sapiens
ggggaaggtctgggggcacagatgctttggttggagtcctttcctcaacactgatttcttgggacgaattctctgtggagggaatcttgcttaggtcagaagtacatgactgaggaggagtggaatggggtttctcactctgcttttcttcctgtggggcttcggggtgctgtactgttgtcccctcatttgcagcaggactctcaccttgagcttggtcggattcagggacatggctctctacaggagccaccactttcttgtttgtgtttcgcttgcggcgtgatcgggttgttttctggcgccctttgtctttccgaacaagagtgacttccacttctttagaccctttggcttctggcactgagtgtgaggtttcactgctatttcctctggcttccttggtatctgttgggccggctgaggggtcaggagcattgactggaggcctagaagattctgtagcagcctcagtttccaggatgccagatacagcctcatctgtctctattccttcctcagaaggctgcagcgcctgtgcacctgcggggggttgcagatctgtctgggattctccaggataaggtggaggtgctgggaagttttctgcacctccgtcatcgt

SEQ ID NO: 173659 - DNA, 475 bp, Homo Sapiens
tagtgacactgatgaagaggtgacatctcagaaagtctgaaacaggtcaaaatgtactgatgaatgtggctgcccattaaagcatggtaatcgaagaaatattagaagtaagtttaagggatactttgcgtgtccccggatccaacattaaagaggagcatactgactacatgaaaccctgaagggaatagagatcacgatactcgaagcccgtcatagtacagatgaagtcactgagccacagagaagctgagtggcctgcccagaatcaaatgttaattcatggcagatctgggagtaaaatccaggctcctgtctcccaacatgtttgtcatcattagtttaagaacatctcagaaagtctgaaacagggtcaaaatgtactgatgaatgtggctgcccattaaagcatggaattgaagaaatattagaagtaagttaaagggtacacattgctgccccggaatcctcctta

SEQ ID NO: 173660 - DNA, 737 bp, Homo Sapiens
ataccaggccagcgctacgacatcatcacagcccctcaccatcacccttaatgttaaacagaagtatatccaactcagatgtgaaatcacatccatcttctaattaaaaataaagcagcatgtgaaataatgatattctttcaaaataagaaaatggtgattagagcagagctgattgggttgagggaaagcaggttacttaattatggttattgtgtgtctgaatttttatggaaagaaaggaagtattgtttaggacgatgaaccctccaaaacatagaggggtggcattgtgtagaagtactctgggttgtgtctttgtcttttcagctgcttgtcttgggtcaccagtcttgcctattagcatgtgacgttgatgagaacttagcatgattcaaaaagctaagccaccaagacgatgggtagtgtttgatttggagtgggttttatgactactgatcatttcaacttcaaaacaaccagagctcatattctttagagagcaatacattttttttgacaagtaatgtcaatagtggtgagggaaacataataggttgtttagtgtccatgatttcattcatttattttttcctgcttatctctgcaattcctgctcctcctcgtcactggaacagtcttttcctttgtgtccactcacaagctcctactgtttatcccccatagccatcttgagcatagaaataagctcccctcacctcctcatctttaccacg

SEQ ID NO: 173661 - DNA, 1039 bp, Homo Sapiens
gagggctgcagatatctcactactggggaatgggcaaggaatgaagtagtggtaatatctaggaggcccaagccccaagtcctcaggcgatggcagccaggaagatgatggcaaaaggagacctacctggtgggggcagataagctgaaaagaagtaggagagggaaggggtagctaggaagggtagactaactacgaaaacttgcaaaggtgtcgtgaaagctcaaacacaacagacgggagtcactaaatgcaagaggctctatacatctaacagcatgtaacattgaatcatgggttggactatgtagtgtatctttccaattgcgaaacctgtatctagtccattagataaataaaatattcggttagattataatctcttcatgtttctgccaggaccaatcatgtttacagattgtggtatctggggtttgcaaatgtgatctaaaaacaaaagtatggactatttcgcttgcttaaaacttctgggtcacatgagctaatatccagagcagttaatttttatagaggagatggtgtctcagttttgttacttgctgtgacaccatggtcatcagctctctgttatagtttctcatttataaacaggatgttgataacattattaatgtagctcagtcttgaattgctattcttctggttgctaaggaaaatactaatatgaatccaaagataatactaatattttattaatttaatggactagatacaggttttgcaattggaaagatacactacatagtcaaacccatgattcattgctacatgatgttagatgtatagagcctttgcatttagtgactcccgtctgttgtgtttgagctttcacgacacctttgaaagtttggtagtttgtctacccttcctagctaccccttccctctcctacttcttttcagcttatctgcccccaccagctaggtctccttttgccatcatcttcctggctgccattgcctgaagacttggggcttgggctcctagatattacattattcattcttgccattcccag

SEQ ID NO: 173662 - DNA, 507 bp, Homo Sapiens
  misc_feature (442)..(461): n is a, c, g, or t
aagttagtaaccactctggacagaaaccaaaaaagactcatccccacagagtaaaagaggattactgattcctgggacatgcataggaaataggatctttattggctgtagaatcctaagggaatcccatccaaacatccaaactcctgcctctgctacattttaccaatatactgacaggagttacaccaatattggtcttcagacgcaaattccagtactatcctttacaaaaccagaacatagaacaaagtggtaaaccactgtgaaggttatgaggccaaatcacttctactctgttgggagaagcctggccaaatctacccacaacattaccaacttacctttaaacccgtcacagagccaagtaaaaaaaaggagcttcatatattttattactaccatttaaaggaaacttaaatgttttgattaacatttaacnnnnnnnnnnnnnnnnnnnnaagaaactgagtagagccaaagctgtatagacacacctcctcatat

SEQ ID NO: 173663 - DNA, 320 bp, Homo Sapiens
aggtgtttgagaagtcagcacatccaataacaagcacccctctctcttctgaccttcgcaaacacgctacttgatcactcactcactttcctattcatgcattcactcatctgactcagcaaacatgtactgtgtctctgtggcagaagcgtttatatgccagcacctgctgtgttgtcagaaatgcagaccctaaacagggtctgcccgcagagactcaagttctagacaactagctcccaaaagaacaaagctgtgtgactgtctaggagctaggaaccgtctgtagactttacaggccatgccccacctccttcatg

SEQ ID NO: 173664 - DNA, 683 bp, Homo Sapiens
tcactgatgacgaggtgaatagagacataggccaaaagaaaagtacagagagaggagacaaaagatagtcacgcctaatctgcaaatcatatctgaaaactaacatttcaagacctatggctaaagtgcctagcaactctattaagcatgtttatgcccactgtacagttgagaaaggtccacaaataatttgcccaaggacacacacaacaagtaaatgataaaccaatacgtgaagaaaagccatccatttgcaaagccttgacctcatctattcaccactcactccaggcacaaaccagcctggtggaagagcaggtgctctgctgactgggcttctggtcccaggattgtggccagagaagagtaaccatctgggcctattcctgaagcaaggacaaagtgctgagtgctatggccaacttctggtggtctgccatgctggacatatctcattcacttttacccaggagtgtgcaagtagaagcaggcagaacgcagcagaagagaaggtattacaaatacctgctggcttgactatgtgctctggaactggctctactgacctactgacactcaaccattcttggacaaataaagtgcgggttggttctaatgtagcctatggtggcgggagtataagaatgatcaaattattatcaccttgcaattacttctggtta

SEQ ID NO: 173665 - DNA, 707 bp, Homo Sapiens
ttacagctgtgaacaggaatcagcatggatcagtaacagctcatatgagacgtgtaggtataggtcataataaccattaactagtgatggctttgaggttatgagcagtttcctagccatctcaaagtgtgctgcggggatctcttttgcatccctctgggtgcagagctgaggcacccagaggcagtgtccagaggaggcagcatctgtaggtgtcttcacctgctctggctcttggcacatctggtaggtgacactgttttgtgagatgggttgaaagcacgtgctgccaaaatagaataatgttggtcctctcctcatgtgccgtggaactggggtaaaactgcgtactggctgcagctgcctgtccataccggaatcgagtataacacggtgcctggcttagcacaaaacagtagtgggtcctgcaggccccagagtctaattcctggtattctttcccctacacagattaaataaaccaaaaacaaactattctaggaaagcgtctgtgacatttgtaaaaagtggtatttaatgatcttttattcacttgtctgtttagttggttgaaatcttaagtggcatcctggtctgagaaggagtgctgtctgcgcctgccctccgctgggcacagagtggctgcttcaggggctaagcacacactttctgtcttctaaagggccgccaatgccaggactcaggtg

SEQ ID NO: 173666 - DNA, 499 bp, Homo Sapiens
atagaggtgacacagtcttctctcatggctgtgagtgtggttgatattccaatcattatcacattgaggtctccagctctgactttttctccagttccactctgtaaggcccaactccttccccagtatctacacccgagtgtgtggtggccacctcaaattcaacgtcacccaaacagaatttcttatttcccccaaaatccttctcaccacagacttctagtggtaaaacccctaaactttgtaatcatcttcactcccctatctcatacaccctacctttaattcagtagcaaatcctgtttcaccttcaaatatatgtagaatctgcatcgtcctccctctttccactgccaccatcctctctcacttcaattactgcactagcctgatacctggactctaaagcttccctctgcaatccattctcaacagccatcttttaaaaacaaaagtcacattgtggcactgcgtagactctctgttgggcggggatcct

SEQ ID NO: 173667 - DNA, 481 bp, Homo Sapiens
atcagttataacatagctgtaggaatgatgtcgattcatgcttaaaattgagcatcaatagaaaattgctgtaggtaaatctcacatttatctgcaacaaaatatagatttaatttttagcttaaactttgtttctaccttatgttagtggacctcagttatccatctgtaaatttctttttatttggctaaaataatctaaaagaataatttggttggccaattagaaatgcctttttcagttggcgtattgaaagctttcctttaacattttcacctgctcattgtgattcctccttttagtctaatatctttccaggtcatacttgtttttaatcattaaatattttcttcctggttttggagactaagctgataaactttttttaaaacttaagcattgtcattgctattttctgtaatttgacttgcctaggagtttaagaacagtgaaagttagcttcgcacctcctaatgataa

SEQ ID NO: 173668 - DNA, 713 bp, Homo Sapiens
ctgtgcacccagaagagtgactataacatgcagcaagaggagaaggggtgggctctgattcaggtgtataatttcctcagttgacaggacaggtctcctctaagaggtactattactcaaccaatccgtgagctccttataaatgcatccaccgattgcagcagtgaaatgattggttttcctagaatcccctgagcaaacgtccaaccaataaaaaggtctgtgcatttcaccattgcttattccacaagatagttctgtcagtggtcacctagggctaccacttaaggagaaagcagagagaccaagcacagaggagacagaggggcaagaggaaagggaagaaacaggatgggcaatgcccacccagtcattgaccaacagagagatcctcacacatgtagagatgcgaagtataatggctcctggcagccacagacagtgaccatagcatgcagcaagaggggaaggggtggggctctgatttaggtgtataatttcctcacttgactggacaggtctcctctaagaggttctattactcaaccaatccgtgagctccttataaatgcatccaccgattgcagcagtgaaatgattggttttcctagaatcccctgagcaaacgtccaaccaataaaaaggtctgtgcatttcaccattgcttattcacaagatagtctgtcagtgtcactagggtacacttaggaaaa

SEQ ID NO: 173669 - DNA, 528 bp, Homo Sapiens
attgtacaagaatgttcataacagaattattgataatactcaaaaagtagaagcaactcaaatgtcaatcaactgatgatggataaataaaatgataaaatgtggtaaatccatatgataaaatattattcagccataaaaaggcacagagtactgacaaatgctaccacatcaatgaactttgaaaacctcatgctaagtgaaagaagctgtcataaattactacatgctgcatgtttccatttgtatgaaatgtccagaagaggcatttctggaacagaagctttacccaattgcagtccatatgttttctgggatcccggagttccctttcaacaatgtaaaatacaaacttaggtcaaaagttcccatgtctgagaaaactcaagccaaatcagttctcctccaaagttgacaggatttatgctttaaaaatacagatacagaattctctttggaaagatataccaaattcctgtaagaaacagtctacccataagtaggggaaaggctatatgctatttccca

SEQ ID NO: 173670 - DNA, 292 bp, Homo Sapiens
tgaagaatgactttaagatttgtaacttatacaactggatactattcactgagagaggaaacactgaaacagaccagaattgaagatgatgagttcccttttagatatgctgaatttcaagtgcttctgaaacattcaagaggagacagaaacagaatttatagctcagtgaagaggtctggactggagaatataatttggcacaaatctttatgcagataataattgactcaagagccaataagacgagtgatggagagattgtaaagtgagataaggagaggatcctgga

SEQ ID NO: 173671 - DNA, 988 bp, Homo Sapiens
gggggcgcagcgcgcggcgtcagtcttggctggcagacctgtactccgtactccgtacttcgtagtcgcagcggcgcggtcttcggcagtctagtcatccaccgccatcctgggccccacgtgttgcctgaccattcctgagcccaggtgggagccgtggctgaggtgacggtctcaaagtggaagagcttactgtcacagcaactcctttgcaagatgccccggtaaatcacgttgcagagaccccaactctgccttcctggaactaggcctgcgttttctctgaaccattatttcatggagaaaatgaaatctacttcatgtgcctggtctacttactccttcagaagtgatttctgagccgccaggaatagttgctgaacaccccaggcctgctgaggtccctccttgagtctcatgttcaagcagtctttgtccatgaaactgggaggcgaccgtgttagctgccagttcctgacagccacctctcaccagtggcttcactctgtgtccctgacccagcacatggcacaagagtgcctgccatccgtcagtgtttccacagcagcaatcccaagatgctggagctagaggggacctgacctgagagaagataccttcagtggctgccaggctgttccttggaacctgtgcagggatgaggcctgcctgtgttaatacacctacttgaggagtggaactgaattttgaatgcaagcccttggcacccttaattgagcaagtttgaaacctcgcttgttgcccttctggaaggagtcacgaatttccagttctgggcctgggctgtggggtctgggcagacaatacctccgggcccctaggtttttgggtgcccaggtcccctcttgctttcccggaaatggaacacactctttggcttgttggcaaccaacgggaaccctgggggaccccttttctcggggcaattcctccccttcgcaattgggcaacaacaaccacagggggc

SEQ ID NO: 173672 - DNA, 817 bp, Homo Sapiens
ggggcagcgcgcggcgtcagtcttggctggcagacctgtactccgtactccgtacttcgtagtcgcagcggcgcggtcttcggcagtctagtcatccaccgccatcctgggccccacgtgttgcctgaccattcctgagcccaggtgggagccgtggctgaggtgacggtctcaaagtggaagagcttactgtcacagcaactcctttgcaagatgccccggccaggaatagttgctgaacaccccaggcctgctgaggtccctccttgagtctcatgttcaagcagtctttgtccatgaaactgggaggcgaccgtgttagctgccagttcctgacagccacctctcaccagtggcttcactctgtgtccctgacccagcacatggcacaagagtgcctgccatccgtcagtgtttctacagcagcaatcccaagatgctggagctagaggggacctgacctgagagaagataccttcagtggctgccaggctgttccttggaacctgtgcagggatgaggcctgcctgtgttaatacacctagtgaggagtggagctgaatttgaatgcaagccttggcaccttaattgagcaagtttgaaacctcgcttgttgcccttctggaaggagtcaggaatttccagttctgggcctgggctgtggggtctggcagacagacctctggccctaggtttgggtgccaggttctctgcttccagaatgagaagctttgctgggcacaggacctgggcccttctggtatctcctggatgaaaaacaagggatatttaataatatggatttaaataccaaaag

SEQ ID NO: 173673 - DNA, 468 bp, Homo Sapiens
  misc_feature (14)..(14): n is a, c, g, or t
  misc_feature (54)..(54): n is a, c, g, or t
  misc_feature (59)..(59): n is a, c, g, or t
  misc_feature (66)..(66): n is a, c, g, or t
  misc_feature (101)..(101): n is a, c, g, or t
  misc_feature (147)..(147): n is a, c, g, or t
cccctgaaccccanacaacaatggcaacaaaaatgccctgcccaacccgtccantgttnccctaanagccagcaaacccccaaaaatgcctggaagcctanaggggaccctgaccctgaagagaaagaatacccttcaagtggcctncccaggctgttcccttggaacctgtgccagggatgaggccctgccctgtgttaatacaccctagtgaggagtggagctgaatttgaatgcaagccttggcaccttaattgagcaagtttgaaacctcgcttgttgcccttctggaaggagtcaggaatttccagttctgggcctgggctgtgggtctggcagacagacctctggccctaggtttgggtgccaggttctctgcttccagaatgagaagctttgctgtgccccaggccctgggcccttctggtatctcctgaatgaaaaacaagggatatttaataaatatgg

SEQ ID NO: 173674 - DNA, 452 bp, Homo Sapiens
  misc_feature (34)..(34): n is a, c, g, or t
  misc_feature (210)..(210): n is a, c, g, or t
  misc_feature (363)..(363): n is a, c, g, or t
  misc_feature (370)..(370): n is a, c, g, or t
  misc_feature (412)..(412): n is a, c, g, or t
  misc_feature (427)..(427): n is a, c, g, or t
cctaactccgtacttcgtagtcgcagcggccggntcttcggcagtctagtcatccaccgccatcctgggccccacgtgttgcctgaccattcctgagcccaggtgggagccgtggctgaggtgacggtctcaaagtggaagagcttactgtcacagcaactcctttgcaagatgccccggccagggaatagttgctgaacaccccaggcnctgctgaggtccctccttgagtctcatgtttcaagcagtctttgtccatgaaactgggaggcgaccgtgttagctgccagttcctgacagccacctctcaccagtggcttcactctgtgtccctgacccagcacatgggcacaagagtgcttngccattncgttagtgtttttaacaagcagcaattcccaagatggttggnagttagagggggacntgaacttgagagaagataacttgag

SEQ ID NO: 173675 - DNA, 599 bp, Homo Sapiens
gggcacggtgcctgcttacaatttcccagtgactgctatggctattgcccccaataccaacaaccttgtcatcgctcattcggaccagcaggtatttgagtacagcatcccagacaaacagtatacagattggagccggactgtccagaagcagggctttcaccacctttggctccaaagggatactcctatcacacacatcagttttcatcccaagagaccgatgcacatccttctccatgatgcctacatgttctgcatcattgacaagtcattgccccttccaaatgacaaaaccttactctacaatccatttcctcccacgaatgaatcagatgtcatccggaggcgcacagctcatgcttttaaaatttctaagatatataagcctctactcttcatggatcttttgggatgaaagaacactcgtggcagtagaacgggcctctgggaatgacatcatttggctcagctccccaccacccattaaaaagaaaaaatttggaaccctaaaacagggcactgtctgtgtccttccttgaactgtctaccctgttgcttttcacaaatcatggtaataaaacaagttattcttgagg

SEQ ID NO: 173676 - DNA, 1162 bp, Homo Sapiens
ggcccacataattaggtgaacacaactaaataagaaaaacaaaagcctgggggcgtctttattaatttttataatgtcccagttgggcctggtacggtacggaatgctgggatatcgtcgaccacgcgtcggacaaagggtctgagaacattatctgtagctgtatctccccatgtggaagtggatagcctatctacagttctcggttttctctatcggctgaattatgaacatgacaacataagcctcaaaagggtttccaaaatgccagcattccttcgctctgcccttcagatttgttttctgaagattcaacaaagctctttgtagcatcaaatcaaggagctctgcatattgttcagctgtcaggaggaagcttcaagcacctgcatgctttccagcctcagtcaggaacagtggaggccatgtgtcttttggcagtcagtccagatgggaattggctagctgcatcaggtaccagtgctggagtccatgtctacaacgtaaaacagctaaagcttcactgcacggtgcctgcttacaatttcccagtgactgctatggctatagcccccaataccaacaaccttgtcatcgctcattcggaccagcaggtatttgagtacagcatcccagacaaacagtatacagattggagccggactgtccagaagcagggctttcaccacctttggctccaaagggatactcctatcacacaacatcaggttttcatcccaaagagaccgatgcacatccttctccatgatgcctacatgttctgcatcattgacaagtcattgccccttccaaatgacaaaaccttactctacaatccattttctcccacgaaatgaatcagatgtcaatccggaggcgcacagctcattgctttttaaaacatttctaagatatattaagcctctactcttcatgggatctttgggatgaaagaacactccgtggcagtagaacggcctctggatgacatcattgatcaggcccaccaaccattaaaaagaagaaattgggaacctaaaacagggcactgtctgtgtccttcctggaactgtctccctgtggtttcacatcatgtaatacaagttttttgaaaacacaacaaaaaaagggggggctaagaatccaggggcaattagggacg

SEQ ID NO: 173677 - DNA, 879 bp, Homo Sapiens
cagattgtgaaacaacagggtagacagttcaaggaaggcacagcagtgcctgttttagttccaaattcttcttttaatggtgtggactgagcaaagatgtcatccagagccgttctactgccacgagtgttctttcatccaaagatccatgaagagtagaggcttatatatcttagaaattttaaaagcatgagctgtgcgcctccggatgacatctgattcattcgtgggagaaaatggattgtagagtaaggttttgtcatttggaaggggcaatgacttgtcaatgatgcagaacatgtaggcatcatggagaaggatgtgcatcggtctcttgggatgaaaactgatgtgtgtgataggagtatccctttggagccaaaggtggtgaaagccctgcttctggacagtccggctccaatctgtatactgtttgtctgggatgctgtactcaaatacctgctggtccgaatgagcgatgacaaggttgttggtattgggggcaatagccatagcagtcactgggaaattgtaagcaggcaccgcgcagtgaagctttagctgttttacgttgtagacatggactccagcactggtacctgatgcagatagccaattcccatctggactgactgccaaaagacacatggcctccactgttcctgactgaggctagaaagcatgcaggtgcttgaagcttcctcctgacagctgaacaatatgcagagctccttgatttgatgctacaaagagctgtgctgaatcttcagaaaacaaaatctgaagggcagagcgaaggaatgctggcattttggaaacccttttgaggcttatgttgtcatgttcataattcagccgatagagaaaaaaccgagaaac

SEQ ID NO: 173678 - DNA, 768 bp, Homo Sapiens
tgcataattagcatttaacaagagaattacacactcagtttgtagatattatatcacacttacgctggtaaaatagcatgtctgaaggtaacttcaattctgcagtgaatgtgtagccgatagctccagtctagggtagggaaatactaaaataatgatagatactgtgagagacatacccaataaggtactgacatttacttctaagagaaccactcaactaaacaaaaccataaaattatatctaaatatgaaaaaagttctaaagctaacatgttttaagtttacataagaacacttgaagaattcaaacatcatgccacatgaccaagttactgacaagatcacttgttgatgaggtccttaaataaatccatttgcctgaagttcaagatagactccccttacactatactgatttaaaaattcagtaacatctgcccatgggggagaaatgctatatgaaccacttgaccagtgtaacaaaaaactagtaaatcagaaaaattttatcaaacaacatttatcaggcatttactgtgatcatctatataagaaaacaaaagaggtaaagcccttaggatctatgtcccagcataactgtctggagaaagtttccaggttgcagcacaggaacagagaacagaaacacaatcccgagacatcgccaaattgagaagtcagagatacatgaagttcgtatggccaaggaggtgagacttgtgaggaagagtacttcagaaaagggagacacatgagagactttgg

SEQ ID NO: 173679 - DNA, 274 bp, Homo Sapiens
tcagaaaagttaccacagggagtaacaagaggtgcattctctggtcagacagcccaagtgaggaggtagttattctgagaacttctcaaatagagattattgtactaaactactgagagctggggaagtagcaggagcttctctgtgagactgaagacagcaacaggaatacttctcctccagggaagtcaggaccagggtgtcagtgcagcttgaaagtggctcttttctgacaaaactttaaaagtatcttgttgggagcttggggcctcaa

SEQ ID NO: 173680 - DNA, 593 bp, Homo Sapiens
  misc_feature (298)..(328): n is a, c, g, or t
gatggaaatcacctccggggggacttcctcgggctcaggatagtcttctgggggactggtgagcttcagcttgctcaggatctgcccgcggatcgcctcgatcctcttgcgcatgaactggtccatatcgagtgtgctgcaggtagacaggctgagcgcgaccgtgaccagatgcaggatcagaaaagcgctcagcacacagtagtgcattttttataaaagtggaaaaaaaagttgtttttaaaagtcagaataataataagagatctactattctctaagtatagatcaaggagannnnnnnnnnnnnnnnnnnnnnnnnnnnnnnatgcgcaacttttgctaacaatctagtctatgcccaacaggaatacgtatcttgcttgatctccgttataataagcgaaggccagtagttccaaaagtggaaatattaatacgggacgggcagagggaaccctgactttggcgagtaagaagaaaaaaattcttggagcaatgagatggggaaagaaagagacgagtggctattaagtagaaataaatttaagaggaggaagtggagttcagtgtgtcagtcttggtccggtatt

SEQ ID NO: 173681 - DNA, 499 bp, Homo Sapiens
  misc_feature (296)..(419): n is a, c, g, or t
gcagctctaggagttgagggccttcagtcaacaattgtaagtaattgaattcagttcacagactgaataagcttggaagaagacactgagcatccaatgagaccccagctccaactgacactctggttgccgtattgtgaccctgaatagaagacccagttaaaccctgcccagacccttggctcatgaaaacagataataactggttggtgttttaagctgctcagtttgcactggtaaaaccaccaacaggaaagtattatagcagttaaatgggccggacgtggtggctcatnnnnnnnnnnnnnnnnnnnnnnnnnnnnnnnnnnnnnnnnnnnnnnnnnnnnnnnnnnnnnnnnnnnnnnnnnnnnnnnnnnnnnnnnnnnnnnnnnnnnnnnnnnnnnnnnnnnnnnnnnnnngtggcatgcacctgaaatcccagctactcaggaggctgaggtcaggagaatcacttgcacccaggaggtggagctgctat

SEQ ID NO: 173682 - DNA, 486 bp, Homo Sapiens
cagtgtccatatttcataatgaccccaacagaacttatacctgaaggagaggaaatgcatcctgctaaaaacaaaatcaaaactcattaagtgaagcagttaggtcaccgaagagtaacttttatcattataacacaacatgataaaagtaagtagctcttagctggctaagacacagagaattctccattattcaaaataaggaagacttatcaacacagatatgtattccatggcaaacaaggttttccctttcttctcaaattctaaacacagtaatcacataactgctaacggctgctgttttacagaaatctccaagaaaaaaagacacaaatgcaagtcggccctgaaggagcacattctttcgcagaagcctctcggctgctgatcctctgggggatccagcaccttgtaggaggaaggcaggcagggaaaggatggatagcagtggactctgacagacatgcacttggctccaccctt

SEQ ID NO: 173683 - DNA, 232 bp, Homo Sapiens
actgcaatattaggaggttccagatctcgtgatgtcagttaccacgccttgtgaggtgtctctatgtgctacaagttggtttaaggttaatcagaagaaggtccccagctgtccaatcttgaagaagtatcttacaccatatctctccagcaagcagccaacaaggacctcaggcctgccaattgccgcatgagtgagcttggaaacagcctccccaagtagcgctttgaga

SEQ ID NO: 173684 - DNA, 618 bp, Homo Sapiens
taaggaggtgggaatgttaattagtacagtcattactgaaaacagtatggaggtttctcaaaaaattaaaaatagaactaccatatgatctagcaatcccactactggatatacacccaaaggaaatgaaatcagcatgtgaaaaagatatctgaactatgtttattgtggcactactcacaatcgcaagatatgaaatcaacctaaatgtccacagaaagacgaatggatgaagaaaatgtggtatggagacatgatagaatactattcagccacaaaaagaataaaatcctgtcttttgtggcaacacggataaacctggaagacattaagtgaaataggccatgcatagtaagacaaatatctcacgatttcatccacatgtggaatctgaaaggctgttctcacagaagtagagaatagaataggggtacgagaactctggggaggacagaggaaagagaaataggcagagattggtccacaagtacaaagctactagttagatagataaatttctcgtgttctaacgcatgatagcataatctagagttaacaataatgtattgcatatttcaaatagcagaagggccaggcatgcacctcctaatgattacg

SEQ ID NO: 173685 - DNA, 331 bp, Homo Sapiens
ggcatgtgaccaaagagacacggtgcaaagagaaccacatagagcacagaagaggactactctcaaatggtgtcacgttctgaagtggacctgactgggctgggagcagtgaagtgtgcctctcatcagattaccacatgaatcacccagacaacccacagggacctttagcttaggacagcgtacagtaggttatccaactgtcatctcctgtgaataatttaagagtacacttaaatggaaatctttctatgaggtaatttgtacacacgaataatgaaagcttatctcaatatcaaaagtaaatactttgagccagatatttataatt

SEQ ID NO: 173686 - DNA, 683 bp, Homo Sapiens
tttgttgatcccattactacgtggtaagaagcaatcctaatgtttcttgtacacaattttatttatgaatacaacaacctgaagaggtaggaactgatattcccattgtacagatgagaagacagatgctcagagagcttatttgtctgttgaagccaaaacctgtgcccttgaccacaatggacactatatcttctgagctccacttaattagagaatttggatcaagtgactaaataaatcacacaccacacacattaagatacgccagagtgacagggacattaaataaatcaagtatccatgaagtttgctgccttccaaatcagccccctattcttttgccctaagatatcccatcatagtctgtttccttcccttctctctttgccctcaacctttccttccctcttatccatgggaatgactctaggaatcctgttgagtgtatgtgtgtgcgtgttcttttctttttctctcatgaatattacacttttattagccagctatacttgtgttgatgaaaaagacaaaatggaattttgttttcctttaacaatcaagtatgaatggtctgcttacaggatgtcccttcttggggtccttggaggtaacaaaagctcatcattaaacaggtagctatcatttctacatgcttagtatcacttccgattatcttattc

SEQ ID NO: 173687 - DNA, 315 bp, Homo Sapiens
gattgtgtgcggaagttagctgttaaagagtaaactgtaatgaataagtgagtaacgtatatcacagagataggacattttccagaggatgcctgtgagagctgtgtccctgtcttgtctccaaccttcaaagacctactccgttacatgaaaatgcttggctcaagccggaggctgtttgggtacaaccttctaatttcattccttagctgtgaccttgaataagctgctaaatctgtgcctcagcttcctcatttgtgagatgggtcaaaaacagtatcttctgtctaggaatatgaataaggtttaaatgaa

SEQ ID NO: 173688 - DNA, 481 bp, Homo Sapiens
gtataagaggtgctcgcgacttgcaatagtattggtcttgtgtatacccaatttatcttgtgcaagtcaggatttctctggtgccggaaaaagtggtgattaaacttaggctgttaagaactggtataataacaacatcaacggtaatgcatttgttagtttttcttttttattatatcgatctatatgaaagaaaatatgggaagtacatgaagctcagaattatcaatactgttgacgtttcctgcgtaccacattctcctctcccctagatattgctgggatttgcaaagtttaacggtttctgtgccaaaagtaacttagcttaaaatacttgttccttgaaatgcctgggaattggtaggaaagcactttcaatcggtattagaaacaaacatctccactatgttctggacacgtaacgttctggaaacgaatgagagtgtattttccactgctacatatccacctcttatatatg

SEQ ID NO: 173689 - DNA, 1053 bp, Homo Sapiens
taaaaagcaggctggtaccggtccggaattcccgggatatcgtcggaccacgcgtccgatcttaataacataactttttaatcaaatgtttatttggcttgtggatcttggtgttatttaaaaaaattgaggtgatggtcattgcaagctcatatattaagtactatatggtacacagtctatgagtcattagtcttcatgttaatatgtaaaaaatcttgatgctgtattgatttgtttgcatttaagatgacagtgagaaaatgataagcataaagagaagtatcaggttatttgctttttccaaacttttcagatgaactattgtttagtacagagactgagcaaatactacaaaattcaacgtaaccttcatttcattggtttaaatgcgttattaaccatcttaagtgcaaactaatcattgtaaattatattttagcatggtctgcctcaaatagtaatgtatttttctgcattcacttggatatatttagaatcacttttttcctcctgtatcaaggaagaggtatgtgctgatttgtttggatatttgacaaggcactctgatgtgacttccctgactactaccttcatatttcatttcaaattcaaacttctgaggttgcagcatatatgaattgcattttcaaaagaagatttgtaagaattaaactatatttatgagtaaacttttgagggttctgctgtattgttctccaatgttatacactttaccttctggtacaacatggggccggtggattcctccggaacccccaacaagaattctcacgctgccatgatatgtctgacccccttaattacggcacggaaggtcaccttgccacggaatttaggacccccgcggcacaactatcaactcttctagcccccttcggacgggagaaccactctccaggcaacgctctttcaacaccctcgctattactctctggggcataccccacgccagctccaagcactgggttacaaatacccacacaataccccaccactttatggccacgtgcattacccacaccaatcacc

SEQ ID NO: 173690 - DNA, 580 bp, Homo Sapiens
aagactgtataaatagtaaaaggttgagtggggtgacctgtgagtcctaacactctcttctctattcatccatctcaggagactctaatcattccagtgagcccagacactcagcaatccaatggctgagggatctgaggcacaaacctggagctcaatggatccgggtcacctacaagtctttgaagggtgtcacaggacaaaggaaacagacatgatctgtggtgcccagtggctgagctaagacaaaacgatggaatggaactgcagcaggagacttgatctctcttcactgtaaaaagcaaattccaagagtcagagctacccaaataaaggatgagctaccttggatggaaatgagctgcttatcactagagatgtgcaagactgtaataaataagtaaaaggctgagtggggtgacctgtgagtcctaacaatctactatctactatacatacccatctcaggagactactaatcataccagtgagcccagacactcagcaatccaatggctgagggatctgaagcacaaaccaggagctcaatggatccgggtcagctccttaaagataaacg

SEQ ID NO: 173691 - DNA, 335 bp, Homo Sapiens
cgttaatcattaggaggtggagcacgagcatgtggtactgctgcattctggagtcaagttgaaatgactttggagcccaagtatttcagaaaatctgtacctctactcttccctagggcattactgtttcagaatcaacagtatactgagaacctgtttaaaatattcttaaatactcttcatttttacaaatgagataatattgcttatttagaaatattattaacttttctctatatgttgtggctatttatttatttatttgtttttgagagagtctcactctgctgcttaggctagaatatagtggcacaatcttcgctcactacaacttc

SEQ ID NO: 173692 - DNA, 487 bp, Homo Sapiens
  misc_feature (57)..(108): n is a, c, g, or t
gttactcatataggaggtgcgtggtgacaagagcatctccgggtgcagggaagggannnnnnnnnnnnnnnnnnnnnnnnnnnnnnnnnnnnnnnnnnnnnnnnnnnnggggcttgcatcccctgaaataacagcctgagctgtaccttggcctcttttacccacagctggagcaggtgggatgccccaagtcccgaggctgcacactgcaggggggccctggaccctgcccataaaaccattttttacctcctaggcctctgggcctgtgatgggaggggctgctgtgaaagtctctgagatgccctagagacattttccccgctgtcttggtgattaacatttggctccttgtttcttatgcaaatttctgtagccagcttgaatttctccccagaatatgggtttttcttttctaccacatcgtcaggctgcaaatgttgactccatgtctcacatccaggtcatgtggggattatgggaagta

SEQ ID NO: 173693 - DNA, 459 bp, Homo Sapiens
atttcatgagacctgaatagtggaaaatataaaacataaagtatgcacttgaatcttattctattgattaacaaaaaagcaagcacataatacaacgaatcccctttctatttaacaggagtagacgtaccagtttaaaattcttctactgtaagtactagaagcaaaatattaatctttgtgattattacttctccaaactagaggagagatatccaaaaaccatttcatgaaaataactagttgattcaggggtatgaaaatcagtcaaactggatatggaattattatcttcgaaggaaccagaaaaccaatcaaatatcttgctttctagatgacagtgccaagatcatattcactgagcaagaaacaggtaacagtgactaaggtttacaggctgagaaataaattcaggtaacagaaatgtgattatttgtaggtggctagataggctgaacc

SEQ ID NO: 173694 - DNA, 1134 bp, Homo Sapiens
  misc_feature (140)..(185): n is a, c, g, or t
  misc_feature (1123)..(1123): n is a, c, g, or t
ccaggagtggcctgtgcctcccacctcttccttcccactgccaaaggcctgtgttgagaaagatgtcatgcaaaaggacgacggtggccaactaaagcaagtcttccttccaccctgtggcctgcacttgagccacaaannnnnnnnnnnnnnnnnnnnnnnnnnnnnnnnnnnnnnnnnnnnnngctatgaggctgattcctgtttggatttttgtcctcacgtgtatcattaagctggcctttgggcctttttcctttctacctcccctgtgacctttcctagcctcagatctgttaattcttttggccccagccctgtccctcactgtcctctgtccttggaccagaaccctggggtcagacccatctcctgtagctgtccatcacactgacaggcttcttcctgagatatcctcaggttttctcagccagagagctgcctttagagtccaactgttgtacgtatgtcaccttcactagaaatgtcccatcatcgtgggaggggagcagggcacaggggatggtgtgcattcagagcattgggttgggggcttccctgttccctcagccccagtcgagaggaaagagaatcgggccactgccagaaagagagtcaagcaaacctggaagggcaaatctgagagtgggaaggccaaaggccgaggcccagatttagtattcactagcagcgccttcgggtagcaggatgattccttttcctgcctgtctgctgctggctctcttccctaaggtacaggttggcaggaccacctccgccctacttctcccacccatcccctagcatgcccagcccgttccccagatcaacctgcccagtggagtcaggcagtgcactccctggagccaagagggaagggcagggtagagagggtatgtccagtagcctggagctccatggtggcttcatgcctcccttctcccagctcaggtggccctgagggctccctcggaacagtgcctcaaatcctgacccaagggccagcatggggaagagatggttgcaggcaaaatgcactttatagagattttctattgctgggaaggtgtgtttctcccacaatttgtttgtgaatattcacttgttttataaatgtctgaantaatcttcagt

SEQ ID NO: 173695 - DNA, 618 bp, Homo Sapiens
ctagtattcctaatccaagatggtcatcactgatagtaagattcatcctctcacaatttcagtcacaggaaatggggtggtgaccaaacaagctcaagtgataaactgctggtgatatgtatatatgtttgttgttttctccacctctgaggtgctgggttgcctgataccaaagtgtaccagtttgtgtactaaagttgtttttctggcagcctgagacttcgctttttagaaaatgcagcaattggttgatttttgttgttcctgaaggacccatcacactacccacggtatctgagtttcaaatctagcatggcttgggtaatctgtgattgtacctgtttcttcctgggattctgcacatagccaggagcatctcattgcttcattccgtgttatcttgcagttatgcctgggatatgcagatggaaatgcatattttattgtaaattacattttatatctagcttatattacccttagggcattaagtgggtcttttaaacttatgtctgttaagtaggttgtctgtgacttgacgtcgggcagtaaaggtagatgctaagcaagtatttattatcacaaggaaatgttgagtccacattaagggtgagaact

SEQ ID NO: 173696 - DNA, 397 bp, Homo Sapiens
tcaatttctacacccaggttaggacttgagttcggtgtcactatcctgggatccaagtcatggcagagtagctggcttcgaagtacagtccttgcaggatgcaggaaatcagcttggtatggaggatacatctctgagctctggaatgctcacccagaacacaaatgtaccaattctagaaggtgttgatgtggccatctctcagggaatcaccctaccttccttggagtcttttcacccccttaatatacacattggtaaaggaaaactccacgctactggctcaaagagagggaaaaaaatgacactcaggcctgggccagttacccaagaagacagatgtgatcatcttaccctaaaggagcctttttcaggagagcctagtgtagaaattgaa

SEQ ID NO: 173697 - DNA, 538 bp, Homo Sapiens
  misc_feature (181)..(229): n is a, c, g, or t
  misc_feature (411)..(445): n is a, c, g, or t
actattaggaggtggggagggtcgaggggaaggggaccagcttccctgtgcccgctcaccccactccaccagtccccggtcgccagccggagtctcctctctaccgccactgtcacaccgtagcccacatggatagcacagttgtcagacaagattccttcagattccgagttgcctaccnnnnnnnnnnnnnnnnnnnnnnnnnnnnnnnnnnnnnnnnnnnnnnnnngaagacagcaataaccacagtacatattactgtagttctctatagttttacatacattcataccataactctgttctctcctcttttttgttttcaactttaaaaacaaaaataaacgatgataatctttactggtgaaaaggatggaaaaataaatcaacaaatgcaaccagtttgtgagnnnnnnnnnnnnnnnnnnnnnnnnnnnnnnnnnnncacctgaatgcggaagagctcggctcccgtttagcattttgtacttaaggaaataaaaaaccaacaaaggatctcacattttcttaaaaagtg

SEQ ID NO: 173698 - DNA, 425 bp, Homo Sapiens
tataaataatagtgtatgtacaatcaaacactatggagttaaaaagctgtccaatacatatttgtaaatgaaaaacaccaaggagctgaatatatatgagatgataaattttaaataaaccccacacaacttaaactatttttatagataattatttaaggtataaatatccaggacaagacatgaaaaagaacagaactgaatggcagggagagtttggcgtttcccatataatatgaaagctttccaacaggaagatattcatgaattagttacattaaaaacaaagttttagaaacagaggactgtcattctccttctcagtctagtgcctaccatgcagcagctagagtaatcttcttaaaagtacaggccagattatgtgactaaaaaaccctccaatggtttccacctcctaatgtagc

SEQ ID NO: 173699 - DNA, 423 bp, Homo Sapiens
ctattatggaggtgtgaagtaaattaaagagtctcccaacagtgaaggatgaggagagaagcaatactgtaggagttttaagatctccacaggagcactactaaagcccatccacagtgaagcaagagaatcatctttaaagggctttggagacactatgatgaatgtggactcagcaaagaggcaggcaagcaaagtcccagggataaccacagtcctatgcaaaatgacagagaaaaagccagtagagaccattaagtacccaatagtaccttcccattaaggcacttgaagtatggctctacctctgggacttggtatgaacatatattatcagaagcctagtaggtctattttaaaatgttataatagcttgacatagctctcgcaaatctttctgcatatcaaatcataatgtttcat

SEQ ID NO: 173700 - DNA, 304 bp, Homo Sapiens
ccgccggcacggcgcgcctgcggatcgcacttcaccgccggccattcggaggccgatgtggaccgcctggccgaggcggtcagaccgcttatggagccttgctgatgcgcgccctgttcgtcgccggcgcccacaccgatgtgggcaagaccttctgcgcctgcgccctgatccgcgccgcccgggcccgcggcctgtcgctggaggcgatcaagccaggtggtcagcgggatggacaccgaggactggggggagagcaatccggggcgactgctggcgtagtaacgaaagatatataggtatc

SEQ ID NO: 173701 - DNA, 433 bp, Homo Sapiens
tcggtacccgtctatcatttagagaggtgaaaggcatgatgactggaatcgcttaggagtggcgggagagaaaataaacgtggcaaaatcttcctgttgaatttacccggttgtgtaggggtcaggactcacttgactattttctcccacttttttgtgtttggagacaatttttttaaaggcgtgttcatctggctactgacacatcatgctaattgaagtgttgggtgcaggtttaaaaagtttcgagggaattggtgtgtccgtgaacaatccacgacaaacgtggtggggcccgcgggagcgctgcggcccaagacagtgtgacaagcgggaagatcacgagtccgcaagacaccaagcctccagaaatgctccagaaacgctccagaaagcctttaaagaacggatttgaacccagccacctccttaa

SEQ ID NO: 173702 - DNA, 1100 bp, Homo Sapiens
  misc_feature (907)..(944): n is a, c, g, or t
gggaggctgagcgcgggctctcaaggaaagtagtcgcggaatctcagttagcggtggagaggcagtatgtccggttcaatggcgactgcggaagctagcggcagcgatgggaaagggcaggaagtcgagacctcagtcacctattaccggttggaggaggtggcaaagcgcaactccttgaaggaactgtggcttgtgatccatgggcgagtctacgatgtcacccgcttcctcaacgagcaccctggaggagaagaggttctgctggaacaagctggtgtagatgcaagtgaaagctttgaagatgtaggacactcttctgatgccagagaaatgctaaagcagtactacattggtgatatccatccgagtgaccttaaacctgaaagtggtagcaaggacccttcaaaaaatgatacatgcaaaagttgctgggcatattggattttacccatcataggcgctgttctcttaggtttcctgtaccgctactacacatcggaaagcaaatcctcctgaggaggccttgctgaagttagaaagtgcatccactttggggcgaaaactagagacttgcttgggggctgcagaagtgccctctcctcgaatcctgccagttgcattcttcccccttggagccaagacgattggccagacatcacctcagatctgagaccagcgtcttccatctctcagagccttactcccaaagtacctgctcactgttccgtgttgaacaattgccgggtgtttcctctcttcactggtttccatgagtacccttatatttcacaactttctgttcataagttatagtgacattgctctttggtaaaaatgcctgctttccaatactttgattgcatattagacattcttaacagggcggcagtctagtgttgaaagnnnnnnnnnnnnnnnnnnnnnnnnnnnnnnnnnnnnnnaaaaaattctgatttaggggctaggtgtggtgggctcagggcctgtaatccctgggcacttttgggacgccaaggtgggaaagatcgccttgaaggcccaaaagtttcaagaccagccctggggtaacattagccaagaccccctatcctgtattt

SEQ ID NO: 173703 - DNA, 143 bp, Homo Sapiens
catcgtgagcgccctcgacacccgcgccggcaaagatggcgactttcctgacgtcgttaagcagcttgaccagttgacgacgtcctccgggttcggctcgatagtcggccgacgactcgggatgaaaaccggggaggcggtac

SEQ ID NO: 173704 - DNA, 223 bp, Homo Sapiens
cgtttatcataggaggtggagtgctgctagggctgcaataatgaagggcaagatgagctatttagttcagaacacacatcttagagattctgttctgttaagaggagttttgtgaaaactagatctaattttaggaattttctcaccagaaaaacggagcttcatttcttaaaccctcatctggaaaaattctaagcctcctaaggctgacatgcacctcgta

SEQ ID NO: 173705 - DNA, 579 bp, Homo Sapiens
tgtgaaaatctcctatgttgtcagtcttgtcagtttcttcctgtagacctgtcagtttttactttatattttgaggcatgttatttggtgttattagtttataattgttatatcttcttggtaggttaaaatgtatcactaataatgctttttgccttaccatctactttgtctgatagtaatatggctatcccagctttcttttgattagtattggcctggaatatcttcttgtcctcggaggatttaatttttgtgaacatctcttcaataaacctttgatgactggcttccagtaaattcaaacctaactacaaaaatcttacattttgtatgtgtgagaaatatgctctgaacatatgatgtaaagctgtgatgaatcagtaattcgggaaccagttgtgacttcagatgtttttgggtttttggtcttgtcgttatgcaggttgacatgtttgggttctgtaagtcatgtgtttctgtctttgattccctactccacattgactcagtcagcagatcatttttaattcttcctatacaatccctttcacataaatccctctttttgtccacctc

SEQ ID NO: 173706 - DNA, 331 bp, Homo Sapiens
cacactgtatgctctcagcagaaagtggcaagcagatggccgcgaggaagccatgaaggcctgcatggggaggcgaccaactccatggcttctgataaccagcctggaggtatgatctcagagtcacattgataacattggaatccatgatgcccaacaaggtcaggaagattggcgagctcgtgagatacctgaacaccaaccctgtgggtggccattattggagtacgcccgctcccatggctttgctgctgaattcaagtaggtcgaccagtccggacctcctcaagagcacaaggtggggagacacacaggagagcacacaggtgga

SEQ ID NO: 173707 - DNA, 1341 bp, Homo Sapiens
  misc_feature (79)..(79): n is a, c, g, or t
  misc_feature (233)..(271): n is a, c, g, or t
  misc_feature (315)..(335): n is a, c, g, or t
  misc_feature (367)..(480): n is a, c, g, or t
  misc_feature (1101)..(1156): n is a, c, g, or t
cggtgggggtgtcgcgggtgtggagtccggccggcctgtaacgggggcccgcgtgggaggtgctgtgtggtagttgccngtgtggtggtgtcccagaggagaggccgtgtggcggtttgcgcgcgcgggtgggggttttgtgtttttgtgtggggtgaagagactggggggtccctttgtggttcttggcggggaggatgggttttctgatggggaccgagcggttttggacnnnnnnnnnnnnnnnnnnnnnnnnnnnnnnnnnnnnnnnagaagcgtaaggaggaggttgttgatggaggaagtttttttgannnnnnnnnnnnnnnnnnnnnccgacacgaggttgtttatggttttgcgctcnnnnnnnnnnnnnnnnnnnnnnnnnnnnnnnnnnnnnnnnnnnnnnnnnnnnnnnnnnnnnnnnnnnnnnnnnnnnnnnnnnnnnnnnnnnnnnnnnnnnnnnnnnnnnnnnnnaagttatagcacaggttattggctagaaatgaattttagcaggccctgtctcagtgtgaatgaggcaaatttaggcccacatcattaggtatttcacaacttaacacctaaaattttaacataaatttacaaaaataaggcttattttaaagtcatctggagaaactgttttacaggtatcttaactttatttagctctctgtagaattaacatctttgcaaatatattattcaaccaagcatttgccataaagataagcatcaactttcccattggacaagtgatagtgttcaagctacttgacttgtgaaaaacaaaaaaccaccatgacttctcaacaaaaacattttaaaatgaaatatgctcaggctgataaacaaacaagatattaaaatggagactgacattgaactacatagtcaacttgaaaaacacaagaagacaatgctcctataaaatgatatattattggctttacaaagacatactggtttatgtttacaactatgttttattttcaaatggtaaaggaaaggcttcatgttgctatttgaaagtacttctcaactatccgggcatggtggcataattcctgaagtaggaggatcatccccttgagnnnnnnnnnnnnnnnnnnnnnnnnnnnnnnnnnnnnnnnnnnnnnnnnnnnnnnnntgaccgagtgagaccctgtctttaaaactaaaagaaagtacttctctgcaagtaaattttatggatataatctttattctgattaaataaatgattaccctaatcagctattatttattattttctattatacattcatttttgaagtgccgagacctgcctatgtcgcataagtgtgtcgagca

SEQ ID NO: 173708 - DNA, 1020 bp, Homo Sapiens
  misc_feature (126)..(126): n is a, c, g, or t
  misc_feature (1005)..(1005): n is a, c, g, or t
gggggccctacttctccgttactactacgacaggtacacgcagagctgccgccagttcctgtacgggggctgcgagggcaacgccaacaatttctacacctgggaggcttgcgacgatgcttgctnggaggatagaaaaagttcccaaagtttgccggctgcaagtgagtgtggacgaccagtgtgaggggtccacagaaaagtatttctttaatctaagttccatgacatgtgaaaaattcttttccggtgggtgtcaccggaaccggattgagaacaggtttccagatgaagctacttgtatgggcttctgcgcaccaaagaaaattccatcattttgctacagtccaaaagatgagggactgtgctctgccaatgtgactcgctattattttaatccaagatacagaacctgtgatgctttcacctatactggctgtggagggaatgacaataactttgttagcagggaggattgcaaacgtgcatgtgcaaaagctttgaaaaagaaaaagaagatgccaaagcttcgctttgccagtagaatccggaaaattcggaagaagcaattttaaacattcttaatatgtcatcttgtttgtctttatggcttatttgcctttatggttgtatctgaagaataatatgacagcatgaggaaacaaatcattggtgatttattcaccagtttttattaatacaagtcactttttaaaaaatttggatttttttatatataactagctgctattcaaatgtgagtctaccatttttaatttatggttcaactgtttgtgagactgaattcttgcaatgcataagatataaaagcaaatatgactcactcatttcttggggtcgtattcctgatttcagaagaggatcataactgaaacaacataagacaatataatcctgtgcttttaacatatttgacaataaaaaggactagcaaataaaactcattttgcattcaaaaagaaagaaggtacagggggaaattantgcatgtcgggcgac

SEQ ID NO: 173709 - DNA, 1251 bp, Homo Sapiens
  misc_feature (252)..(320): n is a, c, g, or t
ggaacaacaagaccatttgtgacagcagcgtgtccacgcatgacctgaaggtgaaatacttggctaccttggaaactttgacaaaacattacggtgctgaaatatttgagacttccatgttactgatttcatcagaaaatgagatgaattggtttcattcgaatgacggtggaaacgttctctactacgaagtgatggtgactgggaatcttggaatccagtggaggcataaaccaaatgttgtttctgttnnnnnnnnnnnnnnnnnnnnnnnnnnnnnnnnnnnnnnnnnnnnnnnnnnnnnnnnnnnnnnnnnnnnnaagatccgggaagagtggaacaatttttcttacttccctgaaatcactcacattgtaataaaggagtctgtggtcagcattaacaagcaggacaacaagaaaatggaactgaagctctcttcccacgaggaggccttgtcctttgtgtccctggtagatggctacttccggctcacagcagatgcccatcattacctctgcaccgacgtggcccccccgttgatcgtccacaacatacagaatggctgtcatggtccaatctgtacagaatacgccatcaataaattgcggcaagaaggaagcgaggaggggatgtacgtgctgaggtggagctgcaccgactttgacaacatcctcatgaccgtcacctgcttttgaaaagtctgagcaggtgcagggtgcccagaaaccagttcaagaacctttcagatcgaggtgcagaagggccgctacagtctgcacggttcggaccgcagcttccccagcttgggagacctcatgagccacctcaagaagcagatcctgcgcacggataacatcagcttcatgctaaaacgctgctgccagcccaagccccgagaaatctccaacctgctggtggctactaagaaagcccaggagtggcagcccgtctaccccatgagccagctgagtttcgatcggatcctcaagaaggatctggtgcagggcgagcaccttgggagaggcacgagaacacacatctattctgggaccctgatggattacaaggatgacgaaggaacttctgaagagaagaagataaaagtgatcctcaaagtcttagaccccagccacagggatatttccctggccttcttcgaggcagccagcatgatgagacaggtctcccacaaactcttccaccatgatattctccacgtcgcggacacagacgccatagaggtacacg

SEQ ID NO: 173710 - DNA, 908 bp, Homo Sapiens
ggggttagagaaggtttgaggtagactctgaccgtctcataaaagagttctacccagcagttggcagattatcagctgtggactccagcatgtttctgataattatgcaagcaacaattctgtagcctcaagtaagaccacctgtgaacttgatcattatctggcccaaatatgaagataaactataactttggagtttgtttcctatttgtattcacattctgcttcctaaatcagttttctaaattatgcctgcaattaggcattggtcaggggtgaatggctcttttcacagagagtagccaaccagagacctttgctttgatatcatcaactgcagagaatgctgttgatgggaatgctggaagcagaaactttgtcatcggaaaaacttttcttgtatgcatgagactcaacatcaggatccacagcttaaagatgggaattcaggtatgaaagaaaacaggcaaggaggcactgagggagaaagacacagactttatcgctctgtggctcattgttactggaatattctaaaactcttgttcacatgctattatgacttataaagcagcaacagctgaggcgcaccaggacacagcttccatttctttaacgtctgttcccttaacatcgctgaaatgatttactgttgaagagatgccttgcggtgtggccagctgtgaggagaaagcagctggcagtgttaggacattagtccaccttcagcgcagggtctctggccgggtctgactcagaaaaccttggtactcgccccttggccacagtgcccagacccatgtaacccactggctcctgcattaacccagaaatacctcgcttctatctgtgcacttagctgggaacttacccactgtaatcacctaaataaagtgtttataaccctg

SEQ ID NO: 173711 - DNA, 1285 bp, Homo Sapiens
  misc_feature (291)..(291): n is a, c, g, or t
ctgccaaaaggtctacaggtccaactgctgccactggcagtaatcgaagacttcagcagacacaaaatcaagtagatgaggtggtggacataatgcgagttaacgtggacaaggttctggaaagagaccagaagctctctgagttagacgaccgtgcagacgcactgcaggcaggcgcttctcaatttgaaacgagcgcagccaagttgaagaggaaatattggtggaagaattgcaagatgtgggcaatcgggattactgttctggttatcttcatcatcatcatcatcngtgtgggttgtctcttcatgaagaaccagcggaactcaaaactgctgttcaagaaacctcttcaagacttttgacttagaacctgctatattatcaagcttacctactgttatctctaaaattttctgtgtgttaatggaaagttgaattttctaggaaacgtggcctttgttttttaatatgcactccaaattagaaaggccggccccgtccacattttgcacagtgcctttacagatttacgtatgggctgatgaagaggccttcttaagttccagagtgctataatctagatgtaatgttgtcactaattaattgccattactcccagttagttacccttgtcatttggcattattttcagaaccacattttaaacctttgggtaatcagatttccaacttatgccttccagaaaaaaacactactgcctaacacaaatctgtgataacaacaggctgtgccttattttgataattttctgattccctagaagagaaccctctactttttgtaagcactactgactctcgctgtatttaagatgctggtgaagagcttttgctcttgcattagatttgaagatgtttacattgttgttattgttatgtatcacttgctaaaaatattgttttaatcagagataacctctttaaaaaaatttttaaagaactatggctatgaccaaagcttctattttgccaaaaagttaaataccgataaaatggccttaagtgtattcctgacagttaaattcagaaacgtgccaaatggaactcaaggtgccccttcagaattaaaatcattaccttgtgtgtgaaccttctacatcttcataggcctttcttccttttgaaaggctgtagacagtgtggctccccttctgattcagtattttgcatgggggttagagaaggtttgaggtagactctggaccgtctcataaaagagttctacccaggcagttgggcagattatccagctgtggggcttt

SEQ ID NO: 173712 - DNA, 317 bp, Homo Sapiens
gacagaaagcaaggggtgcctaaatctagacttggggtccacaccgggcagcggggttgcaacccagcacctggtaggctccatttcttcccaagcccaagcagagggtcaggcaggccccacagaaacgcaccgaacttccacgctctgctggtcagtggcggctgtcccctccccagcccagccgcccagccacatgtgtctgcctgacccgtacacaccaggggttccggggttgggagctgaaccatccccacctcagggttatatttccctctccccttccctccccgccaagagctctgccaggggcgggc

SEQ ID NO: 173713 - DNA, 356 bp, Homo Sapiens
ctgggagtcagaagccctggcatagctgcagggcagggtcaaggaagcaatccccaccggttagcacatcctctaagctggagatgctgtggaaggctgtcaaggtggcactgtttttcctcctggctccctctggtccctcctggttgaaagcggaggtggccctgctatttattcctagctgtgggcctcctggagagtggtgtgacctctcagaacacccctttttcccagtgaatggggacacccttactatcctccttccctccgggaagtagtcgtgaagactgagaaacaccagcacaaaagaaatattccattgatacagatggagaatcatttagaccccaggcttg

SEQ ID NO: 173714 - DNA, 497 bp, Homo Sapiens
cgggatataggcactccgtaacactaatatttctacttggaaatgtgaagtggaaaacattccagtgcacataacactgaggcataaaccatgctgcaaaaggtgtgaatgcatgaggctttatagggtgcccagcctccttattaaataaaagccatgagaaagtccctaggcatattgtcagagcagccattctggtggtagcggtgtccccgaactaagcaaacctgtaagcatactgctgctttttcgacagtcaacattgcactatactagaggagccacacaggtacgaagttgagaatcagaggccagagatagagtgatgtgggcaagcaacctagaagacttggctccatacctctcaccaaggccacctttcaataagggtatctccacccagcagcctttgatgacagagcagagtgcagaggatggtctcatacttctgagagaagtattgattacctaagtctcctgagtgtcacggatcctct

SEQ ID NO: 173715 - DNA, 1746 bp, Homo Sapiens
  misc_feature (564)..(564): n is a, c, g, or t
  misc_feature (1252)..(1289): n is a, c, g, or t
  misc_feature (1509)..(1568): n is a, c, g, or t
  misc_feature (1655)..(1665): n is a, c, g, or t
gggacagacagctgaccatggaagcgaatgggttgggcctccagcgtagcatactgacacctacccccacccccacctgatcgccagacctcagggttttccggagctgaagaatgacacattcctgcgagcagcctggggagaggaaacagactacactcccgtttggtgcatgcgccaggcaggccgttacttaccagagtttagggaaacccgggctgcccaggactttttcagcacgtgtcgctctcctgaggcctgctgtgaactgactctgcagccactgcgtcgcttccctctggatgctgccatcattttctccgacatccttgttgtaccccaggcactgggcatggaggtgaccatggtacctggcaaaggacccagcttcccagagccattaagagaagagcaggacctagaacgcctacgggatccagaagtggtagcctctgagctaggctatgtgttccaagccatcacccttacccgacaacgactggctggacgtgtgccgctgattggctttgctggtgccccatggaccctgatgacatacatggnttgagggtggtggctcaagcaccatggctcaggccaagcgcttggctctatcagagacctcaaggctagccaccagctggcttcgcatcctcactgatgctctggtcccatatctggtaggacaagtggtggctcgtgccccaggcattgcagactgtttgagtcccatgcagggcatctggccccacagctcttcaacaagtttgcactgccttacatccgtgatgtggccaagcaaagtgaaggccaggttgcgggagcaggcctgcaccagtgcccatgatcatctttgctaaggatgggcattttgccctggaggagctggcccaagctggctatgaggtggttgggcttgactggacagtggccccaaagaaagcccgggagtgtgtggggaagacggtgacattgcagggcaacctggacccctgtgccttgtatgcatctgaggaggagatcgggcagttggtgaagcagatgctggatgactttggaccacatcgctacattgccaacctgggccatgggctttatcctgacatggacccagaacatgtgggcgcctttgtggatgctgtgcataaacactcacgtctgcttcgacagaactgagtgtatacctttaccctcaagtaccactaacacagatgattgatcgtttccaggacaataaaagtttcggagttgnnnnnnnnnnnnnnnnnnnnnnnnnnnnnnnnnnnnnntcgccgatttacgacacgtctacctctcttttataaaccccatgtaatacctacacacttcctttgtcgcccgcccctccgccctcgaaaaagttttccaaaccccttctttttgggcgcccgcggccccccccaacgtaaacggaaccctgggccccataaccctgtctctcctaagacaaatcccctggcccatagaaataagcggtttgggatcttnnnnnnnnnnnnnnnnnnnnnnnnnnnnnnnnnnnnnnnnnnnnnnnnnnnnnnnnnnnnacaggcgcttcttccgggggccttcccgtgggttcttacaacccggggaactcccccggggggtctcctcatatccacattttaggnnnnnnnnnnngttgcaactcttattcccaaataatccgggtacattctcctcatacgtcatttcttgccccacaccctgggaaaccccccc

SEQ ID NO: 173716 - DNA, 819 bp, Homo Sapiens
ggggcagttacagacagctgaccatggaagcgaatgggttgggacctcagggttttccggagctgaagaatgacacattcctgcgagcagcctggggagaggaaacagactacactcccgtttggtgcatgcgccaggcaggccgttacttaccagagtttagggaaacccgggctgcccaggactttttcagcacgtgtcgctctcctgaggcctgctgtgaactgactctgcagccactgcgtcgcttccctctggatgctgccatcattttctccgacatccttgttgtaccccaggcactgggcatggaggtgaccatggtacctggcaaaggacccagcttcccagagccattaagagaagagcaggacctagaacgcctacgggatccagaagtggtagcctctgagctaggctatgtgttccaagccatcacccttacccgacaacgactggctggacgtgtgccgctgattggctttgctggtgccccatggaccctgatgacatacatggttgagggtggtggctcaagcaccatggctcaggccaagcgctggctctatcagagacctcaggctagtcaccagctgcttcgcatcctcactgatgctctggtcccatatctggtaggacaagtggtggctggtgcccaggcattgcagctgtttgagtcccatgcagggcatcttggcccacagctcttcaacaagtttgcactgccttacatcccgtgatgtggccaagcaagtgaagggccaggttgcggggaggcaggcctgggcaccagtggcccatgatcatcctttgctaaag

SEQ ID NO: 173717 - DNA, 929 bp, Homo Sapiens
acagcacagaggaggggcactggctgggctttcattaagcacatcctttctgataaagactaaaagatcttcatgattgtcattccactccaggtcctggcaaatgtagcctacatcatcatagagtccaccgaggagggcacgactgaatatggcttgtggaaggactctcgatttctggtcgacctgttgtgttgtggtgccatcctcttcccagtggtgtggtcaatcagacatttacaagaagcatcagcaacagatggaaaaggcaagttctctcgtgctcattttgtgttgctcagcttgctctgaacccacgtgctgcggcactgcggaggagtggaggcagcctatggtgtcaagatgctgtcttcctgggaggagagctaggggaggcctggggcccacttcgtgagagtagccaggggtagtttggagaaggaggtgttgagtcagttgtataaggaggaggttgggggtgactgctgcttattaagatgattcatttcatttccactcgtggttgtgattttcaccttctcaaaactgagtcagcaagagaaaatcttgtcttagaaaggccagataacacttcgctgtgagaacaggagggataatggattggagatggctatgtgtaaagcagccctgcctgctgatttaacacactttcaaaatagatgtgtcaagtattcatttaaaagcaagactctgaatgacagaaagaaccttggaaaactacctgaatattggaaatggttgtggcccttttaatagccccttttgcattcttccttggactttcccagtccaggccttctctaaatccaaaagaaaaagcttgcaaaagaaaaatggttttggtgggggtgtccttggggcttaattttggaataagggtttcctggaacccacccgggctggcctat

SEQ ID NO: 173718 - DNA, 141 bp, Homo Sapiens
agcacagaggaggtggacagcacagggagtgacatgctgaacaattgtgatggagctggcagaggctgtagctggctgctgaatgtggatgggttgcagggctggtgtggctggggccagggcacgctgaggctggaaagg

SEQ ID NO: 173719 - DNA, 299 bp, Homo Sapiens
cccatacagagtaagttgtgaagcttgttgacttgatcagaatgatcagccagcatgcatgttctaatacgctgatttgtcactgataggagcagcaggaaaactgagaagggggctgttaaccttccgggaaatgtaggtcttcagtggattcccccaaatttctttcaaaaaaaatttgtaatgttctttttcagtgaagcctttgcactgctagagctgaagaatgtgatcaatcggcttgttgaataatcccgcacagtaggtattccgcttacctactgtgtatgggggatcta

SEQ ID NO: 173720 - DNA, 281 bp, Homo Sapiens
actctagaggtgccccgagatccccatacagagtatacagaatggcatcacataaatgagtctaaatatagataggcagcaagaggcacaataaatagcaacatttatagtacttccacaatcaaaataattctatgctatcacaggaaaagacagtcaatgacaccaaccagtgagtccagaagtcaaatagatgagaatttagtatttgatgtgtagaactttaaataagtgagcaggcacaggggtacttgcctgcagtcacagatactctgtatggg

SEQ ID NO: 173721 - DNA, 244 bp, Homo Sapiens
actctagaggttacccgagatccccatacagagtagctgggattgcaagatgtgagccactatgcctgccctctaagaaactttcttataaaggaggaagaagaaaagtaacagtgcagtgctccaaagaatttttttacaacacttaaggaagaactacctttaacttgtagcactagagactctgtttcaaagaatgcacaagaatacttacccttattactggtaatatactctgtatggg

SEQ ID NO: 173722 - DNA, 296 bp, Homo Sapiens
aagatccccatacacgtagggtagaagaacaataaaaagagtaaaatatgggtaaacacaatagactttcccctccttttgaattttctaaattgtatgatggttgaagcaagaattatagcactgatttggttttcagtatatatattggaaatatttaaggcattatgttacagatgaaggagggtcaaaggatataaagggaggtaacctttctatatttcttttgtactgatgcaggcactttggaaaataatttcactatttgtttaaaaactgaacatactctgtatggg

SEQ ID NO: 173723 - DNA, 869 bp, Homo Sapiens
  misc_feature (47)..(269): n is a, c, g, or t
  misc_feature (703)..(703): n is a, c, g, or t
  misc_feature (823)..(823): n is a, c, g, or t
  misc_feature (825)..(825): n is a, c, g, or t
  misc_feature (837)..(837): n is a, c, g, or t
aaaaatgaaaataaaattagccgagcgtgatgcctcagcctctctannnnnnnnnnnnnnnnnnnnnnnnnnnnnnnnnnnnnnnnnnnnnnnnnnnnnnnnnnnnnnnnnnnnnnnnnnnnnnnnnnnnnnnnnnnnnnnnnnnnnnnnnnnnnnnnnnnnnnnnnnnnnnnnnnnnnnnnnnnnnnnnnnnnnnnnnnnnnnnnnnnnnnnnnnnnnnnnnnnnnnnnnnnnnnnnnnnnnnnnnnnnnnnnnnnnnnnnnnnnnnnggaagcttttcctgatccactaactaaggacaatcaaacccttcatgatctagaatctggagactgtgtcttctgggaatagtatcagagaaagactgcccttactgcccacatgtagcaaaactttgagacgttgaattatgggtccataatctcacaactcagaggggcacctctagactcttggaactgtatatctattggagactttaaggtaaagctgaacagagagacgtttttctccagaagcagacagcaccatagtcatggacagctttcccaagatcacagatcaagacttctctgccgtcatgagactcataacctcttaattttttcttgcttatgcttctgtgaccaatagaattggaaaaggggtggtcccgcgtgcacccatagggtatacttttatttgtggaggattttgctgccanccttatacatgggcaaacttatgccttcatggatggaagataaagggctaatatgggttagaaattttaatggtacctttgtttctccataatcattcagaaacagaacactggtccacncntgttaacctacntcataggttgaagagaacattgccaggaggcc

SEQ ID NO: 173724 - DNA, 426 bp, Homo Sapiens
aacaacggttagaacaagatggtaaattatacttcaaagtaaccaaagctcgtttaactgacaaacatcaatctattgaagaggcaaagtctgcggcaatgtgtgagatggaaaaaaagctgaaagaagaaagagaagctcgagagaagcctgaaaatcgggttgttcagattgagaaacagtgttccatgctagacgttgatctgaagcaatctcagcagaaactagaacatttgactggaaataaagaaaggatggaggatgaagttaagaatctaaccctgcaactggagcaggaatcaaataagcggctgttggtacaaaaatgaattgaagactcaagcatttgaggcagacaatttaaaaggtttagaaaagcagatgaaacaggaaataaatactttattggaagcaaagagattatta

SEQ ID NO: 173725 - DNA, 1364 bp, Homo Sapiens
  misc_feature (675)..(715): n is a, c, g, or t
  misc_feature (801)..(809): n is a, c, g, or t
  misc_feature (847)..(875): n is a, c, g, or t
  misc_feature (934)..(977): n is a, c, g, or t
  misc_feature (1062)..(1070): n is a, c, g, or t
  misc_feature (1159)..(1167): n is a, c, g, or t
ccaatacggtcctaggtagcgaggcctgggtggcgattccggcacgaggggaacagctgcggctgctggtgtgcgagagggccagcctgctgcgcaaggtacgtccgccgagctgcccggtgcccttccccgaaacgtttaatggcgagagctcccggctccccgagtttatcgtgcagacggcgtcttacatgctcgtgaacgagaaccgattctgcaacgacgccatgaaggtggcattcctaatcagcctcctcaccggggaagccgaggagtgggtggtgccctacatcgagatggatagccccatcctaggtgattaccgggccttcctcgatgagatgaaacagtgctttggctgggatgacgacgaagacgacgacgacgaagaagaggaggatgattattaggccctcgaccctcgggcctcgggggggagggccctgcacgccgccaccccctccccgcagccctcaccccgccaggagccactgctctcccccttgccctccggtccccttacctacccgcgcccgtctgctctctctcttcatttctccgtagtgcttgtctttggtccgggaatagcgctccacttaccctgcctgttgggggtcagggcctggaagccctccctccactcgggaagctgccctggaaagcggatcatcttannnnnnnnnnnnnnnnnnnnnnnnnnnnnnnnnnnnnnnnngcgggcctacaatcttggaaaaccttgggggtccccctgcgacaacccgccccacgcccttaattttgggacccacacaagggcgnnnnnnnnntgggtcttaccgccatagacacccctggggcgcggcannnnnnnnnnnnnnnnnnnnnnnnnnnnngcgtgattaagtaactccccccccttctgtataaccttctgggccccctagtgcggggnnnnnnnnnnnnnnnnnnnnnnnnnnnnnnnnnnnnnnnnnnnnttgtgggggcttactgtggtgcgaccccttacaaaggggtcgggttattgtctatttaaaacacaaggtcctcgccctttttttnnnnnnnnntcaacaagccccccataaccaaaaaatcctttcatttaaatctgggggcgccgtggtggggcgcccaccccagctcctctcttttcctnnnnnnnnngctgtttcctccccaaccagcgctttccgccgggacggggaggagccaacgattttcccccccgcacaaccgcccgtttgatcgccgggcgtggtgattttttgtgagctccgcacacctactttcttttttttgtggcgggggcagacaattctccgaggggggcaacaccccattaacctcccccttgtgggcgg

SEQ ID NO: 173726 - DNA, 1057 bp, Homo Sapiens
  misc_feature (568)..(569): n is a, c, g, or t
  misc_feature (726)..(736): n is a, c, g, or t
ctccgtggagccgcacttcctgcgagggctccgtgcgcaccttggccgagccgaaccgagccgagtcctgtccttccaggccgttcgcaatggtggatgagttggtgctgctgctgcacgcgctcctgatgcggcaccgcgccctgagcatcgagaacagccagctcatggaacagctgcggctgctggtgtgcgagagggccagcctgctgcgccaggtacgtccgccgagctgcccggtgcccttccccgaaacgtttaatggcgagagctcccggctccccgagtttatcgtgcagacggcgtcttacatgctcgtgaacgagaaccgattctgcaacgacgccatgaaggtggcattcctaatcagcctcctcaccggggaagccgaggagtgggtggtgccctacatcgagatggatagccccatcctaggtgattaccgggccttcctcgatgagatgaaacagtgctttggctgggatgacgacgaagacgacgacgacgaagaagaggaggatgattattaggccctcgaccctcgggcctccgggggggaggtgcccgnntgacggcccttccctccttgggagccctttcatgcaccgggaccccgcggtccctcccacttgcccctgcccttcgcctacctttgccccttacgattgggccctccccacgtcaagggccccagaccggtgagctcccttggatcggcttaaaaannnnnnnnnnnaactttgggcggggcggctatttgatccgatcccccacccatgatatccgccacctgttttgccaagtcgatgtccaggtcagcgcgaagaaacccggttgggcactggcccctcccgcattgtcgaagcggggcctcccgtatacgatccttccttgcccgtgctttcccccacctcttttctcaccctttcttttatactctggcccgccctattcgtgggggaggaggcgctcgactgcttcgccccgtgacgagaatgtaccgcatcttctccgcccatacaccataccatttcgtcccccgcgctcttccctcccc

SEQ ID NO: 173727 - DNA, 311 bp, Homo Sapiens
cttcccctcgggggaagggagagccgagcgctgagttggtgctggaaaccggggctaatgttgacaacaggctcgagattgtcctgggtcacataatgccagctgagcgtaaaaagccagcaagtatggaagaaaaagactctttaccaaacaacaaggaaaaagactgcagtgaaaggcggacagtgagcagcaaggagaggccaaaagacgatatcaagctcactgccaagaaggaggtcagcaaggcccctgaagacaagaagaagagactggaagatgataagagaaaaaaggaagacaaggaaccc

SEQ ID NO: 173728 - DNA, 572 bp, Homo Sapiens
ggagccactcaactgacataccatggattatgtgaactaacttcaacggttcaggaaggagaactttgtgtgttctttcggaataatcattttagcaccatgaccaaatacaagggtcaactgtatttgttggtaacggaccaggggtttcttactgaagagaaagttgtttgggaaagcctacacaacgtagatggtgatggaaatttctgtgactcagaatttcatcttcgacctccttcagatcctgaaactgtatacaaaggacaacaagatcagatagatcaggattatcttatggcattatctctacaacaagaacagcagagccaagagatcaattgggaacaaatcccggaaggaatcagtgatttggaactagcaaagaaactccaagaggaagaggacagacgggcttctcaatactatcaggaacaggaacaagcagcagctgctgctgctgctgcttctacacaggctcagcagggccagccagcacaagcctctccatcaagtggaagacaatctgggaatagtgaacgtaaacggaaggaaccacgagaaaaagacca

SEQ ID NO: 173729 - DNA, 977 bp, Homo Sapiens
tttagcctccaggcccaaatcacagctctcaccaagcacaatgaacagcacatcaaggaactagagaagaacaagtcccagatgtctggggttgaagctgctgcatctgacccctcagagaaggtcaagaagatcatgaaccaggtgttccagtccttgacggagagagtttgagctggaggaatcttacaatggcaggaccattctgggaaccatcatgaatacgatcaagatggtgactcttcagctgttaaaccaacaggagcaagagaaggaagagagcagcagtgaagaagaagaagaaaaagcagaagagcggccacgaagaccttcccaggagcagtcagcctcagccagttctgggcagcctcaagcacccctgaatagggagaggccagagtcccccatggtgccctcagagcaggtggtcgaggaagctgtcccgttgcctcctcaggccctcaccacttcccaggatggacacagaaggaaaggggactcagaagctgaggcactctcagagataaaagatggttcccttccacccgaactgtcttgcatcccatcccacagagttctagggcccccgacttcaattccacctgagcccctaggccctgtatccatggactctgagtgtgaggagtcacttgctgccagcccaatggcagctaagcccgacaacccatcaggaaaggtctgtgtcagggaagtagcaccagatggcccactacaagaaagctccacaagattgtccctgacttcagaccccgaggagggggacccactggccttagggcctgaaagcccaggagagcctcagcctccacagctcaagaaagatgatgtcactagctccaccggtcccacaaggagctgtcaagcacagaggcaggttccacagttgcaggagcagcctcagaaccagcatcatcccagggtccaggcctcgggatgacgaggctgaacgtaaaggg

SEQ ID NO: 173730 - DNA, 367 bp, Homo Sapiens
ctacactggtggcgacatgaatcaaattgcttatttgattagaacatcttagaagcattcagaacaggactcatgatatacaaaagaacaaagacaaggaatatttattgttagaaataagtgagaagacagtggaaaatctttaaagtactgaaaaaaaattgtcaacctaaaattctattcctagagaaaatctctttcaaaaacaaaggggtgaattgaaaattaaaaagctagtgttccattatgtcagcataaagtcttatgaattttgtacatacctttggtctcctctttgtttgttttcaaattacaaatattttgaaaatcctactgtctttttaagagacaatggcagccgggtgca

SEQ ID NO: 173731 - DNA, 810 bp, Homo Sapiens
gggctctctccccaagatggctgctgaggacgagttacagctgccgcggctccccgagctgttcgaaactggtagacagttactggacgaagtagaagtggcgactgaacccgccggttcccggatagtccaggagaaggtgttcaagggcttggacctccttgagaaggctgccgaaatgttatcgcagctcgacttgttcagccgaaatgaagatttggaagagattgcttccaccgacctgaagtaccttttggtgccagcgtttcaaggagccctcaccatgaaacaagtcaaccccagcaagcgtctagatcatttgcagcgggctcgagaacactttataaactacttaactcagtgccattgctatcatgtggcagagtttgagctgcccaaaaccatgaacaactctgctgaaaatcacactgccaattcctccatggcttatcctagtctcgttgctatggcatctcaaagacaggctaaaatacagagatacaagcagaagaaggagttggagcataggttgtctgcaatgaaatctgctgtggaaagtggtcaagcagatgatgagcgtgttcgtgaatattatcttcctcaccttcagaggtggattgatatcagcttagaagagattgagagcattgaccaggaaataaagatccctgagagaaacgagactcttcaagagcaggcatcaaccttctaactcatctcgccaggagaggcctccagtgcaaacccttcattctcactcggaacatggctcaagccaaagtattcggagctgggtatccaagtctgcct

SEQ ID NO: 173732 - DNA, 991 bp, Homo Sapiens
tggctggtaccggtccggaattttcgggatatcgtccatggcttatcctagtctcgttgctatggcatctcaaagacaggctaaaatacagagatacaagcagaagaaggagttggagcataggttgtctgcaatgaaatctgctgtggaaagtggtcaagcagatgatgagcgtgttcgtgaatattatcttcttcaccttcagaggtggattgatatcagcttagaagagatgagagcatgaccaggaaataaagatcctgagagaaagagactcttcaagagaggcatcaacttctaactcatctcgccaggagaggcctccagtgaaacccttcattctcactcggaacatggctcaagccaaagtatttggagctggttatccaagtctgccaactatgacggtgagtgactggtatgagcaacatcggaaatatggagcattaccggatcagggaatagccaaggcagcaccagaggaattcagaaaagcagctcagcaacaggaagaacaagaagaaaaggaggaagaggatgatgaacaaacactccacagagcccgggagtgggatgactggaaggacacccatcctaggggctatgggaaccgacagaacatgggctgatcttcccacaacaccacaggactgcagggtgcacaactcccctgccaaggaaaaccatgcagtcctcccctccctggtctcctgcttcagctctgtacaacgagggcaaagatgctaaatcttgctttgcattcagtaaagtgtcaagtgattaagtgtgtatttgtaccctagatgatatgaaccagcagtcttgttttggcatcatcctcatcatgttgtattccagcttcttaagtggaaggacaaagagtgcctgagaaaactggctctgtataatctatggctatccgaattctctgaagaacatcactaaaagtcccctctattatatgagcctgtaccaaaacacaacacaacac

SEQ ID NO: 173733 - DNA, 303 bp, Homo Sapiens
tcctttaatccaagcagtcgtgtcgcatctatagttgctcttaaaataaaacatcacctccactcacagcagacgacagcttctctatcctttcatctgaaacaactgggctgggtaaaagaataaaaggtggctcgttaccttagaatgatcacagtgacaccagtccaagcagagagcagagactgcttatgtccagtctccagaactagactgtgagctcctagaaggcagatagttttggttctatttccttctaatatctcattttctattttctgcgactgctttggattacaagga

SEQ ID NO: 173734 - DNA, 237 bp, Homo Sapiens
tccttgtaatccaagcagtcgtatgtcatccatgaaaatcggcgacctcctggttcagcagttttcaggtgaaaatggggagagaatgaaagaaaagtacggtgtgtattgtagtggccacaatgaagctgttagtcattacaagttgctgcttcagcaaaacaagaaatttcaaaactggatcaagaaaattggcaactactccatcgtgcgactgcttggattggttcactctat

SEQ ID NO: 173735 - DNA, 926 bp, Homo Sapiens
  misc_feature (865)..(865): n is a, c, g, or t
ggggatgcaacctggctggactcgcgtgacagttcccggcacgcggcggcgacggtgacccaggaaggggctctggtgccgggctgagcgggggaagcaggggtagcggagccatgggggacgctcccagccctgaagagaaactgcaccttatcacccggaacctgcaggaggttctgggggaagagaagctgaaggagatactgaaggagcgggaacttaaaatttactggggaacggcaaccacgggcaaaccacatgtggcttactttgtgcccatgtcaaagattgcagacttcttaaaggcagggtgtgaggtaacaattctgtttgcggacctccacgcatacctggataacatgaaagccccatgggaacttctagaactccgagtcagttactatgagaatgtgatcaaagcaatgctggagagcattggtgtgcccttggagaagctcaagttcatcaaaggcactgattaccagctcagcaaagagtacacactagatgtgtacagactctcctccgtggtcacacagcacgattccaagaaggctggagctgaggtggtaaagcaggtggagcaccctttgctgagtggcctcttataccccggactgccaggctttggatgaagagtatttaaaagtagatgcccaatttggaggcattgatcagagaaagattttcacctttgcagagaagtacctccctgcacttggctattcaaaacgggtccatctgatgaatcctatggttccaggattaacaggcagcaaaatgagctcttcagaagaggagtccaagattgatctccttgatcgggagggaggatgtgaagaaaaaaactgaagaaaggcccttnctgtgagcccaggaaatgtgggagaaacaatgggggggttctgtcccttcactcaaagcaa

SEQ ID NO: 173736 - DNA, 319 bp, Homo Sapiens
  misc_feature (214)..(228): n is a, c, g, or t
cacttagaggatcccctccttgtaatccaagcagtcgtatgtggaactatgactgtgcagagaccctgggaggtggtctgacccaactctgccacatgcggggggctctatttcaccactgctgcctccttggcactgctttttgaggcacattgataatttagctactctgtgttaaagatagcgatgtagactgactgattgcctgatgttnnnnnnnnnnnnnnngtgtttggcaaatacaaccctatgtggtccatatttgaatattttttcacaagtcgactgcttggattacaggaggatcctctagagcgat

SEQ ID NO: 173737 - DNA, 254 bp, Homo Sapiens
ctccttgtaatccaagcagtcgaattgaaagtaatttaagagttcaatggttgatgacttttttcaattatgatatctctttattaataggaaattcataaattaaggagtatgcaatataatcattgtggaatatattagggaaacatttttgatccatgcaagtaaattgagatagactgggtgcacctgttcctagtcatgcccagggaatatgaaaactcggctcaggatgaacggggatactctagatc

SEQ ID NO: 173738 - DNA, 276 bp, Homo Sapiens
actccttgtaatccaagcagtcgttattctaagccattttacatgaatcatcccgtttaatctcaataacaactctaagttcttttatcctcatttgacagataaggaaactgagactcacggaggttaagtaaattgcctaaggttacacagccagtaaactcgaagagctagacctgaactcagatttgccagcctccaaaggcttccagacttctaaccgtaatgctaatatatagcaaatagtctttagttcgactgcttggattacaagga

SEQ ID NO: 173739 - DNA, 325 bp, Homo Sapiens
tccttgtaatccaagcagtcgaggaacagtttctcaaagtgtttttatttatttcccagaatgtaatcctttcgaaacaattttgtcacaactgaattttcaaaagaatgaatctgagtgttttgttttacatagagacaatgcagcgaaagttttaaagcagttaaataattgtgtgtggggagggaaggctaggttgttgggctttacaaataagtacacatagagaatccgggtaactcgattaaaaatattaagactgtgaagtatggttattcagggatttacatggcgactgcttgaataaaaggagggatcctctaga

SEQ ID NO: 173740 - DNA, 135 bp, Homo Sapiens
tccttgtaatccaagcagtcggttcaagttttgtaacttggctgtgcctgaactgctactctgtgttcttactatgacaactgttttctcttttaaaattccagagattgcttattgcagttctcatgtacaaac

SEQ ID NO: 173741 - DNA, 269 bp, Homo Sapiens
tccttgtaatccaagcagtcggcaagaagagcccaccgggctataatcatggcattctctgggtactgtatcagggtccaggtggaagaaagcagcctcgtgaagtcacaggcccaacgcatgaggaccgctccacaagagcgagaagagatattaatgaaactttgtctgcctgctccaggaattttcacaatcacggcatcctcttcgctgaccagcgtccacgtacatcacggctgcttggactaccaggagtaactcaggcacgt

SEQ ID NO: 173742 - DNA, 245 bp, Homo Sapiens
  misc_feature (32)..(32): n is a, c, g, or t
gactggttccaggacctctgccaataccaacnctctgatgcccaagtcgcttatataaaatagcacagtatttgtatataagctaagcacatcctcctgtatactttaagccatctctagattatgtatgatacctaatatgatgtagctaatgctatgcaaagttgttatactttctcatttagagaataatgacaagaagaaaaaagtctgtatatattcagaacagatggaatttttccaag

SEQ ID NO: 173743 - DNA, 625 bp, Homo Sapiens
  misc_feature (603)..(603): n is a, c, g, or t
  misc_feature (609)..(609): n is a, c, g, or t
tagaggaacccctccttgaatccaagcagtcgaaagaagcttttctctctgactcctgctgaggtagaacagaggagagagcagttagagaagtacatgcaagctgttcggcaagacccattgcttgggagcagcgagactttcaacagtttcctgcgtcgggcacaacaggagacacagcaggtccccacagaggaagtgtccttggaagtgctgctcagcaacgggcagaaagttctggtcaacgtgctaacttcagatcagactgaggatgtcctggaggctgtagctgcaaagctggatcttccagacgacttgattggatactttagtctattcttagttcgagaaaaagaggatggagccttttcttttgtacggaagttgcaagagtttgagctgccttatgtgtctgtcaccagccttcggagtcaagagtataagattgtgctaaggaagagttattgggactctgcctatgatgacgatgtcatggagaaccgggttggcctgaacctgctttatgctcaaacggtatcagatattgagcgtgggtggatcttggtcaccaaggaacagcaccggcaacttcaaatcttctgncaaggngaaaagttctcccaat

SEQ ID NO: 173744 - DNA, 396 bp, Homo Sapiens
  misc_feature (213)..(213): n is a, c, g, or t
cctgcaaagctgtatctcccagatgactagatggaacacttaagtcatattcttagtgcgagaaaaagagaatgaagccttttcttttgtacgaaagttgcaagagtttgagctgccttatgtgtctgtcaccagccttcggagtcaagagtataagattgtgctaaggaagagttattgggcttctgcctatgatgacgatgtcatggaganccgggttggcctgaacctgctttatgctcagacggtatcagatattgagcgtgggtggatcttggtcaccaaggaacagcaccggcaactcaaatctctgcaagagaaagtctccaagaaggagttcctgagactggcgcttgcgctactggaaatgctcacgggtttcctacagagacacag

SEQ ID NO: 173745 - DNA, 921 bp, Homo Sapiens
  misc_feature (93)..(111): n is a, c, g, or t
  misc_feature (524)..(682): n is a, c, g, or t
  misc_feature (692)..(704): n is a, c, g, or t
  misc_feature (730)..(738): n is a, c, g, or t
  misc_feature (776)..(837): n is a, c, g, or t
tccttgtaatccaagcagtcgaatgttaagtttcattaacagtttgaagattgtcatttttaacctgccactgaaattgagcctaattgagcnnnnnnnnnnnnnnnnnnnaattagtttgcaggtcgaagtaagaaggaaaccaaatattctcttaaggctgtcgaagacatgttggaaacattgcagatcacccagtcttaaggtttcaaaaactctttgacattagatttcacaactgcacaattgaacttattggcctgtaacttatttactaaatgctcagtgctatttatatactacagtaattttctgttaagaaggcagttgtaaagaatgtgtttatataaacctaaaaatgccttttactgctaagtggggagatgggggaaatccatggaagagagatttaagacttattgattgtacatcagtctcttcatatcacatatacatgtatatatataaaactctaatgtagtataaccttgttaaataaaccatgatgatttattaaacttgcnnnnnnnnnnnnnnnnnnnnnnnnnnnnnnnnnnnnnnnnnnnnnnnnnnnnnnnnnnnnnnnnnnnnnnnnnnnnnnnnnnnnnnnnnnnnnnnnnnnnnnnnnnnnnnnnnnnnnnnnnnnnnnnnnnnnnnnnnnnnnnnnnnnnnnnnnnnnnnncttggggggnnnnnnnnnnnnnaaaaaattttttaaaacctttttttnnnnnnnnnccccccaaagaaaagggaacggggccaaatctttcccnnnnnnnnnnnnnnnnnnnnnnnnnnnnnnnnnnnnnnnnnnnnnnnnnnnnnnnnnnnnnnccgagggtttttaaaaaacaccaaaagggatttctgggggttttttcggggaacctttaaaaaggggggccccaagggggcctc

SEQ ID NO: 173746 - DNA, 629 bp, Homo Sapiens
  misc_feature (124)..(228): n is a, c, g, or t
  misc_feature (311)..(372): n is a, c, g, or t
tccttgtaatccaagcagtcggagctaagatatatttgtttgcatttgacagtgagagcattatttttaggtaaaacatgtcttcccaggatggttcaactagtagtacagagggtcttcagannnnnnnnnnnnnnnnnnnnnnnnnnnnnnnnnnnnnnnnnnnnnnnnnnnnnnnnnnnnnnnnnnnnnnnnnnnnnnnnnnnnnnnnnnnnnnnnnnnnnnnnnacaaggatccttgtaatccaagcagtcgtcatcatcaccatcatcatcattattttggtttgtttgtttttgagacagatctnnnnnnnnnnnnnnnnnnnnnnnnnnnnnnnnnnnnnnnnnnnnnnnnnnnnnnnnnnnnnntgggcttaggtgaccctgccacctcagcctctcaagtagctgggactacagacacaagctaccatgcctggctaattttttggtttctatttttggtagacagaaggttaatccaagcagtcgaatcaggctgagatacgacatagattttggagttatcagacaggaaatttaaaataactatgattaatgtgtaaaggactctgatgaaaaaagtagacagcatgcaagagcaaataggtaatataagatagatg

SEQ ID NO: 173747 - DNA, 215 bp, Homo Sapiens
tccttgtaatccaagcagtcgcacgtggcggtgtcgcggccgtcggcggcgatcagctcggcgctcaggcccaggcgtgcaaggttttcacgcacgcgcacaaggcgcttggcttcctggtccacggcgacttcaccggccaggtctttttagacatccagaatgtgacacgtcttcgactgcttggattacaaggaggggttcctctaaagtcg

SEQ ID NO: 173748 - DNA, 462 bp, Homo Sapiens
ctcgactttgaggatcccctccttgtaatccaagcagtcgcatcaggagctcttcgtagacatttgttcagaaaaagacaatttaagagaagaactaaagaaaagaacagaaactgagaagcagcatatgaacacaattaaacagttagaatcaagaatagaagaacttaataaagaagttaaagcttccagagatcaactaatagctcaagacgttacagctaaaaatgcagttcagcagttacacaaagagatggcccaacggatggaacaggccaacaagaaatgtgaagaggcacgccaagaaaaagaagcaatggtaatgaaatatgtaagaggtgagaaggaatctttagatcttcgaaaggaaaaagagacacttgagaaaaaacttagagatgcaaataaggaacttgagaaaaacactaacaaaatttagcagctttctcaggagaaaggacg

SEQ ID NO: 173749 - DNA, 1035 bp, Homo Sapiens
gggcctccggcttgccgtcctcgcagccatggcggccgccgcgctcccagcatggctgtctctgcagtcgagggcaaggactctgcgtgcattctccactgccgtctactcggccactccggtcccgacacctagcctgccggaaagaacacccggaaatgaaaggccaccaagaagaaaggcactacctcctaggacagagaaaatggctgttgaccaggactggcctagtgtttacccagttgcagcaccatttaaaccctctgcagtacctcttcctgttcgaatgggttatccagtaaaaaagggcgtgcccatggcaaaggagggaaatctagaacttttaaagattcccaattttctgcatttgactcctgtagcaattaaaaagcactgtgaagcccttaaagatttttgcactgagtggccagccgcactggacagtgacgagaaatgtgagaagcattttccaattgaaattgacagcactgattatgtttcatcaggaccatctgttcggaaccccagagcacgagtagtagtcttaagagtaaagctttccagtttgaatttagatgatcacgcaaagaagaaattaattaaacttgtaggagagcgatactgcaagaccacagatgtgcttaccatcaaaacagataggtgcccttttaggaggcagaattacgattatgcagtgtatctactaacagtgttataccatgagtcttggaatactgaagaatgggaaaaaagtaagactgaagcagacatggaagagtatatatgggaaaatagctcatcagaaagaaatatcctggaagcgcttctccagatgaaagctgctgagaaaaatatggaaataaataaagaagagctccttggtactaaagaaattgaagagtacaaaaagtctgttgttagtcttaaaaatgaggaggaaaatgaaaattccatttctcaagtacaaagaatccgtgaagagactattaaatgtgacatgaattatggagtagatatagaagagtgcacttttgg

SEQ ID NO: 173750 - DNA, 270 bp, Homo Sapiens
caaaagtgcactcttctataatcttaccatgaggagacgcccaagtgctgtgtagaaggtagtccgacaccgcatgtctgtcaggttggactgattgttaatacccaaaaatgaaaaagtgctcgctcgtgtgattgcttcaacatgaactgtaccgcactaagcttcactagcttcccttacgctactgtaccaaatggagaggtcagtgagaagctgtagtgtcttggaggtgtagatatagaagagtgcacttttcaggatcctcta

SEQ ID NO: 173751 - DNA, 273 bp, Homo Sapiens
caaaagtgcactcttctatatctacagctacaggtccagcatttcgacaatgaactctgaaatgggcagtgagctccatgtgggaacgcagtgtcttgtggcaggccacacacttaacttgaaagggaacatctttgcacagagagatcaaaagtttctttgcaaaagatgggaaagatattggatgtgcaattcctttgttatcacccagtttgaaactctgatggaaatggtagatatagaagagtgcacttttaagggatcctctagatc

SEQ ID NO: 173752 - DNA, 314 bp, Homo Sapiens
ctgacctagaggacccctaaaagtgcactcttctatatctactttaactgtaagtgatttcttcctaagattgataggcgagggtttcacatcaggaagtttttgacttttatcaagttggttactggaagaattgctctcttttctacaatccccttctttctttattttttccttccatttgtcattactagatcgcaaatcaacatcatttttatttgaataagtacaggcaatgctgtctttcttagacggtttaaaaggttctttgacttgtccatctactagatagagaagagtgcacttttggtaat

SEQ ID NO: 173753 - DNA, 482 bp, Homo Sapiens
gaaaaagaaagggaaaatgtaacactacataatgcctggaataaaagaagccggaaataaatgagagatgagttgggtatcaagtagatatagaagagtgcacttttcaaaagtgcactcttctatatctaccaccccatcagatggacgatggccttccaagaccaaggagcccgggcaagagggatggctggtgtcgatggtgcaaaaaggaaacttaggaattcagatgctttgaaaatgaacttttgctggtactgaaaaggaaagagcattctcttcctttagagaatagaggtttgagtgctccggctctgcaaacagtccctacggttggcacgttggtgtgtgcgaggggttcggaggccccagtacatctgatcacctcgcctttttgtgagtttaggtgttcagttttaatcttgttatgcaaaggaacatgtgactctttggaagtagatatagaagagtgcactttttgg

SEQ ID NO: 173754 - DNA, 309 bp, Homo Sapiens
cgagcgtatagtacagtaggttaattaataccagatgccgactgggctagatgcatcattcttcctaggggagctcagaacctccctgagggctgctttcctcctcttggacttgcagggacccagaggggaaagtcaactgcctgaagcgtggtaaaagtcctttcccatttaggctaagtgactgcacttgtttcgttttcttgtgtaaatatactggctgcattaaaattgttcttttaaaaatctaggtagatatagaagagtgcacgttagggagtaacagaggtgaaatgcgtagtcatggtc

SEQ ID NO: 173755 - DNA, 814 bp, Homo Sapiens
ctaacagttttaaaaacatgaataggtataggtttaattaagtgttttctggagtagtatttctggagttctaactgggaacatgggggcatttcctgggccattcctctttgacgggccttgcatatcaatccagtttcagcaactttctgctcaagcctcttagccacttagggctgccccacttatgaactggtggatgacttgggaggaaggttttacagaattcatcacttgccttagtatgtagatatagaagagtgcacttttgggggagcgactacgagtagatctgcacatgtaagtgagaagtacaacccattcagatattaatatacctataggacatctgataacaagcacctcaactgcagtagatgttaataactgatgtatctgaaactagaaggaagggaggttgcctttatatttagtgcattcttttgttgtagtcaagatctatcacagagtttcctgttgttatactcttggaaatgttagttgtactcagatgagggcatttaatgtgcccatttttatcactaaattctgtagtagatatagaagagtgcacttttggcaaagtgcctcacatgctagtaatctaccatatttttgaaatggacgatgatttgtacaatactgtgtatgtgcgtattttatactttaaacatttataagccatagaataatattaccagaatagttgtttcaggaaggaagttaatttagtagtcgatatagtagctgtatggagtacgggggttgattgacggttcatatatagaagtagatatagaagagtgcacttttg

SEQ ID NO: 173756 - DNA, 301 bp, Homo Sapiens
actcttctatatctccaaggctaacaactttcttctctgctcagggcactaggcggatgtgatattggaaaggccagaatagtacataaaccacaaaattaaggagacaatagcaacctcaagttatgcctcagaatccccagatgtggtccataaacaccctcttgctgccttgtgggcctgagagcatttttggctggtgtggaattgttccgtgttttcatcaggtgcctcatatttatgcttccgtctcagttcagtgtagatatagaagagtgcacttttcaaaagtgcacttttg

SEQ ID NO: 173757 - DNA, 289 bp, Homo Sapiens
cgaggttacaaaagtgcactcttctactatctacggatatcatctccctggttcattcaggcccttatcatgcctcatctttttaaaaaggttttattaattttaattggcacataataattatacatattaatggggtacaatgtgatgttttgatacatgtatacattgtgtaatgatcaaatcagggtaattaggatatctgtcatcttaaatatttattgtttctttgtggtaagaacattgaaaatccttcattctagcgtagatatagaagagtgcacttttg

SEQ ID NO: 173758 - DNA, 363 bp, Homo Sapiens
gtgaccctagaggatacccaaaagtgcactcttctatatctacagatctccagcaatctccccttttccttccccatcgcagggtgcttccttcattgtttttttggtcagcatcaccagagatttacgagtttggggcactttcaaagaatcgatagttgacttttttggccctcaatggaaggtgtgttctgaaggtttctcctccctgtgtctctagccctccctctaaggacgtttcaaacacctcttctataccaatcagctcatgtctcctgaggaagaacgctcttgatttctcttgtgtgagtctgtatttatttcacctttattcttgggtagatatagaagagtgcacttttg

SEQ ID NO: 173759 - DNA, 480 bp, Homo Sapiens
ctagaggatccccaaaagtgcactcttctatatctactacagaaagaagggtgaaaatgtggaggctttgagaaactttgtcatttgacatatatgagggtcagattactgccttacttggccacaggtggaacaggaaagagtacattgatgaatattctttggttggactctgccccaccttctgatgggtttgcatctatatatggacacagagtctcagaaatagatgaaatgtttgaagcaagaaaaatgatgggcatttgtccacagttagatatacacttggatgtttggacagtagatatagaagagtgcacttttgaaaagtgccctctttctaatatctaggtcaaccagaaaatcgtttctcccaataacttattgtgggttggatcctcagccaggaggcacaggcccctacaagatcccaggcttccaacacggacacctggaccctcccatttgactgcagccttg

SEQ ID NO: 173760 - DNA, 378 bp, Homo Sapiens
ggtaccccaaaagtgcactcttctatatctactctcacatggcagtactgggtacacgttaggtattttacaaacgaaagaatcacttagcaaggttgaatggctcaagagctgacaaaagcagaatttacaaaggatgcatagtttcatgttgttcctgtgaatgttctctgtctaggttggtgaccagattgttgaaatcaatggggaacctacacaaggaatcacacatactcgagcaattgagctcattcaggctggtggaaataaagttcttcttcttttgaggccaggaactggcttgatacctgaccatggtaagtaaagtagcccactagtagatatagaagagtgcactttaaggtcctggctagtcag

SEQ ID NO: 173761 - DNA, 249 bp, Homo Sapiens
gaggaccccaaaagtcactcttctatatctaccaccgatttgaggtgaggattccagcttgctggtactctggaaagatagtgagctgagagaccagcagaattatttttcatgcctcaacaggtgaatccagtctggaaaaagtgtttggaagaacaaggcttgaagtttgatggccaagatgttgaaggagagagaatacgaaattgtagatatagaagagtgcacttttaagctcctgcagatcac

SEQ ID NO: 173762 - DNA, 599 bp, Homo Sapiens
tagcgcgttgcctgtcgctttcccttggatacctagaccgttataaagtgtgccacatggacttaccgagcatggagagaggattttagctaggatttgaacacttggtgctgggaacctcagggtattgcttgccactaagccatgaaaccagagacaaaatctgtatactgccctgagttggggggaattctcagtgccaactgtggctggtcctccattccaaagggacggtcagtttggtgtcaacatgaaacaccaagatgtctgtctctgaagcgtgattttaaaatccccatgcctgtggcggcgcttcctatttctagggctgggaaacactccttgcatcaaggggtcacttacagaacaaagaatcttttgggggaaacttcctctaaaaccctctcatatatagacagctttgactggagggtccatttttcttccaggatggtgttactgcagttgaaagggcaatatgaagttactttcttaatgtgacctagcaataggcatagctacgtggcactatattctggccagactcgatgtgtactctaacttaagaaataaatcagtaaggcagaacaagaaaaaaa

SEQ ID NO: 173763 - DNA, 1317 bp, Homo Sapiens
  misc_feature (38)..(38): n is a, c, g, or t
  misc_feature (262)..(262): n is a, c, g, or t
aaggccatttgtactatgaaccagttggtacaaaaagnggctggtacggtcggaattccgggatatcgtcgaccacgcgtcggtggttgaattctcaagaaacgtgctgggatggcaagatgccaattctacagagtttgaccctacgaccagtcatcccgtggtcgtagacatgccagaacacaacccaggcagatgggcggaaccatgaggctgggcaagaggagaaccctgttccagaccaagaactcagtcatgaggnaaacttctatggagacgcagactacttggaagagaggcaccgccaccgatttgaggtgaatccagtctggaaaaagcgtttggaagaacaaggcttgaagtttgttggccaagatgttgaaggagagagaatggaaattgtggagttagaagatcatcccttttttgttggggttcagtaccaccctgagttcctgtccaggcctatcaagccctccccaccatactttggcctcctcctggcctctgtggggcggctctcacattacctccagaaaggctgcaggctctcacccagggacacctatagtgacaggagtggaagcagctcccctgactctgaaatcaccgaactgaagtttccatcaataaatcatgactgatcttgtagcggatgattcttcaagagacccttcaaacttgggtagagtttacagctctgactttacactcggctttggagactttctttaaattatgtttttattaagattattttattatgcggaaaggtatttgggaaacttgtcacttgcatgtcccatcacgtgtactggctcctctgtggcgtctgcctgttgcgtgacactcttcttgcagttcttgagttgcggcagaacatcgcgatgggaaccgatggtgggcgccgctgcagagtgccccatcggtcaccttgtttctccactacctcgcatcattgcagatgctagcgcgttgcctgtagctttcccttggatacctagaccggttataaagtgtgccacatggacttacccagcatggagaagaagaatttcgctaggatttgaaacacttgggtgctgggaaacctcaagggtaatgcttggccaccaaacccatgaaaacccccgaccccaatctctattactgcccctgaagctgggggggaaattcctcaaggggccaaattggggggccgggtaccccaattccccagggcaagggccccagattcgggcggcccaaccctggtaaaaccacccaaagaaatggccctgttccctcccgaaaaacgctcccgatttcttaaaaaaa

SEQ ID NO: 173764 - DNA, 272 bp, Homo Sapiens
tgaggatccccaaaagtgcactcttctatatctacaaccgaaagaacagaattcaagttctagttctgatgtttattatatatgtggatctgggcaacttacttgatttctcggaaattcatttgttactgtaaacgtgaaagctattaagattcaaatgaatggttttacagcaggtaacatgtgagaagacagctacatatttgtaaagccaaaacaacaaagaaatatatgcaaaattcacaggtagatatagaagagtgcacttttgg

SEQ ID NO: 173765 - DNA, 283 bp, Homo Sapiens
  misc_feature (149)..(191): n is a, c, g, or t
tgaggacttacaaaagtgcactcttctatatctacaagctcctgttctagggaagacaaaaaagaaagaaaatacacgtgtccttagtacattagaaggttccaagtactgtagagaaaaataaagtaggttggactcggtggctcatnnnnnnnnnnnnnnnnnnnnnnnnnnnnnnnnnnnnnnnnnnngagactgtagattgagaccatcctggctaacatcgtgaaccccatctctaccataattcggtagtatagaagagtgcacttttaagcctccg

SEQ ID NO: 173766 - DNA, 404 bp, Homo Sapiens
ctccaggactcaaaaagtgcactcttctatatctactttgagtcaaagaccagaaatgtgtctagaagttcttagatgaagaggtagtgttaacagtattccagttagtgggagcatctgaccatgtgtaaaggagctcggtgcatttgaggagccaaaagaaggctgttgtcactagaacatagtcagtgatcgggagagggactggaaatgactagattcccttccttttcttaatctgcttttcaatgttcactactgtgttgtagaaaatggatcagagggtcaggggtaggtatggagagagcatttaggaggctgtttgtttatagtagttcaggtgagaaacagtggggacattacaactagggatgtgacagtagatatagaagagtgcacttttg

SEQ ID NO: 173767 - DNA, 550 bp, Homo Sapiens
ggcgactctagaggaccctgaaagtgcactcttctatatctacaggtagaatatgtacagagaaggtcctaagtaagctcttggctgtgttactcagaatagaggtatgctgtcaggtcaggactgccaaaacaagtaagcaaaaagaggatttaaggaatggaagattcgattttagaatctgaaacacacgccctgggtttcaaggtaaagaaaaagcagaatgttaaaccccattcggatcaccataggtcggagaatagaagaatagtgataacggtgtcattcacatttatgttgtggggagggatgaatgttatggctgtcagacaagatagagaagaaaatacacagaatgtgtgagatacagtctatgtcatcaagtagctgaaagttcagatggttggtacttgtggagcaataagagaggtaatatgtgctgagtgggacagaatttttgcctaggataaggaagagaaacttttgggaggtaaatgggaattgagttggcttaaataatttaaatgtagatatagaagagtgcactttt

SEQ ID NO: 173768 - DNA, 318 bp, Homo Sapiens
gacctagcggatcccttaaagtgcactcttctatatctactctctctgtaccactcaccatactgcccttgtagacaaccactttaggcctcaatactggctgttctctgtgcctggaacgctcttcccacttacatccccatggaaaagttctctacctctttcaagtgtatggttcgatgtcatctttcgagtaaggttttaacatggtgacccgcctacctctagcacttattagtatcttttcctgttttaattattcatcgtttcttacttcctaatacgctatgttggtagatatagaagagtgcacttttg

SEQ ID NO: 173769 - DNA, 350 bp, Homo Sapiens
gtctgaggatccccaaaagtgcactcttctatatctactgtgttgttagattgccttaaggcaccaagtcatagcttactaccataatttgtagagttttcatcaattccagtgaactatatagtgattctttgtaattcttaccagttatcacccacattcttgaaatgctgctttaacatctaacttcaaataatctgttatcttatttctacgttctatcttgttgattattctcaaagagaaatgtagtgcttttgtaccttttctatcaaacttacagagtacataaatctaccaacaagttatgtagatatagaagagtgcacttttcaggatcctctagatca

SEQ ID NO: 173770 - DNA, 269 bp, Homo Sapiens
gctctagaggacctcaaaagtgcactcttctatatctacgaccatttgtctcaaagcaaaaatcttagagtcaatcctacttattttctttgtcaagaattgcacatcccacctttcagtgagtcttgctgcttgctctaacattcagaatctatccaaagttagtcactctcttagtctctcccagaaacagatcccagtaaaaacattcaatcagagtaatttgggatggtagatatagaagagtgcacttttggggatcctcagag

SEQ ID NO: 173771 - DNA, 328 bp, Homo Sapiens
ttgaggatcccaaaagtgcactcttctatatctcacctaactaacatagcctgggaggtgagaggagcgactttaaactgagacctgaggagatgagaagttaccccagataaagatgggactgataaaaaagtgcagtggattccaatttaagagagatcatatatgttaatttactttgggtaactggggaacataactaccttggctatagagatatttagagaaacgtactttggaccaaataacttagcttaggaaggacaaatccttaggaaacccaagtctcagattatttctctagtagatatagaagagtgcacttttg

SEQ ID NO: 173772 - DNA, 310 bp, Homo Sapiens
gggtcgtcagaggacccaaaagtgcactcttctatatctactgttactttaatggaggctcctagatgtcagctatttgatgaaactgtctcctacaacttagtttttactctaaatatatatttctcttctttaatctataaatctcacaaagaaagttagttctcagctttggtaattgtctgcctgccaagtggtctcttcctgggtgtttaaacaaacttactctgttttctgaattcttaccaaagcataaacttagttgtgagatttgtagatatagaagagtgcactttaaggatcctctaga

SEQ ID NO: 173773 - DNA, 834 bp, Homo Sapiens
  misc_feature (604)..(604): n is a, c, g, or t
  misc_feature (799)..(799): n is a, c, g, or t
  misc_feature (823)..(823): n is a, c, g, or t
gggaggggccacatggctgagggggacgcagggagcgaccagaggcagaatgaggaaattgaagcaatggcagccatttatggcgaggagtggtgtgtcattgatgactgtgccaaaatattttgtattagaattagcgacgatatagatgaccccaaatggacactttgcttgcagggtgatgctgccgaatgaatacccaggtacagctccaccatatctaccagttgaatgctccttggcttaaagggcaagaacgtgcggatttatcaaatagccttgaggaaatatatattcagaatatcggtgaaagtattctttacctgtgggtggagaaaataagagatgttcttatacaaaaatctcagatgacagaaccaggcccagatgtaaagaagaaaactgaagaggaagatgttgaatgtgaagatgatctcattttagcatgtcagccggaaagttcggttaaagcattggattttgatatcagtgaaactcggacagaagtagaagtagaagaattacctccgattgatcatggcattcctattacagaccgaagaagtacttttcaggcacacttggctccagtggtttgtcccanacaggtgaaaatggttctttccaaattgtatgagaataagaaaatagctagtgccacccacaacatctatgcctacagaatatattgtgaggataaacagaccttcttacaggattgtgaggatgatggggaaacagcagctggtgggcgtcttcttcatctcatggagattttgaatgtgaagaatgtcatggntggtagtatcaccctgggtatggnagggattctgc

SEQ ID NO: 173774 - DNA, 556 bp, Homo Sapiens
gggggttcaagagattaattgctctccgacaagaaagactaatgggcagtcctgtggcctaagtaatatacatatagttggattggattgtcagcagtaacattggaaatttaggtttttaaatcccaatattaactttttactcttaaaaagaattttgctgattatatataaaggtagtctcatttcatttgtctctcatgtaggcttgaatatttgttaatttgaattaaatcaaacattgtaaaaattaaaacaaaatttaagattgcatgaaaatgttatactgttaataaagctaaacataaataagtctgttaaaatgaatggtagacactagtgtttcttagtgcaattcaaaaaatgtcaagatgtcatttaaagacacaattttgattaattatgcatacatgagaattgaattacatgctataaatatgagatttcatcttccgtatggtattcaaccatttttaaatattttatttcaccatattgcaaatttttaggcacaataaaaagcaccctaaacaatgtaagcagaatgtgcatgtta

SEQ ID NO: 173775 - DNA, 938 bp, Homo Sapiens
gggactggacagggcagctgctgggttgctactctcgcctccgccatgattccgcccgcagactctttgctcaagtacgacaccccagtgctggtgagccggaacacggagaaacggagccccaaggctcggctactgaaagtcagcccccagcagcctggaccttcaggttcagccccacagccacccaagaccaagctcccctcaactccctgtgtcccagatcctacaaagcaggcagaagaaatcttgaatgccatactacccccaagggagtgggtggaagacacgcagctatggatccagcaggtgtccagcacccctagcaccaggatggacgtggtgcacctccaggagcagttagacttaaagctgcagcagcggcaggccagggaaacaggcatctgccctgtccgcagggaactctactcacagtgttttgatgagttgatccgggaggtcaccatcaactgtgcggagagggggctgctgctgctgcgagtccgggacgagatccgcatgaccatcgctgcctaccagaccctgtacgagagcagcgtggcgtttggcatgaggaaggcactgcaggctgagcaggggaagtcagacatggagaagaaaatcgcagaaattggagacggaaaagagagacctggagaggcaagtgaacgagcagaaggcaaaatgtgaagccactgagaaacgggagagcgagaagcggcaggtggagggaaaagaaagcacatgagggagattccgttccctgaggccgaacaaatcagccagctggaaggcccaacctgggaagggcattatttgcaccccaaagaaagggataaattttcccaccatgaatttaaattttcccaaccaaaaaaccctttgggggaaggttatattttactggggggtttccccccgcgggaaagaaaccaaaa

SEQ ID NO: 173776 - DNA, 644 bp, Homo Sapiens
  misc_feature (618)..(619): n is a, c, g, or t
aaaagtgcactcttctatatctacttcctcagggagtttccggaactggcgcagaggacacatggactgccacatgcgtttgtcgatcatcttgcagaggttcagggtcttgtctgtaagctgtgcccaacctcggttcaggacaatttcaaatatcgctcgcatcaaccggccagccgactgtgtgacatacaccatgtcagccatcagtgcaaagccctccaatttcagctgtgagatgaaggcttgcagaagaacgttgatcttagcactgggttcctcagtgctctcctttacagggataggcaccctctccagcaacttctgcagctccagcttctcctcctctctcactgtgatgttcctgaactcagaggacaatgagaagaccctgaaaagctcaatctcactcagggtgggcttcagcagctggttgtaagtctgcactgtatcattggtgatgtagtagtggctgatgttgaagccctggatgtgcagctccaaggggacgggacgcacattgggatggaagttgaaggtggaggtggcactgcagcccagccagtgggccacatccttggcattggagagcgaagagctgagtgccacaatacgtgnngcgtctgtccgggggaattcctcta

SEQ ID NO: 173777 - DNA, 520 bp, Homo Sapiens
gctacacagcaacttctgcagctccagctcctcctcctctctcactgtgatgttcttgaactcagaggacaatgagaagaccctgaaaagctcaatctcactcagggtgggcttcagcagctggttgtaagtctgcactgtatcattggtgatgtagtagtggctggctatacggcccagttctgtcacctggaagttgcccgtcttcttgtcgtacttgaccagattgttcttgtccagcatcagggcagctgtatgaaccagatctagtcggcgctggtccagcaggggatctcccttgaggtcatcatgagagatgccatagagggttggggatcgcagcattcggatatagaggtaggcatagcccagccagttcaccgcatccttggcattctggacatttcctagcacgatttctgcattgagcatgtaaggaagctttgaaaccatctggctttcaataggaagttgctgtggaggaaggaagttgctgtggaggaggaagttgctgtggagg

SEQ ID NO: 173778 - DNA, 263 bp, Homo Sapiens
tgttccaaacaataggcagaatctgctgcatggagaacaccatgtgctttgggaagtttttcactagggctgtcactgcctttaggacctccatcttaaacccactgtcagatgtgggcccatctggtatctggagggcctgaacaaaggcctctgtgaactgctgtaccacgggaaagatcaggactttggcgcacctttttccagctcctccatgttacagatcgtaatatagaagagtgcacttttaggatcctctgagt

SEQ ID NO: 173779 - DNA, 756 bp, Homo Sapiens; identical to SEQ ID NO: 6536

SEQ ID NO: 173780 - DNA, 549 bp, Homo Sapiens
  misc_feature (137)..(145): n is a, c, g, or t
  misc_feature (354)..(354): n is a, c, g, or t
  misc_feature (395)..(395): n is a, c, g, or t
  misc_feature (443)..(443): n is a, c, g, or t
accatgattaaataagttttttattgtcacatttaactgctttgtcagatatacattgtagatttcagtatggcatcaaaataaaaatattttcctgaatgtcaaaatctgaacagaggagacggtaatggcacttnnnnnnnnntaaattcacactggcgctgaagctgcgtagtaggtagctgataacaactggaacacatttgcagataaagtgtctgcagcgttttaaatcaaatggcagtggtgtaaggccaacataaccaggagagtagttaaaagacagacccccatagagtggcgatccaaagaacggcagttctagcatttcattttccgtctatatgatactgnctaatttaagtattggaactgggagctcagtgagtaaatgngtatcctataactggaactacttttcagaacccagattttaagccttnacaacttccttatcttacagaatttaactagtcaaagggaagcagttaactccagttttacctatggtgccttgcataaagggggcttggtggttccaacaaaact

SEQ ID NO: 173781 - DNA, 546 bp, Homo Sapiens
  misc_feature (532)..(532): n is a, c, g, or t
atccctgtcctttcatatactaagaaagaggattggctactgaaacagttcattgcaagacacatgaagacgacatactgtggcatgagttgtttttgtttttaatttgttgtgctgttactaaagttctgagggctgcagttaaaacattccaatttctcccttccttccatctttctttattgattgattctcaagattttgcacagaaaactctttgggggctagaacagcagtaattgcatcacactgttttcaagacttcaagtttcaaaagcaaatcattaaaaaaaatacagttcctgatttgagttagatacagggacaaaaaagtagcacatacttgaaggttacgtggtctacaaatggtggcaatattttccttgcgcaatgagagatttaaatctctcattgcggacaaccagttgtttgggattttatttattgggattgacttaataagtcaaatatagttttatatgtatgtattattctacattgcttttaaatattacataatatgccttgcgcnatgagagatttggg

SEQ ID NO: 173782 - DNA, 244 bp, Homo Sapiens
tctagaggattccaaatctctcattgcgcctggtatactttaccagtccacctgtgtcggtttcgggtacggtcttacgcggaggctatttcctgggaccccttcaccgcccggtcaatccaataagaccgaacgatacacggcatccgtcaccatccgctggccggggaatattcaccccgttcccatcgactacgcctttcggcctcgccttaggggccggctaatcctgcgaagatactat

SEQ ID NO: 173783 - DNA, 302 bp, Homo Sapiens
tctgtgactacccaatgcgtatgctggtgtctggtctcaggataagtggaagggcaaatttgaagttaaatggatctttgtcaaagatgttcccaataaccaattacggcatattcgcttagaaaataatgacaacaaaccggttaccaatacaagggacactcaagaggtacccctagaaaaagctaagcaagtgcttaaaataattgctactttcaagcataccacctcaatctttgatgagctttgcacattatgaaaagcgtcaagaagaggaggaagccatgcgcaatgagagattt

SEQ ID NO: 173784 - DNA, 198 bp, Homo Sapiens
accgcatcggcgtaacccgcatcccaatttgaacgcggtcaacagcaccgccatcaccaacgcccagcacgttcaagccatgcacaagccggcacggaactggctgaaaacgtccggtcactgatgtggccacggcgcacgctacatcacggtgctgaacctgcccgacgtcgcccagacgccttacgccgatgcggg

SEQ ID NO: 173785 - DNA, 299 bp, Homo Sapiens
cccgcatcggcgtaaggccaccaggccagccatggtgtagcccagggtcacgtggaccaggcgaaagcgttcggtctcggcggtgaggtaggcgccggcaaagcacagcaccatcagccagtggaacagccgcacgggcatgtcccacaccaggaccttagcgggggatgcggatgaatcgttcattgaaatctccttgatcgcacgtgtgtgcagccgcgcattgcgggctcttgatgctggcgcgttgcaatgtgcgggcgggcacctaatcgtgttgatgttacgccgatgcgggt

SEQ ID NO: 173786 - DNA, 350 bp, Homo Sapiens
gtacgcactacgtacagaactctggactcaagcgatctccagctcagctcccgagtagctgggattacaggtatgcaccaccacgcccggctaattgttgcattttagtagagtcgggattttaccacgtaggttagactggtcttgaactcctgacctcaagtgattgtcccgccttgtgctcccaacagtgctgggaattacacggagtgagccaccatgcttggctgcacactattttttgtgtcttgcttccttggctcagcattgtttgtgagattcatccatgttgtgggacccgtagttcatttttaggaactatatacttgtgtgattacgccgatgacggg

SEQ ID NO: 173787 - DNA, 247 bp, Homo Sapiens
  misc_feature (99)..(99): n is a, c, g, or t
agaggatcccgcatcggcgtaatgcttggttggctgagaatgtcgtgcagtccttagcagcctacatcatagcagaactgaagaggaggcggatgtgcnggagtttattggttccataattccctttctttcggtgcggtcacaggacattcacttgacgccaagtgcctctgacctgctgacctgccactgaactgtcatccagtggcgattagagcctcggccatttgtgttacgccgatgcggg

SEQ ID NO: 173788 - DNA, 278 bp, Homo Sapiens
cccgcatcggcgtaaccgcatcccaagacgcagtgactgcgtcttattgaagtgcctgctcgcagcaggcaattaaagattagatcaagcgttcaggcaacgcaagcccgtttgtcggatagctgggtgcttgtcacggcttttgaagaatccgggacacgatgtcgtccacgcgggcgttgacctgctcagtcatggtgatggtgcggccccattcacggctggtctcgccgggccatttgttggtggcgtccagccccatcttacgccgatgcggg

SEQ ID NO: 173789 - DNA, 359 bp, Homo Sapiens
caaacgcagagaggaaacatgggtcccagtcttcacccagcgaaatcctgaacacctcatccgagtgtttgatcagtaccagcggagcactgggcaagagctggaggaggctgtccagaaccgtttccatggagatgctcaggtggctctgctcggcctagcttcggtgatcaagaacacaccgctgtactttgctgacaaacttgcatcaagccctccaggaaactgagcccaattaccaagtcctgattcgcatccttatctctcgatgtgagactgaccttctgagtatcagagctgagttcaggaagaaatttaagaagtcccgctactctcctctctgcgtttggggatcctct

SEQ ID NO: 173790 - DNA, 349 bp, Homo Sapiens
  misc_feature (147)..(147): n is a, c, g, or t
  misc_feature (161)..(161): n is a, c, g, or t
actctcaggatctacaaacgcagagaggacactgtcatgattgccgacgtgcttgacttcgactctgaagacattgacggtatagacaacgatgtgggagaagaacaggaaccaccacccacggggcactggacagccacctcttcngtatgatatataancactggtcggcacacccggcaaagaaaacaatggcgatgacggcaacagaaagacaaacccccttagggaagaaaccaaagcatgggcatcattggcactgctctaagccctgccatagaaataccggcacaggacaagaaaacaacccagatggtgccaaagaggaatacaatcctctctgcgtttg

SEQ ID NO: 173791 - DNA, 404 bp, Homo Sapiens
gtgactctagaggttcccaaacgcagagaggatactcgtttgcatctttcaggatagtcaaaaccttctggttgtatcacatacaacctttcctcaagaaaaccatcgagaaacaatgttttgacatccttatatgcaacgatttcataacataatgcagtaattgctaatataattccaacagactcttagcatcgctacgagtgagaaagcctcaccgcagtcaactccttgaacttgtcggaaaacatgttaacgacaagtcgagatttcttaatggtgacacttaccatcatagtctgtcttccttttaaaatccatctgtactcaaaagccttacgaccatcaagcagttcttccatagtctacactttgttttcatacatggatcctctctgcgtttg

SEQ ID NO: 173792 - DNA, 1234 bp, Homo Sapiens
  misc_feature (162)..(181): n is a, c, g, or t
  misc_feature (1044)..(1044): n is a, c, g, or t
  misc_feature (1101)..(1101): n is a, c, g, or t
  misc_feature (1149)..(1149): n is a, c, g, or t
  misc_feature (1190)..(1190): n is a, c, g, or t
  misc_feature (1216)..(1216): n is a, c, g, or t
accaagagatcatcactaagggagcagtgggactgggatccccatggggagggtgtccgtgttcatctggaactgcactagccttggtgaaatctaggggtccctaggaggaacctcaggtgccccttcttcttcccatagatgctctcccctcctcggagnnnnnnnnnnnnnnnnnnnnctcctcttcagaggagaaagaaacagataacaccaaaccaaaccgtatgcgtgagacactgtttcctatcttactgccctttgggtctgggcattgggtttaagaggggaggggaaggctgaaaggggaggaagaggagggcacatggggtcacggtgcctgttctgctaagtgccaggcactgctcacaggtgttgggcagatgggcaagacacctccaggtcctggcctgggccctgctcctgagcctgaccagctgctcctctccaccctgcctgtctctcttggctttccccgggcagccgtagctccatattggacatccccagaaaagatggaaaagaaattgcatgcagtgccggctgccaagacagtgaagttcaaatgcccttccagtgggaccccaaaccccacactgcgctggttgaaaaatggcaaagaattcaaacctgaccacagaattggaggctacaaggtccgttatgccacctggagcatcataatggactctgtggtgccctctgacaagggcaactacacctgcattgtggagaatgagtacggcagcatcaaccacacataccagctggatgtcgtggagcggtcccctcaccggcccatcctgcaagcagggttgcccgccaacaaaacagtggccctgggtagcaacgtggagttcatgtgtaaggtgtacagtggcccgcagccgcacatccagtggctaaagcacatcgaggtgaatgggagcaagattggcccagacaacctgccttatgtccagatcttgaagactgctggagttaataccaccgacaaagagatggaggtgcttcacttaagaaatgtctcctttgaggacgcangggagtatacgtgcttggcgggtaactctatcggactcttccatcactctgcatggntgaccgttctggaagccctggaagagaggccggcagtgatgacctcgnccctgtacctggagatcatcatctattgcacaagggccttnctcatcttctgcatggtggggtcggncattggctacaagatgaa

SEQ ID NO: 173793 - DNA, 800 bp, Homo Sapiens
  misc_feature (295)..(328): n is a, c, g, or t
caagccaaatacatgacataagatcaataaagaggccaaatttttagctgttttatgtacaaggagagatctgtttcattttgttttgccgtatttctagatataagttttagcatgggccaggaaggactaaaataaaagtttttaaggtactgtactttttgccatacttgactcatatactcaaaatacagagttgtcttggtgtaggaattggaaagcaagagtggaaaggaacgtaataactcgttggagtttaaaaatgagggtcttggcaagtaacactgatgtctgnnnnnnnnnnnnnnnnnnnnnnnnnnnnnnnnnngagggtcctcagctgttctcttcatatcctattacagtctctcagattcttgtgggggcactcttagatctcccttggagacaaggttatagttatatgttgttaatctcgcagagcttccttttagtcacaatagccttcattttctgccatgccccttcataagggagaaggatgtttgtaccatgatcctccccgcataatctatggaattaggagtcctgtgtggagtcttatcaataaatatgcacattcatcaaatgtctacttaaatgtgagtattctaccagtgagaaaaaacacataattttcaaggtaatcattgttaaaccaacagcaaacttctttcttatcagcaccataaagtccagaagacagtagaaaagtatcttcaaagtgctgaggaaaataagtatcaacttagaattttatgtacaatattggaggcaaaataaagacatgtttagacata

SEQ ID NO: 173794 - DNA, 412 bp, Homo Sapiens
  misc_feature (52)..(52): n is a, c, g, or t
acaaatacagtggcccaaaggaatctgcagccaacttcttaaaatactgttnaacatctttgggtttgctgaggcttgtcagtaacttacatcaaatcctcccaaaagaagatctgattagatagatatgactaaacggttttgtagtaataatccaattttacacattaatttgctgttgcaaatctgcccaaagctacaggtaatgaaaaataaagcaagtgtaaaatggatagtctgacacttaaaaatttatacaaagtggaagttaaagtttacatatttgaaaatcacatatacactaaattaccattatctgaattttccaaagacaaattgcaccatgacagctacaaaaggcatagggtttggttttaagggcacaagaagggagggcagattcgttatccgt

SEQ ID NO: 173795 - DNA, 231 bp, Homo Sapiens
tcgatcagaggatccccgtcaatttctacacacaacagagaaattagggaaaaacctagagaaaacaaagaaacaaaggaaagaaggtgcttcaaggaaagagtggtcaatagtgatgaacacttctagaaagtcaagtcactgaaaagtgaacattatcaaacatgcagcttgtgagtcatgtaagtggaatgctgggtgcatcaaccaggctgcagtgtagaaattgaa

SEQ ID NO: 173796 - DNA, 246 bp, Homo Sapiens
ttcaatttctacactatagatcaaacattatttgtcctttctaaactatcaaatgcaacaacaaaactatattacaatatagaaaatgaaatttcagtgtgagaaagcgagataggtcagggtaataatcaaagcttcaccaccataagatcagtgcattgagcaaattaataaactctataaaatttgcctaaccttccaaaaaaaggtgactttggtggtactgaaaactgtgtagaaattgaa

SEQ ID NO: 173797 - DNA, 723 bp, Homo Sapiens
aatctgttagattggggctagttgaacagtcatttaaatctaatagtcatttgtatacaatgtaagacatggatacaatatgcagtgctagcctgtattttcctatttgaatatcccacataaattactacagataggataaaaaagacacatatctatttaaatgacttcctagtttccattccaaaagcagaagatatgtacttaagcagcacatgctacagtgtcttctctttcaaactatctgttcctagcctctagggattttgttttgttatgcttcattccactgcctaagaaactaagattttgccagcaagagggccaatatgacaaatcatcgatgattcttagcatggagccaagaagcctgcctccttgatcagattttcagctggaaagatatccacaccttgcctagtccaatatttgttaagtgagaatataaaattcaaagatgttctgtcacactctagatttgtattaatgtccacaaatattaaagattcacatgatacatatttaggaaacacatgctactttgttactgtttgaactctcaggaaacaatgttcccattggtgctccgaattgttactattctctgccatcctgaagataactaatacgtacctatctgtgttcaatctcagctttagattatggcactggtgtgtgagaaacaactggttcaactaactataagcaatatattaactctgc

SEQ ID NO: 173798 - DNA, 306 bp, Homo Sapiens
gactctagaggaccccggtcaatttctacacgaggagtagctgatcagcatgggcgtttatgcagtggagaccacattctaaagattggtgacacagatctagcaggaatgagcagtgagcaagtagcacaagtccttaggcaatgtggaaatagagttaagttgatgattgcaagaggtgccatagaagaacgtacagcacccactgcttggggcatcaccctctcctcatccccaacttcaacaccagagttgcgggttgatgcttctactcagaaaggtgcagaaattggtgtagaaattgaa

SEQ ID NO: 173799 - DNA, 1071 bp, Homo Sapiens
ggggagccgattacagctaggtagtggagcgccgctgcttacctgggtgcaggagacagccggagtcgctgggggagctccgcgccgccggacgcccgtgaccatgtggaggctgctggctcgcgctagtgcgccgctcctgcgggtgcccttgtcagattcctgggcactcctccccgccagtgctggcgtaaagacactgctcccagtaccaagttttgaagatgtttccattcctgaaaaacccaagcttagatttattgaaagggcaccacttgtgccaaaagtaagaagagaacctaaaaatttaagtgacatacggggaccttccactgaagctacggagtttacagaaggcaattttgcaatcttggcattgggtggtggctacctgcattggggccactttgaaatgatgcgcctgacaatcaaccgctctatggaccccaagaacatgtttgccatatggcgagtaccagcccctttcaagcccatcactcgcaaaagtgttgggcatcgcatggggggaggcaaaggtgctattgaccactacgtgacacctgtgaaggctggccgccttgttgtagagatgggtgggcgttgtgaatttgaagaagtgcaaggtttccttgaccaggttgcccacaagttgcccttcgcagcaaaggctgtgagccgcgggactctagagaagatgcgaaaagatcaagaggaaagagaacgtaacaaccagaacccctggacatttgagcgaatagccactgccaacatgctgggcatacggaaagtactgagcccatatgacttgacccacaaggggaaatactggggcaagttctacatgcccaaacgtgtgtagtgagtgtaggagataactgtatataggctactgaaagaaggattctgcatttctattcccctcagcctacccactgaagtctttgggtagctcttaagccataactaaggagcagcatttgagtagatttctgaaaaacaatgttatttgttgatttaaaaagaaaactgtatttttattaaataaaatttaaacatcacttcataaaaacc

SEQ ID NO: 173800 - DNA, 350 bp, Homo Sapiens
  misc_feature (64)..(84): n is a, c, g, or t
ttggaatataaaaatattgatttattacccaacaaagcagggatttccccagttttttcaattnnnnnnnnnnnnnnnnnnnnnatagcagaatgaaattacatttttcacatctaaaggtttatacctcaaagaaaataggcatgtgtccaaaagacaattagaaagcaagaaatctttccttttactttgaatatggaaaatcttttaacagagactctttccaggcaaaccaatgaagatttaggcatagaaaatgcttgtcaccttaaggttttaaaatataactgtattcaccaaatcaagtttttactagaagtttttacgatttttatgtaattaaaaatcaa

SEQ ID NO: 173801 - DNA, 386 bp, Homo Sapiens
ttcactttctacactcataaggcctttctccactatgacctccctggtctttgtatatatgtatacacgtgctctgcttagaaggtgctgcctcatcttcccctccatgccaacaacctaaaagcaaagaaatgctggtgaggtacatgttgactttgttgagtatgcagcctacccacaagagtatctgacaaaccaaaaaactagtctatggaattatttgcacaaacagggagttgggttcaggttgaggttggggctgcttagcattatcacagatatagaaggcctcatattgtcaagggcatgactaaatgagtcaacagacagaataaaggcagggtctataactccttcatttgcaaacaacttgcctgtggaacctt

SEQ ID NO: 173802 - DNA, 371 bp, Homo Sapiens
ctagaggacccggtcacttcgtacgcaatatccacttccacctagcgactctgcaatcttgttggtcagaaagtacaaatctttttcatgcttctctagagattttggaagcatgcacttatctctgaagatatgctctggtagaaaataaggggcttccatagttcgaatttcaataaccttgctaacatgctggcaaaatgcagggacagctatcatctgacttacaaagttgaggtatgctgaaaccagtgacatgattccacaacgatggaacataggcaaattatcctcattgataattgcactgtcctgtaaagcaatgaccagacgaatgagatcaataactacttcttcgagtagaaatagaa

SEQ ID NO: 173803 - DNA, 871 bp, Homo Sapiens
  misc_feature (501)..(501): n is a, c, g, or t
  misc_feature (686)..(695): n is a, c, g, or t
gggggggcagagggtggcatggtgctgtcaatcagagaaacagcccctgtgtggtgggctgaaaacacagggcctggctgcctgggccccacttggtatggctgcacctttgtctcctgctgcaagtcctctctgagtgtttagccagtgctaagacaattcagggaaggggatgtgttcagggagggacagggccttgctgaggctggcaggcagaaatctgctgctggggtttgcctgttaaggaatgtgaacaaagctgtctggcggcagcgccctcctggcctgcatctctggtggcctccctgctgatgtaggaaaccagacggtaaaagggacccagatctcagcctgccgaccccagcatccttttcttacaagtctgtgctagaaatgaccatggtagctttggtaaaattgttgcctgtataaacttcagacaggatgtagagagtgagctagtttagttattcagctagatgattataaagtagtaatcanaataggggccttagaagttatttttaaaacatttctaagagtttgcttagggatcatattgatggacagtatagcatgacttttgaaatctaccagcccctaagtggtttccagctaaaacactctattagcctggatgggaacctgggagaaattgttttgactttctggagcctccagtggtnnnnnnnnnnttggaaaataagggaatgaattaccttggccttttggcctgggtggggtttaccccgggttattccaatggaagggcaatttgaatgggggccttaacctttaagggtccaaggtggcttttaaggcctctaaaacacctggggcccaccatgaaaggaaaggggcggtcccagaa

SEQ ID NO: 173804 - DNA, 935 bp, Homo Sapiens
  misc_feature (751)..(751): n is a, c, g, or t
  misc_feature (774)..(813): n is a, c, g, or t
  misc_feature (851)..(860): n is a, c, g, or t
  misc_feature (882)..(883): n is a, c, g, or t
ggggtctcccctaaggctgaggcggcggcgggcgtgcgaggctgttgtgctcccggctctcgtgtttcccctcctgagcgggtggaggaggcccaagcggtgctgggcgcgctcccccttcctttccctccggcgtcctctcccggccctctcgcgctgcactgtctctccgacgcaagactgtcccggcccggatatggctcgtggacagcagaaaattcagtctcagcagaaaaatgccaaaaagcaagctggacaaaagaagaaacaaggacatgaccaaaaggctgctgccaaagctgccttaatatatacctgcactgtctgtaggacacaaatgccagaccctaagaccttcaagcagcactttgagagcaagcatcctaagactccacttcctccagaattagctgatgttcaggcataaggttgtttacaggtgaattcatgacacctttgactcttctactgtctcagaccttaggtaacatacctgcagctgcttttctaacaaactgttgatcagcaaaaataaaggggctacagaaacactcatttttatgctgttccctcttgggcttcatgcaaagacaattctgtgtaaatgtacagttgactctgatttggaaatatgaaaatcagtccatccttgttataaaaaatttttttacaattgtaattatattgatgttcatattgtgtaaaataactcatttaataaaatagtactttgatttacgacatccccggngaggggacgcagagcaacggcannnnnnnnnnnnnnnnnnnnnnnnnnnnnnnnnnnnnnnnagactgtggaggagccggaaaggctggacccaccaggnnnnnnnnnnacatcgagcagccccgaggcanncgactgacgcgccggtgaccccgggggggaggatggggaggggtcgggtcgg

SEQ ID NO: 173805 - DNA, 397 bp, Homo Sapiens
  misc_feature (194)..(204): n is a, c, g, or t
ggatttcattaagtgcattgaatgtggctatttctctaagttactcatattgtcctttgcttgaatgcaatgccgtgcagatttatgtggctgctatttttattttctgtgcattactttaacaccttaaagggagaagcaaacatttccttcttcagctgactggcaatggccctttaactgcaataggaagnnnnnnnnnnnggtttgtgtgaaaattggtgataactggcacttaagatcgaaaagaaatttctgtatacttgatgccttaagatgcccaaagctgcccaaagctctgaaagactttaagataggcagtaatgcttactacaatactactgagtttttgtagagttaacatttgataataaaacttgcctgtttaatctcaaaa

SEQ ID NO: 173806 - DNA, 951 bp, Homo Sapiens
  misc_feature (18)..(18): n is a, c, g, or t
  misc_feature (65)..(65): n is a, c, g, or t
  misc_feature (96)..(142): n is a, c, g, or t
acagtaaacggctcgacnggctcaaaacggacagcaagccccctgtcagcctacacagccgtganccttagcagggatttcatttttgtttattcnnnnnnnnnnnnnnnnnnnnnnnnnnnnnnnnnnnnnnnnnnnnnnnaaaaccgtgcccttgttcactgccaacacaacatctgggtggacatgaactcattacaacaaattcttatgtggatgttgtaagaagtcactcaatgtctgtggatttaataagtcacttcacaccacagaaaatatttaataaatccaaaaaaaggaaagaagaatataacgacagaagagcttctgtctcagttctctgaaactgagtcccccataggaaactggtcccaaagttctcgaggggtcattgaagaaacttcggtttgctaatttttttcatccttttagtgttcaaaagttctagaaagactcctcgctgttttcagtttttaaacagtcaaatctccatctcccccagaaggtaacagtctggtgcagatccataaaaacgtgggaggaaggcgcgctggggagaggcctgtccctcttggaaggggccccacctctacatccgcacgaagagaaggaaccaaacagggctccagcacctctctcctgcaaacgagctccctttaaatgccaaatccagtcacacggcagttccttaaacacaggtacatttctgagtaccaggccagctctaagaggaaacaaaccatgagttgagagaaaaggactatgacggccatctggtcactttccacgtgatccatcatacttccaggaatcgggagctgctggacttggagtggaaaggctcagaccacatccgccggaggtcgccctttaaataggccaccgtgaggagtggcaataaagtacatggcaccaaatagagaagggcggactgggcggcccggtgaatga

SEQ ID NO: 173807 - DNA, 857 bp, Homo Sapiens
  misc_feature (658)..(658): n is a, c, g, or t
  misc_feature (675)..(675): n is a, c, g, or t
  misc_feature (709)..(709): n is a, c, g, or t
  misc_feature (769)..(769): n is a, c, g, or t
  misc_feature (805)..(805): n is a, c, g, or t
  misc_feature (821)..(821): n is a, c, g, or t
  misc_feature (846)..(846): n is a, c, g, or t
aatccagcaaaacattacaaatcttatgtttatgcatacaacttataaaatagaaaaaagctgctatttttccaatagtatagcatcacactaacactatatagttaagattgaaaacttctgtacacacgttcactacacctccaaagcagcatatgcctctgtagacatcctcatttgttatctaacatatgccaatcatggtttcagggatttgtatcagttcgagcaggctaaaacaatcattctgctgtatttatttaactttagacacagttaactagcttcagggaacaaaagttccataatcaatgaagaaacattaataccaaatccccacaacaggatggaaaacatttctaaggagaggatataatcctaacagaatggactatgcccctagttacagtgaatgtgggaattaattaggagtctgaaaaaatacattaagatatataaaatttaagtgattatcaaatcagtagtaactactaaaacttaaatatgaattattgatgtttttctaatgcaacatcatccagtttactgcttaggaccactctcaaagctgatctgccattacattttgctattagtgcaaattaataccaaataataggggacaggttgaatcacatggaatttcaaaaaacagaangatggggatcttttggnatctgaaaatagtgctataaactcaattattctnctctaaaatcccctcttagatggtcaaattaaacatggtggctgcaaatcttttctagangaataaccccaacactatggaatgtttgctggatcnggtccgactcgaatcnaatctgggcatagctggttccgggngaaatgtatcc

SEQ ID NO: 173808 - DNA, 436 bp, Homo Sapiens
gttcagtttctacacacaaacacacccatgagaccgcatggactgggaagattacccactatttcccacttattaagatctggatcatatttctcaatgctctgaagatacgttccctttgagtaggagtatcctccagtgacataaatacatccattcatgatgacggcaccgcactccatcctcctttccatcatgggagctatctctctccattcatttggttcagggtcatagcattctgtgattgtagtttgtccaccgactagatagagctaattttcaaacggaactgagcacaatccatattctggatgtggactggaggtgatgaggctccattcgttgatatcggaatggtagctctgaactttgtaataggtgcagcttcctctgtagccacagtggccaccaatgggtgccgagaatagcgaac

SEQ ID NO: 173809 - DNA, 387 bp, Homo Sapiens
gttcactttctacactcgggcgtggggctcacatcataaacccaagggcaagtggtactgtcccaagtgccggggggagaacgagaagaccatggacaaagccctggagaaatccaaaaaaagagagggcttacaacaggtagttggtggacaggcgcctggtgtgaggaggacaaaataaaccgtgtatttattacattgctgcctttgttgaggtgcaaggagtgtaaaatgtatatttttaaagaatgttagaaaaggaaccattcctttcatagggatggcagtgattctgttggcctttggttttcatgggtacacgtgtaacaagaaagtggtctgtggatcagcattttagaaactacaaatataggtttgattcaacgt

SEQ ID NO: 173810 - DNA, 556 bp, Homo Sapiens
ggaagcatgtagctgctggcactgccttccctcagagaactgaactgttttcggaacctcggccaacagggatgtctctttataatagtttggagacagctactaccacagaagaagagatggaactctagaaaccaatttctacactaaagttgtcaaatgttagaagaatcctgtgttcagttatgagactctttgcatagtatagggacttgaaagttttatgagacgggtgtaataatatctccacctgtgatttgggggtgggactcttattttgggtagccatttattgacttcacctttttgccaaggacgtttgtctcaagggaaaagcagttttctgtggggcttattaaaggaatgttggtttacattgtcttcaaagacaagtatagaagctgtatgtgtaagggcgacttaaatcatatgtcacattgtctaaactattcagacacttggagaatattctccttgaattaaaaaagatgattaagaaggatgctcctacaactgtatcctgacagataagtcacagctatgtgtagaaattgaa

SEQ ID NO: 173811 - DNA, 251 bp, Homo Sapiens
catcaacctgaacagcttcttcacccagttcgagcagttttgctttgtcctgcaacagcctatgatttatgaaggacaggcacagctgtgggaccgatttgcaatacagggagaaagaggtgaagagatacctgtggcaacatctgaaaaaacacgtggtaccattgccggacggaaaaagcacggactttttgcctgtggactgcccagtgaggagtaaactgaaaacaggcctgattgtcctttttgta

SEQ ID NO: 173812 - DNA, 927 bp, Homo Sapiens
atggctgggcccgcgtggatctccaaggtctctcggctgctgggggcattccacaacccaaaacaggtgaccagaggttttactggtggtgtaaagagtaggattgcagagtctctcctctgttgattcctgcctcccctttgatgaccccccgggaggttcagacagtaactttaattccaggagatggtattggcccagaaatttcagctgcagttatgaagatttttgatgctgccagagcacctattcagtgggaggagcggaacgtcactgccattcaaggacctggaggaaagtggatgatcccttcagaggctaaagagtccatggataagaacaagatgggcttgaaaggccctttgaagaccccaatagcagccggtcacccatctatgaatttactgctgcgcaaaacatttgacctttacgcgaatgtccgaccatgtgtctctatcgaaggctataaaaccccttacaccgatgtaaatattgtgaccattcgagagaacacagaaggagaatacagtggaattgagcatgtgattgttgatggagtcgtgcagagtatcaagctcatcaccgagggggcgagcaagcgcattgctgagtttgcctttgagtatgcccggaacaaccacccggagcaacgtcacggcggtgcacaaagccaacatcatgcggatgtcagatgggctttttctacaaaaatgcaaggaagttgcagaaagctgtaaagatattaaattttaatgagatgtaccttgaaacagaatgtattgaatatggtacaagaaccttcccaatttgatgttcttgttatgccaaatttgtatggaagacatcccttattgacttgctgtgccggaattgatcgcgaggtctcgggggtgaacaccaagtggccaacattggaagcccaatggg

SEQ ID NO: 173813 - DNA, 972 bp, Homo Sapiens
gaagcgatggctgggcccgcgtggatctccaaggtctctcggctgctgggggcattccacaacccaaaacaggtgaccagaggttttactggtggtgttcagacagtaactttaattccaggagatggtattggcccagaaatttcagctgcagttatgaagatttttgatgctgccaaagcacctattcagtgggaggagcggaacgtcactgccattcaaggacctgggaggaaagtggatgatcccttcagaggctaaagagtccatggataagaacaagatgggcttgaaaggccctttgaagaccccaatagcagccggtcacccatctatgaatttactgctgcgcaaaacatttgacctttacgcgaatgtccgaccatgtgtctctatcgaaggctataaaaccccttacaccgatgtaaatattgtgaccattcgagagaacacagaaggagaatacagtggaattgagcatgtgattgttgatggagtcgtgcagagtatcaagctcatcaccgaggggggcgagcaagcgcattgctgagtatgcctttgagtaatgcccggaacaacaccggagcaacgtcacggcggtgcacaaaagccaacatcatgcggatgtcagatggggcttttctacaaaaatgcagggaagtttgcagaaagctgtaacagatattaccttttaattgagcattgttccttgatacagtatgtctggaactacgggtacaagcatcccttgccaaatttgactgtcctggtaaggcccacaagtgggtatggcagaaccattccgttaggggacctggttgtggcaggaatgggatcgggaaggtccccgcgaggtggacacccaaagggggcaacccatggggagccaaaggggcgttgcaacatcggacacacaggtcaggcggacggctccacgacacttgtgggggcacggacactggggaaacccga

SEQ ID NO: 173814 - DNA, 870 bp, Homo Sapiens
  misc_feature (648)..(690): n is a, c, g, or t
  misc_feature (713)..(736): n is a, c, g, or t
ggtcggtaaacagtagtaaccaaatattttcactccagatttgtgttttctctggcacagagtagatcttttgggaaatatatatgaaagtggattaagtttgactacccttatgttagccacatctggatgagaacagttacaaagagtttggtctctaagttgatttgtacccagtgggtcaacttctgcaaaattccgtaatggtgtattagtattagaatagtgaataaaatgggaaagttatacatgtatacttattatcttgctcagtattttatctcacttgttctagaattttctgtaaaccctgctactgggtttgaagagttttagtcatcctttaacaatttttaaaaatttagcttctagattccatttggtaaggaaatcaatattggaagtattgctaaaatcttataatatgaaaagagatccactaatgtagcttaaggttattagatttgggcttttaatcatggaataatcttatgtattggtgtaagagttgatgaatgactttagctgtgtgaatatataatagtcaaactgcaaacattttgcatcccttttgtgacctaatttacagacatttaaattgtgttgcagttctgctttgccgtttaataaaaagctatttcagaggtnnnnnnnnnnnnnnnnnnnnnnnnnnnnnnnnnnnnnnnnnnncaaccagcgcccccaaccttttnnnnnnnnnnnnnnnnnnnnnnnnccctggtggcccgcctcgcccctcaaaaactttccaaaacctttctttgggccccgggccccatagggaaggggaccagggcctaacttttttccaagaaaatccgggcaaggaaaagggttgggctcccccac

SEQ ID NO: 173815 - DNA, 786 bp, Homo Sapiens
  misc_feature (618)..(618): n is a, c, g, or t
  misc_feature (742)..(742): n is a, c, g, or t
gggaggggcgtcaagatggcggcggggaggtaggcagagcaggacgccgctgctgccgccgccaccgccgcctccgctccagtcgcctctggtccttcaaactcacacctcccgggaggagctgtcctggcgccgggtcccgcggggaaacagcagcctccatctactacaacatttgtgctgaatcaaataaatcatcttccacccttgggatctacaattgtaatgactaaaacaccacctgtaacaaccaacaggcaaaccatcactttaactaagtttatccagactactgcaagcacacgcccgtcagtctcagcaccaacagtacgaaatgccatgacctctgcaccttcaaaagaccaagttcagcttaaagatctactgaaaaataatagtcttaatgaactgatgaaactaaagccacctgctaatattgctcagccagtagcaacagcagctactgatgtaagcaatggtacagtaaagaaagagtcttctaataaagaaggagctagaatgtggataaacgacatgaaaatgaggagtttttccccaaccatgaaggttcctgttgtaaaagaagatgatgaaccagaggaagaagatgaagaaganatgggtcatgcagaaacctatgcagaatacatgccaataaaattaaaaattggcctacgtcatccagatgctgtagtggaaacccgctcttttatcagtgttactcctccctgatgtttggtancaaacatcccatttctgagggaaccattggataatgggctgggc

SEQ ID NO: 173816 - DNA, 374 bp, Homo Sapiens
  misc_feature (178)..(313): n is a, c, g, or t
ttcaatttctacacacacttttttctttcatttttccaaacaattagggtacaatttacagtatagtaaagttcactctttatagttttagttatgtgagtttgtacaaacatatacaggagtgaaccactaccacaatcgaaatatagttgcatcacccccctaaaactctccaggnnnnnnnnnnnnnnnnnnnnnnnnnnnnnnnnnnnnnnnnnnnnnnnnnnnnnnnnnnnnnnnnnnnnnnnnnnnnnnnnnnnnnnnnnnnnnnnnnnnnnnnnnnnnnnnnnnnnnnnnnnnnnnnnnnnnnnnnaggttttaacaattatatacatttacagtacagtaaaattcactgctggatacagtgcaaa

SEQ ID NO: 173817 - DNA, 547 bp, Homo Sapiens
  misc_feature (373)..(373): n is a, c, g, or t
  misc_feature (389)..(389): n is a, c, g, or t
  misc_feature (490)..(490): n is a, c, g, or t
  misc_feature (506)..(506): n is a, c, g, or t
  misc_feature (508)..(508): n is a, c, g, or t
  misc_feature (517)..(517): n is a, c, g, or t
tgcagattccttccactcgtatgggttggatacgcgggtgaatcataggaatcatttgcgtggttcgcgtaggacataaccaactccgcgcagggtgtgcaggtatttcacgtcaccagtgtcaattttttcccgcagatacgaaatgtaggactccactacattggcatcaccattaaagtcggagtcccacacgttatccaggatgcgtgccttagacagcacaacccccgcgttcaccatgaaatatcgtaatagggcgaactcagttggggtcagctcaactaattcccctgccttccacacctcgtgggtgtcgtcatctagctcaatatcggcgaacgtgaggtgattactgggttgaccaaaaganctgcgatcactacgcncgcaaaattggtccgtagcccggcaataacttcttccaagctaaaaggctttggtgacgtagtcatctgcccccaaggtcaatccgtggcccggtcttccnattgcgtcttttgcgnanaggaaaaangagtggaaggaaatttgcgggggatccggg

SEQ ID NO: 173818 - DNA, 339 bp, Homo Sapiens
cgcaaatttccttccactcgaaatttccttccactcgacaggcagatgaatcagagaccaatagaagctgggaagtggggtgggattgtgatccgtggaatggtgcagtctaaatgttgtttattcactgtctgcaaaaagaaaaacgcacacactgagattaggtgttagaaacttttatagcagtttggcgtggctgtaataattgttgtgtgtgttagataactaggtaaaaagagtagaggccatcacactcctgttgctggtggcgtgagctatgtagaagtactatgcacaatacgagtggaaggaaatttgcgggggatcctggagattccc

SEQ ID NO: 173819 - DNA, 406 bp, Homo Sapiens
  misc_feature (329)..(329): n is a, c, g, or t
cactcgggaaccctgaagttgcccaaatgttagactatcggcttgacagtgatggcaacacactcaccattagcaatgttagaaattttgattggcaagataaaacccattttcagccgcgctgggaaactaggcaatacgacttggcaaaactgcaaacggttgattttattgcctcttattggatgggccgatgccattgcccatacgctagtgagttttgggtttagtgatggaaagcagcttgcgttatctatcgagattcgcaaagaagtcaatgaacaatttagtacgctgggtggattttttcgcaagtttgaattggtgantatcgctgccgatgaaaaagatattatttacacccgtagtaatatccgcatgaagatgtttatattatcccatcgag

SEQ ID NO: 173820 - DNA, 1043 bp, Homo Sapiens
gggagttccgccatggcctccttggaagtcagtcgtagtcctcgcaggtctcggcgggagctggagagtgcgcagtccacgacagaacaaatattcggtgcttttacctacctacaacgagcgcgagaacctgccgctcatcgtgtggctgctggtgaaaagcttctccgagagtggaatcaactatgaaattataatcatagatgatggaagcccagatggaacaagggatgttgctgaacagttggagaagatctatgggtcagacagaattcttctaagaccacgagagaaaaagttgggactaggaactgcatatattcatggaatgaaacatgccacaggaaactacatcattattatggatgctgatctctcacaccatccaaaatttattcctgaatttattaggaagcaaaaggagggtaattttgatattgtctctggaactcgctacaaaggaaatggaggtgtatatggctgggatttgaaaagaaaaataatcagccgtggggccaattttttaactcagatcttgctgagaccaggagcatctgatttaacaggaagtttcagattataccgaaaagaagttctagagaaattaatagaaaaatgtgtttctaaaggctacgtcttccagatggagatgattgttcgggcaagacagttgaattatactattggcgaggttccaatatcatttgtggatcgtgtttatggtgaatccaagttgggaggaaatgaaatagtatctttcttgaaaggattattgactctttttgctactacataaaagaaagatactcatttatagttacgttcatttcaggttaaacataaaagaagcctggttactgatttgtataaaatgtactcttaaagtataaaatataaggtaaggtaaatttcatgcatctttttatgaagaccacctattttatatttcaaattaaataattttaaagttgctggcctaatgagcaatgttctcaattttcgttttcattttgctgtattgagacctataaataaatgtataa

SEQ ID NO: 173821 - DNA, 676 bp, Homo Sapiens
cccggatcccccgcaaatttccttccactcgacacagcaccctcctgaaaactgcagcttccttctcaccttgaagaataatcctagaaaactcacaaaatgtgtgatgcttttgtaggtacctggaaacttgtctccagtgaaaactttgatgattatatgaaagaagtaggagtgggctttgccaccaggaaagtggctggcatggccaaacctaacatgatcatcagtgtgaatggggatgtgatcaccattaaatctgaaagtacctttaaaaatactgagatttccttcatactgggccaggaatttgacgaagtcactgcagatgacaggaaagtcaagagcaccataaccttagatgggggtgtcctggtacatgtgcagaaatgggatggaaaatcaaccaccataaagagaaaacgagaggatgataaactggtggtggaatgcgtcatgaaaggcgtcacttccacgagagtttatgagagagcataagccaagggacgttgacctggactgaagttcgcattgaactctacaacattctgtgggatatattgttcaaaaagatattgttgttttccatgatttagcaagcaactaattttctcccaagctgattttattcaatatggttacgttggttaaataaacttttttttagattgaaaaa

SEQ ID NO: 173822 - DNA, 534 bp, Homo Sapiens
  misc_feature (445)..(445): n is a, c, g, or t
  misc_feature (454)..(454): n is a, c, g, or t
  misc_feature (480)..(480): n is a, c, g, or t
ttgggaatctccaggatcccccgcaaatttccttccactcgaacaagtatttggcagtcttggagggcagaaaaggaggtggggaagatttttaaataacattctttaaaaagtcacattgtcctacaataccgatttttcttgcatatttaggaaattgagggtttttttctaaaacatgcggacatatgggaaataggatgcaacatttgcactaatgtttcagacacagttagaggtttccaagagattttgcgctggggaggctgcttgctacaagctcccaaagctctgggaggacatagtattcattcctccctcagcagaagcggtgaggcaagaagctctggggagcacccagcgttggacttttagcataagtgtgtcaaggtcttcataagtttgggcccagggcacaagagaaagtcacagctcttccggcatnctgtgaacntttaccttctttgccaagggaaatgngggcccaccaaacaagaaacttgagggcttggggcaacccagccttggattttg

SEQ ID NO: 173823 - DNA, 535 bp, Homo Sapiens
  misc_feature (297)..(298): n is a, c, g, or t
  misc_feature (312)..(312): n is a, c, g, or t
  misc_feature (339)..(339): n is a, c, g, or t
  misc_feature (354)..(355): n is a, c, g, or t
  misc_feature (371)..(371): n is a, c, g, or t
  misc_feature (388)..(388): n is a, c, g, or t
  misc_feature (419)..(420): n is a, c, g, or t
  misc_feature (423)..(423): n is a, c, g, or t
  misc_feature (439)..(439): n is a, c, g, or t
  misc_feature (443)..(443): n is a, c, g, or t
  misc_feature (448)..(448): n is a, c, g, or t
tctcccaggatcccccgcaaatttccttccactcgtcattcttcataaaaggataaaaggatgtattctggtcttgcaaacaataagtgctaacaacaagagagctcttctgatgcttgtatggtggtaaggagttttcacaaatatccaagttttagcacagttagaaggactaaaatttgtttctctcaatataaatactactggaatccacaaactgatttttgagaaattctgcaaaaatcttttcttcttcccttttcccttctgttaaaactcaatgcctttctttgattnnttccttttggctcnagcacctgacgatttgtctggctcagncaaatgcagacaggnnctccgaagaccaccgngggatatcctggggcanggcctaaactgaacccccaagtttcaaactnnccnggccgaagggacccantggngcagnacaaggggtttcattaaattttccttcccccgtttccccaagttatttaaggccggtttaaaaacttggggccccaatgcaagccct

SEQ ID NO: 173824 - DNA, 662 bp, Homo Sapiens
ctggtgatctagaggatccctgcagagacatgtacaggcctttcttgtgttgcagaggtgaagtgcacatgtggaaagggatcaaatgtagcacagtgtaaagaaagacagcaacacaggtagagggacccagtgtgtgctgggaggtggctgtggaaggtaagtatagacctacatctctgttggggaggtggtcagggcagaatggcctgggtgtttagcagcttctaggggtgagggtggcaggaccccaaaaccaaggccctctgcatcgttgttgtaataatcagctctggcatattcagctgcaactgtccctgaagaagaggtttctgagctggctgaccccatgtaggagggtgttaccttgtagaaaaagctggagggacctggtgggacagtgcagtgaggcagggtagaaatggtcagttgtttagggccagtggccacataccaaaataccaccaatgtgcccagggccaaactgccttaattctgagtgctgtgtgttctgcaggtgacagtttcctgaggagaggggtgtatccaggcttaactcccagcaggagtggtaccatatggtgtttatgtactactctatagaactcttggcttgcacttctacagctctgtacatttataagaataaatgcaatcacact

SEQ ID NO: 173825 - DNA, 623 bp, Homo Sapiens
  misc_feature (83)..(91): n is a, c, g, or t
tgtagacctgtgagaagtattctacattgtaacattaaaagattatatttacaatacttctttaggatgttattcagccatcnnnnnnnnncccaactaaaatgtcttaccagtaaagtattattaaaagcctcatttgtggagattcgctgacttccttggttaagctgtcttgtatttacttaatttgtcccctcaaccaggtgttttcttttcagcctgttactgtcctgtgccatttttaaaaatagccatcatgagtaagggcttctttaaaataatccctgacaatatctttggcattaatacgacataaagacaagacagtatatgtatgttttcattcctgtttggtacgagtgcctcatttggtagtcatgaaagtaacatagtaccttaaataaaaatgtaatgactaatctaaggtctaggaataactatcgtagaagctaagtagaacacttagttaggggtgtcaattttctatcaacgcaaacaccttagggtacccagaccaattttatgtatatatattctgaaatgctccctttttaatgtggtcatttgttgccttctaagttgagaggacaaaactgaataaagtgaatgttaattgtagtcta

SEQ ID NO: 173826 - DNA, 607 bp, Homo Sapiens
gggtgatctagaggatccctgtttacttaaccagtgtgtggctgtccctggatgacatctgctgtcactagccttcccagaacacccgctgcccagggttcctgctgccttccccggtggacagattttgcagggaagactgaggaaatgggagggggagctctgctctaaagcagaaggcacagaaggtggggtttttgttttatagggagactgcccagtgtgctgcaaaaggaaaaccaacaacagggagtgcccaactcaccccctctgcatgagcaaatgcagatggacactggactgtgccgactgacaccgggactcacacttgctggtcagtggacgagaggtaaaagcaggcaggattattacaggaataaatctgcacttccaaagaggcagctcccatgactgagttacaatgcttggagcccccgagggcagagtggcaccagctgggaggttgacactgcatcactgcttcggatgccctcacaggctccgactcgctgccaggtgctggtgaggctggaagaacttccttccttcctatgtacaatgcaaacagtgccgcttccagtgttacccacactgggttaagtaagca

SEQ ID NO: 173827 - DNA, 315 bp, Homo Sapiens
acagcataaactattccaattatatgagacgtttttggaagagtagtaatagagcaaacaccaagaaggtgacggtggcagaaatattggctgaaggtcagaggtagaggcaatacaagtgtaaaaacttaaacagattgggagatgtcagtatgaagtttagaaacttctattctgaaagaatctcggagcagttgtaaatggagggaaaattgtatgtacacttggttttcaactcttcagcatgagcagctgttttaacagttgagttgctagccactgtcaggaatagtttatgctgtgggtaccgagctc

SEQ ID NO: 173828 - DNA, 165 bp, Homo Sapiens
tatcccccctgtgcaggtgttaagcatcagtacataactgaggagtaggagggcagcagcccaaatctttgatgaagaacctctttcgtatcaacttatgctttggaacgagacactgttggatgggaatctggcttctaacaaactgattgggtggactcatgc

SEQ ID NO: 173829 - DNA, 476 bp, Homo Sapiens
  misc_feature (421)..(421): n is a, c, g, or t
cagcataaactatttgcaggagatactctgaattgagacaacacagaaggcactgagaagacagtgacagaataaaataaaatgtggggtttgcctttgtaaaacaagacagaatgaacatgataaggtgggcagcaatggaggtttacatggagacttcatagaagactctgaaacaaaatggaaccctgttggaagatgccctgcaatatagggatacaagggtttcaaaatggctatgacaaaatctttcaagtattcaagatggctttaggatagcaatactacattatactaaattcttataatttaaaggaataaaaaggaaatttgatttgtaaataatcacaaacttaaaggctattaccatctataaaagggcaactgatgtcaaaattatagctatttggatcttctctcngcttttcttggttaatcttgctaatggtctatcaagtttatttatcttttcaaag

SEQ ID NO: 173830 - DNA, 580 bp, Homo Sapiens
ccagtcaactcctcacttgtagtaataggaatatattttgcagaatctaacataatacccttaaaattcatactggacaaccatcagtgtgatgtatagtatctggtgtaaacaaattttattcagcatattaaattattctgtgttttgcttttccttgatatgtaggaggtgcaccagtaccagtttttctcttgtggtggcttaaaacgctgattgccatttgcattgtctactgaaaagctgtggcagcgagtggtattattgaccatgtgttctcatgtctttttgcagatttaaaggttttattgtagtgtccatttaatatctgcatgtgtgtttaatctctgaataccatgtaattaaactgattaacttgtgatggtgatggtgattagcacacactaaaaacccaatgaagcaattgtctccctcttcttaactggaaatcacacttgtgaggtatggtatccattatcaacagtggattcatgattgacttcatattttgtgtatctggttataaattttgtatagcatctaatttggcacttaatataaatccatttgatttgaatag

SEQ ID NO: 173831 - DNA, 384 bp, Homo Sapiens
gagccccacagcataaactattcagatggattgaaaacagctgggagacctaacagaaaagactcaaaaggtcactgcttgccaagacagaatgctccaagacctatcaaaggagatagcgagtatgtaactggttaactgcagacatatccctaccagccaggccataggaagcgacatcatcccatacttcatggcataccagtggtcttccctagacaagcaaacactttgtatgccttgtggcagcaggaagtctgtgttctacaaatcatgtcacatatcacatataaggcatacatataaggcatacggcacctgtcttaatgggcttgtctggtccattcagcgtaaggaaggggaactctcagaagaggcagaaga

SEQ ID NO: 173832 - DNA, 566 bp, Homo Sapiens
gatttcagccatgaatcaggcataaatattctgatggttaattgtagacgtctacttgactggattgagagacacacatagctggtcaaacacgatttcagccatgaatcaggcataaatattctgatggttaatcgtagacgtctacttgactggattgagagacacacacagctggtcaaacacgatttctgggcatatctatgagggtgtttctggaagacactgagataaccatgacccaatgtggatgggcactgatatggtttggctgtgtccccacccagatctcatcttgaattgcagttcctgtaatacctacatgtcgtgggagggacccaatggaaggtgactgaatcatggtggtggtaaccgccatgctgttctcatgacagtgagtgagttctcatgatctgatggttttataaggggcttttcccctttgggtcagcacttcttgttgctgccatgtgaagagggacagctttgcttccccttctgccatgattgtgaggcccctgcagccatgtggaactgtcagcccattaaacccctttgttctttat

SEQ ID NO: 173833 - DNA, 264 bp, Homo Sapiens
ctataccacgacgtgtaaaatggtgaaggtggggagtgttagggatcagaattccgtggtatagggtggtatagctgagctgataccaccataccacaccttaaaactcactaccactccccaccttcaccattttacagtataagaaaagcactacctccatgagaattcacgtgtggtatagggtggtatcaggggtggtggtgcatggccgttcttagttggtggtatagctagtggtatcagaggggatagaggtggtat

SEQ ID NO: 173834 - DNA, 683 bp, Homo Sapiens
  misc_feature (619)..(619): n is a, c, g, or t
  misc_feature (625)..(625): n is a, c, g, or t
tgataccacctcaccggggaacttttcagtgatgaaaatacacagggtaataaaccttcacatggcttcaaaaggaaaacaagcaaatcttctctaatctactcttactataatttcctaagtgtacaccaaactctggatttaaaaatctgaagtactatagaacattaagttgaagaatggaaattaagagtacgtattcatggtttatatttcttattctatggagttcgtgaacacatctaggtggaatgcatctgagactaagggctggtttttaatcctcataagaaaccagccttgaagaattaacaattctcttcattggtattctaaacctcctaagatatttaggcttctgtacataaaagtgtttttgctaaatttacagtatatatagatcctttcatattattttactaagaatgtttgaactttgcatatttgatatagttcctggtaggaatagcacagctcaaacattagtttttctacttacctcctctaacacgtggtttgtctggagagtttctaaaaattcagctataaccccagttcatgtatttactgggtgatttgttcttgctgaggtagtaaccagcccaatcttgggctgttntaaaancctagggaaatctccgaatccttaggtgatttaaatagttgggggtaaagtttgtagc

SEQ ID NO: 173835 - DNA, 276 bp, Homo Sapiens
  misc_feature (133)..(196): n is a, c, g, or t
ggccgctcgctcgtggccggttgaggtacagaaggacgcttgaatctgcaaatgtacagttccttcactcagtaagcgtgactgacctaaggataaacgcgtggctgagactagtacctgccgatggttgccnnnnnnnnnnnnnnnnnnnnnnnnnnnnnnnnnnnnnnnnnnnnnnnnnnnnnnnnnnnnnnnnccagatgcccccgattatagcgcatcgttactgcctgactggctaacctgtaccttcatcaaaagtggtcatcacgtacc

SEQ ID NO: 173836 - DNA, 345 bp, Homo Sapiens
atgcactcgtcatctaaaaacgattaatcgacatcctataattagatgaacacggctgcggaatgttggctcaaccgaacaatgtttgtaggagcccggtcacgctacccgaagcgttcatcacgcgtgccaagcaaaagtttagtacgacgacacaacaacttatccaggattactatgcagtcgcgccggttctgccaatgcgtgaaaccacagaattatgcatagcgcgccccgattatagcgcatcgttactgcctgactggctaacctgtaccttcatcaaaagtggtcatcacgtacccggggtttaccctcgctgcgggtggtggcggttgctggggt

SEQ ID NO: 173837 - DNA, 250 bp, Homo Sapiens
agctgagtacgggtaagggccggacgtccggccctgttgttgccgcaccgcttactcctaaggaaacgtttggtgtcccgggttatgtttcctttccgtgtccgtgccgaacgtgcgaacgagctataaatatcgaattcacccaccaccactgaccttcaataagcaaccaccagatgctaccccgattatagcagcatcgttactgcctgactggctaacctgtaccttcatcaaaagtggtcatcac

SEQ ID NO: 173838 - DNA, 236 bp, Homo Sapiens
ttaggtcctcgctatgcctgccgtgcaggttatttcaacgctgcggccctggggctatctaacgataacgaaaatgcagtcggagtgcgttcacgggctccccttatgtcgattaatacgttaaaacccaaaaggctgccaccagatgcccccgattatagcgcatcgttactgcctgactggctaacctgtaccttcatcaaaagtggtcgatctacgtacccggggtttacctt

SEQ ID NO: 173839 - DNA, 393 bp, Homo Sapiens
tagttgccgtaaatatataaatgatggcgggcgctagatggatacatggattacattcacattcccttcccacgccaaatttcacaacatgggaaggcttctgcctattgtattaccaccactttaattcatggaattaaaggcaaatgtctaaactggttgagtattttttccggtttgggcgtaaaccaaatttccggctactttcctcccatgacccggaggtcttcttctgatcttccatcctgatcaaagaccatccggtagtcgtccagatacgatcataatcggttattcgtaaatcaataacgaaggacggggtgaataacctgggactaaatctataccaccagagcccccgattatagcgcatcgttactgcctgactggcta

SEQ ID NO: 173840 - DNA, 156 bp, Homo Sapiens
gcactatattaagagtacaggggaccacggtaacacagctaagcgtaccagcacgcaaaaggccacaccccaccagagcttatccccgattatagcgcatcgttactgcctgactggctaacctgtaccttcatcaaaagtggtcatcacgtaccc

SEQ ID NO: 173841 - DNA, 292 bp, Homo Sapiens
tcgatgagccggcccggattacgcacgtggcgggtgtccataaatgtctgcacctttgcattgagcccattttccagatagtgaaaatgcggctcccaggggaagtcactagggtcactcctagaggggccaatgacccaagggctgctgtaggggaggtaccggcctctgaaccccctttcttctctccccaacagggtgacgctgggggacccctggcctgcagggagccctctggacggtgggtgctaactggggtcactagctggggctatggctacgtggcgtctgt

SEQ ID NO: 173842 - DNA, 1277 bp, Homo Sapiens
  misc_feature (653)..(780): n is a, c, g, or t
  misc_feature (927)..(951): n is a, c, g, or t
  misc_feature (992)..(1026): n is a, c, g, or t
gggaggcgagggcgccgcacccacaccgcgctgcgcagttttgttctgctccagctgttcgaaggtgatccagacgcaagatggctgtcctctctaaggaatatggttttgtgcttctaactggtgctgccagctttataatggtggcccacctagccatcaatgtttccaaggcccgcaagaagtacaaagtggagtatcctatcatgtacagcacggaccctgaaaatgggcacatcttcaactgcattcagcgagcccaccagaacacgttggaagtgtatcctcccttcttattttttctagctgttggaggtgtttaccacccgcgtatagcttctggcctgggcttggcctggattgttggacgagttctttatgcttatggctattacacgggagaacccagcaagcgtagtcgaggagccctggggtccatcgccctcctgggcttggtgggcacaactgtgtgctctgctttccagcatcttggttgggttaaaagtggcttgggcagtggacccaaatgctgccattaaagaattataggggtttaaaaactctcattcattttaaatgacttacctttatttccatttacattttttttctaaatataataaaaacttacctggcatcagcctcatacctannnnnnnnnnnnnnnnnnnnnnnnnnnnnnnnnnnnnnnnnnnnnnnnnnnnnnnnnnnnnnnnnnnnnnnnnnnnnnnnnnnnnnnnnnnnnnnnnnnnnnnnnnnnnnnnnnnnnnnnnnnnnnnntgtggggcccccccccgcccccccaaaaattttttctaaaaccatttctttttgggcggcggggccccccaaaagggaaaggaaacagggggccaaaacgggttttccaaagaaaacccggggcaaagaaaaagaggtgttggattnnnnnnnnnnnnnnnnnnnnnnnnnggggggaacaccggaagggttttgtgaaacaaaatcccaannnnnnnnnnnnnnnnnnnnnnnnnnnnnnnnnnntctcttatcacacgggaggggtccccgggggggaggccccaaaaatataaaaattaagccccccgcgccgctggccatttttttgggagaagattggggggaaaattttttaaaaacattcttcgcgccccaagggggaaccctctcccaaacggcgggggggagaactctgaatccccccgggggattaaaaccccttggggccccttgtggaaataaatattttccccccgtggaaaaaaacggggggg

SEQ ID NO: 173843 - DNA, 313 bp, Homo Sapiens
gtgagccctggcccacgtttgggcaagatcatctgcggtggcggcgatttgaataaccttgcagtcctttatggtaaaagagggaagtacaaagaagcagagccgttgtgtaaaagagctctggaaatccgagaaaaggttttggggaaggatcaccccagatgttgccaacgcagttaaataacttaggccttactggtgccatgaatccagggcaagtatgacagaagtagaatattattatcaaagagccctcgagatctaccagacaaaactgggacctgatgaccccaacgtggcacgtggcgtctgt

SEQ ID NO: 173844 - DNA, 340 bp, Homo Sapiens
tcatcgagctcggcccggttgacgccacgtggcagggagactgtggacctccaggcatcccgctgtcgacacaggacgtgcaacacatcacacgctacctgagcagccatggtgctgtgctggcggtgctggacctgagcttcacggggctgagtgatgagctgctgcacctcctgctgcccagcctgtgggcgctgccccgcctcacccagctcctgctcaacggcaaccgactgacgcgggccactgcccgcaagctcactgatgccatcaaggacaccaccaagttccctgctttggcttgggtggacctgggcaacaacgtggacgtggcgtctgt

SEQ ID NO: 173845 - DNA, 315 bp, Homo Sapiens
tgatcgactcggcccggattgacgccacgtggacagacgccacgtgagtgtgtgggcatgagcccgaagccaccaccagcaaatcctccccacggatgccaggagagctctgatcctaaccaccaccacctctcccttcagcaaaatcaaaacagggaaagaaaacataggaaaccaaacggcggcactcaacaatttgggggaacaagtaatttttaaaagtaagagttgttccgtaaaccagcactgagctggtcacacggcctctggtctacctgctgagcatgtcagaaatcccgacgtggcgtctgtccg

SEQ ID NO: 173846 - DNA, 722 bp, Homo Sapiens
gtgagccggccccggatttacgccacgtcacacagaggccctgtagtacagtccctggggcattggcagatcccggcagtcttcccccgtgtagccgtcatcacaaacacacatgccattcacacagcggccgtgctggtgacagtcattagggcagctcatgtcactgcagtcatagcccttgaagccttgctcacatacacatttgccctcgacacagcggccccgactgtgacagtcattggggcaccgtagctggctgcagtcctccccagtatagccctcatcacacacacactgcccattgacacagcggccatggccactgcagccattgggacacttgagctccccacagtcagctccagtgaaaccatcatcacactcacaccgcccgtctacacagcggccacgattgtgacagtcagcaggacacctcttcttgctgcagtccacaccggcaaagccctcatcacatacacactgaccctcctcacaccggccctgggtgtggcaggcaatgtgggcaggtgggtttcccgcagtcttcacctgtgaagccttcttcgcagtagcaggtgccattgatgcagcggccccggtcgaagcagtcattggggcagatgagctcactgcagtcttcgcccgtgaaaccctcatcaaacacgcactcattctccacgccatcgtccacgggttgtagccattgttgagacaccgag

SEQ ID NO: 173847 - DNA, 231 bp, Homo Sapiens
ctataccaccattgtggggttacacattgctgatgcactaagacgatcaaatacaaaaggctccatgagtgatgggtcctattccccagactactcccttgcagcagtggacccgaagagtttcaagaacaacctggtggacatcattcagcagaacaaagagaggtggatagagtggtataggtgatatgagggtggtatagcgtgtatagggtgaatcagggccggtga

SEQ ID NO: 173848 - DNA, 567 bp, Homo Sapiens
tacatcagctcggtaccggatgacgccacgtggtaagggagctacagatctgagtggaacagataatgggaaaggcagcgagcagattagactacctgatgagaaggaagagtggaagcccaaagagaaacagagggccagaggcacaacactctgagaatagcccaacttcctcaaggagggtccctggtccgtcgtcacagggagggaaccatgatggaagaagatatggaggtgggattaagaagcaaccactgaaacatcaagtaggctgggcacaatggagaaagcggcaaattgttatgaatggtgaacacctgtaaaaagcaaaataataataccccatgctgaaacagagaagggggcataaattcatcctctgcccttctcttccttactcaattctcctaacctttggcacccttgagatatcccagatatactatatttgagggtacatctacacatctttctactccggttctacagtaccttccattagcccttgagtcttcccggatactaggagagacgggattaggtgtgtgtatgagacgtggcgtctgt

SEQ ID NO: 173849 - DNA, 360 bp, Homo Sapiens
cggcaccggatcagacgccacgtgggggctggagctacccaagtcggacctggcctctacgctactgacccccaaggtggcacccgttgacacgctaggtgtaacgcggcaatttgcccttaaccccgccatgactcgaatggccaccttgttcaacacgggcaaggcggccatccagctcaatgtcggcccgctgatcgtcccgctcactcgagataactacgacagcaccgaccacaaaacctatccgcgcccgccgcaactgttttcgcacaatgaccagcaatccatctggcaatcttcgaatccagaaggcgccaagattggctggggtgggaacatcgccgacgtggcgtctgt

SEQ ID NO: 173850 - DNA, 411 bp, Homo Sapiens
acagacgccacgtcctcagggctgctgaccaccctccacgggggcctttatcccaggaaaaatccctcattcccgggaagctaccattgccaaaaatatggcctgacaggcacccgtctgacaggtgctcctcaagcacccatccgcggacacatgctgaacccatacgatgctctaaacggggcgtgcacactgcagccctctcagcacaggggccatgcaccaccagttaccaggataatccctgtggatgtcggattacagcctgctgggctggagaagtggctgccctcagcagggcgcgtgcctccccagtcatcccatgtccccctctgcaatgacagagccccagggagctgcagagaaggggattattcttgcaaacaaaaccccacgtggcgtcaaccggta

SEQ ID NO: 173851 - DNA, 383 bp, Homo Sapiens
ccccggatttacgcacgtcctcttcgtaggacctcacaggttcataaccacgtgatgggtgatcgtgggttcccatgtctcctcctccctggtcctcagacctcttcgtaggactcacagtccactaaccacgtgatgggtgatcgtgggttcccatgtctcctcctccctggtcctcagacctcttcgtaggactcacagtccactaaccacgtgatgggtgatcgtgggttcccatgtctcctcctccctggtcctcagacctcttcagtaggactcacagtccactaagcacgtgatggtgtgatcgtgggttcccatgtctcttcctgcctggtcctcagacctcttcgtagggactcagagtccaacttttagcctgc

SEQ ID NO: 173852 - DNA, 585 bp, Homo Sapiens
tggcccggattacgccacgtgggcggcgttgccgttgagcttacctctggcggctggccaaacaggatctcgccgcgcagcgactgcttgaggatgggggtggcgcggccaatgggcgtatccgggttggacagcgggatgcctggcgtggccgagggggtgccagaggtgctttgggaggcgcttgcagaggcccccaggacggcgctctgggcaaaggtcaacgcaggcacagccagggccagagcggccgtgaccgacctgagacagcggggcatggtgtagatccaggggctgttgatcggagacgcgattctacggcaagggtgtccgccgatgtgggtaatatgcgggctgccgggtgcccgaaggaggtgccctgatccgggagaatcacatgggtttggtcgatttcatcaagaagcagttcatcgacgtcatcgagtggacggagtccaccgatggcgtgctggcctggcgttaccccttcgaggaccgcgaaatccagaacggtgcgaccctggtggtgcgtgaatcgcagatggccctgttcgtcaacgagggcaaggtggacgtggcgtctgt

SEQ ID NO: 173853 - DNA, 932 bp, Homo Sapiens
  misc_feature (391)..(407): n is a, c, g, or t
  misc_feature (582)..(678): n is a, c, g, or t
gatgcgttacactttatgcaaaaagaattttcccagataggctagccagaaaaaacttcaagtcctctgtaacatctgaggtgaccaagaggcagaagagcagagcagtcgggggccgtgtcctggctgatcccaactgcagctctgctgtgggggcccgtgggagggaggcagacccctgggctttcctgctggccacggagactctgctcctgcatggaaagggagcctgggagccagcagcccacgcctggggagcctgcctggggccatgtgaccatggcctctccctgggaacgggctgaccacaacacaccctgctgccatccacttctgtttactctgcaaatgtaagaaagaaccacttggccagaagtgtcccccagatgcnnnnnnnnnnnnnnnnngggaaacggtttggcctctgttgtctccccggttggagttgcaggggcatgatctcaactctcaactcactggtgaacctccggcctcccgggatactcctggcctcaagcctccggggtacgctggggattacaagcacccaaccgaggcccagctaatttggggatttacggnnnnnnnnnnnnnnnnnnnnnnnnnnnnnnnnnnnnnnnnnnnnnnnnnnnnnnnnnnnnnnnnnnnnnnnnnnnnnnnnnnnnnnnnnnnnnnnnngaggcatgagccagcggcgccgggcccccaaagtgctcttgaaccggaaacccagggatgggagaatgctcactgagctgctgcttaatgtgtgcgtggtgcaatgtgtgtcatgtccgcggaagcgtgtctttggccactataggggaattcgggccacccggggtggggtgtgtccggggtgagaacccaagctgttgcgaactgtaagaccccgcctgtcgactgtgtgcccctggggcaatgtttgacgc

SEQ ID NO: 173854 - DNA, 1466 bp, Homo Sapiens
  misc_feature (30)..(30): n is a, c, g, or t
  misc_feature (40)..(40): n is a, c, g, or t
  misc_feature (48)..(48): n is a, c, g, or t
gttatgggcttcggcaaggattaaatggcnagggaactgnaccttcanccgcagtccccaccctggcttcgcctttggaacaagctccggcacttgccgaaagagctgcggttgctcctgcctcgagtccgggtcggcgaagcccaggagaccaccgaggagtttaatcgagagatgttctggagaagactcaatgaggcagctgtgactgtgtcaagggaagccacggactctgaccatagtcttctctcagcttccactgccgtctccacaggaaacccagaagttctgtgaacaagtccatgctgccatcaaggcatttattgcagtgtactatttgcttccaaaggatcaggggatcaccctgagaaagctggtacggggcgccaccctggacatcgtggatggcatggctcagctcatggaagtactttccgtcactccaactcagagccctgagaacaatgaccttatttcctacaacagtgtctgggttgcgtgccagcagatgcctcagataccaagagataacaaagctgcagctcttttgatgctgaccaagaatgtggattttgtgaaggatgcacatgaagaaatggagcaggctgtggaagaatgtgacccttactctggccctcttgaatgatactgaggagaacaactctgacaaccacaatcatgaggatgatgtggtggggtttcccagcaatcaggacttgtattggtcagaggacgatcaagagctcataatcccatgccttgcgctggtgagagcatccaaagcctgcctgaagaaaattcggatgttagtggcagagaatgggaagaaggatcaggtggcacagctggatgacattgtggatatttctgatgaaatcagccctagtgtggatgatttggctctgagcatatatccacctatgtgtcacctgaccgtgcgaatcaattctgcgaaacttgtatctgttttaaagaaggcacttgaaattacaaaagcaagtcatgtgacccctcagccagaagatagttggatccctttacttattaatgccattgatcattgcatgaatagaatcaaggagctcactcagagtgaacttgaattatgacttttcaggctcatttgtactctcttcccctctcatcgtcatggtcaggctctgatacctgcttttaaaatggagctagaatgcttgctggattgaaagggagtgcctatctatatttagcagagacactattaccaaagattgttggttaggccagaattgacacctatttataaaccatatgcgtaaaatttttcctgggctatatatgaaaaataattgcatgatttctcattcctgagtcatttctcagagattcctaggaaagctgccttattctctttttgcagtaaagtatgttgttttcattgtaaagatgttgatggtctcaataaaatgctaacttgccagtgatta

SEQ ID NO: 173855 - DNA, 457 bp, Homo Sapiens
  misc_feature (34)..(34): n is a, c, g, or t
cgattaaggtccttataaaagaggcttcaggggnagttagctcgtttgccttctgccttcctccaggtgagggacacagcatccctccccactgtgggacgcagcaatgcgacttgagagcagcgcttatccaaacaaccaaatctgcttgatgccttgatcttggacctctcagctccagaactgtgagaaaattgatttctgttctttctaaattacccagtcttgaatattttgttacaacagcataaatggaccaagataaaggaagatgaactatttggatgagcaagacaaaaataacaatacatccttgccagagccgtgttgttctccccagtcacgtcattcttcaggccacctcaattacacgacagaatattgaatataatctctttatcttacaaataaggaaccgaggcacagcgatgttatgtgaaaaacagaaggccacctt

SEQ ID NO: 173856 - DNA, 105 bp, Homo Sapiens
ttggattatggaccatggacatggagaagttaaggactgtcattctctttttaaagcgtcaactgtacatattttggcatttatttttaaggtttataaagcaac

SEQ ID NO: 173857 - DNA, 585 bp, Homo Sapiens
  misc_feature (529)..(529): n is a, c, g, or t
ttatagaggatcccccgagcctcacatactccaccctcacttcagtgctgtgctcctgtgcatggtagtcagcgcctggttcctggtgctgcaagctccgcaaactccctctccagctcggcacagcgcaggcgctcatcctccctgccactctccagcctgaagttctcctcctgcaactgctccagctgggattgcagcagcagcagcttcttggcagtgagacctggggtaccctcgccttcaggccggcccatccgctcccgcagccctgcattctcttgcgccaggctctgcttctcctctgacaggagcatcagctgccgctccagatccagacagcgctgctgtaattcgtccccctcctcagcctcctcacttaggaaatagtacctgcgggactggctgtcaaagttgccatacgtctctggtgacagggagtcaaggaagtgtctttggtcatgagctcttggatggcttccatcaccacatgctgaaccgattcttcagcgcatgattctctggatgnggcctgctttttttcgcaactgataacacaggccccaagaagaaggggatccttct

SEQ ID NO: 173858 - DNA, 540 bp, Homo Sapiens
tgcggctgctctatgaggatccccagccctcacatacctgagcagcggcttgcggtagcctatgtgctgaaccagatagacccctcctggttcaacgaggcatggctccagggcatctcggaagatccaggtcccaactggaagctgaaggtcagcaatctgaagatggtcttacggagcctagtagagtactcccaggatgtcctggcgcatcctgtgtcagaagagcatctcccagatgtgagcctcattggagagttctcagacccggcagagctcggcaagctgcttcagcgggtgctgggctgtgccatcagttgcgagaaaaagcaggaccacatccagagaatcatgacgctggaagaatcggttcagcatgtggtgatggaagccatccaagagctcatgaccaaagacactcctgactccctgtcaccagagacgtatggcaactttgacagccagtcccgcaggtactatttcctaagtgaggaggctgaggaggctggaggtatgtgagggctgggggatcctctaggg

SEQ ID NO: 173859 - DNA, 911 bp, Homo Sapiens
  misc_feature (844)..(844): n is a, c, g, or t
  misc_feature (849)..(849): n is a, c, g, or t
gagcagttggacccgccgtttgaaaagatacgcatcatggcggagagattggccaatcagttgccaatttataaacctgtcactgattttttccttcaacttgtggatgcaggcaaggtggatgatgccagagctctcctacagagatgtggtgcaattgctgaacaaaccccgattttgttgttgttcctccttaggaattctaggaaacaaggaaaggcatcaactgtgaaatctgtgttagaattgattcctgaattaaatgaaaaggaagaagcatacaattccctcatgaaaagctatgtctcagagaaagatgtcacatctgctaaagcactgtatgaacatttgactgcaaagaatacaaaattggatgatctgtttctaaagcgttacgcatctttgctgaagtatgctggagagcctgtccctttcattgaaccccctgaaagctttgaattttatgcacagcagctaagaaaattgagggaaaactcttcttgaaataaccaggcgatactttgttttgtatatatttgtgattctgtgtctacatgttattttgaagtatatctgagggaaaaataaatgaaaattttctttatgtacttatgtatgtgtgatgcatgttcaaagtcttattgaccataactctgtgcacttggttattggacatttttggagtttttttctctgggaaaaatcgatagtgttttcttcaatgctgctgctgtgtgaagccatactttttcaggattctttcccctaattggctctttggttttcctgcctctgtttcatttatttcttaaaatgttattccttttatttaagattccaaccntcctnattcataccatactattaatatcctcacccaagacccccccataatccatcccacccaatca

SEQ ID NO: 173860 - DNA, 523 bp, Homo Sapiens
  misc_feature (17)..(17): n is a, c, g, or t
  misc_feature (412)..(412): n is a, c, g, or t
  misc_feature (429)..(429): n is a, c, g, or t
  misc_feature (475)..(475): n is a, c, g, or t
  misc_feature (477)..(477): n is a, c, g, or t
ttccccgagtcaagaangaagtgccccaccatagggtatctacaataggtactccgggagaaaggaccccaagaagtcagaccacaaatgtatgaccagcacaattctattgatcaaacttctacctctagcaagggcgtctcaacaatcaagttctatttaaatcattcgctcgtgtcttctctcagtcatgatgaaataatgagaatatcataaggaacagaaggtaatgcattggtcaccacccttggagaggctggtgggatgtatctggattagtcctcacggggggtgctattttcctgcatagtcttcattatccagtcaacatagttctttacccgtgtgtagagcccataaggtcccacacttggggcccccaggacaccaggccagctgcgtagaatttggncttgcattgggatcctntacagcaaaaggcccacaatggccccttaaaggtatccatgccctntnttcttcaagcacagatcatgttagaagtgatacacaggcccaaaat

SEQ ID NO: 173861 - DNA, 758 bp, Homo Sapiens
  misc_feature (57)..(57): n is a, c, g, or t
ggactgatctcagtctgggccagacagagaagagagatcgtgctgttcgcctcaagncggcaaggttacctgtagctcctttaagaaaatgcaaagaagtgaaagtggagaaacccacagcagatgcagaggcgtatgttttcactcctaacatgatctgtgctgaaggagagaagggcatggatagctgtaaaggggacagtggtggggcctttgctgtacaggatcccaatgacaagaccaaattctacgcagctggcctggtgtcctgggggccccagtgtgggacctatgggctctacacacgggtaaagaactatgttgactggataatgaagactatgcaggaaaatagcaccccccgtgaggactaatccagatacatcccaccagcctctccaagggtggtgaccaatgcattaccttctgttccttatgatattctcattatttcatcatgactgaaagaagacacgagcgaatgatttaaatagaacttgattgttgagacgccttgctagaggtagagtttgatcatagaattgtgctggtcatacatttgtggtctgactccttggggtcctttccccggagtacctattgtagataacactatgggtggggcactcctttcttgcactattccacagggataccttaattctttgtttcctctttacctgttcaaaattccatttacttgatcattctcagtatccactgtctatgtacaataaaggatgtttataagcaaaaaa

SEQ ID NO: 173862 - DNA, 1084 bp, Homo Sapiens
aggggagcgatgacagtggtgcagaagcctgccccaaaaggcagaagtgaagtggcaagggaggtcatctgtcatgaggttggctttcaggagggcatccttgatgaggtcataggtcaccagctcagcacagttgacaatggcattacgagcaacattgggagaggtccctttccagaggccccggaacccttcctctcgggcaatggtcttgtaggcattgacggtgctttggtatctccgaccacctccagcccgggcctgagcttggaatcggacctttaacacatccgtgggctgggccacagccacagccagggcacctgtggtgctgcctgctaggaggcggctcccaatgctggcatgctcagagcccttggtgtagaactgttggacagaatcatacaggccgatgcggacagaggcaaagctcatttggcgctgcaggccggcaaccagcccattgtagaggcttcgggggccctcagtacgcaccatggtcagaatggtgcccatcacaccgcggtactgggcgctgactgtagcgcgcactggcccctgactttctccttggatctgtaaccggactttagcagtatccagaggaaaggtgatgagatctgcgatgcaggcagctgtgccagccccaagaaacttcacagtggcagtagggggcacatctgtggccttgaacccaaccatgatgctgatttcctgctacgtcccaggagatggagaaaaactggagacaggggcacctttaatcagcaacaagacgagatagaggaactctgccggaatccggctttgtaaggtctcacggtgaggcctccaagatcaagcttctctaaaggtgtcccgttcttcaaagctgccagtggctatcatggcccgatccccttggttttccatagaaaatgggtgggagacgaaacacctaatggtcatactatgtgtccgagccgcagggagaacacggcagtgcgtgcggctgtgtctgtcggctggcggagggcgcgtcggacgagccgggcgagcgtggacagtcaatcccaaggcgcgcgcagctgggcttcgcagtccc

SEQ ID NO: 173863 - DNA, 921 bp, Homo Sapiens
ggagaatcagtggaagcaagctggcagcgatcgacccttcacccttgacgatttacagtacatgatctttcatacacccttttgcaagatggtccagaagtctctggctcgcctgatgttcaatgacttcctgtcagccagcagtgacacacaaaccagcttatataaggggctggaggctttcggggggctaaagctggaagacacctacaccaacaaggacctggataaagcacttctaaaggcctctcaggacatgttcgacaagaaaaccaaggcttccctttacctctccactcacaatgggaacatgtacacctcatccctgtacgggtgcctggcctcgcttctgtcccaccactctgcccaagaactggctggctccaggattggtgccttctcttatggctctggtttagcagcaagtttcttttcatttcgagtatcccaggatgctgctccaggctctcccctggacaagttggtgtccagcacatcagacctgccaaaacgcctagcctcccgaaagtgtgtgtctcctgaggagttcacagaaataatgaaccaaagagagcaattctaccataaggtgaatttctccccaccctggtgacacaaacagccttttcccaggtacttggtacctggagcgagtggacgagcagcatcccccaaagtatgcccggcgtcccgtctaaaggtgttctgcagatccatgggaaagcttcctgggaaacgtatgctagcagagcttctccccgtgaatcatatttttaagatcccactcttagctggtaaatgaatttgaatcgacatagtagccccataagcatcagccctgtagagtgaggagccatctctagcgggcccttcattcctaccatgcggcaatcactgtgcacttcgttaagctcctgtaga

SEQ ID NO: 173864 - DNA, 701 bp, Homo Sapiens
  misc_feature (38)..(38): n is a, c, g, or t
tttcgacaagaaaacaaggcttccctttacctctcacntcacaatgggaacatgtacacctcatccctgtacgggttccttgcctcgcttctgtcccaccactctgcccaagaactggctggctccaggattggtgccttctcttatggctctggtttagcagcaagtttcttttcatttcgagcatcgccgaaagtatgcccggcgtcccgtctaaaggtgatccatggaaagcttcctgggaaacgtatgctagcagagcttctccccgtgaatcatatttttaagatcccactcttagctggtaaatgaatttgaatcgacatagtagccccataagcatcagccctgtagagtgaggagccatctctagcgggcccttcattcctctccatgctgcaatcactgtcctgggcttatggtgctatggactaggggtcctttgtgaaagagcaagatggagcaatggagagaagacctcttcctgaatcactggactccagaaatgtgcatgcagatcagctgttgccttcaagatccagataaactttcctgtcatgtgttagaactttattattattaatattgttaaacttctgtgctgttcctgtgaatctccaaattttgtaccttgttctaagctaatatatagcaattaaaaagcgacaactagggatcgacacggataataaaaacatggt

SEQ ID NO: 173865 - DNA, 362 bp, Homo Sapiens
  misc_feature (24)..(24): n is a, c, g, or t
tttggcccctagcagccataaagnccctagccccttttcctacaagaggcagaaacaagacaggcctagttccataaacaaactgtgtaacttcctcaaaatgaatcctatttcataactcggacaatttctgggtggtgactgagtacccctttagtgagtacccctttagtgctatatttgtgccattcattatctggttcatatttctttgctgttagatgatacacatttcttcaaaaaaatttctaatgtcacttttgtacttttttaaataaagtatgtttaactgttgggctctcaataatttgtgaaatttcagtgttttctataatgttaatggggaaattcagcaaaattta

SEQ ID NO: 173866 - DNA, 395 bp, Homo Sapiens
ctctagaggatcctcgctgccacgaagtgtgggactgctgggtaaattcagaagggatgttcatcaaaccttgttgactaagtgactgctcaaaaactgacttataaaggctccgaaatgaggcactaagatctccaaaattatattctgagaaaagtagttgcttgtctctttctggaaggttgtactgtggttgctgctgaggagttaatgattgagagactgattctggatggcttgtcaccggtgtataactatgcacacttccaacactgttcaaattaacagatgccaaactctggtctgagagactgttattaaggccactgcgtgggctatcactaccatcctgatcagtgttatacaatgttacccgttctacagatcgtgccctc

SEQ ID NO: 173867 - DNA, 377 bp, Homo Sapiens
ctgcccacgaagtgccataatattgcacatgggaacacaggggtaaggtacaagctacttggtccttccatggggcaaaatcctgacctgctggcatttcactggctctgctctggttccattctttacctttaccattagagatacagcgatgacacccccaggtgcacatgaactcacacgagtgcacacatgcactagtatgttaattcagaaattcaaaaatctaaattgagcctgatagctggttcttattctgctttctgagaattttcctttcagatagccaacccaagattcccaaatcatcattacatcatgggcttctgccaaagacaaagcttattacaatctagaactgccccccacttcgtggg

SEQ ID NO: 173868 - DNA, 864 bp, Homo Sapiens
ggcgattaggggaaatagaagaggaaatggagaatccggaaatggtggacctgccgagaaactaaagcaccagctgcagcatctgggagctgttcctctcccggcagctggagtctctgaccgccacgcacatcaggggcaagtgcagcgtcaccctgctcaacgagaccgagtcgctcaagtcctacctggagcgggaggatttcttcttctattctctagtctacgacccacagcagaagaccctgctggcagataaaggagagattcgagtaggaaaccggtaccaggcagacatcaccgacttgttaaaagaaggcgaggaggatggccgagaccagtccaggttggagacccaggtgtgggaggcgcacaacccactcacagacaagcagatcgaccagttcctggtggtggcccgctctgtgggcaccttcgcacgggccctggactgcagcagatccgtccgacagcccagcctgcaaatgagcgccgcagctgcctcccgagacatcaccctgttccacgccatggatactctccacaagaacatctacgacatctccaaggccatctcggcagctggtgccgcagggcgggcccgtgctctgcagggacgagatggaggagtggtctgcatcagaggccaaccttttcgaggaagccctggaaaaatatgggaaggatttcacggacattcagcaagatattgctcccgtggaagtcgctgaccagcatcattgagtactactacatgttggaagaccaccgacagatacgttgcagcagaaacgcttgaaaagcagctgaagctgagagcacgttaaagccaagttatattcccactataaacaagccaaatcc

SEQ ID NO: 173869 - DNA, 320 bp, Homo Sapiens
gctgatccgcttaagcggcgctggtgaagcggctcatcaggtctatcaggaaacctgagaattggagtgagaatcccagtgtggaaaatcaggaaagagggctggtatgagcgacagagaagtcattcagagaaagaggttattgaattcattggagaatgaatgctgttctgaatttggtagagggaatgtaagaaattaccaatgtacttttagagttttttcaagcaagaattccaaaggatttcaaggtctttatggaatcaagctttggactttatcataaaaatggaaataattaggaatgattctgtgcagtc

SEQ ID NO: 173870 - DNA, 754 bp, Homo Sapiens
  misc_feature (681)..(690): n is a, c, g, or t
gggggttcttctggggtgctaatcaggcccctgttatgcttagggggagccctggtgctacttgcttgaagttttcagtgtaagtaccctgatgccttttggaccttgggatcagatcaagagttttggagatcaggtaccaaggaaataaggacagtctagctgcctcaagtgaggggccctttgcatagctctccttccccctcactgaagctgggtagcctattggggttgagagggaaaatgtgaaatctcagaatttatctcccttagaagagagccagtaacttatgtacaaggatgaaagaaaggtcgcagcagtagctttggggaaagggaggaagatatggcacttctccaaccccggaaaacattgcttttgaaaactgctgataaaatatgagccggttattacttctgtttgggagactgtgctctctgtggtgcctctcttggctctactccacagataccagacctcttctaagaggatgagcagaccagctttgaggttgacctgtttctctttgtctgccttcccaaaacaccagccccccaggaaagacatttaagcagcccttaaagccttaaattccctacctcccctcctttccaaaattttggcctcccctttgccctttagaatcccaagggcaaggggaaaaagggaaaaaagaaaannnnnnnnnntcctcctgggccttttaatttaaccctccccccccttaaaggttccttttttaactctccttga

SEQ ID NO: 173871 - DNA, 338 bp, Homo Sapiens
  misc_feature (41)..(41): n is a, c, g, or t
  misc_feature (50)..(50): n is a, c, g, or t
  misc_feature (56)..(56): n is a, c, g, or t
  misc_feature (59)..(60): n is a, c, g, or t
  misc_feature (68)..(97): n is a, c, g, or t
aaaaaagaaaaattggtcttagaaaagcttctcgaaggggnccgaggagncgcgcncgnnaacacagnnnnnnnnnnnnnnnnnnnnnnnnnnnnnngtaattttattccgtttcatcattctcaaaatatatcccccaaaagtaatctacaaaagagtgcaggctgctccccttaaaggaatggacaagtaatatacactacaaaacaatgtttaagatcatgtataaatgttactctgaatctcatttgttgtcatcaatttctttagtatctcagtgctttggggaatattcttaaccaaacccttcaagcttctggtagaaagtataggcttcc

SEQ ID NO: 173872 - DNA, 788 bp, Homo Sapiens
  misc_feature (552)..(605): n is a, c, g, or t
  misc_feature (731)..(731): n is a, c, g, or t
ggagacttaagggactatgtactactgttaatatctctaagaacaaaacacattgaacatccttccagaaagtctttgagggaggacctatacccataatagaattatggcactcatttctgacagtgatcaagaaatcagttatttccttactgttggaaggacattgtaaagtatgtggttatatgcagtgaaactgcagaaaatactcctggttgaggagttttcactttactacagtgatataaaaaccagcagtttttacactaaattttttaaagaaatattagacaaaaatatagaattaaaacctttggttccaaaatgggaaaggttccacgatacataaatcatttctcatttgctttaaaaaatttaaaagtgtaaaaattatgagagactttattcgttaacaatgggggtaaagagctatatacatgaaaatgagtcttataaaattaagtgaagtgcaaataaaagcactgctactataagacattctggaatggttgtttaataacggtattatccatttgatctatagcaatgtgnnnnnnnnnnnnnnnnnnnnnnnnnnnnnnnnnnnnnnnnnnnnnnnnnnnnnngcttaagcacttcatccattgctttattctgtatctgcggagataatctgcaatcctcttttgttctttttaaaatttgatttggttataaaaatgccaaaatagaaagggtttcaaaaacctaanttggaacccggaatttctaatttaattgccctcctggttccttggcaagtccattca

SEQ ID NO: 173873 - DNA, 382 bp, Homo Sapiens
acctagaggacccgctgatcgctaagcattaggtcctgattacaacactttgagccccatgagcttccttaaatcaaaagacttgctctggacactcatcacctcactgctggcttattctgcttcttctgtagactccctgctaccctgtccatctggcagaacactgggcaaaagaggttctgattctggcctgttacttgctgtacaaacttgcacaaggccagagaggactctcttttcccatcttgcaaagtgggaggttgaactagagtgaactcttgatattctctgatactccaccgctagattaattttttccgaaaatgccccaatgaatatatcccctcccttaagccgaaccgcgggtacccaacttcaa

SEQ ID NO: 173874 - DNA, 276 bp, Homo Sapiens
cgaattggaggctcgatacccctggatccgcttaagccctaaagagaaaaccaagaaagaagtaccttttgtggaaagaatcagcaactacataccaatcaccaacaagccaggtgaagcaatgtgtagtatattcaggtggtagtctggtttctaaactgcttgtagtctgtaagctgtggctgtttgcgaagcaaatgctttccagatggaaactgactaagcagatacaagacttatgcacacacctaagcggtcagcggatcctctaggtag

SEQ ID NO: 173875 - DNA, 1382 bp, Homo Sapiens
gggcccgctggcccgtttccggtccggtgggtacaagatgacggagccgggcgcctctcccgaggacccttgggtcaaggtggagtatgcctacagcgacaacagcctggaccccgggctttttgtagaaagcacccgcaaggggagtgtagtgtccagagctaatagcatcggttccaccagtgcctcttctgtccccaacacagatgatgaggacagtgattaccaccaggaggcctacaaggagtcctacaaagaccggcggcggcgcgcacacactcaggctgagcagaagaggagggacgccatcaagagaggctatgatgaccttcagaccatcgtccccacttgccagcagcaggacttctccattggctcccaaaagctcagcaaagccatcgttctacaaaagaccattgactacattcagtttttgcacaaggagaagaaaaagcaggaggaggaggtgtccacgttacgcaaggatgtcaccgccctaaagatcatgaaagtgaactatgagcagattgtgaaggcacaccaggacaacccccatgaaggggaggaccaggtctctgaccaggtcaagttcaacgtgtttcaaggcatcatggattccctgttccagtccttcaatgcctccatctcagtggccagcttccaggagctgtcagcgtgtgtcttcagctggatcgaggagcactgtaagcctcagaccctgcgggagattgtgattggcgtcctgcaccaattgaaaaaccagctttactgaccggttcttggaaacctggagaacagccaacaagaggcccttgaatctctacgtggccactgaactgctgggcccgggagactggactacaacacctcacactggtcagctggtttctacttggtgtttggtttttcccagccccattttatcttcagcggagccgcggtgtttgttttgtgaaagcttctgattaatttattatattgacgataaaactcaaacctacccagccttccccccactccatggaagtccttgggatgggcgtctgctctggacaccccaaagagctcctgccctctcagccctttattcaagcctcagatttctgctcatgatctacatagattttgggaaacttgttttcctctgtattggtctcttgggcaacatttatggcccaaggttgggcaacattttggcccaagttgggccattcttggcaaggtacagctgtatcgggaacgcaccagagtcacgacgcgaatattcccacagccatgcacggctgcaagggcaccttgtgcctagaactaggctgcctggtcagtccccatgtgatgcccaagccttctggccatctcacggaggggcacaaggtgctccc

SEQ ID NO: 173876 - DNA, 231 bp, Homo Sapiens
tccgtatagcatgagccagaaagaataatattgatacacatgctagattgagagaatactggatgcgtaactactcttctcattacatgactttagtggtccaatccaaagaaacactggatactttggaaaagtgggtgactgaaatcttctctcagataccaaacaatgggttacccagaccaaactttggccatttaacggatccatttgacacaccagcccttaagc

SEQ ID NO: 173877 - DNA, 678 bp, Homo Sapiens
  misc_feature (12)..(12): n is a, c, g, or t
  misc_feature (31)..(31): n is a, c, g, or t
  misc_feature (261)..(270): n is a, c, g, or t
tttgaacccctncctgcggcccgactctagnggatccccggtgacaatcgtgacaactgatggaacaataaataatgatgcttctctgcccatcttctctccatccagaggaaatttttgtcattagtacaactcgttttcctctgataccctggtttgcaggagaaattggtttggtggtttctactacgtaatccaatatgccttgtgttatttcactgttgccttgaagtttcgtttccaataaaactttctttctcnnnnnnnnnnctgtccttcaatgggaacttcatgcaacaaaatttcatatgacttagctctgtattcccgagaattgagactggcagtattctttggacgaataacagcaacatatgcatcttctatgttttctggatttcccattgctggggcaactagatgtggagatggttcagtctcccacctccgttttccctcgctggagtcgaacttgctcctcctgtttcccgaagacaccgagaggtcccacccgtacgggctgccgcgagtgcctctctggccgctacattcaactaaatgggtgggacagtcacctggcgagggggggcagggaccgtcaccgctttctcattcctccttccctcctcccaggcacagcagcccggcccagcttcctgtggcagaaaaaccctcagt

SEQ ID NO: 173878 - DNA, 361 bp, Homo Sapiens
ttgatccgcttaagcgtagatattgaaggtacagatgaacccatttttggaaagaagccaggatagaagagtcaataactgaagacttaagttccggcagtacctgatgcccagagtcaaggtacaatcagttgaaactgttgaagggtgtacacatgaggttgcacttcctgcagaagaggattatttaccacttaaaccacgagttggaaaagctgctaaggaatacccgttcattcttgatgcttttcaaagagaggccattcagtgtgttgacaataatcagtctgttctagtatctgcacatacctcagcgggaaaaacagtatgcgccgagtatgccattgcataggccttaagc

SEQ ID NO: 173879 - DNA, 248 bp, Homo Sapiens
  misc_feature (196)..(196): n is a, c, g, or t
tctagaggatcccgctgacccgcttacgcatgcttcaggttgtagcacacagcacaaaggcaaaacttccagacgatagccatgctgaggacttaactataagcatggtaccatctttgggtgtctaacatatgctacaccacttaatcttactcagtgagcctccatgggatgggccatacagtatctcctcgtntcaccatattgagggaaaacttgagcgcacagtttaaggtatccttggccca

SEQ ID NO: 173880 - DNA, 275 bp, Homo Sapiens
  misc_feature (102)..(112): n is a, c, g, or t
gcttaaggggaagtttctatccttaaatacttagatgagaaaagaaaagaggtctaaaatcaataatctaaactttaagaaaagttttgtggtttttttggnnnnnnnnnnncagagagaaaattaagcctaaaagttaactgggaaaaagtacaaaggatcctggtggagatgtcttatgtcttgactgtggtgatggtaacaagagttaaacattaaaacacaaacacctgacaaacgtatcaactgcttaagcagatcagcggatcctctga

SEQ ID NO: 173881 - DNA, 352 bp, Homo Sapiens
tctccgctcaaccgaacactaagttatagccaagaagggaaggagacacggggatttggggttctctgcttgaatgtcttctcctttaccacctcaccttgttggtacctccctccctggatctctgagccagcagccaggaggacctgacccagcagttctttactggcccctttgtagggccttgctgccagggggcagggatgctttccagcctgcagcaacagaacacttgaccttaaaagtctcttctggtctttggattagaaaaggcttatgttagcatagcttaagagcaacctcagagatgtgagccctactaagtgactgaccactgtctacgagtcatcta

SEQ ID NO: 173882 - DNA, 509 bp, Homo Sapiens
tctgatccgctttaagagagagggagggggaagagcagaagttagagaaaaaaagccaccggaggaaaggaaaaaacatcggccaacctagaaacgttttcattcgtcattccaagagagagagaggaaagaaaaatacaactttcattctttctttgcacgttcataaacattctacatacgtattctcttttgtctcttcatttataactgctgtgaattgtacatttctgtgttttttggaggtgcagttaaacttttaagcttaagtgtgacaggactgataaatagaagatcaagagtagatccgactttagaagcctactttgtgaccaaggagctcaatttttgttttgaagctttactaatctaccagagcattgtagatattttttgtttacatctattgtttaaaatagatgattataacggggcagagaactttcttttctctgcaagaatgttacatattgtatagataaatgagtgacatttcataccatgtatat

SEQ ID NO: 173883 - DNA, 838 bp, Homo Sapiens
  misc_feature (516)..(516): n is a, c, g, or t
ggggtgcggcggctgggcaccgccattttggccggtggccgtgagaacacgctgtgtggctgaaaagtgaaggcaagagctgatttggcctctgtgctcccctccgcaaggggatcgttttctccagaagagctggatattctttcgcccagttatggcagacaagttaacgagaattgctattgtcaaccatgacaaatgtaaacctaagaaatgtcgacaggaatgcaaaaagagttgtcctgtagttcgaatgggaaaattatgcatagaggttacaccccagagcaaaatagcatggatttccgaaactctttgtattggttgtggtatctgtattaagaaatgcccctttggcgccttatcaattgtcaatctaccaagcaacttggaaaaagaaaccacacatcgatattgtgccaatgcccttcaaacttcacaggttgcctatccctcgtccaggtgaagttttgggattagttggaactaatggtattggaaagtcaactgctttanaaattttagcaggaaaacaaaagccaaaccttggaaagtacgatgatcctcctgactggcaggaagattttgacttatttccgtggatctgaattacaaaattactttaccaagattctagaagatgacctaaaagccatcatcaaacctcaatatgtagaccagattcctaaggctgcaaaaggggacatggggatctaatttggaaccggaaagatgaacccaagaacccgggccattgtatgtccccaacctttgttttaacccaccttaaaaaaccgaaatggttgaacaaatttttccgagagaaaatttccccata

SEQ ID NO: 173884 - DNA, 449 bp, Homo Sapiens
ccacctccatatcaccttaaccaaaacaaccacaatctagccacttttagattatcagaagcaaatcgctaaggtataataaatttatgaagtgaagttcatcttgtgtagtgaatccagcctcacaattattctatcttacaataggcattttaaatcccaaatctaaagttaatgtttatatagctcaactctatataaatccacaaagaaactttcagaaatagatggaagaagtcggcattttctaaagttctaaatctttagagataaaatacaatcagctaacacctttaatatctgaggagcatcccacttccctaccacaaaaatatcaatcatgtgtaataaaatattactatagaataagcagcaacttgcttgcttggttttctttccaagagcatactagacaaacaagagtaatcaaaaaggcacctatatttgtt

SEQ ID NO: 173885 - DNA, 318 bp, Homo Sapiens
  misc_feature (207)..(207): n is a, c, g, or t
gcttaagtgtggggcattcagtagtgaatgagataaagatctggtcgtcatggagactgtggtcttgtgagggaaacaggtcataatgaacaattaaattatagcagaggaccattgtcagagagtgcccagaagctcccagttgtcagttctctctagactccattatgtcatcttctgtctctccctgtctactcttcggacacntaggagtgactcatcctcatataacccccagacacaagcaagggacacacctcagatctattaggccagagaagcagtgtcaggagaggtcttcctcttaagcgatcagcg

SEQ ID NO: 173886 - DNA, 302 bp, Homo Sapiens
gctgatccgcttaagtgagagacaggcaagagtcaagactatgcagacaattaattaactgtcttaattcaataagatttcttagaggcatcagtggtgtcctggagcacatgatcacttcttgtttttaaagataatgcaccatattcccatttgagaaaaaattcaccatattatataaatggggttaaggttctgcatcaggtttttgtactgctgctgggttttaagactcaggctgctgagtgcccagcctttgcaagaatccacttcaggaataatgacatcatgccttaagcgga

SEQ ID NO: 173887 - DNA, 231 bp, Homo Sapiens
gcttaagcaaggcttgaataagatgtggatttcaacagttatatagccaaactgtcttgtgagcatttataggttagataaaaagttagaaactggcactttagcaagaactgctgttttccatgctcagtaaaggcaatggaccaacagagtaggagaccagagtcccaccttgtgcctgacagggcgtaagccttgtaaggaaccttacctcttctaaggggatcctct

SEQ ID NO: 173888 - DNA, 430 bp, Homo Sapiens
gggtgaccccaggatagctgatcgcttagggactctcacgtattaggcgtcagaagctggaagattcctatcgattccagttctttcaaagagatgctgaagagctggagaaatggatacaggaaaaacttcagattgcatctgatgagaattataaagacccaaccaacttgcagggaaagcttcagaagcatcaagcatatgaagctgaagtgcaggccaactcaggagccattgttaagctggatgaaactggaaacctgatgatctcagaagggcatattgcatctgaaaccatacggacccgtatgatggagctgcaccgacagtgggaattacttttggagaagatgcgagaaaaaggaatcaaactgctgcaggcccagaagttggtgcagtacttacgagaatgtgaggacggtgcttaagc

SEQ ID NO: 173889 - DNA, 516 bp, Homo Sapiens
aaaaatacatatttgggactcttattatcaaggttctacctatgttaatttacaattcatgtttcaagacatttgccaaatgtattaccgaggcctctgaaaagggggtcactgggtctcatagactgatatgaagtcgacatatttatagtgcttagagaccaaactaatggaaggcagactatttacagcttagtatatgtgtacttaagtctatgtgaacagagaaatgcctcccgtagtgtttgaaagcgttaagctgataatgtaattaacaactgctgagagatcaaagattcaacttgccatacacctcaaattcggagaaacagttaatttgggcaaatctacagttctgtttttgctactctattgtcattcctgtttaatactcactgtacttgtatttgagacaaataggtgatactgaattttatactgttttctacttttccattaaaacattggcacctcaatgataaagaaatttaaggtataaaattaaatgtaaaaatt

SEQ ID NO: 173890 - DNA, 365 bp, Homo Sapiens
ggattagctgatctgcttaaggaacgccattagtatgacaatggtccgagcctcagttaagccaagtgaccacaaagcccacagctctgcacctttatgtgggcacttcaaggctctcatgttggtccagagaacaaaaaatgcaacagttaaagctaccttgagccagagaagaaaacaggcagctctacccttctaagtccagtaagactgaaggatcaaaggccttttactctcaccaacatgctaagtaaattcaaacaacaggactgaagaggacctagagaaaggtcctacctgctcctcttcacccacagaacacgtttcaaacatttcaaaccacgagtctttatttacacttaagc

SEQ ID NO: 173891 - DNA, 227 bp, Homo Sapiens
gcttaagcaggaaacatgccctcaccatttcaacaaccaaaggctttttgaaagagttttgtgttgtggctgttctggatgaagttcttgatgatctaattttaaaaacctttttttccctggaccctctgtgagttgccatagagataagttagaggcaaacagagctaatgagcttggttgggtcttttgtgttcctgaatgtttactctctggtcctaagcgat

SEQ ID NO: 173892 - DNA, 365 bp, Homo Sapiens
gcttaaggggagtacgtaggtacttcctgtacttatatttgactttttgaaagttggcacaggcatgtgctcacacatgacattatttcccacatgttagaaccaagaatttgccaggcttctatttcaatgactgtgtttaaagtaatagtttgccagcgacttggtttacatatccaatcagtgtgaaagttatgtatccttctccatagatacaaggaagtcctctttgcccaatcagtagatcaagaaggcgaacaccttcttaattacaaatgaggttttaaaaagttggcttaacaaatatagctacgtttgctgaacaaatatacgccatatagcttaagcggatcaggcggcacctg

SEQ ID NO: 173893 - DNA, 407 bp, Homo Sapiens
gctgaccgcttaagactgccatatgtctatctagagtagtgatatacaggagttattcagtaaaataatttatatttgtgtggattgctcattaatactctacgtacattttactgtcttctaaggatctcttcgggagtaaggccattaactcatcgctagaaattttctagtttatcattggtcttcaaaccttgttcatagtgttttcttacgtagactatttacgtgaacaaataaacaggcaataggagtcatcagtctttgctttcttctgagttttgttgcattttgaaaatgtctgatttataccttttttctggtctgtataaatcgtttttcactgtacctgctgtttctctgttagaattgtctaaaaaatgatttttactttattttacttaagc

SEQ ID NO: 173894 - DNA, 1147 bp, Homo Sapiens
  misc_feature (552)..(560): n is a, c, g, or t
  misc_feature (838)..(838): n is a, c, g, or t
  misc_feature (1051)..(1051): n is a, c, g, or t
gcttaaggggagatcgctgggagcggttgcggcgtgcggggagctgagttatagctgtgacttctgccctgccaggccgcacacaagctggctgacccggtttgtaaaaatggaatttcaagcagtagtgatggcagtaggtggaggatctcggatgacagacctaacttccagcattcccaaacctctgcttccagttgggaacaaacctttaatttggtacccattgaacctgcttgagcgtgttggatttgaagaagtcattgtggttacaaccagggatgttcaaaaggctctatgtgcagaattcaagatgaaaatgaagccagatatggtgtggattccctgatgacgctgacatgggaactgcagattctttgcgctacatatatccaaaacttaagacagatgtgctggtgctgagctgtgatctgataacagacgttgccttacatgaggttgtggacctgtttagagcttatgatgcatcacttgctatgttgatgagaaaaggccaagatagcatagaacctgttcccggtcaaaaggggnnnnnnnnngcagtggagcagcgtgacttcattggagtggacagcacaggaaagaggctgctcttcatggctaatgaagcagacttggatgaagagctggtcattaagggatccatcctacagaagcatcctagaatacgtttccacacgggtcttgtggatgcccacctctactgtttgaaaaaatacatcgtggatttcctaatggaaaatgggtcaataacttctatccggagtgaactgattccatatttagtgagaaaacagttttcctcagcttcctcacnacagggacaagaagaaaaagaggaggatctaaagaaaaaggagctgaagtccttagatatctacagttttataaaagaagccaatacactgaacctggctccctatgatgcctgctggaatgcctgtcgaggagacaggtgggaaagacttgtccagatcacaggtgcgcctgctatgtccacatcctgaaaagaggggctctgctctcgagntgagcacactggggactctacatggaagcaaacggacaggtggcccaaattgctgtctgctctctggccagaaaaaccacccagtccatttcgtca

SEQ ID NO: 173895 - DNA, 418 bp, Homo Sapiens
  misc_feature (47)..(47): n is a, c, g, or t
  misc_feature (75)..(124): n is a, c, g, or t
  misc_feature (304)..(346): n is a, c, g, or t
  misc_feature (380)..(380): n is a, c, g, or t
gaaaatcactaaaaattcccacaaatcttgtttctggcactttaganaaactgcaaaaaaatacgtaataaagannnnnnnnnnnnnnnnnnnnnnnnnnnnnnnnnnnnnnnnnnnnnnnnnngcggaaccacaagagagactgaggaaggcctggaggcaggggcagaggtgacgacagtgcccctatatccttaacccatactcctctgaggcaaacaggcatgggaaaatggaagggttgaggatggaccggagaattggaacttcagaataggtcaaaattcccaaaaccatgggacannnnnnnnnnnnnnnnnnnnnnnnnnnnnnnnnnnnnnnnnnnccttaaatatggtccagggaatagcttccagatnttggtggttcttgggccaccattgaggtttttggccac

SEQ ID NO: 173896 - DNA, 289 bp, Homo Sapiens
tggggttggttggtgtgggtggggatactacagtgccccacaggacgcccctcagccccactcccatgttcttccccctagaaccatcagcgccgtcaaagcttcacagtgtcacaggcatagacaccaaagacaaaagcttaaagactgtgagttctggggccaagaaaagttttgaattgctctcagagagcgatggggccttgatggagcacccagaagtatctcaagtgacggaggaaaaccgtggagtttaacctgacggatatgccagagatccccgaaaatc

SEQ ID NO: 173897 - DNA, 274 bp, Homo Sapiens
gcttaagcaactttcagagaatgataaatggtgttgggcattgaggggagagtggattttctgtgctttagcgattttaatcaagaaataaaactgaaacccaaatcaacttttgaatagtaggaaaagttaatccctgcatttgcttacctaagtttaatgccttaatagtggaaggactagatgtcacaaagtcaaatattaaggcaaaaataacatctagttaaaacgatcacccataaaaacctaagcgatcgcgggatccttagagtcg

SEQ ID NO: 173898 - DNA, 759 bp, Homo Sapiens
  misc_feature (12)..(12): n is a, c, g, or t
aattcggcacgngggggaatatgagaaatgtcacctcctggctaccacaataatgcaactaggagttctggttctccgctgactacccacaggagtccttagaggaaccacacaggaaacctgggaaacctaacactctgattccaaggctccaagcttgatatagaagactatcatatgaaccagaaagggtaactgaaaccaaggaaatgactccagtatcaagctaaagacatgccttaaaggatgaggaggagcagaaatcttaccagcaaggcaagaaagaagccgtacgtgaacagcctctgctttaggcccagaaggaaaagaagcttacaggagacaatcagtcttacactcttccatggtcacaaacaagaggtccctggatctacaggtcatcttgcccctgaaatggccctggaaagctatggctgaagaatggaggaaaagatgactttctctgtttcttcagaccaggcatcaactgggatgttggaatgttgataaaaggacatctcatcctttgttttctgcctatgctttcaccatacccattcccatgtctggtcatcacagcgtccttcacagcccttagctgaatcatgttgagtacaggatggtgtgaatatcatggtttgaatgcaaccatggtctgtccatgtggcttgttttttgcagcccacttagacttaagccctcttaatttcaaaattatgttcatatgtgccaataaagttgtccctacatgaactgaaa

SEQ ID NO: 173899 - DNA, 1014 bp, Homo Sapiens
tgctgaggtcgctctagagtatcccggctatcacattatccattttagtcacaatacagttcgaggatgttcttatttttataactatccagcagtgtgtgaattttgccaaaacaataattggttatcgattattagagctcatgaagctcaagatgcaggctatagaatgtacagaaaaagtcaaactacagggttcccttcattaataacaattttttcggcacctaattacttagatgtctacaataataaagctgctgtattaaagtatgaagataatgtgatgaatattcgacagtttaactgttctccacatccttactggttgcctaattttatggatgtcttcacgtggtctttaccgtatgttggagaaaaagtgacagaaatgttggtaaatgttctgagtatttgctctgatgatgaactaatgactgaaggtgaagaccagtttgatggttcagctgcagcccggaaagaaatcataagaaacaaaattcgagcaattggcaagatggcaagagtcttctctgttctcagggaggagagtgaaagtgtgctgacactcaagggcctgactcccacagggatgttgcctagtggagtgttagctggaggacggcagaccctgcaaagtggtaatgatgttatgcaacttgctgtgcctcagatggactggggcacacctcactcttttgctaacaattcacataatgcatgcagggaattccttctgttttttagttcctgtctcagcagctgacctagacagggtactgtattagctagtgtctcattaatacctgatcagggcagaaaactgatagaatgggtattcctttcaattgaaaataaatggtcagtttcctcagcttttcatgaacatgatatgggagcagctcatatcataatgtctgaaatatttatttattcatctgtctaattcacccttttctttttaaaaagcccagtttcagaatgtgaatcagggatattcctgttactaaaatg

SEQ ID NO: 173900 - DNA, 385 bp, Homo Sapiens
atccccggctatacattatcacagcttactcttgactaatatgagaaagagaagatacagtctaatccttagctgcttcaggaaacaggccagcagtatttctaggttttattttcagctggtttgaccaggtatgatcataccatttggtttgaagttcctactattaagaggtcatgtggagtagggcaaggtatgaggtaacctatttctcctccattagatttgaagttacctgaataaaagaacttatgttcaactctgtatcacacagagttccttcaacctatgagaaacacaaatttgttgaaataatatgagtactagtattcattctttcattctggggtacaatcatacatagggcagataatgtgatagccgg

SEQ ID NO: 173901 - DNA, 260 bp, Homo Sapiens
ctatcacataatctccctctccaagtcactttcctcaccactggtgctgcccagtctggccatctttctagagcctttagctgtgggttcccccttcccactgtcttcctcgtcctcgctgcttccactcaacctcttcccacccttaagctgggtcctgtcctcactcttcctctgcacctgggggttctctatctctcccactgtcatccccactgctggctgcctctttctgacttcctcggataatgtgatagccg

SEQ ID NO: 173902 - DNA, 578 bp, Homo Sapiens
ggctatcacattatcaatcatgaagaaattatgttgccaaagccttaagtgaatggagtactactctttccaaaatattgcaaaatggggtacacggtgagatgcccttcccattttctgtaacagttattttccaatattttaccaaaaataaacatatgtgagtaattttttagtacagtcattttattgactgaactcacaggaagtctttatctgaagctgggtcctaaaatcatgtgatattttattagactccaaacacaattttggataatgtgatagccggctatcacattatctcataaattgaaaaataaaccttaataggcttctaagctcaaccatcattaaatgatagatgcaagtggtaatgtgtacactgttgtatttcctttcccttcagaatttctcgatgtcagaatagatccaggatactcaagtgtacttgattcatccttgtagaatggatctagacaagtctgatgttgcacatacaaataagaatatgtgactaatagtgtgtaatttcatatgtatttagccaaagaagtgccctttctagtacaaataataat

SEQ ID NO: 173903 - DNA, 303 bp, Homo Sapiens
ctatcacattatcacatgagtgtagggtctgttagccttaaatcactacctaaaccttgagaagttgataatgcctttgttttgtgagaacagtttcagtgtgcaggctgatagtctataggggtggcagaagaaaagtgtagggccagaaaaaaagggatacacagatcttcttgcgatttttttaaagctatgaaacatgatgaattaacaaagcataagtatacccttcactatgaatgtttatgttttcacatacttcagctagatatgtgtaagataatgtgatagccggggatcact

SEQ ID NO: 173904 - DNA, 350 bp, Homo Sapiens
ccaggtagacctaactcataactcaagagctgttgtttagggacctctggaggactttgtgccaagggaggagagattccagtgagagccatttgactacgtggactgtggcctgggcaggctgtgggcatttcttctggctttttccatattccctttgcctgaaaactgtgggaatcatgaggtctttggtcagcattagatgagctactgagattctgttgcttgaaaatgacaccatggctcactggcttacaagactcccttgggaaattttgggatgggccttgcttggcctggaattgggttgccagcaatggaggtgcccgagctaggttaggtctacctgg

SEQ ID NO: 173905 - DNA, 252 bp, Homo Sapiens
acacccaggtagacctaactgataagctattgtctgtaatagttttatatcgttttatattgaaccctcttttccatagtgttaactgtcagttgcccatgggctatcaacttaataagatatttagtaatattttactttgaggacattttcacacagattttctattttgaaaaatgagagctgtaactgaggactgtttgcaattgacataggcaataataagtgatgtgctgggttaggtctacctgg

SEQ ID NO: 173906 - DNA, 671 bp, Homo Sapiens
  misc_feature (103)..(112): n is a, c, g, or t
cgttaattctccaaactggtcataaaggcactctgtgaagatattggggactgacatcttaagctctcacctggctgcagtaggaaaggccaaactgacgacnnnnnnnnnnttctttataaagatgatatggtaacatgtatctttgccctgggtctgggtgggtccagtcagtctcagatttacaagcatttaggagcctaggtaaaagctgctagtattcttttaaaagttatatttatgacttgcaatgatagaaaactccttccaattaaatggcattttataatattatgtgtgtacttcacagtgttaaaaataccctcatacgttattgcatttgatcttcacagaaagtgcattttaaccagtactctgggtgcaataaataatatgtagaaatttaagtcctccaattccagcatatccagtgagttttgacagtgtgtttatgtggaatgtttaaggatatacaattgtactttatataaatgggttcttgttcttcttaaatgtgacatgaaataattgtgctgctacattatactggaaattaacaggggaaaagggaagagctcttggctcccttgaggttctgctagtggtgttaggagtggttacaactgagcttttagtaaccatttaaccgtatgtaaacttggtttctaatt

SEQ ID NO: 173907 - DNA, 139 bp, Homo Sapiens
ccaaatttaaacaacttctgtaactaagcagatcaaaagtaacagtaaatacttcattcctatacgcacagtatccaggagcagaatccaccaaagaacatatgaagaattgaatttttctaaaggttaggtctacctg

SEQ ID NO: 173908 - DNA, 265 bp, Homo Sapiens
caggtagacctaactggaagaaggcacagtcttcattttggtggcttttatcaccatgaggatgaggtgacctgtgctcacagtcctcctttcaggatcgaggggagcagagaagtttccaggccgagccgtaggcctggggatcatctgacacagaggcaggctgtgtccccactgcattcatcagacccacttcctttgacctacaagagggatcaccctgcattttccatccttctcatcagattgggttaggtctacctgg

SEQ ID NO: 173909 - DNA, 490 bp, Homo Sapiens
ccaggtagacctacttgtgctaggtcatggagaaacaaagagactggggtcacatctctgaggggctctcattataaggagagaaatagatggatagcaaaaaattgtatcataatgtagaacgtacaataattgtagaagcactgatgacctctcactttattctaaaccacatatgtatgactatgaaaaagaagctattatcattcatgatcctaaaaatgactgggttaggtctacctaggtaacctaacccagggtagacctatcccaggtatacctaacgatgttctggtcggtcttcattctaactgcatcctgcatttattttgccatgttttatttgctgcttcttgcttgtttctgcttgcccgagtttctggtcaggatcagtctcattgcctgagcaatggcaggtgcattggcctcatgtaattagcactattcagcagtttccgttccttcctatcctgctgttaggtctacctgg

SEQ ID NO: 173910 - DNA, 237 bp, Homo Sapiens
ccaggtagacctaacacgatgatggacactcaggccacaagtgaacatctgtccccaggtggacatccatcccaaggtggacatcaggccagaggtagtcattagtctccagctggacaatagtccctaggtggatacctaggccccaggtggacactagaccccagattaacacaaaaaccaagtaaaaaatcaaaccccaagtggaaaaccagtccctaggttaggtctacctgg

SEQ ID NO: 173911 - DNA, 299 bp, Homo Sapiens
ccaggtagacctaacccaggtaacctactgacaaaatattaacccaagaaaaacaagctataacttaaattccttggttaatgacataccataaaaaactaaccaaatcaaaccaaaatgtttggacataactgatgtcttaggtgtcctctaacactactggatgttttctatctagcaacttcacacctgccagctttgtgacatatgacataaaacacaatttgggcttgtgctcaacataaagacaagtttctaacagtgttagaatgacaatgagtatatgttaggtctacctg

SEQ ID NO: 173912 - DNA, 309 bp, Homo Sapiens
ccaggtagacctaacccccctgccccatccagccctgtgtccatgctgacacatctggaccagaacccaggccaggtgaggtattatgagagtacccagattggcctcaggcagcccgaggctctgagaatcttggtgtaaggtgcaacattctattgagaaagaaatgtatgccttggttttatcagattggatttgtgtataatgtactaagacctaaaatgaggctttcctgccataggcttgcctaaagtgaggctctttcttgtttgctttaagtagtgcgcagcccctgttaggtctacctgg

SEQ ID NO: 173913 - DNA, 284 bp, Homo Sapiens
ccaggtagacctaacgaatgtggtactttgcttgtaattggaaaactggaaagttgaaaattaaagtatggatattatgattttcaatttttagaagatgtatagtatataatggcagtttgcatttgatgttagaaagaatagcatctcaagggaaaacaaaaatgctttccgttccagaaaatgttaaacattcctttttcttcttaggataaactcactactagctacttttcttctacctgggttaggtctacctggggggatcctcagagatcgaccat

SEQ ID NO: 173914 - DNA, 334 bp, Homo Sapiens
ctgatggtcgactcctagaggtatcccccaggtagacctaacacagtaaaaataaatactattctgtttgttcttgaaactaaaaataccaagttaatatttacttgcaaaggtctttgaaatttatctgagatactttttagatctgttggtcaaatttctcaatatacatgcattcctcaaactacctttattcatattctgtctgtcatgttccatttgaaaagaaagaatgcttgaacagtacttgagatagctttacgcagtagaacaagtactgaactaagatgcagatctcaatggctatatgaaatcgtggggttaggtctacctg

SEQ ID NO: 173915 - DNA, 243 bp, Homo Sapiens
tatacctaacatctataatgcattcataggggacatttggctatagttttcttgtattgtctgtctagctttggtatcaggataatgttggcttcatagaatgactcagaaagggttctgtttctcaactttttggaggagttcgagaaggattagtgttaattcgtttctaaacgtttggtagaattcaccagcgaagtcatcagttcctgggcttttctttgttaggttaggtctacctgg

SEQ ID NO: 173916 - DNA, 1405 bp, Homo Sapiens
  misc_feature (577)..(579): n is a, c, g, or t
  misc_feature (582)..(583): n is a, c, g, or t
  misc_feature (585)..(585): n is a, c, g, or t
  misc_feature (592)..(699): n is a, c, g, or t
  misc_feature (701)..(701): n is a, c, g, or t
  misc_feature (717)..(717): n is a, c, g, or t
  misc_feature (764)..(766): n is a, c, g, or t
  misc_feature (781)..(795): n is a, c, g, or t
  misc_feature (834)..(843): n is a, c, g, or t
  misc_feature (846)..(854): n is a, c, g, or t
  misc_feature (947)..(947): n is a, c, g, or t
  misc_feature (1096)..(1096): n is a, c, g, or t
  misc_feature (1145)..(1145): n is a, c, g, or t
  misc_feature (1148)..(1148): n is a, c, g, or t
  misc_feature (1283)..(1283): n is a, c, g, or t
  misc_feature (1377)..(1377): n is a, c, g, or t
tataagcagttatctctgaacctttcgctggctttccagcttagaatgcatctcatcaagcttaaaagtcagtatcatattattatcctcctgttctgaaaccttagtttcaagagtctaaaccccagattcttcagcttgatcctggaggtcttttctagtctgagcttctttagctaggctaaaacaccttggcttgttattgcctctactttgattctgataatgctcacttggtcctacctattatccttctacttgtccagttcaaataagaacataaggacaagcctaacttcatagaaacctctctatttttaatcagttgtttaataatttacaggttcttaggctccatcctgtttgtatgaaattataatctgtggattggcctttaagcctgcattcttaacaaactcttcagttaattcttagatacactaaaaatctgagaaactctacatgtaactatttcttcagagtttgtcatatactgcttgtcatctgcatgtctactcagcatttgattaacatttgtgtaatatgaaataaaattacacagtaagtcatttaaccnnnaannanaaacacnnnnnnnnnnnnnnnnnnnnnnnnnnnnnnnnnnnnnnnnnnnnnnnnnnnnnnnnnnnnnnnnnnnnnnnnnnnnnnnnnnnnnnnnnnnnnnnnnnnnnnnnnnnncnaaccccggaacagccncctctacggccaggccgcccacccacgcaggaacaagaagaaggagnnncttggggggggccgnnnnnnnnnnnnnnngacaaaaattttttataaaaccacccctccctgggtgcnnnnnnnnnncgnnnnnnnnngttggcacgatagaacaaccacgacggttgcctcgctctgtcctctccctccctcacagaagaaacaaccacccccgcgcgggagacacaaancaccgtggggcgcgggtgtgcgatacctcccaccacacccagatagaacaaaaaacacacacccgcccgcggcggcgcgaatcacaaccacgcatggaggtctcctctatagtacaacacacaccacgatagagaaggggcgcggcgtncgttgcggaggggaagccgcacaccggacggagggcgcctcaacactcnacnagaggaggaagcgcgtccgcactcgacgcgaccgcgtctcgctccccacataatacatatgatcgtctcctcgcgccgccgctggcactgggtctcataattagtggaggagaacaacgacgcgtgtaggagtgnttatatatataaataagacactctcacacgcctccgagccaagcgtgtggaaacatacactcatccacgcagaggcggcgggagacatgataantcgttgctaccgctgctccacccctcta

SEQ ID NO: 173917 - DNA, 234 bp, Homo Sapiens
catacacatatgcaaacacagacaatattatttttatcctggcagacacactattcaattttaaggaagttccccacccccctagaactataagtatgttgtttgatttttttatgtgtcaaatctctttgacagagggatcatttgcaaactgtcttactttccctcagatttcctaagtgatgctagcttcttttcccaggcagtcttaatggcacatagataatgtgatag

SEQ ID NO: 173918 - DNA, 941 bp, Homo Sapiens
gcggtggcaagatcgacgtcagtctgaacatcagtttacccaatctgcactgcgagttggttgggcttgacattcaggatgagatgggcaggcacgaagtgggccacatcgacaactccatgaagatcccgctgaacaatggggcaggctgccgcttcgaggggcagttcagcatcaacaaggtccccggcaacttccacgtgtccacacacagtgccacagcccagccacagaacccagacatgacgcatgtcatccacaagctctcctttggggacacgctacaggtccagaacatccacggagctttcaatgctctcgggggagcagacagactcacctccaaccccctggcctcccacgactacatcctgaagattgtgcccacggtttatgaggacaagagtggcaagcagcggtactcctaccagtacacggtggccaacaaggaatacgtcgcctacagccacacgggccgcatcatccctgcaatctggttccgctacgacctcagccccatcacggtcaagtacacagagagacggcagccgctgtacagattcatcaccacgatctgtgccatcattggcgggaccttcaccgtcgcggcatcctggactcatgcatcttcacagcctctgagggcctggaagaagatccagctgggcaagatgcattgacgccacacccagcctaatggccgaggaccctgggcatcgccagccttgcctccagtgccctgtctccttgtggcctcaatctggtgccaaatctggctgtgtcccaaaagggtgtgtggggaagtgggggggaaaagtagaggatggctcgaatgttttggaggtacctcttttccccggttctttttagaaaaattacactgctgtaaagttgcatttccccttcctggggagccccaaaaagagtttggcaagggtggg

SEQ ID NO: 173919 - DNA, 476 bp, Homo Sapiens
  misc_feature (412)..(412): n is a, c, g, or t
  misc_feature (418)..(418): n is a, c, g, or t
taacatcgtgtcaccaaccggaagctgaaccaggaaccgagcgccacctcatgcacctggaattggacatctcggactccaaaatcaggtatgaatctggggaccacgtggctgtgtacccagccaacgactctgctctcgtcaaccagctgggcaaaatcctgggtgccgacctggacgtcgtcatgtccctgaacaacctggatgaggagtccaacaagaagcacccattcccgtgccctacgtcctaccgcacggccctcacctactacctgggacatcaccaacccgccgcgtaccaacgtgctgtacgagctgggcgcagtacggcttcggagccctttgggagcagggagctgcttgcgcaagatgggccttccttccttccggcgagggcaaggagttgtaactngagttnggttggttggaaggcccggaggaacattcctggggcattcttgcaggattttcccgtt

SEQ ID NO: 173920 - DNA, 792 bp, Homo Sapiens
gtccactgaacatcgtgtcacaatttaagcaactttccataggaaattaaaatcccaaatccaaggacctggtattttcatgctaaagaaagcattccagcgtaaagtggagtttaatttgcttcactgtgtgcatcttaatatatccaaatgagtaaaactcaaaagcaaccgtaagtcagaatactataaaacatgttttgttgaaagaagataaaattccttccagagtattgtctaattaaattaacatatttctttgtaactaatttaacttttccaaattctcatttgcaaattagattcatacagttaaaactgaatatacaaaccaacatattagaaagatcaaaatttacatactcaaacgtgactccttaagactgactttaacatgttctttcaactttattcaaatcagatggccccctccagcatttatcattttaaaaaatgaatttaatgctataaaaaggtgatgttcactttaatcctgtttgccttcacgccactgtcgtgagccttcattccaggccacatacacaaagagggccagcaccacatggacggcgaccactgcaacaatagcagcgtaaaaatagctgtccctattggacatcccaagggcgccttcaaatatgtaagatttagttgtgaaatataacccaataggaacagtgatcattaaagctgtgaagaacaggagcgtcttcagtgtagatgctaatgagctttcatttctgaactcaggaggctgcagtgcgttcagcgccgccttatccgggcgctccc

SEQ ID NO: 173921 - DNA, 174 bp, Homo Sapiens
tgaacattcgtgtccaaccctgtgttaattatgacagaaggaaagtgtgtgagagagatctaaactacctagcagctatagctgccatcttgaaccatgaagatacgggccacacgtaggggtagctgggtagtgagtagcaagaagccttgttggatgaggacacgaatttca

SEQ ID NO: 173922 - DNA, 776 bp, Homo Sapiens
caaagtatgtggcgtcgactgctagttttttcgtatttcaaggcagctcgtgtgacaggggaggacccgttgccaagagtgcagagaaattgtgagttggtccagcaacaccacaaattgacaatggaataattcaaggggaacgtgaccattatggatatagacaagtctgtaacgtatgcatgtaataaaggattcaccatgattggagagcactctatttattgtactgtgaataatgatgaaggagagtggagtggcccaccacctgaatgcagaggaaaatctctaacttccaaggtcccaccaacagttcagaaacctaccacagtaaatgttccaactacagaagtctcaccaacttctcagaaaaccaccacaaaaaccaccacaccaaatgctcaagcaacacggagtacacctgtttccaggacaaccaagcattttcatgaaacaaccccaaataaaggaagtggaaccacttcaggtactacccgtcttctatctgggcacacgtgtttcacgttgacaggtttgcttgggacgctagtaaccatgggcttgctgacttagccaaagaagagttaagaagaaaatacacacaagtatacagactgttcctagtttcttagacttatctgcatattggataaaataaatggcaattgtggctcttcatttagggatggcttttcattgtctttaaggtgtgttagggaatgttcaacagaggcaagggaggaaaaaagggcagttcccggggattcacattcttt

SEQ ID NO: 173923 - DNA, 499 bp, Homo Sapiens
  misc_feature (474)..(474): n is a, c, g, or t
agatcccttatcgtgtgcacgtagtgagctacctgatctctaaggactaactacccaggtccaggtcttcactaggggtactgacagtgtttaagctttactccacctccttacttagaaatcactttacgatttatttccattttccacttttatagaccatccttttgcttatatgctagatttttctggtgagggaagggttgtgttcttcaggggtcttttgttttgaaatactcaggatggggagaggtttatttaagaacgaattataattatggtttacactgttgggagtaaaggagcatttttacaccccttaagggtgcttaattctgttgaaaccaaaaagatttgtctacaaatgctatcttttttagaaactattagaaatgactccctttcaaagtcaatctttgggaaaatattgaggaggtcactaattagttgggtgcagttaatataattcaagangatttaggatgatgggggaagtttt

SEQ ID NO: 173924 - DNA, 388 bp, Homo Sapiens
tactgtgactacccatctgctataaaagcatctacatgcttcttttcaagtttctgtactcacctggtcagacaggtaagcagaccacagatctgcaggaatctgtagactactttcagtagcctgattcacaagagcttatttttttacatttttacacttatctttctggagctggtcattaatgacctctttcatatcctctatcatttcctcaatgcatttttacaactcaaggcaaaactgttaattccattaagcaaaatacccctaaatcccttaagtgatattataccaggtttgcttaaagaagcaatctaatggtgtcatcacttacaatgtgatctgattctatcacaggatcaacaataatgatggcttaacttgg

SEQ ID NO: 173925 - DNA, 185 bp, Homo Sapiens
tctgtgactacccagtctgtgctacccaattctgactagttagttcagttgtttgcccaggtttaatgggaccatgatcaggaggtacaggaagaagactcaaagtgtatttgtgtcacatgcatgtcaggatgcacagaatcttctgctagaaggtgcagcattagaatatgggttgtcacaga

SEQ ID NO: 173926 - DNA, 370 bp, Homo Sapiens
tctgtgactacccaggtgggaaaaaataatatggtgaatgtttagttaccttaagcactcaaaggataagaaagagattttggattaattaggtcacctgtcctagacatagttgggagggttggtgtgaagtggaaagctgttaatgtgcataagacatatacaaattgagttatcagaacttggttaatttacagtgttcggtattacttggtactgttctgagcacacagtagtgaatggtcattaaattattaatactggacagcattcataaaacaaatgaactttgatgtaaaagcaaactaaatttggaaatgttaagagcactcttagccatctaaccactatttggaatgggtagtccaga

SEQ ID NO: 173927 - DNA, 258 bp, Homo Sapiens
tctggtaactacccattgcccctttgatttcttgacttataggttattttgatgtgtcatgttttcaaatattttgaggatcttccagagatcttttgttactgatttctaatttcattacattgtgttcacagaatatacttcatatgattttaatccttttaaatttattaagatttgttttatgacccagaatttgatgcatcttagtaaatgttccatgtgcacttgaaaagactatattctgtggttgttggg

SEQ ID NO: 173928 - DNA, 309 bp, Homo Sapiens
actcgtccgtctgttataccatctgtgactaccagagcatgcctaacatcccagcttgctccttttattattaatcacacttattttcatgaaggtttgtgtagatgcagatatctgttagctaataaaacaaggaaaagctaatgactgtgacctgcaaaatattctacagtttgagaattaaatgtctcgtgtaaattttaaaaaatgcccctttgaaaggaccaaatgtagtgatttaatctcagaggaggatgattagagatgggggtcataataaactggcctttcaggtgggtagtcacagac

SEQ ID NO: 173929 - DNA, 567 bp, Homo Sapiens
ggacgcgtgggtcgacccacgcgtcggactagtctaggaagaatttgaagagctgattgacacatttgaagatgataactgtttcagctctggaaaggatgatattgatagctggaaacgtgaaaaagagaacaaaaggagctaaggataacacattagatgaagattcagaaggtagtgatgatgaactggtaacctggatgacgatgaagtctttaggaagtatggatgatgaagaatttgctgaagttgatgaagatggaggaacattcatggatgtgttagatgatgaaagtgagagcgttccagaacttgaagtccactccaaagtcagtactaagaaaagcaagagaaaaggtacagatgattatgactttgctggctcatttcaaggagccaagaaaaaagaaaagaaacttaaatgattccagacctatttgtatctgctgaagagtatggccatctattggatgaaaatatgggatccaagtttgataacattggcatgaatgccatggctaacaaagatgatgcaagtctcaagcagcttagatgggtagtcacaga

SEQ ID NO: 173930 - DNA, 667 bp, Homo Sapiens
aaagaaacagagatagtgaaaaaacttgagacagaggaaacagttcctgaaactgatgtagaaaccaaaaaaccagaggttgcttcctgggtgcacttggataatttgaaaggtgggaaacagttaaataaatacgatccattcagtagaaaccctctgttctgtggagctgaaaatacaagtctttgggaactcaaaaagttatctgtgcattttcatccctccgtggccctttttgcaaagaccatccttcagggaaactatattcagtattcaggggacccactgcaggatttcactctaatgagatttttggatcgatgtgtataccgaaatccaaagccccataaaggcaaagaaaacacagatagtgtcgtgatgcagccgaaaagaaaacattttattaaggatattcgtcatcttcctgtgaacagtaaggagttccttgcaaaagaagaaagccaaataccagtggatgaagtgtttttccacaggtattataaaaaagttgctgttaaagagaaacaaaaacgggatgcagatgaagaaagtatagaagacgtggatgatgaagaatttgaagagctgattgacacatttgaagatgataactgtttcagctctggaaaggatgatatggatttggctggaaacgtgaaaaagagaa

SEQ ID NO: 173931 - DNA, 282 bp, Homo Sapiens
tctgtgactacccagtctgtgactacccagaatatattgcttcatctgccttaaagaagatacaaggcctgtttttagtttataatgatggataaattcgttttaatctagattactaatccttcttttcaataattcttctaggcaatacaaactgttaccgagctcctatggagtgtcaagaatcatggaagtaaacatctgagaaacctgttgaagattatttcattcgtcttgttgttattgatgttgctgttattatatttgacatgggtagtcaca

SEQ ID NO: 173932 - DNA, 268 bp, Homo Sapiens
tctgtgactacccatttcaacctactatctcaatataactggattacctcatcccactcagaaataggccagattccattgggttgcacattgggaggagagcgcttccagtcccacgtctttacaggaatcttccaggtcttaccatagttggcttcaatgtattcgagggtttcacagggtacatggaccttcatgtctacaaactcagtcccactcagaaataggccagattccattgggtagcacagactgggtagtcacagac

SEQ ID NO: 173933 - DNA, 272 bp, Homo Sapiens
catagaggatccccgtctgtgactacccagtcaggcaatagtgtaagatgccacgattagaccaattatgacgtggaagagattcttaagaccatgggttatgttttctccagttaataggcggtcaaagggatattaggtaatgtatctttatgcttgtttgacaaattatgaacacggaaaaaagaatcaatttgtatacttcggtcatggacacacatttctcaaggctagagtgtgcagggatgaaattccaaatgggtagtcacaga

SEQ ID NO: 173934 - DNA, 767 bp, Homo Sapiens
atccccggtgaatacgaggggacaagctattcacacgaagacaaccagtagctcaatttcacggcacatccctgagtgctgctattttgcataggatgctgaaacgcctgggacttctgacctggaacataccctgtgggcaatcctgctttccacaccagcttgaggaatgaaaactctggagtggtacccatagagacagcctttccttccccacactgagccaataagcaatgtcattctacccaagatgagaagtcaatggcttaacatgacataagctgctatacaaaacaaaataaatatcggttcaccaagtttgggtcacttaaaattgcacgggcctaaccaatgcagggaaaatggccttcaatgcattctatgaaccagagaattggagtccccagtagtctgtgttctttttctccagagaggcgtatatttatagaaggaacaaaaccccatgcaggatgagggggctggctaataatatgtgtgaatacactgatctgtctgaacagttcttggctgcctgcgctcaatggtaataaatatccactgaaagccgtctgctgtatgtgtttttggtaacgtctcacacttccctgcatgaatacattcagaatgtaagcagcacacactcaacgatagagactctgttgtattccgaattcttaagttatgcagcttagcagcagtgataatgtaatggtttgcaaaataatagactggcaagacgtcaacctggaataacacatcatataatg

SEQ ID NO: 173935 - DNA, 465 bp, Homo Sapiens
gctggcccgattgagacttcactaagaaccaggacacacacccaccatcccgctctgaattgtgtatttacaaaggtgctggacacacacagactttcaaacaagtcatcagtacaaaggattcacagataaattcttcacgtcatatatattcccaagccacactgagaaagaggagaaatgattcacgactagttatctaagaagcgaaaaagaaatgtttgcaaaacaccgatcaacatgtctactgcatttagatgaatagccaaaaataacatatacatttaaattacaatacatctatacaccatttcactgaaattacacctagatacctacattatagctacacaaagtgcataggcactgttcttcatgcgtgaaccaagtgtcagtgtgtatacacaagagcttcatgctttgacagctagctgtacttgaaaatagatacaattattgccagtc

SEQ ID NO: 173936 - DNA, 504 bp, Homo Sapiens
acgggaacatcaccttgcccatgtctcacgcgggaacaggaaatatagtggtcattatgattagctatccaaaaggaagagaaattttggagctggtgcaaaaaggaattccagtaacgatgaccataggggttggcacccggcatgtacaggagttcatcagcggtcagtctgtggtgtttgaggccattgccttcatcaccatgatgattatctcgttagcctggctaatattttactatatacagcgtttcctatatactggctctcagattggaagtcaggtaatgacggataactctgaattttgctttattaaaagataatgtcataaatatgccgctatatatattctctagaagttacatgttgaccataatcttgattttcgcttatattatttaagtattcaacatgactttttggaagtaactttttaattggactatgttaaattttttgttttgtgggtagtcacagacgggatcctctagactccgcctg

SEQ ID NO: 173937 - DNA, 663 bp, Homo Sapiens
  misc_feature (21)..(21): n is a, c, g, or t
  misc_feature (42)..(42): n is a, c, g, or t
ctatagacatccaatccaacngtgggacacacacaaattaangaataaagggtggtccctgtttaagttttaaaagtttcctcccatgtcttgccatcccaattttcctttatttaatagcgaagtaatatcacaaagattgcctttgatgagggaaatttagttaatattgaaatgaacaaatttagtaacgtaaaatgcttattaaattatccttttgactactattcacattttgattagattcatttataattttttaaactagttttaatctaaacgtgtatttgactatcatttccttctaactgtgatagaaattactgtccaaaaggtaaaatgtgcaattccccatttttaatatccatatgttatatacacaatatgtatacacttaaaatataagagttacatatcctggtctcttacatgcaaacagtagatcacaaatagttttgagctacacatgtatcttgcacaggtattggaaaaaaatctgtgaaatttttttacagttttaacaaatatacataaatataagaacataaatgactagtaaaatagttgacagcatttgagaaaaatgctctgataacccagactgcactgatgctctaaaggctttataactaatagaaaagtacagctcagtggccatctctt

SEQ ID NO: 173938 - DNA, 1361 bp, Homo Sapiens
aggatccccgttagatggccactgatggaggcacgccttcactgagcgacgttgccactgtgaacgttaatgtaacagatatcaacgataatacccctgcgttcagccaagacacctacacgacagtcatcagtgaagatgccgttcttgagcagtctgtcatcacggttatggccgatgatgccgatggaccttccaacagccacatccactactcaattatagatggcaaccaaggaagctcgttcacaattgaccccgtcaggggagaagtcaaagtgaccaaacttctcgaccgagaaacgatttcaggttacacgctcacggttcaagcttctgataatggcagtccacccagagtcaacacgacgaccgtgaacatcgatgtgtccgatgtcaatgacaacgcgcccgtcttctccaggggaaactacagtgtcattatccaggaaaataagccagtgggcttcagcgtgctgcagctggtagtaacagatgaggattcttcccataacggtccacccttcttctttactattgtaactggaaatgatgagaaggcttttgaagttaacccgcaaggagtcctcctgacatcatctgccatcaagaggaaggagaaagatcattacttactgcaggtgaaggtggcagataatggaaagcctcagttgtcatctttgacatacattgacattagggtaattgaggagagcatctatccgcctgcgattttgcccctggagattctcatcaccgcttctggagaagaatactcaggtggcgtcattgggaagatccatgccacagaccaggacgtgtatgatactctaacctacagtctcgaccctcagatggacaacctgttctctgtttccagcacagggggcaagctgatagcacacaaaaagctagacatagggcaataccttctcaatgtcagcgtaacagatgggaagttcacgacggtggccgacatcacagtgcatatcagacaagtcacacaggagatgttgaaccacaccatcgcgatccgctttgccaacctcactccggaagaattcgttggtgactactggcgcaacttccagcgagctttacggaacatcctgggtgtgaggaggaacgacatacagattgttagtttgcagtcctctgaacctcacccacatctggacgtcttactttttgtagagaaaccaggtagtgctcagatctcaacaaaacaacttctgcacaagattaactcttccgtgactgacattgaggaaatcattggagttaggatactgaatgtattccagaaactctgcgcgggactggactggccctggaagttctgcgatgaacaggtgtctgtg

SEQ ID NO: 173939 - DNA, 673 bp, Homo Sapiens
gcagaagcactacaagaaagcgtgcctaaaaccacagaactatgcacacacaaacacagacacgcgtgctcgcacacacagagtcgggatcaaagaatcttatctgatacatagttgggggagcacgggaaaaagctggcaagagaggatatggagagatctgatcagctaaagatgttggaatgttacagtatggcatggaagtggttcttgggctatacaaaaaagggggtgggcaggcagagagaatgataaatccaggctactagagagaggttcagtggccatgcatgagttaaagatagtagaggccagtttactggatgaaatgttatattatggagtggtcatttgaaggatggacttgcaatggtccaggggaggagcatctgcttagcaggacacctccatggtctggtgtctgtccaggacatcaggggactcacaggattcttgagttccatctgactgattgctggtgacagaccggctgaagggactttctccagagccgaggctactcgaggttgagtgggttcgtgatcgggcgagccgagtcatgctggcagatggtatgtagcccattccctgcaaaaagtacttgaaggcctcggtgagcttcccaggctgaactacctggggcagtcccccacagtccgcctctttacctcgt

SEQ ID NO: 173940 - DNA, 977 bp, Homo Sapiens
  misc_feature (822)..(822): n is a, c, g, or t
  misc_feature (844)..(844): n is a, c, g, or t
  misc_feature (939)..(939): n is a, c, g, or t
  misc_feature (957)..(957): n is a, c, g, or t
gtcgatctataggatccccagtagcttcgaaagatgagtactgatggactgggctcccgcagcatcaagcaagagatggaggaaaaggagaattgtcacctggagcagcgacaggttaaggttgaggagccttcgagaccatcagcgtcctggcagaactctgtgtctgagcggccaccctactcttacatggccatgatacaattcgccatcaacagcactgagaggaagcgcatgactttgaaagacatctatacgtggattgaggaccactttccctactttaagcacattgccaagccaggctggaagaactccatccgccacaacctttccctgcacgacatgtttgtccgggagacgtctgccaatggcaaggtctccttctggaccattcaccccagtgccaaccgctacttgacattggaccaggtgtttaagccactggacccagggtctccacaattgcccgagcacttggaatcacagcagaaacgaccgaatccagagctccgccggaacatgaccatcaaaaccgaactccccctgggcgcacggcggaagatgaagccactgctaccacgggtcagctcatacctggtacctatccagttcccggtgaaccagtcactggtgttgcagccctcggtgaaggtgccattgcccctggcggcttccctcatgagctcagagcttgcccgccatagcaagcgagtccgcattgcccccaaggtgctgctagctgaggaggggatagctcctctttcttctgcaggaccagggaaagaggagaaactcctgttttggagaagggttttctcnctttgccttccagttcagactnatcaaggaggaaagaaatccagccctgggggagggaaatgcccaccacttttagcgagaaccccatcaaaagtgggaagagcccctcccctttgnggaagaaggtgggccctntcccccggggcccccaattt

SEQ ID NO: 173941 - DNA, 408 bp, Homo Sapiens
acgtatagatttcgttgggcaatgattattgtgggcagagaatgtaacgtgtgatgtgtgcatatcagaatcacaggaaatatgttaagagtaattatcaaagtagaatctatgcatggtaaaaaggaaatcaatcagaaaggcttagaataaaatctcctgcttagaataaaatctcttcttttccccactacacctctacctccatgtgtctgaggtcactacttagctcatccttttcatacttacctcttacctttaattagcctcctattgctatgtctcagtgtattaactccagacatgatctatccaatttgttaacgcaggttttcatcctgcagcactttcctcctttctcctatgtagttctatcacctctttcagctccttgcagtggaccatact

SEQ ID NO: 173942 - DNA, 706 bp, Homo Sapiens
ctgctaccaattatggcactgatgctggtccggggctgttttggcaagccacacatgaccttgctctaggtgctgcctctgtgtgtgcccagagcttctggagaagggctggaaattgggctactatagtgttaggccaaggaatgtttttacaaggcgtgtaaccctcttattgtgcctctgagataattcagagatcccagcacagtcatcttgctgattctcagatccatcctgcatggcttacagaggctgcagaggctgtggggcatactggagaaatactctgtgtgtcagtgaaggacctgctcattctttttctctctgactctaagagcagggagctcctgatcacatttagtctgctcttaaagggatccgaggctcagttctgaaaatgaaatcaggtacatgaaagatgttcactcttctacatctgtgccagcatcctgcggcacatgggacaactgagctgaaaggtttcacttcctagcatccgttaagaggacacagaaaagacaaagagtcctcagaagtaaaataattttataaattggagcccatggttcacatgatgtacactttgcacactcacattttaaatgtctttgctgtcctttttcggcatacaggccataatttccatccatgaaaatgaaaaatggcgatgcaagctatactttgtctacaatcaccaactaagtga

SEQ ID NO: 173943 - DNA, 428 bp, Homo Sapiens
caaaatttgcaaagtgatttcaggagagagcagctttgaggaatgtggaaaatcataattgccgtctggaccattgattgattgtgaccagtagcagaagggtgcctgttacatagagaggctccttctgtccaaatgaatttctgtatactcttctataaataaaagggaggaatatattctgctggaagcccatgaaccatcgctgaggttctgatacaacatagagttttttccaaggagtgaatgtggtttaattactggactctcttagcacaggaaggtggaaacaaaatgccaggcctctgcttctgaagagcaaaactgctgtcgctgcagtatctgataccagacacccacatatccacaagaagtgcctcttagctctgtgacagagagagtctctccattcctcagtggccatcttt

SEQ ID NO: 173944 - DNA, 703 bp, Homo Sapiens
gtctacaacggtttgtagagaatatgggagggttacaggcagcaccgaggcccagctgaggctggctctgctgtgtacagttcctgatcttgattccgtgagcccagctgcccttgcctctgtggcgggggatacttgtgttcacccagggaggcagtcacggcagtccacgcagtgaactgatagaggagcaaaaaaggctcatgagtcgctggagtgatgtaaatggtcaactgtggagtctaagatggccactgatggatatgaaggcaggaggtgaagaggggatatgcaggaagcagaaataagagaactacaggatccaagaagaaaatgttgaggaaacaaagtggagatgtaggaagttgtgatcaaagagtgaatgttcccattctgtgcgtcgtgtggtgagagaacctaaacccttgcatgtggaggtggccttccccagtggtggtggccgtgggagtctgtctaagcaggtttgacttgtgtctgcagagttgcattttgttatttggtaatactggttgtttagtgttagtttgaaaatgttataattctctcctgttaactttgggtacgatgtgtagatgaaaaaaattttgtttttgttttaaagaatcatattttcactatcttgtgacactttacagtcattatgatggagccaaaaaagcagagccttctagcaggggatcct

SEQ ID NO: 173945 - DNA, 384 bp, Homo Sapiens
aaagaggccactgagaaattattatcactgttgcctgaatatgtagttccatacatgattcacctgctagcccatgatccagattttacaagatcacaagatgttgatcagcttcgtgatatcaaagagtgcctatggttcatgcttgaagttttaatgacaaagaatgaaaacaatagccatgcctttatgaagaagatggcagagaacatcaagttaaccagagatgcccagtctccagatgaatccaagacaaatgaaaaactgtatacagtatgtgatgtggctctctgtgttataaatagtaaaagtgctttgtgcaatgcagattcaccaaaggacccagtcctcccaatgaaattttttacacaacctgaaaaggac

SEQ ID NO: 173946 - DNA, 311 bp, Homo Sapiens
atccccagatatggcactgagtctgttgtaatctaggttctgccatctctttttccttgcttttgttgttgttgaagaaactaagtcatttgcctacagtcctacagcctggattttgcagattgcctccttagactgccacttaacatattttcggacgctctgtatcccctgtaaactggtggtaaatccagaggcttgatctgattcaggttccgtttgttggcaagaatattttgccagcggtgacacacacttccatcatgaggctccagatgcctggttgtctctctttttgtaatgtccacagc

SEQ ID NO: 173947 - DNA, 215 bp, Homo Sapiens
ggctgactaaatattgattatcaattctgtaaaaaatgagtcctaaatatataattctgagtaaattttcagaagtaaacttcttacttagagctcaaaactgttcctaaagcatggtttttaaagtaattaaaatatggagtttcaaaaaacattttttccaacaggtgggaaggagaaaccaaaaacaaatatagaagacttacaaattaaaa

SEQ ID NO: 173948 - DNA, 975 bp, Homo Sapiens
agggtctccttgtaggtttggctggtattccccaaaattgttggcattggctgccatggccacaatgttggtcccctgaaataggatttctgcggaaactgtcaacagtagtaattcaccatatgcaagtaccatccttatcatgcgagaataatcacaggttctgtagaaatgtacaatgtgcttaagataatgaaaattgtagcgctgcatctgagatttatttctctacttagctagtaaaacttgtcatttttgctcacttaagtatgatcatttgtgattcctttaaatagcaaaaatgcacagtcctctttaggcctctactcaataatagtttacattactcttaacaaaatcattctacataaacagatagctccttaaaaatagtactctctcattaaatctaatttgacagaaagaagtttaagggaaaaaggagtgctttgtaagtgaaaaagtacaaatctttggcctttctcttgacattttcgtatgtcaaaaagcaaaaaaccttcatgtatttcaatctagtgattactttttgcaccataatttgttttttacaccacaaaaggaggcactttcagtatctgtaaaaggtatttaatcctaaaacatacttacctagagaataattaaaacagaattcaatacaatctagtatctattaggaaattaagagttatcacttctaaaagtcatttgaaagtcaatgatgttatctggtcaatggcaggaaatgggaactggaacaaatataagaacttatgggatttcctacacggagacaaaaaaagatattcctttatgttgtttaaaagtggcagctgctctttctttattccattttaatcaatgagtattgattcaagttttcctttctatttttccttatgataagtttccttacagtagcttatacaacaacaaatagcatagaaaaactactggaagataccaaaatgcctg

SEQ ID NO: 173949 - DNA, 643 bp, Homo Sapiens
  misc_feature (42)..(42): n is a, c, g, or t
tactcatggaaatctctttcaaagtctaagtaaaacgttaanttataacttgaatcttgacataatgtggtggggaatggggatgggaaatggtaaaattacatgaagctaaccctgaaggcaagttctgaagttccccagcgaaaattatctttgcttttgaaaatgcttccactggggaaggaaggggtaaggccagtgggaggaatgaggtgaagccactgggggaaaatgttcaccattaacctgtactttaaagacacctttgagagtagtatacttccaaacactcatcagttttatttcataggagaaagctgctatagcatatccaaaaatatcaatcttcccttgttctgcttaagcctgcaaatctgtgggcacttgattcactgctgacttcaaaactcttactcagtcatgaagcgctctattgcttagagtatataatcatgcagttatgttacatgctcggagatgtcctgcagtgaagaatgctgtttaactttgatcctagcatatcatctacagtgaaattattgtggtccaaagctgacttcaaggaaagcaaaggagagagaatagaggcagggagcctccaactcagcccccaagaattttctgatgccacagtgggctacgg

SEQ ID NO: 173950 - DNA, 1155 bp, Homo Sapiens
  misc_feature (63)..(63): n is a, c, g, or t
ttgcaataagtactcccagtaggttacatcactaaaaattttgaataacagatattttcttgntttcatgactgatctgaaatttcttttcagatataccatggggtatacagttagcagccgtgtatgctctttgtgacttgagtcccagcaatccagcagaaatttccaagatcctggaagcttggcggagagaggcctccaaaagcgttccgtctgcgattgtcagctgcctagaggaagtcagtgccctgagcacagaggagcttggctgacctgggatgccactgaggcttgagaagtgccttgacacattttgaacacaaatagtttgatcagctttcagaatacaaagggaggtttcaaaacaaaaagacataaaatagataaaacagaccagaggctctccttattgtttggcaaggagacaggagaaacaagcagtcgcatagtcgtttttccctaaatctaatacgtttcacttaaggctgttgtgatctgtgacatatgggttatattattgtgtctttgtcaaacaacaaaaacttgaacttagccctttttctgctgcagaaagtgtccttttagtggcttcttaaaattgagtggcattttataatgaacttaccaatataaaaacatgatttggttcctgagctgttgttgttggacttgtgttccaatgagtgactaggaaaaaataaattggcaaaaacctagagttttctgctatctttgctggaaatgagttgcaaaagtttttctcaagatgtagtgcgtaattgatcagagcaaaacatgcagagcccttagcagaaacccactttaatgcattttcttcatatccctaaagttccttaaaaatatgtgacaatgcatcaggaagaggagaactgaagagtagatagttcccttgcagatttttttatcagtgacatgtaatgagcaattcacagatgagcgcaggcagagctctgtgtgccgtgtacatatggaccgtgctatgatgtgtctcacattggatgatattccactttgggaattttagtatttgtatatagaaaatgggtttaataactcaccatggttttgatttgtcttatattcgttatttcttaaaactcttgtatgtgtttttataataaaaaataaaag

SEQ ID NO: 173951 - DNA, 1283 bp, Homo Sapiens
  misc_feature (847)..(855): n is a, c, g, or t
ggggagaggcgttccgcggaggagaagaggaagaggaagttgggggagggtcctagcggggagtgaaccggaagtgtaaaggttcctgcctctcctcggccaggcggaacctctctgctgggcccggtggccgcaaaagaactttctttctcccgcccgaacggtcgccgcggccaactgcctcgcccgcctggcagcctaaccctccttctcttcttctcctctccggcttcgcgcggccctgcctccctctcgcccggcggcatccgcttgctgctgccaccgcctcctcatcttctgcccggccaaccggcctgccccgctgcagtgatgtgcgacaaggagttcatgtgggccctgaaaaacggagacttggatgaggtgaaagactatgtggccaagggagaagatgtcaaccggacactagaaggtggaaggaaacctcttcattatgcagcagattgtgggcagcttgaaatcctggaatttctgctgctgaaaggagcagatattaatgctcccagataaacatcatattactcctcttctgtctgctgtctatgagggtcatgtttcctgtgtgaaattgcttctgtcaaagggtgctgataagactgtgaaaggccccagatggactgacccgcctttgaagccactgacaaccaggcaatcaaagctcttctcccagtgatggatggatggactgataactccggaagaatgactctcctgtggcctcacactggctgcctgtctgtctgtcactctctatctgccagcttcttcagctaaatactttaagaggggtgaggggagagagaaattcataacaaatccgactaccagnnnnnnnnnttgttttggaggaggggcaaaaggaaccatgatcaggcttttactgggattcctgatcaagtaagcctcttccctttctaataaaatatacaccttatacccaagggagagcaaagacaaaatacaccagtaacatttgaccttttcagctccctagctaatttattagattgtgttgaaggtctgattctacaaaggccaactctacatatttggtagccctaactgtctgagcagtagtggctgctgtgatgtaaacttagggtgctgagataagcaattagctctagccttctgccttaagaatgcactctactggggatttcctggcatagttaagagcgctgcctataaggttggtgaccaaatctttcctcggtgactttaagctttatgtgaaagcttagttaaggtattgtgagggctgg

SEQ ID NO: 173952 - DNA, 604 bp, Homo Sapiens
aagatggccactgaggatccatacaacacaacggaaaatatgcactgggagaggagccacctgtcttttcattggaaacctggtcagtttgtgttcaagggtgacttggatatcaacgtgagaacagcctctaagtatgacgactgctgcttccttcacctgcctgacctctgcatgacactggacctgcagtggctgtgccatgggaacccccatgatcaccatagtgtcactctgcgggccccagagttcctgcctgaggtgcccttgggccagcttcatgactcctaccgggcctttcgctcggagaacctcaatctctccatcaagatggatctgactcggcacagtggaacaatatcccagccccgaattctgctatatagtagtaccctgcgctggatgcaaaacttctgggcaacttggacaagtgtcacaaggcctatctgcaggggaaagctcttcaataacctgaaacccagcaagaagaaacttggtcagcactacaagcaactttcctatacagccctctttccccagctgcaggtacattattgggctcatttgcccagcaacggggcatccagattgataacagtgcgag

SEQ ID NO: 173953 - DNA, 378 bp, Homo Sapiens
atggcactgaatgatgtctaattaccggtgaagaacacagtaattacagagagtatttaggacctcaggtgaagagagaaaagggaaggaaaggaggaaagagatgttacattcccaaagccacaggcacaagaaaagaaccacatcatcgggaggcagcaatgcagggaaggtgccatcagcaagaggctgggccaccgtggacattatccccactccttaaagggcaaaggaaaaaaccactgctgaaaatataacctaatattcctcatgttcaaatgaagacacccatataagctgaaattaattcactgggaagaaaaactgaacagataaatccttactgtctattttgtgcatttaaatagcatgtgaacg

SEQ ID NO: 173954 - DNA, 401 bp, Homo Sapiens
aaagagccactgataggatgttttgtttccttgataaaacaaatgtaaatggggaattttatttgaattggaatattgtttttctagaggacattcatatctgcactattatctgatgacatgttggtaattttaaagactgcaaggcagtttagagaatgatgtaaaccaatagatactctttcgattctccaaagaaatataattttggtttttgttcctcagagagagtttgaaagaaattttcagatgttctgttccctatagagggcctattccaggatctaaatgaatgggaatttataattcctttcatagactcaaacctgaaagcagaaatttttagtagttgagttgctttaagtgaattttaacaaatatgacacagaaaaggtcagatg

SEQ ID NO: 173955 - DNA, 382 bp, Homo Sapiens
  misc_feature (90)..(107): n is a, c, g, or t
catgtgcacgacactacattaccctaatggctgctacccagaacctttttataggttgttcttaattttctgttgttgttgttcaagcannnnnnnnnnnnnnnnnncttagtgtttgggccacgattttaaaatgacttttattatgggtatgtgttgccaaagctggcttattgtcaaataaaatgaatacgaacttaaaaaataaaagctggtatcttaaaatgtaagagagtaagactgtgaagcctaaaaatgacatggctgagaatgaaccagaaatgccatttgccaaacagttgtaactagaaatttgattctcacagtccattcttttcttctgtccttaagatgacattgttagtgttcacgtcccatgttc

SEQ ID NO: 173956 - DNA, 595 bp, Homo Sapiens
ccaattatggcactgaaggggacacggccacgctgtggtgtgagctgagcaagcggcaccggtggagtggaggaaggggcatgagaccctcagagatggggacagacacagcctgaggcaggacgggtccaggtgtgagctgcagatccgtggcctggctgtggtggatgccggggagtactcgtgtgtgtgcgggcaggagaggacctcagccacactcactgtcagggccctgcctgccagattcatagaagatgtgaaaaaccaggaggccagagaaggggccacggccgtgctgcaatgtgagctgagcaaggcggcccccgtggagtggaggaaggggtctgagaccctcagaggtggggacagatacagcctgaggcaggatgggaccagatgtgagctgcagattcatggcctgtctgtggcagacactggggagtactcgtgtgtgtgcgggcaggagaggacctcggccacactcaccgtcaggggtaaagaccacatgtggccacctgagtgattcctgtctcctcccacctaacccacatgatctgtgctctcccagttcctcttgatgtcagtggccatcttt

SEQ ID NO: 173957 - DNA, 399 bp, Homo Sapiens
aatggccactgaaaacactatccttacttcctctgtttaccaggtagaaagtttgaggattctattttgtttctcatactctgtgtctactgtggtcaatcaaaaaaatctactgaagttaccgggctttgaaattacattcagaaaaaagcaagctggactgtgggataggtatttatcaatgaaatgctcccaaggacactaatgaggttttagaaaagaggaagccacttgctgagacattgccttcacggccaagagtctttactagccaattccatagcactcttcctatgaattataatttagaaaggcagatcccacccaattctagaaatataagttcaaataggccctaagaatctggcgaactccatttaaaaaatgatttggctctgc

SEQ ID NO: 173958 - DNA, 477 bp, Homo Sapiens
aaagatggccactgatagcatctgccacaacttcacatctcatccatctaaccattaggtttatctggttacctaatagtgatgataagaaataaacgtcataagatcaatcaacccaccaatgactcaacactatatcagggtctatggaaaaagaaaacaaaaattgttcactttctgtagaagatccatctgtccccttcctcctctctaacagggtcccgcttttgctcacaggatctgttcacctcctccgagcatggtgctcatcaaccaataatggtgactccattctacttgcaaatgcttagcttgggaatgggcatgaaatatgagggttaggtattgggggacactaaaagtctgccttgctgataaaaaaagacatagaacaagagacagggagggaagggagcgggaaggagttctgagagtgacacatcacctagactctgtctataatctcagtgcctcatt

SEQ ID NO: 173959 - DNA, 436 bp, Homo Sapiens
aatctgtggaagcaaatctaaagcacactgtaacatatgccctctaggctccagggtcacaggtagccccacccagatgctgccggggggctgcacagagttctactcctgccgatgcccaaaagcactcaccccagcccctgcacccactcacctgcatgctgctcctcccatgaggggctgagagctgtgggctgagtcctgtgaaggggtcaagggaactatcccatttcatttagaatgtatcaataaatctgtacggcaatatgcatgtaattcctaagtaagcattttaatacatatgtgtgtgggaggtggtctaaatatatcgtctgttcatagagtgtgcgatcagaaaattggagactgttggcctggaacatcactgctctaccctgttagatactggctccttcatctgtcagtggccatcttt

SEQ ID NO: 173960 - DNA, 435 bp, Homo Sapiens
caattatggcactgagcttcttggctctcttatatatattctttattgtcatttactttggtggacgaagagaaggagagagttggaattgggcctgggtcctcagcactagattggcaagacatattggatatttggaactcctccttaaattgatgtttgtgaatccacctgagttgtcagagcagactactaaagctttacctgtgaggtttttgtttacagattacaatagactgtccagtgtaggtggagaaacttctctggctgaaatgattgcaaccctctcggatgcttgtgaaagagagtttggctttttggcaaccaggctttttcgagtattcaagactgaagatactcagggtaaaaagaaatggaaaaaaacatgttgtctcccatcttttgtcatcttcctttttatcagtggccatcttt

SEQ ID NO: 173961 - DNA, 780 bp, Homo Sapiens
cctaccaattatggcactgagatgcgggcacgtaggctgactcgagccagcccctgcgttagcaggagggggagaacagataggtaactctcttacatttcctttatgatctggcatcttctccccagaatccttccctctgccccccacccctactcctcaacagttctggtttgccctgacttctctacggctctggcttcttcccgaagagatataggagccatgtaagcacgcagtgggtgaactgcttaatttcactacatgttgatgtacttgtcttccgtcctgtaggtcttttctatataactttatgccacccttaaatgaatcattgggtatacctgtcatgttggatcctgtaatcacagttttccctgctcacctttttgtctaagatctattgagaaagggaaatatgggaaggagaaccatttgatcagaatacaaccaatagtctttaagcattgttaaagtatgaaactgaaatacattcaaaacacttaatccttgaggcttgtgatctgagtaattagcaggtatgatgctgggactggaaaatagaaagtaataactaaagggttaatgtgcaacgttattttttggccttgtgcatgattttatgttttcagtgtcctgtgtacatatagaattgttaaagttgtcatttccaatatttatattagaaaaattatttagatactttataattttaaccggcatttttaataatgacacttgcatttattgtattgtaataaatttcacttttaactttaa

SEQ ID NO: 173962 - DNA, 583 bp, Homo Sapiens
aaatattagaaagtcacactcgtatgatttaaaagtcaaagtagtagtatttatccaaataaactgtaaccaaatttaatatctcctctattggagaaagcatttcctaatgtgattttcctgtgactacttgttttccagttcatttatttttcagctcccaccctgtcacagtacttaccaatctttattagttaccaaagtataaacacattttttgaatcaactagccatgtgtatgtttttctctgaccagctttccattaccaccataaaacaatgataggtaaaccactgctaaatttgaaaagtaaatactatgcaaaactacactcagagtgagaagattaattttaaaagagaccactttaccttagtagcaacactcaagtcttcatcatccaatgtaggcaatgaatccacacacagttcatgcaaaatgcatgagagcaaaaatacacaatgaaaatgagcaagatgatttctgtacaatttttttaactgccagtttatatccagcttccccctcaaaaaaaggaaaacataatctgggaaagtcattgctaattgtagcgagctgatt

SEQ ID NO: 173963 - DNA, 680 bp, Homo Sapiens
tctagaggatcccgttcgcgtatcataaacaacaaggagaaatgctgcgcaagaaacgaagggagaaggatggcacacaagatcctctcttggtggaggtgagtcggcttcaggataacattatgaaggacattgcagagctacggcaagaggcagaagaggcagaaaagacagcaatctgaactggacaaagtggctcagatcttgggaattaacatcttcgataaatcccagaagtctttaagtgacagtagagagcctacagagaagcctgggaaagcagaaaaatctaagagcccagaaaaagtgtcatcgttctcaaactcctcctccaacaaggaatcaaaagtaaacaatgagaagtttcgtactaagagccccaagcctgccgaaagcccccagtcagccactaagcagttggatcagcccactgctgcttatgagtattatgatgctggcaatcactggtgcaaagactgcaacaccatctgtgggaccatgtttgatttcttcactcatatgcacaataagaagcacacactagacactggatccctacaacagaccttgggcttcaaagacccagagtgaggccaagcaagatgccataaagcgcactgacaagataactgttcctgcaaaaggctctgagtttctggttcccatcagtggccatcttt

SEQ ID NO: 173964 - DNA, 1228 bp, Homo Sapiens
  misc_feature (998)..(998): n is a, c, g, or t
aaagatggccactgaacacgaaatccccaagattggctggtacagccgctttgctaggcatcctttctatggctctgcaggagttaattcaggagtcatgttaatgaatttaactcggataagaagtacccagttcaagaacagcatgattccaacaggcctggcttgggaggacatgttgtaccctctgtaccagaagtacaagaatgccatcacgtggggagaccaggatttattaaatattattttttatttcaacccagagtgtctctatgtattcccctgccagtggaactaccgtcccgatcactgcatgtacggaagcaactgcagagaggctgagcatgaaggtgtgtctgttctgcatggaaaccgaggcgtctaccatgacgataagcaaccaacgttcagagcactctatgaagcaatacgggatattttgagaagagggggaaaaaggaagtttgtcctgtcctggatcagtttctttgtcatgtagccaagactggagaaacaatgattcagtggtcccaatttaaaggctattttattttcaaactggagaaagtgatggatgatttcagaacttcagctcctgagccaagaggtcctcccaaccctaatgtcgaatatattccctttgatgaaatgaaggaaagaatactgaaaattgtcactggatttaatggtatcccttttactattcagcgactatgtgaattgttaacagatccaaggagaaactatacaggaacagacaaatttctcagaggagtagaaaagaatgtgatggttgttagctgtgtttatccttcttcagagaaaaacaattccaatagtttaaatcgaatgaatggtgttatgtttcctggaaattcaccaagctatactgagaggtctaatataaatgggcctgggacacccaggccacttaatcgaccaaaggtttctttgtcagcccccatgacaacaaatgggttgcctgagagcacagacangcaaagagggcaaatttgcagcaaaatgaggagaaaaatcacagtgactcttcgacctctgaatcagaagtttcctcagtgagccctttgaaaaataaacatccagatgaagatgctgtggaaactgaggggcatgaggtaaaaagactcaaggtttgacaaagaaagtgaagtcaaaggaaccgcccagtccaaccaactttccagcgaaaatttccttcagttattgg

SEQ ID NO: 173965 - DNA, 860 bp, Homo Sapiens
acttagtacgctgcgaccttcccatgttgttcaacatcctcaactcggagcgtcactggctggaggtggtcaataaatggaattggctcaactatctctttcactgaaaggtggacatttagggagttgtccagtttttcaggctgtcattaaacaactgcccttagacggcaaagaattcacaggtcaatcgttcccttcgcttgtgaacttcttcgcagaccgttcacttgaccgaagctggaatttgctcccgtaaatgtaggaaataaaagccatcggtttccacagtgaacaacgcagtttagcttggggataactttcaggcggtcttctttggtgataattttgaaaatgtgctttgtttcctgtagaaggattcctgtaatacccacataagaggggcatttggattttgtcactgaaataatagccccgtgaagatctgcctttaagagcttggcctgaatcatctgtggctgcgtgtctggcttgagcccactgcacaggtccctgatgtactgtttccagagttcatggagagggaggaaaaggctgtatctctgctgctctggtttaatgtcaaagagccgcagctccctcctttgcctggcagagaggcctttggctttcttcttcttctccttgcgcttgtggcgggtgaagtactccaggaccaccgccttgcgctgcagctggtcctcgcgggcctgcgggctcatgcggggcgtgctgcgcttcaggaaggccctcacgaaggcctcggcccgctgtgctcctgaaggctggacatcggagtcattcgcctctttctgagacaatgcatggtagatcacactcttcattctcggaccgcttcc

SEQ ID NO: 173966 - DNA, 530 bp, Homo Sapiens
agatggccactgatacatgctacaacatgagtgaagctttaaatatcatgctaaattaaagaagccagacacaaaaggacaaatattttatgattctgtttttataaaatgcccagaataggcaaacctatacaaacagaaagtgtattagtggttgcctagggctgggtgatagagggcgtccagaagaaggatgatgaaagtaacctaagattacaaagtactggtagttgcataacttggtgaatatattaaaatatcactgaattgtacacttagagatgaaatctcctggtatataaatttcatctcaataaaactgtcactaaaattaataaatttgctaagatgaaatatacatgataagcatataacacaaagacgactgcttccctctaactcaaatatacgcatcaatagggaaaaaaatgacaataagttactcttttgtacttaatacaactccagaaatcagttaccaccttctaaagtagtaaaaatctgtttaagagatctcagtggccatcttt

SEQ ID NO: 173967 - DNA, 584 bp, Homo Sapiens
tccatgagattggtacatgtgttgtaaacactattgaggtgagggagaactcagacctatggaagtacacgaggccaacacaattatgccccttgtgaatacatttgtaaatatttactcaactgaagatgttatgaataacccagtgtcagtctcacagacatttcctcatgacaaggggaattcatggatggacaatattatgtgtattgagaaagcaactgtctggaaggaccacacccaagaatcccatctggagctccccactttgtttctctaactgaaaatcctttgcccatagtccttttggctctgtgacctctgcctcaccccgatacggtgactcctcttttctctattcatagtagagcactgttagcccaccatatgactattaactgtcctcacagtggattccacaagatgtgccatcattcttgcaaacaaaacagctccccagatgcaggaaagggtaaggataaagcaatcgaaccctaatctgtgatgtggaccaagtcacatcgttggacataactgttcacagtacatggattcattccataagcccctcagtggccatcttt

SEQ ID NO: 173968 - DNA, 400 bp, Homo Sapiens
ggactctaaggatcccacctcctacagaagacccacttactactaatttctggggaatttcgtttactcgttttatctaatattacaaaatctacattttgccagcagttaaaaagacaaccttaaagttctcaaattactttccaccaaacccggaaaagaaaaccacccatatccaaaactttaaagcaataaaaatttctattttccaaaaaagtatttacagactgaaattcaaactctacattgccatcaatgtaattatacaagtgcatacaaagccctggaaaagaggaagtatttcattacaaaatatttatgatcaagaaaatattgcttgcctttaaataaagtggcagaaaataaatatgcttaaagatggccattttccgtggggtag

SEQ ID NO: 173969 - DNA, 1962 bp, Homo Sapiens
  misc_feature (1804)..(1804): n is a, c, g, or t
tgacagcgacgcctcagccgcctctgttgctctcggagccccggcttcccctgcaccgggaaagcgccccctctcgagaggctggtccctggagaactgcgaacgagctgcagaaaaccagattttaaaatgtagaagtcgttgggctgcattcctccgaggaccagtctgatcgcccaggactaagagtggcagcgtatgagaagttgggaccatagagcaagggggggaggggagtgttgcagcaggcattctcttctggaaggagtcgctgggagcagtgcggttggacacaagtttgcgtaggagtgttttccttttgtcaataattaatcaccggaattagccaggtagaatttgagttttagcaagagtcctgagggcggggccgaacacctaactccggcaggctcccaggcgcccggcgcagtgggaagctcgcagcagctggggaggagccaaagcctcggcgctcacctaagccgcagggagatacacccaactgggagatgaggaaacagcaacccagagaggagaactaacccacacaggatcatttcgcgaaggagcaaggctgaagaaccagacctggactttcttaggataaacttactgcagcttgaaggagccaaccatggatttgaggcgtgtgaaggaatatttctcctggctctactatcaataccaaatcattagctgctgtgctgttttaaagccctgggagcgatctatgtttaacaccatcttactaaccattattgctatggtgggatacactgcctatgtctttaattccaatccacattccccctggcttgggaaattttcctcaaaaatatgtggatatcacagtacaatttcctaattgatcctgttcacattcagtgaaatggcattgcatatttatatgttgcttacagcttattgatttaggtaactattgtgtcttccttcactatctgacctgaaaagcactctcttctctatgcactcttatattctgcctttctgcctggagtttgaaatacatgtctctttagtttcttttgcacatgctacattgtgctttagaccggagatatacagtgactttacctcacaaatcatattctgtcaacacaaatctatgaaattagtttatttaaaatcagaaaaatttcctacaaaatttttctggaaaatagactcctaacagacctaccagaatcatgcttaaagtgctcccttgacacttattctatactgaaggataaattttaaaaaatctttataggctactgtcagaagtatcctatccttgtttacgatgtataaaaagatgtgaataaattatatggaccccctaagtcttattttctagtaaactgatgatactggaaattcttttacttcaaatgcaaaagaataagctggaggcaattatttcctttcatacagagttcatgaattgttttaaatgcttcttaaagtctggctttataaccgtttaaaatcaacaatgttgattttagataaccaaggaagtattataatacaaaataattttaagtgtaagaaactaaagtataatcaaagtaaattcagttattgtatttgtggtgttgccttgccttgcatgatgctgggggaaaaagagaaaagaaatggttttctttttgtactttcattcagtgtagagggaaaaaagcatgtattgggccaccggaagacaagctaataaataggctgggagtaatattctaccagcaggaactcaacagctccagttaaatgctttgatataggggctcctttgcagagcccnaacaagatttattaaatttccttcaaactgtttatcttttaaaacaaatataagggttttaattatactggctgaaaccaaaatggggaatgcccaaaagactaatgttttttgcaggtttttgccttttccctccccaataaaattatttaagggga

SEQ ID NO: 173970 - DNA, 845 bp, Homo Sapiens
  misc_feature (537)..(539): n is a, c, g, or t
  misc_feature (632)..(632): n is a, c, g, or t
  misc_feature (652)..(652): n is a, c, g, or t
  misc_feature (684)..(684): n is a, c, g, or t
cctcctacccacggggagcgagcaggcgaagccgcggaggacggggtgaagatggcggccttctccgagatgggtgtaatgcctgagattgcacaagctgtggaagagatggattggctcctcccaactgatatccaggctgaatctatcccactgatcttaggaggaggtgatgtacttatggctgcagaaacaggaagtggcaaaactggtgcttttagtattccagttatccagatagtttatgaaactctgaaagaccaacaggaaggcaaaaaaggaaaaacaacaattaaaactggtgcttcagtgctgaacaaatggcagatgaacccatatgacagaggatctgcttttgcaattgggtcagatggtctttgttgtcaaagcagagaagtaaaggaatggcatgggtgtagagctactaaaggattaatgaaagggaaacactactatgaagtatcctgtcatgaccaagggttatgcagggggtcgggtggtctaccatgcaggcctctttggacctaggtactgacnnnagtttggattttgggctttggtgggaacagggaaagaaatcccataacaaacaatttgattatttaatggagaggaattcactatgcatgatnaccattggatgttacctggnatatagataaggggacatgtcaagttctccanaaatggaaaaagatcttgggtctgggcattttaaaataccacccacatatgaaaaaccaagcccctctttccgggcctgggggtttttgaagaaatgctgaaactgaaatttaaacttccggggaaaaaaggaattttaaggtttccacccaaaaggatgg

SEQ ID NO: 173971 - DNA, 604 bp, Homo Sapiens
  misc_feature (418)..(418): n is a, c, g, or t
  misc_feature (503)..(503): n is a, c, g, or t
ggacgaggctacagaggtctccgagatctacctgacacggctgctggcaccaagggcacactgcagaagttcgtggatgacctctttgagcacagtgttcagcacagcccaccggggctcggccctcgccctggccatcaagtacatgttcgacttcctggatgagcaggcggaccagcgccagatcagcgaccccgatgtgcgccacacctggaagagcaactgcctgccgctgcgcctctgggtgaatgtgatcaagaacccgcagttcgtgttcgacatccacaagaacagcatcacgaatgcctgcctgtcggtggtagcccagaccttcatggactcctgctctacatccgagcaccgcctggggaaggactcgccctccaacaaactgctctacgccaaggacatccccaantacaagagctgggtggagaggtattatcgagacattgcaaagatggcatccatcagcgaccaggacatggatgcctacctggtgnagcagtcccgcctccacgccagcgacttcagcgtcctgagtgcgctcaacgagctgtatttctatgtcaccaagtaccgcaggagatctcacggtctggac

SEQ ID NO: 173972 - DNA, 332 bp, Homo Sapiens
acgtgcttaccacgctatatcacaaagactccctagagacagtgcaaacccatggccaacctcgactattagtccacatcaaagatggctagaatgactgggagagagaaaagcaacacagatggcctctggccctcacaccctctcctgctcattcccaagcccgcagtggtctctgaatcggctaggcttaccgctgcttccttctgtaacctcagtgagatatatcaacctggcctggctatatccttggggtctccaacgtctccagtgatgtccagaaatcctcaaaaagttctaacaatcgtggggtagaggtcgtggggtaggag

SEQ ID NO: 173973 - DNA, 717 bp, Homo Sapiens
  misc_feature (158)..(168): n is a, c, g, or t
  misc_feature (495)..(539): n is a, c, g, or t
tcccacgaggaataaatttaagaaaatatttgtaggacatgcacattgataacaagccctaaataaaaatagaggtggactttgctcatggagtgttacatcagttctcccaaaactaattgataatttcagtgcaatctctggtaattatagcagannnnnnnnnnngtggaaattgagaagctgaatctaaaaccgatatggaaatacaaatgagtaagagtagccaaaacagtaagttactcatcccagtattaagactgtgcagctacagtgatgagagtgtagtgctggtaagaggactggcacgcaggccagtggggtggaatggagcccggaaagtgaaccacaaacttttggttcacagaggtaccaggataattcaagggggaggaattgtcttatctacaggtggttctggcaacagagtattcacaggaaaaatggtgaacgttaacccttgcatcatatgcaaaaaattatttgaaacaggtnnnnnnnnnnnnnnnnnnnnnnnnnnnnnnnnnnnnnnnnnnnnnaaatctctgtggccttgaccatgcaaaaatttcttgggacacaaaaagcatgagccacaaaagaaaacgttgataggtgggatctcatcaaaatttcaaactctctttctttgaaagacagttaagaaaataaaaaggcaagccacgccctccaaaaatacatgcagtacatatacag

SEQ ID NO: 173974 - DNA, 456 bp, Homo Sapiens
acggttgtagattccacggcttcttcgaggacaacgacttcgtgttcgtggtgttgagatgctctgccgccggatggtctctcctggagctgcacaagaggaggaaagccctgactgagcctgacgcccgatactacctacggcaaattgtgcttggctgccagtacctgcaccgaaaccgagttattcatcgagacctcaagctgggcaaccttttcctgaatgaagatctggaggtgaaaataggggattttggactggcaaccaaagtcgaatatgacggggagaggaagaagaccctgtgtgggactcctaattacatagctcccgaggtgctgagcaagaaagggcacagtttcgaggtggatgtgtggtccattgggtgtatcatgtataccttgttagtgggcaaaccaccttttgagacttcttgcctaaaagagacctacctccgga

SEQ ID NO: 173975 - DNA, 787 bp, Homo Sapiens
  misc_feature (612)..(612): n is a, c, g, or t
gggattgaggaacatggcgttgctggtgcgagtccttaggaaccagactagcatttctcagtgggttccagtatgcagccgattgatacctgtgtctcctacccaaggacagggggacagggctctgtctcgcacttcccagtggccccagatgagccagtcccgagcatgtggtggatcagaacagattcctggaatagacatacagctgaataggaagtatcacaccacacgtaagctttctactaccaaagattccccacagcctgttgaggagaaggttggtgctttcacaaagataatagaagccatgggattcacgggacctttgaaatacagtaaatggaagattaagattgcggccctgcgcatgtatactagctgtgtggagaaaactgacttcgaggaattctttctaaggtgtcagatgcctgatacattcaattcatggtttcttataaccctactccacgtctggatgtgtctagtccgaatgaagcaggaaggccggagtgggaagtacatgtgtcgtatcatagttcattttatgtgggaggatgttcagcagcgcggcagagtccatgggggttaaatccctatatcctgaagaangacatgatcctcatgacaaatcatttctatgcagcgatcttgggatatgaatgagggatcctttccagatgatcatgggctggccgctgcccctctggagaaccttcttccacggaaaatgtgaagaccctccaactctttgaattgctggtagagtatgttgaggaacacgaat

SEQ ID NO: 173976 - DNA, 555 bp, Homo Sapiens
  misc_feature (35)..(35): n is a, c, g, or t
  misc_feature (37)..(37): n is a, c, g, or t
  misc_feature (153)..(338): n is a, c, g, or t
  misc_feature (348)..(356): n is a, c, g, or t
  misc_feature (458)..(468): n is a, c, g, or t
ttggaagctacccaaaatgggttctggccaagttngnccaagactgacttcaaaaatttaatgggatccagggcattttaaaaacctgtacacagtgtttattgtggttaggaagcaatttcccaatgtacctataagaaatgtgcatcaagnnnnnnnnnnnnnnnnnnnnnnnnnnnnnnnnnnnnnnnnnnnnnnnnnnnnnnnnnnnnnnnnnnnnnnnnnnnnnnnnnnnnnnnnnnnnnnnnnnnnnnnnnnnnnnnnnnnnnnnnnnnnnnnnnnnnnnnnnnnnnnnnnnnnnnnnnnnnnnnnnnnnnnnnnnnnnnnnnnnnnnnnnnctccatctcnnnnnnnnnggaaatgtgtatcaagaacatgattatccaggggtattttctaattcagatcatcaaactgattatatagaagagttggctttaccccatttgcaaatgtcnnnnnnnnnnnaatactggaagaaaaaatattctgttgtgtctcatacagtgcttaggatgtctttcacagagcttattaaaaagatgaaacctgaga

SEQ ID NO: 173977 - DNA, 870 bp, Homo Sapiens
  misc_feature (172)..(190): n is a, c, g, or t
  misc_feature (237)..(263): n is a, c, g, or t
  misc_feature (425)..(631): n is a, c, g, or t
ggtaatatagatacacaaggaataatttctgatccaggatcgtccttccaaatggctgtatttataaaggtttttggagctgcactgaagcatcttattttatagtatatcaaccttttgtttttaaattgacctgccaaggtagctgaagaccttttagacagttccatcnnnnnnnnnnnnnnnnnnnctgcctatttaaagacaaattatgggacgtttgtagaacctgagtannnnnnnnnnnnnnnnnnnnnnnnnnngagctcttaggtttattggagctagcaataattggttctggcaagtttggccagactgacttcaaaaaattaatgtgtatccagggacattttaaaaacctgtacacagtgtttattgtggttaggaagcaatttcccaatgtacctataagaaatgtgcannnnnnnnnnnnnnnnnnnnnnnnnnnnnnnnnnnnnnnnnnnnnnnnnnnnnnnnnnnnnnnnnnnnnnnnnnnnnnnnnnnnnnnnnnnnnnnnnnnnnnnnnnnnnnnnnnnnnnnnnnnnnnnnnnnnnnnnnnnnnnnnnnnnnnnnnnnnnnnnnnnnnnnnnnnnnnnnnnnnnnnnnnnnnnnnnnnnnnnnnnnnnnncacacaggaaatgtgtatcaagaacatgattatccagggtattttctaattcagatcatcaaactgattatatagaagagttggctttaaaatgtttgcaaatgtcttttcttttttaatactggaagaaaaacatatcctggtgtgtctcatacagtgcttaggatgtctttcacagagcttatttaacacagatgaaacctgaaaaaaaccaatcccgtggctacacatatacaaaa

SEQ ID NO: 173978 - DNA, 882 bp, Homo Sapiens
  misc_feature (738)..(755): n is a, c, g, or t
gggccctgttttttgtgctcctccgagctcgctgttcgtccgggttttttacgttttaatttccaggacttgaactgccatgtcctctgaagaaggaaagctcttcgtgggagggctcaactttaacaccgacgagcaggcactggaagaccacttcagcagtttcggacctatctctgaggtggtcgttgtcaaggaccgggagactcagcggtccaggggttttggtttcatcaccttcaccaacccagagcatgcttcagttgccatgagagccatgaacggagagtctctggatggtcgtcagatccgtgtggatcatgcaggcaagtctgctcggggaaccagaggaggtggctttggggcccatgggcgtggtcgcagctactctagaggtggtggggaccagggctatgggagtggcaggtattatgacagtcgacctggagggtatggatatggatatggacgttccagagactataatggcagaaaccagggtggttatgaccgctactcaggaggaaattacagagacaattatgacaactgaaatgagacatgcacataatatagatacacaaggaataatttctgatccaggatcgtccttccaaatggctgtatttataaaggtttttggagctgcactgaagcatcttattttatagtatatcaaccttttgtttttaaattgacctgccaaggtagctgaagaccttttagacagttccatcnnnnnnnnnnnnnnnnnnctgcctatttaaagacaaacttatgggacgtttgtagaacctgagtattttctttttacccagtttttagtttgagctcttaggtaatggagctagcaataattggctctggcaggtttggccagag

SEQ ID NO: 173979 - DNA, 1356 bp, Homo Sapiens
  misc_feature (662)..(680): n is a, c, g, or t
  misc_feature (911)..(1117): n is a, c, g, or t
gccatgtcctctgaagaaggaaagctcttcgtgggagggctcaactttaacaccgacgagcaggcactggaagaccacttcagcagtttcggacctatctctgaggtggtcgttgtcaaggaccgggagactcagcggtccaggggttttggtttcatcaccttcaccaacccagagcatgcttcagttgccatgagagccatgaacggagagtctctggatggtcgtcagatccgtgtggatcatgcaggcaagtctgctcggggaaccagaggaggtggctttggggcccatgggcgtggtcgcagctactctagaggtggtggggaccagggctatgggagtggcaggtattatgacagtcgacctggagggtatggatatggatatggacgttccagagactataatggcagaaaccagggtggttatgaccgctactcaggaggaaattacagagacaattatgacaactgaaatgagacatgcacataatatagatacacaaggaataatttctgatccaggatcgtccttccaaatggctgtatttataaaggtttttggagctgcactgaagcatcttattttatagtatatcaaccttttgtttttaaattgacctgccaaggtagctgaagaccttttagacagttccatcnnnnnnnnnnnnnnnnnnnctgcctatttacagacaattatgggacgttggtagaacctgagtattttctttttaccagtttttagtttgagctcttaggtttattggagctagcaataattggttctggcaagtttggcagactgacttcaaaaaattaatgtgtatccagggacattttaaaaacctgtacacagtgtttattgtggttaggaagcaatttcccaatgtacctataagaaatgtgcannnnnnnnnnnnnnnnnnnnnnnnnnnnnnnnnnnnnnnnnnnnnnnnnnnnnnnnnnnnnnnnnnnnnnnnnnnnnnnnnnnnnnnnnnnnnnnnnnnnnnnnnnnnnnnnnnnnnnnnnnnnnnnnnnnnnnnnnnnnnnnnnnnnnnnnnnnnnnnnnnnnnnnnnnnnnnnnnnnnnnnnnnnnnnnnnnnnnnnnnnnnnnncacacaggaaatgtgtatcaagaacatgattatccagggtattttctaattcagatcatcaaactgattatatagaagagttggctttaaaatgtttgcaaatgtcttttcttttttaatactggaagaacaccatatcctggtgtgtctcatacagtgcttaggatgtctttcacagagcttatttaacacagatgaaacctgaaaaaaaccaatcccgtggctacacatatacaaaa

SEQ ID NO: 173980 - DNA, 1497 bp, Homo Sapiens
gggtgttaacgattgtacagacatttttttaaataactttgtgtaatacttttctagaatagtaagttcttgttgaactgtcacagatgagcttctaggaacacaccgggtgtggttacttccactgggtgtgtccatggtcgtggtctgtgcctttgtaaacaaacagaacacttgaaccaccttccgaattgggtcatcggcttctttacattgatacttagagatttgcagctctctaactttcaaggaaacttcccctactgaaaggcataaaaaggttaaaaaagaaaatccgagagtcccaattccctgtataacagcattaaaataatctgcctgcctggaaagatgagaacactgttgcacaacccaaaatgtgtctttaatttgtgaaaaattaccatggtgagtcagacagtcattttaaacagctgaacagagactatcatcagcaaatagagctcagctttgtagctgcctttaaaatccttgtcccaaatccggtgagctctgcttgctgccgccgcgctcctgggtgatcactcagacgggtcagtgggaataacgggccaacaagacagctttttacatgtgtccaaaggatggcctttcgaaggcctgggaagtatttcactgttggaaagaagtaaacaagaatgacattccagatgggaaatagaattctctctcttgcctttgaccaacatggtactaaggggtttcttctttcccaatgtatgtacgtgccctgctgggggccttactttatagaatgagagcatccgagcttccctaatgaatctggctagttctgtgtctggctgaggatacaggagtgggacatccactctcggatccctcagagcacagaaaccttcagcttcgctgtctctgaagtatttcctgccagtttccctgcgggcccctatgtttgagttcgatggctgctggatcctcactcaacgaaaactcggttggaaactgttccgcctggcagctcctttcgtgtcgttttccatctcatttcccttccatctgaacagtggcattcagcctgacttgctcatctagactgttcacggagtctgaatctgccaacgtggtgttggaggctccaccttgaaaagggccacagtcagggcaactttccccatacaggaaaacttgaaaattacatcaacagtctacgtcacagccaaattatatttcctttataccaaacaaaactatggagaactaaaagtacatcacacaaaacgtttatagtgttttgcatgtgacctatttcagtatttatataactagattagtgctttctagcaaacggttctgttaattagcgagtcactgttgattctgctgtggtggtaagttgataccgtgtaactaatcccgtggatgcctcctcgttatttttgtccaaacgaagcagccgtggtagtagctgtctatgattcttgctcagcaaagtaaaataaatgttaaatatggaag

SEQ ID NO: 173981 - DNA, 2108 bp, Homo Sapiens
  misc_feature (1908)..(1912): n is a, c, g, or t
  misc_feature (1916)..(1916): n is a, c, g, or t
  misc_feature (1919)..(1919): n is a, c, g, or t
  misc_feature (1949)..(1950): n is a, c, g, or t
  misc_feature (1952)..(1952): n is a, c, g, or t
  misc_feature (1958)..(1961): n is a, c, g, or t
  misc_feature (2017)..(2017): n is a, c, g, or t
cgcttcagtacaatgttgatgtgatcaggcaaaaactgtatttgaatgtcctccttagtactgtcttctggaagccgtatggttactgtcaaatcatcttcagtctgttgccagtaatacagaggttctttgattttctctgatacgtcttcatccatattttcttcaagatcttgaccagcctgaacaaatgtgaaagacttgtaggatacaatcattagaccatttccatcaggctcaatagcagcataatgtggcactgactttccacggagaatatcacgcttaataatttcatattttttattatcttgatttttcttactgatagtgacccactccagagaaacatagaaaccacttcctttcatatccaattcctctttctctattcgaagaagtagggtagctatagaatgttcttcagcatttagcagtgagataccgtgaattataataaaaggatccccaagttcttcattaaacataatctcccatttttcagaagcgctatttccacgttcacctgttccaatgacatacaatcttccagttccatctgacaaggtaacccaggtagaagatgagaaatggatagatgcacaaagacggttgtcacatgctgtcaaatctgtaggaagtcgaaacacctctcgtggttttcctaaggcagtgtccagcattactgttaaattcataattcttccaagggtatcaatatagtagacactgtcttgataccatgaatcacagtgcaggtaattatacattccaaaagcatgcatgtgttccagtgtatattgatcatctcgaagttttacctctgccacagctgcgtcaagctccagctggtaacaaggcagcggctcaagagagagcttgtaaccctcgaagcggggatccaacagaggtctcttcacccgtagggagcaattagccgccacctccatcgctttccagggccgcagcgtgagaattaataaagcccttgttgaaaggtccgcgcttcacgcctcgcacagagactgggaagcggcgtggttcccatcccagaaaacactgcggtgcgaactgccttctgggaaatgtagtgtccgtgaaaaagttgagactgttgcatgctgggctatgtagttatcctggtacttaacgcgcgcgcgacggcaaggtctgaactctgttacccagaggccctagcaaccaggaggcggcccgcgctggttaaattctcacattataggcagggtggcgagaccccgccccggaaatgcgtgttctagctttctgtgtgcttaggtgcccgagctactgagggtctaagtccgggcagccgaagagtgtggtaggtaacggtcctcagcgcaagggtcatttcgtcgctgggaagggacggccctcgcccgcggtgatggtggttagcaagatgaacaaagatgcgcagatgagagcagcgattaaccaaaagttgatagaaactggagaaagagaacgcctcaaagagttgctgagagctaaattaattgaatgtggctggaaggatcagttgaaggcacactgtaaagaggtaattaaagaaaaaggactagaacacgttactgttgatgacttggtggctgaaatcactccaaaaggcagagccctggtacctgacagtgtaaagaaggagctcctacaaagaataagaacattccttgctcagcatgccagcctttaagattgaattagattgtgttgttgtggttttatttctgaaagtaaaacttgccataaattagaaaacaatttcccaaaataaaatccttttttgtatgatggtatacagttttcagtaatgatgtatacattgtattgatttttttccctaaatgtgttattttaataaatatctcatgaatgagtttgaaaaannnnngcgnggncgggagcgggccccgcggcgcggggcgcgnngngggggnnnnccgtgttcggccccctcggcccttcgaaaaatgttctaagaccattcttagggggngcgggggccccggggaggaagggaaaatgggccataccgtggtacgccaggaaaacccgggccatgaactaggggctggggaatcccccca

SEQ ID NO: 173982 - DNA, 179 bp, Homo Sapiens
cctgtcggaagctggcgctcaagtaccacccggacaagaacccggatgagggcgagaagtctaaactcatatcccaggcatatgaagggctgtcagatccaaagaaaagggatgttgatgaccaaagcggagagcaggcaagtaaagaaggaggctcaggcagccccagcttttttaaa

SEQ ID NO: 173983 - DNA, 488 bp, Homo Sapiens
  misc_feature (218)..(218): n is a, c, g, or t
  misc_feature (290)..(306): n is a, c, g, or t
cccaatcatatcctttgaaagcatgatctatcctgattccaacaacacgtataattgtggaaaccatacaacttatttatgtttctttaaaagcatttacctcttctctctctagccatccgtccaccaccaccaaagaacatgtcaaagatgtccatgggtgaagagaagctggggctgcctgagcctccttctttaattgcctgctctccgccttnggtcataaacatcccttttctttggatctgaaagcacttcatatgcctgggatatgagtttaaactttaaannnnnnnnnnnnnnnnntttttagagaagtttcagttgttttgttaagcaaacctgccatataaacatacaaagtaatagaggtattctgcccccaaacccttgaactagccagtctatacatcctctacctggaatctgacttgcctgtctacctactcctttggtaaagtgggaaacacagggcaaacatattaagg

SEQ ID NO: 173984 - DNA, 335 bp, Homo Sapiens
gaaaaataagatgggcccaaaggtctatctactaaactagctcttggggaaatagcttcaggatactgtagtttcctctatctaatagagaactttttgttaacagacactgtaaaatagttttgctttgttgaataatacatgtgtacctaaaagaggtaagagcaaaaagtgtaattccacatcatgttacttgagaagtgcttaacgttttcttaaatgttttcattgggaaaggacagctttgataatgtccaaatactctgaaatgcactagaccatataactgtgatgaaatatgaaagctcatctgtaaacttttataccaagggggt

SEQ ID NO: 173985 - DNA, 455 bp, Homo Sapiens
ctacccgcggatcgatccagatcggccattcagcgggcagccctaccggggtgataccgccgtattccatcccggacatgccaacagtcacttgggcctgtggtatccctgatccaatgcacaccgcttcagcctcggctacccgcggatcgatccagatcggccattcagcgggcagccctaccggggtgataccgccgtattccatcccggacatgccaacagcctcatctatcggcgcgaaggatgctttacggacgtcgagctttttgcgcactactttgttgacgtcgacccttgtcgtcgccaaaaccagacatgcaacatacttttcgatgtcaccacgcttcccctgacgatgacgcagttggcgcaggtcttccggcccttaccgaacgcctcgcacagcgcctcggtagataacacaggcccaagatgaggggatcctctagagt

SEQ ID NO: 173986 - DNA, 554 bp, Homo Sapiens
  misc_feature (489)..(499): n is a, c, g, or t
cctgtgttatcattttgtagatgaggaaactgagccacacaaaggtaaaacaacttgcttgaggtcatgcagttaatctctggtgaagctgagattgaaattcaggcagtctgactccactatgctattatcaaaacctctgtgcatagattgtctagactgggaagccgctgtaacttctaaaagaactgcagaggcacatttagaagaacaggatgtcctctgtaccacattagtgtaaaccttgaaagcataattcccacatatcaagctttaagctagaaaaactccatttgagaagaatagtaattatcatatacccatgttatcttttttctttttgattaaaaaaatagcaaacatcgttgttttgagccattatttatggtgagtactgcttgctaaggtaaaggcatttactctgattgtgaaaacagggtaactagagacttgcttaatgaagctcattataaaatatgcaaaatctcnnnnnnnnnnncaaaaagaaaaaagataacacaggcccaagataagataacacaggcccaagatga

SEQ ID NO: 173987 - DNA, 275 bp, Homo Sapiens
tcatcttgggcctgtgttatctcttgggcctgtgttatctctcgctcgtcagtggtgtgatgtgccgtgtcggtggaaggcactctgacctcttttctcgtcgcgggattccgttgttgacgtgtcatatgggtggcggacgaccgcaccgacgatgcgcgtctggatgcttcggaaccagctactaacgctaccatcgagcctttgcttatcgaacttcggtcccggctgcgcgctgccacgcgaatgtgatggataacacaggcccaagatga

SEQ ID NO: 173988 - DNA, 797 bp, Homo Sapiens
gatttggtacacatgtgttatctacctcaaggtaacaagagtatgtggcaaaacatataccacccatagtgcttcacaaaatgcacttctatttagccagcgtttattgtagtaaactattcttaataaaactcactcactgtttataaatgttctggtatgcattctttatagtgaagtgttaatacatcacatcttatttattttagcaaatcagtatattttctgtatttaattataaaaaattaacttagtttttaaaatttatttgcaaatatactttttccatttggcactatggtttgttgcctacctagctgcatctataatgtcagcttatcctaaggctgtccacgtacttaatttacttaagtgttcattttaagtaacgtgctcactgtgtataggaatttgtattttggaggtgcttgatctatctacaaagaaaaattaattaggaattactttattataaaatgctcctagaagtcttaattgtgtttattttttaaaaaaacaaatgttagacttgtgtgcatggaagtaattaaggtacatcattattgtagtttgaaagttgtacatgataagacattttgtttttactgtatgtttttactgaatgatctattccccatcccaaggcaagcatgaataaaattaggttaaacgtagcatgtggcatcgcagtctcttagaatttgtttcatctattttattttattgaatactgtctgtatctttggttatcctgtttgaagaaaaaggacaaataaaacatggccagcaaataccat

SEQ ID NO: 173989 - DNA, 571 bp, Homo Sapiens
  misc_feature (390)..(464): n is a, c, g, or t
tcatcttgggcctgtgttatcactcagcagccacatccctgcatgatttgcattgcaatacaaccataaccgggcagccactcctgagtgataaccagtataacataaacggaagcagcctcaatttttgcctttatgacgacagcttgttatggttgcagtttgggtctggctttacgaagatggcgaccgtaacactccttagaaactggcagtcgtatgttagtttcacttgtctactttatatgtctgatcaatttggataccattttgtccagatgcaaaaacattccaaaagtaatgtgtttagtagagagagactctaagctcaagttctggtttatttcatggatggaatgttaattttattatgatattaaagaaatggcnnnnnnnnnnnnnnnnnnnnnnnnnnnnnnnnnnnnnnnnnnnnnnnnnnnnnnnnnnnnnnnnnnnnnnnnnnnatgtccataaaatacaaataccctgttcataaaaattagtatcccttttgtttggttgctgagtcacctgaaccttaattttaattgataacacaggcccaagatga

SEQ ID NO: 173990 - DNA, 593 bp, Homo Sapiens
  misc_feature (84)..(84): n is a, c, g, or t
tcatcttgggcctgtgttatctagggttgcacaggtcagctaggagatcaagcagaggaagatccggcagccatgggctagctngggagtggcaaagataccgttaaccatgccctggccatgaggtcactgctccatatccctcatcactgcagatgtgtattcctgccccagctctctgtgctgaccagtagatctccgagtcaccacccaggctccaggggaagggtctccctattactagctggggttgaaggcagtgagaaagatcctggaatctgaagccaggagtgtgtgcacccagcagtgtgtcatgcttacctggaagtggtccttttggagtgtggcttctctggatgcacctctgaagttctcagttttgttttatagattctagggaccactgatttggacagcaactcagctatgaactccagagggaggcctgtctcccaactgcctctctcccacaacccccatccactgagagggactgagatactccagtctttcccattgctcctcctttcccatcaagacgctgttgtctttagccaacaccctcattgctcgataacacaggcccaagatga

SEQ ID NO: 173991 - DNA, 838 bp, Homo Sapiens
  misc_feature (82)..(103): n is a, c, g, or t
tcatcttgggcctgtgttatctgagcacattcatttcctttcttattgaggctattctgaggcaagttttctactacttctnnnnnnnnnnnnnnnnnnnnnncagttactcatgatcctgaggtaggaaaaggcttaagacaatagatttgagaacagaaaggactgttctatgctcaagggccagaatgctaaagttttacaagacgtcttttcagaaacaatgctatctggctgtctagaactgcaaactccttcccaaccaatcccctggctctgaggaagtatttactccctcagagtgaattaccaaggaatggctttgtgtgtctgtgtattctgaagaagctgtaactacagaactagaaagaccatggctgagcctcactcccaccaacagaaataaatgctgaaccagcaatggcagcatacacatacattactgtggtgtgtcaggctgctgggagaacaatgttcttccttctagtggacaaagactacactgaactgcaggaagcacaacccctttggtaatcagattttcatgtttctctttctgtgaaaatagtaaccaggacccaattctaagaatgagtaactacctagagattctcaggctactataaagagagggaatctgaaaaataaaagaaattctcatgaaaatggggcaggcagaaccaagggtaatctatgtgaattaataaagaagtataaccttcccttttcatcttgccttcccttttgtctccagtattcaggaatcagcatagtggctgaggtagctaaggacacagggcagtgagaaagggttggggataacacaggcccaagatga

SEQ ID NO: 173992 - DNA, 993 bp, Homo Sapiens
  misc_feature (181)..(181): n is a, c, g, or t
  misc_feature (554)..(562): n is a, c, g, or t
gtgacatctgtgatccgcaatacctgaccccctacgagtttacaggtctgtggcaatactcttaaccataagaattgaaatggtgaagaaacaagtatacactagaggctcttaaaatgtattgaaatgacaatacatgctgttatattagcaagacataacacagattataaacatcagnagccatttgcttctcagtttacatttctgatacatgcagatagcagatgtctttaaatgaaatacatgtatattgtgtatggacttaattatgcacatgctcagatgtgtagacatcctccgtatatttacataacatatagaggtaatagataggtgatatacatgatacattctcaagagttgcttgaccgaaagttacaaggaccccaacccctttgtcctctctacccacagatggccctgggaatcaattcctcaggaatggccctcaagaactctgcttcttgctttgcagagtgccatggtcatgtcattctgaggtcacataacacataaaattagtttctatgagtgtataccatttaaagaannnnnnnnncagtaaaagggaatattacaatgttggaggagagataagttatagggagctggatttcaaaacgtggtccaagattcaaaaatcctattgatagtggccattttaatcattgccatcgtgtgcttgtttcatccagtgttatgcactttccacagttggacatggtgttagtatagccagacgggtttcattattatttctctttgctttctcaatgttaatttattgcatggtttattctttttctttacagctgaaattgctttaaatgatggttaaaattacaaattaaattgttaatttttatcaatgtgattgtaattaaaaatattttgatttaaataacaaaaataataccagattttaagccgtggaaaatgttcttgatcatttgcagttaaggactttaaataaatcaaatgttaacaaaa

SEQ ID NO: 173993 - DNA, 451 bp, Homo Sapiens
cctatctatatgaagcacttaaatgcccaataagtacgaaggtcatgaaagtatcacaaattcatttaaaaaagttaagaaaacatagaagttatattcatgaagtattcataataacataaaaagtatttaatgttaactttaaaaagaagaatataaagctgtatacgaagcataactatttaaaaataaaaatgcatagaaatgactgaagaaaatgtgtcaaaacattaatagtggttgcctgtgggtggtagggtagtattatcgctggtttgtccgttgacacttttctgtatgttctaaattatataaaatggccatgtattattaatacactcttataatccaaagaatatagagcattaaaacagaattttaaagaattaacaaacatataatgttcaactgtgaacatatgtatctccccaaggtcgtctggggatcctct

SEQ ID NO: 173994 - DNA, 976 bp, Homo Sapiens
  misc_feature (102)..(110): n is a, c, g, or t
aaggatcattatctttattcatacacacttgcttccaaactacaattaatgtttctaacaaagcgtatcatgcaaacggagattagaggttatacaaactgnnnnnnnnngcaatgcagtaatttacacatccgtctcctctgcgatataaccaaatggtgtttgacggttgaatggcctctacattttgtcagtaggtgcttatacagaaggaaaaacctcaacctccgtctcttcctccaaacaaagttggggcttatatgatgtttttcaattaatgatttaaacgtggtatgtccttcacacacacaaatcatgtagcaaaagcaatgacttcaaatgcttctgtttataaaagatattctgaaagaccctaacagaagggatgtgaggttaatttttagaaaacctttagactcaaaatagtaactgccttcatgattgattttgaatattctagtaaaccaacccttcaagaaaagaatgatattcttccaggaagaatatcaacaaaagtctacaatcacaggaatggatactcctaaagttaagcagaggtgacaaagacacagtcgtttaatcagaaaatgcaaagccaccttttatcttattttagaaaaaaaggttcttataaagtggacttgacacctattttctgaaaagccgagttctgtctactcgcgtaagtggtaactatgaaacagacgtcaataggcacgtttgctgctgcctcttatatcttgggagatcgaagtatttctgagttgcccagtgggcaaaatccttacagggcatctctgaatcttcacccaaggcgagagacctggggaccaggcgggtctgggcacagagccaaggaagcatcctcctcctgccaaaagatggccacagagcctcacggagcaaggaaaggggtcccagaaacccctgggaatcctattccagggctgcctctggatgggcataaaggggattt

SEQ ID NO: 173995 - DNA, 671 bp, Homo Sapiens
aactcaaaataaaccaataaaatagatagtatatattagacgtgttagtatatatacctgaggcatgttaaaaatcacaactgaattctcacaattcagtcacaaacctaaacagcaaataaaaatttctatcaccagaattatgtttttttctggtggggaactaccaatagctataaatagaagagattattatggaagtatcatagataaaaagagtgctcgcttcaggagcacatgtaataatacagaaacaaatttaaagataataaaatatttaggataaaaagaattgtctcttaaaaatgaaaagaaaattagctttatgtatatataacaactataactctcatcaaaaaactacaggaacagcatgttttcaaaagtacaacaatttccaaactatttgaaataaatctatgaataattcaatggccgacattttccatacaaaccaataaaatgcagagtgtgcatgaagctatctgttacaatctgtggcactgatatttcacaaaagaattctgtcccaatctgagcccctgcattgtgccttcaaatcctcctggactgcaagtccgtaagaaacaggacctccaggttccgccccagggaggttggaattcagcaatataaaaagggttggtggtgccgccagaaacggtggactg

SEQ ID NO: 173996 - DNA, 923 bp, Homo Sapiens
  misc_feature (690)..(697): n is a, c, g, or t
  misc_feature (702)..(776): n is a, c, g, or t
  misc_feature (778)..(778): n is a, c, g, or t
  misc_feature (782)..(787): n is a, c, g, or t
  misc_feature (790)..(835): n is a, c, g, or t
  misc_feature (837)..(846): n is a, c, g, or t
  misc_feature (854)..(870): n is a, c, g, or t
tcttagggaggaaccgtacatcttatattacttagggagcgaagaaaatgtaggcgcgaaagtgaaaagtgaggcagctagttcttcctattccattctcgaccaacctgccctttcttaatatgactagtggtcttgatgctagagtcaacttactctgttgctggctttagcagagaataggaggaaccatatgaaaaagatcaggctttctgacttccatccccaaaacacatttaccagcatactccaaactgtttctgatgtgttccatgagaaaaggattgtttgctcaaaaagcttggaaaatactacacactccctttctccttctggagatcaacccacattagagtgtctaaggactcctgagaattcctgttacagtaaacaaaactaacgtaatctaccatttcctacactatttgagcatggaaatcatagtccccactctgtgaaaacttaacgctttttggaagacatttctgtagcatgtcagtttggaggaaatgatgagctacgccttgatgaaagaaccgtgttggtgctgctaagtttagccattatggtttttcctttctctctcttaagccttattcttcaactaaaagatgaggattaagagcaagaagttgggggggatgtgaaaataattttatgaggttgtctaaaataaagagtagtttcttnnnnnnnnaaaannnnnnnnnnnnnnnnnnnnnnnnnnnnnnnnnnnnnnnnnnnnnnnnnnnnnnnnnnnnnnnnnnnnnnnnnnnanaaannnnnnaannnnnnnnnnnnnnnnnnnnnnnnnnnnnnnnnnnnnnnnnnnnnnannnnnnnnnntttggggnnnnnnnnnnnnnnnnnacaaaaaattttttaaacccccctttttggggggggcgggcgcccccacaaag

SEQ ID NO: 173997 - DNA, 528 bp, Homo Sapiens
ccacggtgtccataaaccatgacctacagatttgacccacaatgaccagcatgtcccttatggacattttctaggtccagtggcactgcaggtcccggatgattgcgggtgccaatttctacattgtggggagggaccctgcaggaatgccccatcctgaaaccaagaaggatctgtatgaacccactcatgggggcaaggtcttgagcatggcccctggcctcacctctgtggaaatcattccattccgagtggctgcctacaacaaagccaaaaaagccatggacttctatgatccagcaaggtaggttttcagaggaaaattcttttatcaacatctgtataaaagaaatgatgaggcagaatttgggccctttgaaaaactctccagtgcattgccacatgctcccaagtggactgagtcccttgagagtcaagacgtggtcttataaattttatgtcccctaaaattgtactacagtcttctgcatatagtagatggtccataaatatttatggacaccgtgg

SEQ ID NO: 173998 - DNA, 446 bp, Homo Sapiens
  misc_feature (14)..(14): n is a, c, g, or t
aggagcgagcctgngtggcgaattccgcacgagggggacctgcggtacctgctgtagtcacgagggacgggcggcggcctggtcggcagagagtagcctgcaacattcggccgtggttacgatgagtttacccctcaatcccaaacctttcctcaatggactaacaggaaagccagtgatggtgaaacttaagtggggaatggagtacaagggctatctggtatctgtagatggctacatgaacatgcagcttgcaaatacagaagaatacatagatggagctttgtctggacatctgggtgaagttttaataaggtgtaataatgtcctttatatcagaggtgtggaagaagaggaagaagatggggaaatgagagaatagcatcttttgtgggggattttttttatatatatttctagacaataaagatttgtttttcaacttg

SEQ ID NO: 173999 - DNA, 527 bp, Homo Sapiens; identical to SEQ ID NO: 90192

SEQ ID NO: 174000 - DNA, 1632 bp, Homo Sapiens
gtgaacttcagattgaaccattcattgcagcagtagccttaaaaaggcttttgtttatttctttggtttgttaactagtgtcatctatttagagaaacatttttgtttttaattgctcaaagctgtcgccgctagtcttatgagctatctactaaaactactggagaaactttgtagtgtgcacacaaaagtattcaagagacagtatggctaacatctcatcttaatgtcttttgttattgagaagttttaggtgcttcaaaacaatataaatggataatagttgttatttggggaattgtaatgatgttggtgctgcttccttctaagagctcagacaagtaaagtatgaaacattcttatttcagttagatggggaacattttgctagcccattagaagcacacagaattatccttgtcctcctaatattgactttcaggaataaagttcagtgtgctgatcattcacaatacagtggatagcttgatatcttctgttttcccattgcagttgatttgagaagatgaaggtttaaatattgttgaaagttgcagttttttaaatgtgttcctttttcttctgtgaatatttagggcaatcgtgtcgctaatagaatatgtagtagagggggtggggaggtaaattcctctgacttgccaaagaaaaagaagggaaccacagtggatatgctagcattttagctgtgcaaagggaggtagtgtgggaaaagtgtttccattctgggaaaagcccaaaccgaatacggtcagcagtcaactccagggtttgggcttgattcctgttgaataatagttttgagcattctttgtggttaaataaattcttaaatctgcctagttttgatgaattcttttgtgaaacttgaaagagaatagacagtatgacatatagaattaagtacaaaacagtttaacaaccatttaactgcagtgtaagaaaattggactgtaatcatatcgctactggcatctgttatctagtatgcatttctggtgtgtatctgaaaggaagacattttctaccctagatccaattgcatttatttatcaataagtgccattaaattgaaattatattacattttacactttctcaatgaatgaacaaattagtctgtagaatctagccacctgtttagcctagtcatgtgccttgaacatatatgtgtcccataatctggctcatggtacctgttcttctatccaaacctttcaattcatgctacctgattcatttatttgacatagatcttaggcccacttgaactcttttcttgtttatctagcatagcacaaacgtttttccagtcttctttatcaacactaatgcctcttaattgcatcagtatttcctattggaaaatacatctgttccagaaaaacatttggcattcctgaataatttccaaatgtttttaatccaaagaaaaaggtttaaagcttatttccctttcttatacacacctgaataaaattgatgtgcatgttttagggatcaattacctaactgttccttggtctatttatgtataagaatgctttttaaagcacatgtctcattttaaatgacgcacaaactgaagatgttaataaaatttaagagtaatac

SEQ ID NO: 174001 - DNA, 845 bp, Homo Sapiens
atatgaaaccgagtattagcggctggtacggtccggaatttcgggatatcgtcgaccacgcgtccgcggggaagtcaggtggccgctgccgccgccgccgccgcggtttgtcgccagaaggaagatggcggatctggaggagcagttgtctgatgaagagaaggtgcgtatagcagcaaaattcatcattcatgcccctcctggagaatttaatgaggttttcaatgatgttcggttactgcttaataatgacaatcttctcagggaaggagcagcccatgcatttgcacagtataacttggaccagtttactccagtaaaaattgaaggttatgaagatcaggtattgataacagaacatggcgacttgggaaatggaaagtttttggatccaaagaacagaatctgttttaaatttgatcacttaaggaaggaggcaactgatccaagaccctgtgaagtagaaaatgcagttgaatcatggagaacttcagtagaaactgctctgagagcttacgtaaaagaacattacccgaatggagtctgcactgtgtatggcaaaaaaatagatggacagcaaaccattattgcatgcatagaaagccatcagttccaagcaaaaaatttttggaactggtcgtaggaggtcagaatggaagtttacaatcactccttcaaccactcaagctggttggcatcttgacaaattcaggttcattattatgaacgatggtaatgttcagctagtgagtcataaagatatacaagattccctaacagtgtctaatgaagtgcaaacagaaaagaattataaagattgtagaagctgcagaacatgaatacca

SEQ ID NO: 174002 - DNA, 410 bp, Homo Sapiens
gggtggaggctcaggtttcagcctgctgtgagggaagctgtcttgtggtaccaggagactgataccctctttcccctcagtcacatggtatgatcacccaactgcagggtgaagggccagatctggggcctgcagccattgttccaaggagattaggtgtcacaggcagcctgcctatccccacctcattctcagaatttcttcttgtttctgaaagattactgtgaaggtgaaaggttaaatattagtcaagggctgagttcttgggaagtgatggagataaggttaggcaagacagaagatagccacagataggttattttacaaagcatccctatctctgttaccccaggaagaccacagagctgatagtttgaaggtgtctttctgtgactcagtaaggtctctaa

SEQ ID NO: 174003 - DNA, 364 bp, Homo Sapiens
ccggtgaagaacttggggggagtacctcaggcagcagaggagaagccagacagggtgagagtctagctaagctaggtgtggtggcaatgtccagttcccagctggccgtgtcaccttaaggggggactgaccacgttgcagttccttcttctgtaaaatgagggggtgactaaagcgtacacaagttctgattctgggaaaaccacagagaatcgagttttgtaaggtgctgccagcaggggaggaggtggagggtacgtggagagctctattattgcttacagaattgaacgtgaaacgacaatggttgctaaattaaaaagttggttattttaagcagtgaaaggtcgtaaggtcgttcacg

SEQ ID NO: 174004 - DNA, 589 bp, Homo Sapiens
gataaatgagggctccaggtggtcagtcactttctcaattctggagtctggcttgctcccgcgcactcttcacctcgtccacccttggctcgtcagaacaatgttgaggtaacgcagatcataaagcagctgcagcgcccggttctgggtgactggaaatgcaccttctttctgcaaatgaattcccggtccccacccatgaagagagaggacttggtatgtgagcgtaataaacagcttcaagttttggttgagtttcagcttgctatttcagaagcagatggttttaatgctcatatggccagtttaatctcacaacaacaaaacaaattttgttagaaacttgaccttaaaattaaaaacctaacagcagggaagagacctggcccttaaaaaaggcctcagatgctgtaaatggttgttctaaaggggaaaaaaaggctccttgcctgaaggagaagtgttttgaggaggctcattagagaagacttactgaattctttccaaaatcaggatttgttccttcttgggtttctgtatgtccgtacgtacgtctgtcttgagatagagtctcgccttgatcgcccgg

SEQ ID NO: 174005 - DNA, 468 bp, Homo Sapiens
tcccgtacagagtgaatgtgtaaagtaagatataataagatgatgtcatcctggttcaaatgcctgggaggtcaaaacaggttgaacagaatgaacaaatgtggcattggtgagcttttctacctgcaacagcagctgactatctagcactaggttaacaggttgggagagaagaggaaaagagaagcgaccttgttctagtgtcaaaactgttttccaaagttatttacgttcaatttaacagtttctgtggtttcactccccttgctcaacaagatgtagctcaaatcacccaatcactaacactttcctgttcattttatatgagtatttcaaaattgttagttaccacgaatgactaagtgcggggatagggtatttttgctggaattgttgcactgcacagcctgtaacaacacagggggtcccagagaggcactcccttcacggactacattcactctgtac

SEQ ID NO: 174006 - DNA, 512 bp, Homo Sapiens
tacagagtgaatgtattactttggagcggcatggcttctggtttatccttatattccctttcgggaaatactgtcacagggataccatggggcccaaacctttgaaagaaatggaagaaaaaaagaagacattaagttaacatctagtaattcaatttcttaaacgtaaacaacatctgatgcttatttatataacctttcccgaaaactatttcatattacaaaacaagactacaaaaatctactatctcttcccccaaaagtccaaagaccttcatttctttaggttctacatttttggtaaaaacaaacagctgccctaagcaatgacagaatagttgactatacttaaagtagatatttccagtcttgaatcagaatgttttctcagatagctttatgttaagcatcacatacattacattcactgaaccatatacaacattttcagtaaatgcagctacaactttgtgaaacacacatatatttcttcctctgacattcactctgta

SEQ ID NO: 174007 - DNA, 1493 bp, Homo Sapiens
  misc_feature (823)..(823): n is a, c, g, or t
  misc_feature (1048)..(1247): n is a, c, g, or t
  misc_feature (1270)..(1270): n is a, c, g, or t
  misc_feature (1295)..(1306): n is a, c, g, or t
ataatgggtaacatatctttggtatggttgcctagattaacttacctagtcagacccagaagaacttcttttactagcttgcttcctaaatgccttttttcctctccttttggtctccaaatggcctggtcagcttttggtaatattcttcctcatcttccacctagcttgagaaggatgttctccatatagagtttagcgagtgcctaatccctccttttgtaagattttgttccctcagcttgaggaacaacttcatcttcaactttttatttctccctgatgttacagtttggtagatttcaaactggaatagctagcatgtgcttgctaaataattttatgccagccttatcctgtatcctagctgttcttaacagcaggtacaaaaatgcctgtttttcagcaaggttgaaattgggaatgtccttttgaatcagaagaaaataggccatagactcatctcccagcacaaatgggcattctatgaaatggtactggccctaggaggatttcctcaaccactctcctactcttggccttgaacctacctctgggttggatcttactattgtagctgctcactataccctcctgcatgcttagaataatgctttgaggggagcactggtaaaacacagtatttatttttttacctcctttaagaggacttggaggtaagttgcattcattcactcaagtttccctcttgctgtctaatagaagcttactttttgctatatcagcatttgttacagccaatatttaaggacaaaatttagaaaatatatcatttcctggcccatcatcaaactaatacagncttaaccttgcagctaccaacttttgtgtcaagctagatatctttatttgatatctaaggtgcaagaccaacaatatattaagagatctggagacatgaaggcaaagctcttgtattttttttcatccaaacacctcaatttattttataaattcgttcatttttcctgttatgttttatataatatatggactaaacaaaataaaataacagtgcaaaagaggnnnnnnnnnnnnnnnnnnnnnnnnnnnnnnnnnnnnnnnnnnnnnnnnnnnnnnnnnnnnnnnnnnnnnnnnnnnnnnnnnnnnnnnnnnnnnnnnnnnnnnnnnnnnnnnnnnnnnnnnnnnnnnnnnnnnnnnnnnnnnnnnnnnnnnnnnnnnnnnnnnnnnnnnnnnnnnnnnnnnnnnnnnnnnnnnnnnnnnnnaaaaaaaaaacaaaacccaaacnccagccggggggggccccaaagggnnnnnnnnnnnnccgctccagacccccccccagaaaaaaccggcggggcaagaaaaggggatcgaacaccccccccaagaaaaagggccccgcgggcggccccgcgtacgccttttcaaaaaaacccccaagaaggagggttttttagcgggctttatttacaacacatcgcacccccgagcgccgcagggaagccttt

SEQ ID NO: 174008 - DNA, 618 bp, Homo Sapiens
gggagcttgaagagaaagaagaggtaccatataggcaattctttccgaggagatgtcgattccattctccaacacccactaccgaattccacaaggatttgggaatcttcttgaagggctgacacgcgagattctgaggagagcaaccggacaatataccagcttttgcagcagcctattttgagagccttctagagaaaagagagaaaaccaactttgatccggcagaatgggggagtaaggtagaagaccgcttctataacaatcatgcattcgaggagcaagaaccacctgagaaaagtgatcctaaacaagaagagtctcagatatctgggaaggaggaagagacatcagtcaccatcttagactcttctgaggaagataaggaaaaagaagaggttgctgctgtcaaaatccaagctgccttccggggacacatagccagagaggaggcaaagaaaatgaaaacaaatagtcttcaaaatgaggaaaaagagaaaaacaagtgaggacactggttttacttccaggaaacatgaaaaataatccaaatccatcaaccttcttattaatgtcatttcttcctgaggaaggaagatttgatgttgtgaaataaca

SEQ ID NO: 174009 - DNA, 515 bp, Homo Sapiens
gtacagagtgaatgtcaataggtgattcctatccacatttccccagacagctcctctgttttcccttttcactttgccagtatggaacctaccctgtgcaaggtattgtggtagatgttgggaactcaaaggtgtaaagaaagctagccacatttgtgcagtgataaaacaagtaattccccagaccggctggtgacttctgcactgactcttgacgagcagggcttcacatgccacatgtaggtgaggatcgcttttagatgttctcaaaatatggaccccaatccaaacctgtctaacagtaaggagagtctggacatacagatgttaaaacacagtggagatgatcctggactcctacatgaagactacacagaacattatattggactggggattgtttcttccttaaataccaggttcttttagggaacattggcagggctttcattccttgtattgaatattctcaagtcgtgatattcccagtggttttgtttgctgttatggctgag

SEQ ID NO: 174010 - DNA, 1157 bp, Homo Sapiens
  misc_feature (146)..(518): n is a, c, g, or t
tacgtgactggtgaaaacccgtgggcgtgtagctgtgcatcaaggctaagaggtcacagcgctgtccttgccattctcaataaatcagttttgcaaaatctccaggccttcttgcagaggattcagacatagagggtgatataggnnnnnnnnnnnnnnnnnnnnnnnnnnnnnnnnnnnnnnnnnnnnnnnnnnnnnnnnnnnnnnnnnnnnnnnnnnnnnnnnnnnnnnnnnnnnnnnnnnnnnnnnnnnnnnnnnnnnnnnnnnnnnnnnnnnnnnnnnnnnnnnnnnnnnnnnnnnnnnnnnnnnnnnnnnnnnnnnnnnnnnnnnnnnnnnnnnnnnnnnnnnnnnnnnnnnnnnnnnnnnnnnnnnnnnnnnnnnnnnnnnnnnnnnnnnnnnnnnnnnnnnnnnnnnnnnnnnnnnnnnnnnnnnnnnnnnnnnnnnnnnnnnnnnnnnnnnnnnnnnnnnnnnnnnnnnnnnnnnnnnnnnnnnnnnnnnnnnnnnnnnnnnnnnnnnnntagggttgtagcggatcagctataaagatgggcctccctttaggccctgcagcagtatggcaccagtttgaaagcctccatccagtccacataatgaaaatcagaaaaagaacattcaccacttatctgtgctttctgcaaagaaacagataccggggtgaggaccaagactgccttcttcttcatgtcattttgtatgtctgtgtagacagagtcggcaagaagggagatatgaagtgcttgcaaggtacctagatctgtccttgcattcagacattcccttgctacttgtaattccttgacagaagacattgtggtagtgggtacttaggagggaaacaactagaatggggcatttttcccaaggcaaacattgaatcctctcttgctgttacagagtaaaattccctgaggcctgggcttggtttttcatgcagattgaatgatagcttttaatactgtctctaatttagtaattctctgtgagctcccttgagaagagggcccaggtactcttattttccatctctcacaaagaatcaataatgaaactaagtattgaccattatatatgtcaagcatatgatatctgtagtgtcaaactggggatccatcatagagtcaaccagcacgtaagcc

SEQ ID NO: 174011 - DNA, 809 bp, Homo Sapiens
ggggtgtttctccggacttcgagccatggcggtgacggaagcgagcctgttgcgccagtgccccctgcttctgccccagaaccggtcgaaaaccgtgtatgagggattcatctcggctcagggaagagacttccaccttaggatagtgttgcctgaagatttacaactgaagaatgcaagattattatgtagttggcagctgagaacaatacttagtggataccatcgaatagtacaacagagaatgcagcactctcctgatctaatgagctttatgatggagttgaagatgcttttggaagttgccttaaagaatagacaagagctgtatgcactacctcctcctccccagttctactcaagccttattgaagagataggaactcttggttgggataaacttgtgtatgcggatacctgcttcagtaccatcaagttaaaagcagaagatgcttctggtagagagcatttaatcactctcaagttgaaggcaaagtatcctgcagaatcaccagattattttgtggattttcctgttccattttgtgcctcctggacacctcagggaagagacttccaccttaggatagtgttgcctgaagatttacaactgaagaatgcaagattattatgtagttggcagctgagaacaatacttagtggataccatcgaatagtacaacagagaatgcagcactctcctgatctaatgagctttatgatggagttgaagatgcttttggaagttgccttaaagaatagacaagagctctatcagctacctcctcctccccagttctactggacca

SEQ ID NO: 174012 - DNA, 651 bp, Homo Sapiens
aacttcatgcgtatatattcgtaagggtcttcttgccaaagttcctcatcagcatctgtatagcacatcaatggaaaaataacatcttggataatgccttgtatatggggcttcagattcttccaggtgagagcatgagaaactccttgattaatataattgaatgtctgttgtaaaactcgacggagccatatattgcttctccttgtactgatataacaccttcaataaaacttgctggacacccacagcaaatgccttcagaaatacttcagcaaattcattatactccttggaaacattgccagggcttccatatctttcaaaaagtcttgctaaaatatgtaaggcccacttcttgcatttccaccatggtaactcaggtcgatcatcttcttcaacttgaagtgtttcattacgtacatccctgttcacaacagtctttaaaatttctatccattctgtcaggttctgttggtttatcagttccagtggtagtgtatactgaacaagagcatagaagatcttgaatatctgtttctggatgaggacagactgatcagactggtcagaaagaagctggataaaacgatcctttagaactggcagaaaatgctgcattgctgctaccaatggactgaagtgtcacgt

SEQ ID NO: 174013 - DNA, 348 bp, Homo Sapiens
attgagccggtaccgtgacacttcagtaggagaagcaccaaactgatcagtgtagttatccatttcgagagaagtatttatatacatctccatctttgtgcatttgcatacgttcaccatctagcttggtttctatgtagaaactctgatgtttcatatccttctcaatgtgctcaatatctgcaatagcagctagcattggtttaaatgcagaaaataaagtgatagaaatatcactgagtcctacagaaggatcatgcagttgcctacagactttttccagatctgtagtgacattatgcaactcagcagcatcattatgaaaaacagaaaagatagtttgctgac

SEQ ID NO: 174014 - DNA, 274 bp, Homo Sapiens
gatcgagctcggtaccgtcgacacttcagtagcttttgtatagatattaaacaaaaaaaggactataaaactttataaccatattttcattgaatatattagtcatgaacactttcagtcattaaaatctgttctgcaacatttttagtgactgcaatagatccacattttatgaataaactttgatgtttttacctgtgcaatttctgtatgagtagataagggtagaaaataatataatgctatataatgccacacaagctacacacacgaa

SEQ ID NO: 174015 - DNA, 935 bp, Homo Sapiens
  misc_feature (120)..(120): n is a, c, g, or t
ttcttaaaagatggagaaggaagagctctgaaattaccaaatcttgtggacatggcagcacaggttgctgcaggattggcttacatcgagcgcatgaattatatccatagagatcttcgntcagcaaacattctagttgggaatggactcatatgcaagattgctgacttcggattggcccgattgatagaagacaatgagtacacagcaagacaaggtgcaaagttccccatcaagtggacggcccccgaggcagccctgtacgggaggttcacaatcaagtctgacgtgtggtcttttggaatcttactcacagagctggtcaccaaaggaagagtgccatacccaggcatgaacaaccgggaggtgctggagcaggtggagcgaggctacaggatgccctgcccgcaggactgccccatctctctgcatgagctaatgatccactgctggaaaaaggaccctgaagaacgccccacttttgagtacttgcagagcttcctggaagactactttaccgcgacagagccccagtaccaacctggtgaaaacctgtaaggcccgggtctgcggagagaggccttgtcccagaggctgccccacccctccccattagctttcaattccgtagccagctgctccccagcagcggaaccgcccaggatcagattgcatgtgactctgaagctgacgaacttccatggccctcattaatgacacttgtccccaaatccgaacctcctctgtgaagcattcgagacagaaccttgttatttctcagactttggaaaatgcattgtatcgatgttatgtaaaaggccaaacctctgttcagtgtaaatagttactccagtgccaacaatcctagtgctttccttttttaaaaatgcaaatcctatgtgattttaactctgtcttcacctgaagtgtcaacg

SEQ ID NO: 174016 - DNA, 582 bp, Homo Sapiens
  misc_feature (438)..(438): n is a, c, g, or t
ggtatgcagctaaatttatcctcacaacaaattacatttaaatgtgtaaaagtggtcaacaggaaaagggcataaaggaaaacaaagcgttctttcaggggaagtaagctgctctggaggccaggaactactgcttgcgttgacacggtgtgagtgggtatctttgccctgaagctgaagttaaactttctactggccgtgtggcacacacgttagatgtgtattaggttaagcctggccaactagagagcgaaggggcttattagttaaattgtgctaatatcagttaggaaaatgcttgtcatgttgtggtgaaatcgtgaggagtttgtgtagcaatgcctggggacatgaacgggccatacaaacagaggaaagccctgggggcttccagggcaatggccttgtgtcgagtcattcttacaagtgtccatcttngaaatcataaagtggatttaaaaagaagtagcagtgccacagtttatcaccaagaacttattttaatggaaatgggtctaatgtcccttcatgcaacaagacagatgaacaaaaaacaatggtcctaattagctatgagtgatc

SEQ ID NO: 174017 - DNA, 909 bp, Homo Sapiens
aggatcccccgttcacaataaattaaaatatttaagttgggagtataacctgcctaaatcacaatatgcttcatcaagactcatggcctagtctttttctcttaagtagcaaaatatataatatatggatttaaacacagtgaagttagcacctcataacacagaatttgagtaacatgacaaagaaacatccaatgcctattaagactcttgctgtttttgagaatcttcagttgagacagctatcaaaataaatggccaatccttttagtacttacattctcaatattgacataaaccatcatctgaccctttacttcacaggttggcatttaaatacattctctccagtatcctacttctgcaatgacaagctcttcagtcaagatttttttctagccaatgttggtagaatacctaatgccatcagttttgacaactctttaaaaatcctacaatacttagatttaaacggatcacacatggtagaacaagctaatacctaccagctttggaaaagccataaatgaatgattacagatgaaggcattttctaataatttagatatcaagtgcagctcacctgccaaaaatggttctgccccagccattctgttcctaactcagagcaacagtgttcacagatttttacagcccagtccagataacatcatactagtcaagaacataaaccaggaccactaatctgttgcaagaagtcatagtttaccaaataatcaacaattgtgatgatgtcattgcctaaaccttgaaaaagtttaaatcagttaaaacaaaaatcaactcatcaaaaacagggaaagttttcaacgatgtattttaatcaagtatgaatggttccaagcattaactaatgtagaaaagacaaactccctgaagtgtcaacgt

SEQ ID NO: 174018 - DNA, 596 bp, Homo Sapiens
ctgtagagttgaccccgtacaaggatatttatacatgcgtatgtaatacactgaaaaccagattgtcattcaacagtctggcttatttgatatgttgccaaaatcaggacagagcacatggcaaacaaatcctttatgaaattcgaggaggcagaatttcatgacttactttcctaagagtatttacagaagccctaaaacagaatgtggtctggggacctacacatttaaaaccaaaacaaagaagacaaccaaaaaaaggaagcatcctgatttcagacataaaagtaaattctaaggaaggatacccagggagcttcttttctgtgatctgggcacaaaagcagtttcattggtcttaccaaatgctaagatctctttcattttattaaggatcattgcaacaggatatgtctgttaaaatacatcaggaaaggtgaacagttataaaagtcaaatttataccaagtacataaagacttatttgctatgcctaataagtttaaaaagtcacttatatgcctccactgtatccatcactagaaaatttttttgttaggactgttctggaaactttaagttaaaataaactcttt

SEQ ID NO: 174019 - DNA, 659 bp, Homo Sapiens
ctaggtgaaccgtaggcaactgaacaactataaatttcacatgactggatagaaacagcctaagctcttgagccccccagatgtatgccggtgcggggtgacttgctacggaggcttaaatcactttcaagagaagaacccacagatgaaattgcacttgtggagactcaggtggatttgcaaaactctgaaaagaattttgggctggtccactaacaaacagtcgtcctaaaagtaaaggtctacattttccctgtatgcagaaatattcgtttgcctacatttccgtatgtccaaagcactgtttttgctgagtcactggaacagaaaaaagataaaacagcactttttatcccagctgagtcatatcgtttggactttgtaattctacttgaatgctagtcgatcttacgttcaaaagtctggtaagttttctgaacactgatactgcaattccacaagtcagacaggaaacagaattctagtttgtttcaatatcatctgacctatcgaaagaagcatttcagtgactaatatagcaagcacgtaaactgaccctccgtgaaagtaatatacttgctgctctgtacatcagatccataagcaggagtaacagtaaccttaagcgtctacgggatcctctaggagcgccatcactc

SEQ ID NO: 174020 - DNA, 367 bp, Homo Sapiens
acgttgacacttcagctttagagcccatttaatacatgccctgttattattttgtttgatagggccattatcttctgtgagaatgaaaagtaatttgtcagaagcatttttttaaatttaaagatcaatctatgtaaatttttcttaaataaaagaaaccacagctgttgttaaaaaaagaacctcaaacataatcattaagagtctcagaaatgggaacttagggcttagattccacaaacatttttagctattattttctaatctgggttctaacatgtgtagtctaataaccaagcctggatagggctatttctgagaggattttatgttaacagtggagttgacaccttggcaaggtttaaac

SEQ ID NO: 174021 - DNA, 703 bp, Homo Sapiens
ttataagataaatgtcgaagctattaaaaattaagtgaagaaaagatagtgaaaattcatggttaataaactatctgttatttgtggttgttggttttaacttctgctaaccacagtcttatactttagaaagtcagatcttaaaaattatacagcccaaagatgacacttacatggcatgtacaccaatggccccacactgtaggccaagctatgcattactaaccaatgaaaacaatctctcttgagcctggtaggtagccaacatcaaccaactggagtaaatactcatttcccatccctaaaaaggctgaatattgaatttccaaatcaaagaatatcacctgtttactcgccccaagtcaccagctttattacagagccacagccaagattagagcccagattgccaaatcgattcagtttcagccatgtgacgtttatttataaatctcttgtaacgagtggtacttctggggtggttaaaaaaatattatgtatataatattaatcctatatatctaatatctacctgtgtatggaaatatgttttctctgtcatctaagccccatcaacttagatgggcatcacctatcatgggtggccctcgccctagaccttaggccctcagcctgggaagagccaaccaggcttctgagtaatggtaagtgcttaacgtccatccaggagctgtagtgtcaa

SEQ ID NO: 174022 - DNA, 259 bp, Homo Sapiens
gatgtatggaatttatcatgagataaggctgggggtatgcgaactagacacaggctcggcatcccagcacggccatatagcaagtgtgcacgccgagcctcagttactgcactcataaaaggaacgtatttacatgttccttgcaaaactgtcaagaataaatgaggtcattcaaactattgaaacaacagcatttacaacatgctaacaatgtcagtttccttaatccacaataaaaaatccttaaagtattttcaga

SEQ ID NO: 174023 - DNA, 627 bp, Homo Sapiens
cgttgacacttcagcctcctgagtagctagcacctgaaaatgctttttaaatgatggtgcagtgtacaatgtgaagtattatttattgctaaagtccatgctttgagtctttacagaaaagcctgcataaggttgctctgatgtcataatgatcggaaaaaatgatctaaaatcaccgtaacttcagaacatcagagttcatatttagggaaagagttttcttttctttctttgaagaatttagtatgtaaaggttacttagcctcagggaaatctttgtataaaacagtcctttaaaaacaataccttgactgtagaagagaatgtttaaactggagtgaataccagtgaagtaacaaataccagtaaagtttcgagtgagttgaagaaaacaaaccagtgatctcaatggcgcaatcacctcagaatgaagctggggcctgaagtttataatggaataagcttagaggttacagccagaagtacagaggtaccaaaagtttttagacctctgtaggaacatcaaaatgtattgcaagcaattacttgcctattcaccttccgaaatcttccactttcactcatctacgctgtatcactaagggagaaaatgttactgtatcctgg

SEQ ID NO: 174024 - DNA, 300 bp, Homo Sapiens
tatgatgagctggtaccatagaagagtggctgttacagaattataagtagtttaatataaagtgtagagcatgaaatgagtttttttcctggatttctctggtaatcaatccattattccacagttggatggaaccatggtcagcaaagggagaaagctttagtggtcatgaaaagaaaatttggtgatacttttcttttaatagaatgtttacaagtaaagtcaggcattaatagtttgtgttctagacctctacacaaaaatttcagaaataacttgcttgaatcttttattttttag

SEQ ID NO: 174025 - DNA, 160 bp, Homo Sapiens
cgcatgcagccagcctcccaaagtgcgggaataacaggtgtgagccaccgtacctggctgttaatctcattatttaaaagcagaaaacctcaggctcagaggcttcgactgggcaatagtgtctggccagatttaatacatttttactttcgttattttt

SEQ ID NO: 174026 - DNA, 189 bp, Homo Sapiens
caggtgattccgaccgcggtagtagtgactgggactacaggcgtgcaccgaccgcagcccacctcacaacacactttcaaaacatcacgaaggagaggccaggagcaagaataaaatcttggagtcatttctctgtttagcagtaaatgcaggcacctgctttacactaagatctgtcaaagcttaggg

SEQ ID NO: 174027 - DNA, 368 bp, Homo Sapiens
gctttttgaagcttgataatttacaaaagctgaatattgagaatgactttgaaagacctgtatgtttcatgactgtagagtcaactaaagatcaaaatgtgaaaggtattcatcctcgtaacttaagaaatagggatacttaaaagcaaaacggtgtctcaacatttactagaataccaggtgaaactatagtattaaaagttattccttacaaaataatcctttcaaaatataaaatgataaacgccatcacaaaatagtttaatagcttcttccaaatcttcagtgttgcaaagatccaaaaggcacatggagctcatgggttaagcattgttaatcttgacgtaggtatgtgatgggctggggat

SEQ ID NO: 174028 - DNA, 181 bp, Homo Sapiens
cgccatgagataccgcccacagaaacgtcaagacaggtggtcattttcaagtaccccactaccacggactccggacgttatcagtaggaaaaagacagtgacacaacatcagttagccgtcatcctgatgaccattaatgaaacgcccctcccggcttatcaagcacgcgggtagctttta

SEQ ID NO: 174029 - DNA, 395 bp, Homo Sapiens
atgtgactaggaagttgggcacatcatttttgctcacattctgctttctaaaatgtcatcacctggtgactcctagccatatgggagtttgggaagtgcggtatcaagctgggcttcctaaaactgcaagggaggatgggtctattgctaaaaggaagaaggaggtaaatagacaatgggagacaattagtagctaatgctgtaataacaaatgaggacactgatattatacaatacatcaggagaaaatttctgatttcaacttgagaggttctagctgaacagtttatttagccttattgctgtcaccttcttttatcagaattttctgtgtcatcctttgctttcctctcctggtatcactcaagaagaataaaggtagtagcgtaactttt

SEQ ID NO: 174030 - DNA, 108 bp, Homo Sapiens
cgcatcctctgactgaatttgtagtgcatttttcttgtggaaagagcttgagtggagattctttgtttagtaccaacaatattaagacttgtaggtgctctgtattga

SEQ ID NO: 174031 - DNA, 354 bp, Homo Sapiens
gagagaaattaagaaggccctgatcattaaaacatgtaccataacccagaaaagccctacgcttgtgacatctgtcacaagaggtttcacaccaacttcaaagtgtggacacactgtcagacccaacacggcatagtgaagaacccatcaccagcctctagttcacatgctgttttggatgaaaaattccaaagaaagccgattgacatagtgagagagagaaattaagaaggccctgatcattaagttaaggcgcggcaagcctggttttcagggacagagtagctcccatagcacgagcaagtcatcaagaggaacttgagatctcgagccaaaggagctgacatttgtacg

SEQ ID NO: 174032 - DNA, 829 bp, Homo Sapiens
  misc_feature (790)..(790): n is a, c, g, or t
  misc_feature (795)..(795): n is a, c, g, or t
ggtggattcagtgagctggactctgagtcaggaagttcaagttctttttcagatgatgaagtctgggtgcaagtagcacctcagcgaaatgcacaggatcagcagggttctttgtaaatagtattttgagacactaagatgtttctactgctacggaatgtatattaaacacatatcgtttctttttcttggaaaaaaagttgattaggaccacagatttggtttagaaagggtaatattttgaaatactacaaggtttagacagtccatgaaatcgacctgtttaataatttaccatcctgaaagtccagaattaaaatatggaagcaagaactatataattgattaggatgcttggtaggtttttttcattgttcaaatattcattgcacagtggattgttttgattagttagtatgcttttttatttaattaattcagtcttctgttaatttttaagttttggttagtgccacaaggaatttaactttttgatttgtataatagaaaactgaactaggaattgttagcggggttttgaaggatgtgtactttccttcaaaataaagtggtagattttcaaaattttacactagtcagttcttttatatttctaaggttaaatggtagtttgtaaaaattattttggggtttttcttctaccaagggaaaagaaattggatttttatataatataaaggttaactggccataatggattttccatttctggactaaataggtggcaggaaattgggcccctccccttaagagcctccaaaaaaaccancagcnagtcgtagacctgacgcaccgagtaggcggccgc

SEQ ID NO: 174033 - DNA, 378 bp, Homo Sapiens
tagtactacccgcagaatggctctagtgcatccccaaacaccacatctgggacaaagaaatagtacaatggaaagtctatccttggacctactagtttgtcattccccatggcatgatggaaatatctaaaataaaaagagtctgctctggagaaggattgcaaaatattatttcatagaacgagatatagaagaggggaaactcccaattacataaggtgggcattatagcttctcaaaacattggttccctatatgggtcatgaagattgatccctagtatcagcctatggcttactaggccagtttaactgaaagatttaatgagcttggaaggatgctgccacctgcactctcactttggcgggtagcttttat

SEQ ID NO: 174034 - DNA, 802 bp, Homo Sapiens
ttatagctaccgcaatcacatgatctcacaggcatgatgacctcagcaacccctttggacaaatgagccttagtcgccaaggttctactgaagcagctgacccatctgcagctctattccagaccccacttatctcccagcaccctcagcagactagcttcatcatggcttccacgggtcagcccctccccacttccaactattccacctctagccatgcaccacctactcagcaagttctgccaccccaggggtacatgcagccccctcaacagatccaggtttcttactatccccctggacaatatcctaactccaaccagcaatatcgacctctctctcacccggtggcctatagcccccaacgtggtcagcagctgcctcagccatcccagcagcctggtttacagcccatgatgcctaaccagcagcaggcggcttaccaaggcatgattggggtccagcagccacagaaccagggcctgctcagcagccagaggagcagcatggggggccagatgcaaggcctggtggttcagtacactccactgccttcttaccaagttccagtgggtagtgactcgcaaaatgtggtccagccgcctttccagcaacccatgctggtccctgtgagccagtctgtgcaaggaagcctcccagcagcgggggtaccagtgtactatagcatgatcccccctgctcagcagaacgggaccgagcctttctggaagggtttctgcaacccccgggcctcttgaacagtaccagaatgggcttagattttccctttttcccgggaagg

SEQ ID NO: 174035 - DNA, 554 bp, Homo Sapiens
  misc_feature (358)..(367): n is a, c, g, or t
gaaaattgcaccatgatttgaacaagcacttccaattacattacccatcttgtatgccataggtgggagtataattgtcacagcctttaggaatgtagttttccgggatttattgaaactttgaaccttttggcctactaagttcattcctaggaaactgcctaatgggaatgatctgacaagtgtacacaagcaaagtcattgcacctttgttctttaatacttaaaactagcccaaatgccctgtcagtaagggactggtttaatagatggtacctttatgcaatttgtttctaagtattcgttaagagagtgaggaatctctggattattagggcaagatttctaaacttgggtnnnnnnnnnngttgtgcaagcatttttgtggacaacttgatgctctaaaatataagtaacaccacattactaacagtggctttgttaggaagcagaattatggaagaactttcatgggtggctttacatatttctataatgttttaattttctataagcatgtatttcgtaaacttaaataaagaaaaaagaacact

SEQ ID NO: 174036 - DNA, 1431 bp, Homo Sapiens
  misc_feature (247)..(247): n is a, c, g, or t
ggagctgtaaacaaaaaggcaagaggctagcgtcacccaagagatcccagggaaaatcacgggatatcgtcgacccacgcgtccggacccacgcgtccgcaaaggccataatactctgccttcaccctggagagaccgtcccatggaggagtcactggctgctctttgaggcaatgcgcaagggcaagttttcagagggcgaggccacactacggatgaagctggtgatggaggatggcaagatggnaccctgtagcctatcgagtcaagtatacaccacaccaccgcacaggggacaaatggtgcatctatcccacctacgactacacacactgcctctgtgactccatcgagcacatcactcactcactctgcaccaaggaattccaggcccgacgctcttcctacttctggctttgcaatgcactggacgtctattgccctgtgcagtgggagtatggccgcctcaacctgcactatgctgttgtctctaagaggaagatcctccagcttgtagcaactggtgctgtgcgggactgggatgacccacggctctttacactcacggccctgcgacggcggggcttcccacctgaggccatcaacaacttctgtgcccgggtgggagtgactgtggcacaaaccacaatggagccacatcttctagaagcctgtgtgcgtgatgtgctgaatgacacagccccacgagccatggctgtgctggagtcactacgggtcatcatcaccaactttcctgctgccaagtccttggacatccaggtgcccaacttcccagctgatgagaccaaaggcttccatcaggttccctttgcacccattgtcttcattgagaggactgacttcaaggaggagccagagccaggatttaagcgcctggcttggggccagcctgtgggcctgaggcatacaggctacgtcattgagctgcagcatgttgtcaagggccccagtggttgtgtagagagtctggaggtgacctgcagacgggcagatgctggagagaagccaaaggcctttattcactgggtgtcacagcctttgatgtgtgaggttcgcctctatgagcgactattccagcacaagaaccctgaagatcctactgaggtgcctggtggatttttaagtgacctgaacctggcatcactacacgtggtggatgcagcattagtggactgctctgtggccctggcaaaacccttcgacaagttccagtttgagcgtcttggatatttctccgtggatccagacagccatcagggaaagcttgtctttaaccgaactgtcacactgaaggaagacccaggaaaggtgtgagctggaagcactgaacctacctcatcctcctggagggtgtggctaccctcgccaccccaaattccatgtcaataaagaacagctaaattctcctag

SEQ ID NO: 174037 - DNA, 1689 bp, Homo Sapiens
  misc_feature (34)..(34): n is a, c, g, or t
  misc_feature (56)..(56): n is a, c, g, or t
  misc_feature (66)..(66): n is a, c, g, or t
  misc_feature (76)..(76): n is a, c, g, or t
  misc_feature (86)..(86): n is a, c, g, or t
  misc_feature (139)..(139): n is a, c, g, or t
aaaggtggaaaacccccgccgtcacagggccatnaatgtaaaacagccgtgggtcnatccccagtncccgcacagnaccagttgcnacaagctggaggatcttccctcttagagacaaacagcatagtgcaggttgagncggccatactcccactgcacagggcaatagacgtccagtgcattgcaaagccagaagtaggaaagagcgtcgggcctggaaattccttggtgcagagtaagtgagtgatgtgctcgagggagtcacagagggcagtgtgtgtagtcgtaggtgggatagatgcaccattggtcccctgtgcggtggtgtggtgtatacttgactcgataggctacagggtccatcttgccatcctccatcaccagcttcatccgtagtgtggcctcgccctctgaaaacttgcccttgcgcattgcctcaaagagcagcagtgactcctccatgggacggtctctccagggtgaaggcagagtattatggcctttgagctcctctcctcgctggtggcacacataagccagacccctgcggatgagctccacagcccacgcatatagctggtcaaaatagtcagacgcatatgtgactttgtaaggtgtgtagcctagccaggctaccatgtcacagatggccgtgaagaactttgcttcctccttctcagggttggtgtcatcaaaacgcagaaaacagatgccattgttggccttggcatagccaaagttgaaattgatggctttggcatgtccaatatgcaggattccattgggttctggcgggaaccgggtacgtacctgcccaacagtaatctccaggtgctgctttagtagattcatggtgtgtggagtgaccacatagcctggggtcttgtagttctcaccaggcttgtgcaacttaagggcctccccccggaagttgctccatcagagacagggtctggtcagcagtctcgccattctccaccacatcctttgccgtcctccggtctgtttcttctagccgagcttttgccaccttgaacttcttctccagatcagcctccaacttggggcccagaaggtggaggacctgcatgtccacttcattcttgatcattttgccatctgcccacttcagcacagcccgagcctctcccatcagcagccccatgttgaaatggtaacgttccaccaggagctggggccggtgcctgttaatagcagcctccacagcctcctcaatctgctctggggtcacaatgacacccacgccacattcccgctcgaagtccacagtgtcgatggggtccaaggggtgactccgcacatactcaagggcagcgcttagctggggctcagtgtggatcttcttactggctatgtagcttacaaggaaggagagacgccgggtatccctgagtcgggaggccaagccatataacaggatcccggtagctttgtcaatggtggaacccagggtctgctgagcctgagtagcggcctcgcgcagctgcgcgctcagagccgagttcttgagcgtctcgcgggccttctgctcgctcaggccgaggctagtgaagagcgacagggagtctagagccgccattgcagagcgacgcgtggttcgacgatatcccggaatcggaccgtacagcctgcattttcacaactgtatagtttcactcaaatcctgtg

SEQ ID NO: 174038 - DNA, 508 bp, Homo Sapiens
catctgaagacaggactgccactgacagaagatgtgagctgtgtctaagtccagtcttgtgcccagccgtgtctgcgccttcactctttggaactctgcatacaacatcttagcaccatcttcctgcagctcttccttacctaaataaagaaacagcccaagggcagtatttctaaaagcactgtaacagcttttcattttctccacatatactacaaattctataaagaaagaaattaatttaaaaaaactaagatgtttttctcttctggcttcataaatgccttgctgtataaattgaaatattgatactgaactgtctttttaatgatgacctaactttattcaacccatcggaatttactttttccctgaaataagatcttttccactggtctactacctgaccataaacatgtctgcatttgaattctctaaaccctaaatctgtgtctatgaaaaatacaaatgactattaaatattattctctttactgttctctttcaa

SEQ ID NO: 174039 - DNA, 1378 bp, Homo Sapiens
  misc_feature (1330)..(1330): n is a, c, g, or t
tggtacaccgggtagccggcggtagaggcgctcgggtcccgcaccacctcctgctgccttcccgtcgccgctcccgaagcttttccagatgtccctggtagatttgggaaagaagcttttagaagcggcacgagcaggtcaagatgatgaagttcgtattttgatggcaaatggagctccctttactacagactggctgggaacttctccacttcatctagcagcacagtatggtcattattccaccacagaggtactgctgcgagctggtgtgagcagagatgccagaaccaaagtggaccgaacaccattacatatggcagcttctgagggccatgccagcatagtagaggttttacttaagcatggtgctgatgtcaatgcaaaggacatgttaaagatgacagctctccattgggccacagaacacaatcatcaagaggtggtggaacttttaatcaaatatggtgctgatgtacacacgcaaagtaaattttgtaaaactgcatttgatatttcaatagacaatggaaatgaagatttagcagagatattacagattgctatgcagaaccaaatcaacacaaacccagagagtcctgacactgtgacaatacatgctgcaacaccacagtttatcattggacctggaggggtggtgaacctaacagatgaaacgggtgtatctgctgttcagtttggaaactcttctacatcagtattagctacattagctgccttagctgaagcatctgctccattgtccaattcttcagaaactccagtagtggccacagaagaagtagttactgcagaatctgtggatggtgccattcagcaagtagttagttcagggggtcagcaagtcatcacaatagttacagatggaattcagcttggaaatttgcactctattccaaccagtggaattggtcagcccatcattgtgaccatgccagatggacaacaagtattaacagtaccagcaacagacattgctgaagaaactgttataagtgaagaaccaccagctaagagacaatgtatcgaaataattgaaaaccgggtggaatctgcagaaatagaagagagagaagctcttcagaaacagctggatgaagcaaatcgagaagcacaaaaatatcgacagcagctcctaaagaaagaacaggaagcagaggcctacagacagaagttggaagctatgactcgtcttcagactaataaagaagctgtttaattgaaatgaacatgtagtttgattttacttttggtcaagaaagaatacaatcttgaactgtacacaacaaaggtacagccatgggaatancgaatgatagaagagactaccgatggataattggacttaagccatgac

SEQ ID NO: 174040 - DNA, 380 bp, Homo Sapiens
ggtcagtacggcaccagtaaatgattgatcgccgtgccgatcagttgaaacagcaccagccaggtcaggccacgtaacagcatcccgctctccccctcaaaactcgcgcgcattataagcatgcccgccctatgctccggcattcgccaaaagcatgttgggttgaccaggctgattgcccatgatgatctacattggttctctgtaacccataaaaacgccccttatcaacgggcacataagtgatgaaccaaggagagacgcaatgccctatgtacccgtagcgcagctcaaagattacgtcggcaaggaactgggacgttccgaatggctcaccatcgaccaggcgcgtatcaacctgttcgcggaagccaccggcg

SEQ ID NO: 174041 - DNA, 815 bp, Homo Sapiens
cagcggtttgcagctgcgaaccggtatactgttagctgagcaggcgagagcatcatggataccgacttatatgatgagtttgggaattatattggaccagagcttgattctgatgaagatgatgatgaattgggtagagagaccaaagatcttgatgagatggatgatgatgacgacgacgatgacgtacgagatcatgacgatgaccaccctgggatggaggtggtgctgcatgaggacaagaagtactacccaacagccgaggaggtgtatggtcctgaggtggagaccatagttcaagaggaagacactcagcctctcacagaacccattattaagccagtgaaaaccaagaaattcactctgatggagcagacattacctgttacggtgtatgagatggatttcttggcggatctgatggataactcagagctcatcagaaatgtgaccctttgtggacatctccaccatggcaagacatgttttgtggattgtttaattcaacagactcacccggaaatcagaaagcgctatgaccaagatctgtgctatactgacatcctcttcacagagcaagagagaggtgtaggcatcaaaagcactcctgtgacagtggtcttgccagacaccaaagggaaaatcttatctcttcaatatcatggacactccaggacatgtgaatttctctgatgaggtcacagctggcttgcgcctctcagagggagtgggcccttttcattgatgctgctgagggggtgatgctgaaccccgagcggcctgatcaaagcatgcgggggcaggaaaaggctgga

SEQ ID NO: 174042 - DNA, 878 bp, Homo Sapiens
aatacactatccccatgataagcataacttgcattccatttcctctaataagggtgtctccacagtggattaaatgcctcagccagatgcacaatagactagtcatcattttcacaagctccagttaaaccacacgagtaagggcataggaggtcaaagggggctgctgatgatgaagaaaccgggctgccaggaggaaggcaaataagagcaagagtgttttccactagtaggtcaccttacagatactgacatatctgtctcctggctaggcactccttcctctccaccactccaggaaagatggtccacccggtgtgggatccaaccacagcttacagacacaacaaaaacttcccgtgagagcttgagactgccgaaaacacatctagttttgctttattcttgctacttggaactacagcctgggaacagatacactgaattactgcgacagccagagagaaaatcatgaaataggaggagggaggaagaagagtcaactgggaaaagggaaaggaaattaaatgaacagagaatcaattatatgtgagcctgtctctgcttcatatgttatacaatttaagcaccaagtgtcattgtcctcatttcacatatgagttgacggaagcttagaaaagcctagcaacaggaccaaatgctttgactctactttgcaaactctttccacataatcatggcaggatccgcatgatcctgaactgggagaaacaatatagtcaactaatgctctgtatgtgtctcagaaatagcttgctgctgggtgccactggtacatgcaatgtacccacagacaggccatgaggcctaaatctgttcgatgtcgggctgcgagatggtgatgccggaaggtccag

SEQ ID NO: 174043 - DNA, 913 bp, Homo Sapiens
cagttgagctgtgcgcggcgccttgcgaggcgcgcctttgggcccgtttgggggtgcgtgcaccgggggttgctgggccttcaatctccccctgggttccccctgagaaagagcggcaaggaaggccctgggtgggaggaggttgatgacgtcggatttcggggcagggacacgggtgtgcaccacctccttgcgtttctggagctcccccatctgggcactgcacgaacttggtctgggagcccatagcgtcgtagtcgcgggcgcgtgtgaaggagcggcccagcttggagatcttgcccgtcgccttgtcgatggtgatcacgtccccggcctggaccttgtccttggtcagggactcaatcatcttggtgcccaggtcgtagatggtctccatctctgtggtcttgagggtcagtttgcccaccttggagcccgtccctgttgctggtcgatcaatctggatctccaccacctccccttcgatgatctccgtctcctccttgatgcgaacgccgatggaccgccggaaggcctgcgtcagcgcctcggtcttgctcatctccagggagaagatttcactgccggcgatggctgtgaatggcgtgtcagggcccagggcctgcgccatgcccatggcgatggccgtcttccccgtgcccggctggccagcaataaggactgcccgaccggcaatcttcccttcccggatcatctccagcaccacgccagccgcccgccgtgccgccagctgacccaccatgccttgcgaagcctgccgaggctccaaggcatcgtccagccccagtccccggatgtgggagtgggcaccgattcgctcaatccttgttacatcacggatctccgggactttggttgtggctgtaacggttgccatgcggacgcgtgggtc

SEQ ID NO: 174044 - DNA, 1000 bp, Homo Sapiens
gcaggctggtaccggcctccggaattccgggatatcgtcgacccacgcgtcgggcaaccgttacagccacaaccaaagtcccggagatccgtgatgtaacaaggattgagcgaatcggtgcccactcccacatccggggactggggctggacgatgccttggagcctcggcaggcttcgcaaggcatggtgggtcagctggcggcacggcgggcggctggcgtggtgctggagatgatccgggaagggaagattgccggtcgggcagtccttattgctggccagccgggcacggggaagacggccatcgccatgggcatggcgcaggccctgggccctgacacgccattcacagccatcgccggcagtgaaatcttctccctggagatgagcaagaccgaggcgctgacgcaggccttccggcggtccatcggcgttcgcatcaaggaggagacggagatcatcgaaggggaggtggtggagatccagattgatcgaccagcaacagggacggcctccaaggtgggcaaactgaccctcaagaccacagagatggagaccatctacgacctgggcaccaagatgattgagtccctgaccaaggacaaggtccaggccggggacgtgatcaccatcgacaaggcgacgggcaagatctccaagctgggcgctccttcacacgcgccgcgactacgacgctatggggcttcccagaacccaagtttcgttgcagtggccgaatgggggagcttccagaaaacgcagggaggtggctgccccgtgtccctggcccgagaatcgaagtcattcaattctcgcacccgggtttcctggcgccctctcccgtgacccggggcgattccgtccaaatccggagcttatgccagggtgctgggccgagggcgcggaaacccgggggtccccgagcacttgggtggattctctcacggccgaagagcgcgtttgccccgtcagcggccaaccgccatggggtttcccga

SEQ ID NO: 174045 - DNA, 1274 bp, Homo Sapiens
gtcagctggcggcacggcgggcggctggcgtggtgctggagatgatccgggaagggaagattgccggtcgggcagtccttattgctggccagccgggcacggggaagacggccatcgccatgggcatggcgcaggccctgggccctgacacgccagttcacatgccatcgccggcagtgaaatcttctccctggagatgagcaagaccgaggcgctgacgcaggccttccggcggtccatcggcgttcgcatcaaggaggagacggagatcatcgaaggggaggtggtggagatccagattgatcgaccagcaacagggacgggctccaaggtgggcaaactgaccctcaagaccacagagatggagaccatctacgacctgggcaccaagatgattgagtccctgaccaaggacaaggtccaggccggggacgtgatcaccatcgacaaggcgacgggcaagatctccaagctgggccgctccttcacacgcgcccgcgactacgacgctatgggctcccagaccaagttcgtgcagtgcccagatggggagctccagaaacgcaaggaggtggtgcacaccgtgtccctgcacgagatcgacgtcatcaactctcgcacccagggcttcctggcgctcttctcaggtgacacaggggagatcaagtcagaagtccgtgagcagatcaatgccaaggtggctgagtggcgcgaggagggcaaggcggagatcatccctggagtgctgttcatcgacgaggtccacatgctggacatcgagagcttctccttcctcaaccgggccctggagagtgacatggcgcctgtcctgatcatggccaccaaccgtggcatcacgcgaatccggggcaccagctaccagagccctcacggcatccccatagacctgctggaccggctgcttatcgtctccaccaccccctacagcgagaaagacacgaagcagatcctccgcatccggtgcgaggaagaagatgtggagatgagtgaggacgcctacacggtgctgacccgcatcgggctggagacgtcactgcgctacgccatccagctcatcacagctgccagcttggtgtgccggaaacgcaagggtacagaagtgcaggtggatgacatcaagcgggtctactcactcttcctggacgagtcccgctccacgcagtacatggaaggagtaccaggacgccttcctcttcaacgaactcaaaggcgagaccatggacacctcctgagtaggatgtactccccgaacc

SEQ ID NO: 174046 - DNA, 475 bp, Homo Sapiens
  misc_feature (453)..(453): n is a, c, g, or t
gctgaatggaaaacattctgactgtgtggcaggtgattttcttccttatgaccacttacagtggatatttattgtacttgacccttttatgccctagaatgctgtgagggttaccatgttgaatttgtgcagaagctaaaagcaccagatgtgccagagatgcaatttgtgattatgtttgcactggattgtgatttgaacaggacacttataactaatgagttctttcttttgaggtggggagagggttgtaaatcaagacttcataccctatccttgtagctcggaaattaaggtgtagcttaggctgatacggagagctgcagacagctggacctccttacacccatcagaccttggaataaaccgaaggtgaatgcagaggactctgaggtgccacccaagagccttttaaaataaatagaagtttttaaaaatgctacttaagagtcnctgcagaagcatggagagagag

SEQ ID NO: 174047 - DNA, 120 bp, Homo Sapiens
tggatagaagtatgtttgtttcttagtgtttacaaatattaagtactcttgatacaaaatatacttttaaacttcataacctttttataaaagttggtgcagcaaaatatagcctcgaat

SEQ ID NO: 174048 - DNA, 428 bp, Homo Sapiens
  misc_feature (322)..(322): n is a, c, g, or t
  misc_feature (338)..(338): n is a, c, g, or t
  misc_feature (361)..(361): n is a, c, g, or t
  misc_feature (379)..(379): n is a, c, g, or t
  misc_feature (387)..(387): n is a, c, g, or t
  misc_feature (393)..(393): n is a, c, g, or t
tttgggaatctacaattgcaaagtggttcaaagtcatttcttataccacttcacaatacacacacagatttagggaaacttaaaaaaagttctttaaaaaattctaatagggatttaccctattttactggccaagtgtaaaaagtaaacccctaaatgtgactttctctaattttcccttgtacaatcttattgacattttttataggctaatcccatatatggcataggaaccgagggctattattttgctgcaacaactttttataaaaagggtatgaaggtttaaaaggtatattttggtatccaggggtaccttaanatttggtaaacccctnaggggaccaaaccatacttcccntccaaaaccctcttggcngccctttnggcccnctggtttttaaggggggaggcccccccttttcctg

SEQ ID NO: 174049 - DNA, 530 bp, Homo Sapiens
ttgctttttattttaattatcctgttaagggtatctatcaatggtattttcaagtagatctctgtttcttaaattattggtgaaataattgattactagatatattgtaaaaccaatagatcctggttatacgataaaatatcagctcattggtaggctgaatcaattatttcaagtgcaccttattaacaaaagtatcactggatccaacataaaattttatagtactaaatgtcaagcctaactgtgaattttgttctgtatcttaagtaaatttatgataatgttctcgagctatcaacaaaatatatgtacttttgtgagctatgaattttctaattaaattttacatgctataacatgatttttacatgaatgatactttgtttataactatcaaatgtcagtattttactacaattttattataaagtgtacattatcactaaatgaacttcgattttaaaaatcaaattagctttagttgtatattattttttacaaataaagatagacttgtataaaggcta

SEQ ID NO: 174050 - DNA, 1000 bp, Homo Sapiens
tcccccaactctctcacaacaagaagaaaaccaacccaaaccagtgaagttttttagaacctttagaagggtggtctttattcaggttttactgtaatggtaaggattgactcaagagacagtattagtaaatttattggtgtatggatcaaaagtgaataatgtatgaatgagagctgtaagaaggatttttattttgttataatttagttaccattttcagtgttatttcaaaggttctttgaagaattttggggcagggcatcagattagagttttaaaatttgagtattttggatatcagtgttcctcatgaagatatacatggatattcaattttgatggcttccagatttgtaagattgtatgttgtatataccattctattaagaaacatgtccactgtgctttcaaacatagataaagcatgataaagattattatttaagatatacttgtatttatacctcagatattcttttgggttttgtacctcaaggcttttttcttcttattgtaaatacactttacgtgaatacagtctaagtgaagaaaataaataaaaggaagaggtttataacttgctctatatctgtacagattataatcaataagtgcactattattaaatgtttaaagtaagggaaaagtctgggctgccttccttaatattgcatctcactcccacccttaaaaccacagattgcaaagcatagcattttagcatcaactacaatcaaaagagcgatttgctgaaggaaaaatcggactgcaaatcattccaaggccaaactgcaactgagccacccactcccaaacaggaaaccctggtgaaggttcaggaagcacggagattctctccaacaaaggtccagttaggaaacgacgctgagaggatgacgacaacgtgcaacagcaggaaagatgcttgcaagcagaagttcaggggccaccagtggaatgcccacaaaagttctcttttcccacttttttaattttg

SEQ ID NO: 174051 - DNA, 380 bp, Homo Sapiens
ggtcggacccaatgctgctcacatcacaaggcctcattctagggtattcttctgatttacatcaatttttcatgaggctgattgtcccattttaagaatagtctgaatattataattttttttaaaataaatatccaactgcaaaatcccaactgcaagattttaccaatcagtattttaacattgaagactttagcattttcgataagagtattatttgagcagaaaattccctttaaccttgaagatttaagtccgtaaatttcagacaaatggctttcatttccgtgggttgaaatttagagatctacagtgaggacttttattactacctaaccaaaaccagacttgcacagatctcgcagctctcgggtgtgtgg

SEQ ID NO: 174052 - DNA, 622 bp, Homo Sapiens
cagcctatcctcccccacagaggctgctgcgctacttaccaattgaattaaatgagggctgaaacggcacgcttcagcatgtactgtagtcaccgtggaagaacaagtctttccaatattggggcatgtattgatttctaaaaaatgtctgcctggggaatgaaatatgcacatgtatttcatattcacagatctgcttccgaaaacctctctatttaatatcactcaattatgaatttgttttgctttcagaggaatggaatgcattttagtttttataaatttggggagagacaacactctgcccaggtaagaggagaggaagttcaggggtccagctgtccatactgctggctagaggaggagacagatccgggagaggtcctggagtgttttgccttttcctttctccccctgaccaatccatcctgggaaaccccaatagtgtcattgattgccacatcctgggctgcatcttctagcgcccacctctcccgaccccaggccagggctggacgtgaaagttgggcccctgcctggtctcggtgcatgcccttcctgcccacctgcttgtcttccttttcctaactctattcgtctttctctctcttctacacgaaca

SEQ ID NO: 174053 - DNA, 388 bp, Homo Sapiens
  misc_feature (165)..(228): n is a, c, g, or t
ctcatatcagtggatacaggaatataacagaacgttatttgatgtagccttcttaagccacaggggtttttttgctgagaacttaagaggtcaagatatcccgtggtcctatcctaacccctgcccccattttaaaagattttctctcataataggagtaatacnnnnnnnnnnnnnnnnnnnnnnnnnnnnnnnnnnnnnnnnnnnnnnnnnnnnnnnnnnnnnnnntaaataaataaaaatgcagaaaattttaagaagtcactggatacacggccatgagcttttccctccttcatccaacaggtttttaacactttccccatgcaggaaaatgggctttaatagtggaaagcaaaatagtctcatttatatgaaggagaaatct

SEQ ID NO: 174054 - DNA, 306 bp, Homo Sapiens
ccaacgctgctcacaaatcatgtattccctctcttcagcagtgaactaggctacatgagagcaagggcttgctgggtacttcactatttttgtgaagtgaagttcaaaagtgatcagaaccttcaaacagccttagagctaacaagaagatgtctgattgatgatagagaaatgcctgtgaaagtggaagctgccattgcccttcaagtattgatcagcaatcaagaaaaagctaaagaatatatcacaccattcatcagacctgtaatgcaggctcttcttcaattataagagcacagaaatata

SEQ ID NO: 174055 - DNA, 443 bp, Homo Sapiens
cgacccatgctgctcacaaatgtatcccagtactttgggaggctgagaatgcagaagaatggagtaagagaaaacccgcgaaaatccaaacaacagaccatttgtagctctagtccctgtggctgcagtagagaacagcaacagaaaacacggcctgtagctgtgaaatcaatgacacaattctcggagggagcaagcacatgctagtcccttccttcttcccagtccctcacagcactgacaaggaacactgacaaggagccacaggtggcatccacatggcactcaccatgccagggcagacatggaaccagcacatgtcttaggctagagcccaggttccattttcctacagagagtctccgaagtgcaaaagagaaactcagtcattccttctttacccttgctcacactagtgtgagcagcgttggggggatcctcta

SEQ ID NO: 174056 - DNA, 289 bp, Homo Sapiens
ccatgcactacacactactgaatattattctttaccttcgtgactgtcagggatacctctatttccacagttacctatttggtcccctagaaggaatgcctcaagacttctagtcttgtgtccttacaagctctctctttaggctgaagggtagctaaatctctcatctactaagtttgagacatgtcttattctgagaatctctcttgaagaacagttctgtgttccaactgctaggttctcatcgcctcttctctttcccactgtgatctgttttagcatggactta

SEQ ID NO: 174057 - DNA, 816 bp, Homo Sapiens
  misc_feature (214)..(315): n is a, c, g, or t
  misc_feature (580)..(601): n is a, c, g, or t
  misc_feature (646)..(646): n is a, c, g, or t
  misc_feature (772)..(772): n is a, c, g, or t
ccaacgctgctcacaaggaaaaggaagtgagttaaggacgtactcgtcttggtgagagcgtgagctgctgagatttgggagtctgcgctaggcccgcttggagttctgagccgatggaagagttcactcatgtttgcacccgcggtgatgcgtgcttttcgcaagaacaagactctcggctatggagtccccatgttgagtctcactctgtcannnnnnnnnnnnnnnnnnnnnnnnnnnnnnnnnnnnnnnnnnnnnnnnnnnnnnnnnnnnnnnnnnnnnnnnnnnnnnnnnnnnnnnnnnnnnnnnnnnnnnttgctgattgttggaggttcttttggtcttcgtgagttttctcaaatccgatatgatgctgtgaagagtaaaatggatcctgagcttgaaaaaaaactgaaagagaataaaatatctttagagtcggaatatgagaaaatcaaagactccaagtttgatgactggaagaatattcgaggacccaggccttgggaagatcctgacctcctccaaggaagaaatccagaaagccttaagactaagacaacttgactctgctgattcnnnnnnnnnnnnnnnnnnnnnnaaataaaaatactattaactggacttcctaatatatacttctatncagtggaaaggaaattccaggcccatggaaacttggatatgggtaatttgatgacaaataatctttcactaaaggtcatgtacaggttttttatactttccccagctatttccatcttgtgggatngaaaagtaacaattgttgggcccacgctatattttttacaactc

SEQ ID NO: 174058 - DNA, 754 bp, Homo Sapiens
  misc_feature (430)..(451): n is a, c, g, or t
  misc_feature (680)..(686): n is a, c, g, or t
  misc_feature (690)..(691): n is a, c, g, or t
ggggacgtactcgtcttggtgagagcgtgagctgctgagatttgggagtctgcgctaggcccgcttggagttctgagccgatggaagagttcactcatgtttgcacccgcggtgatgcgtgcttttcgcaagaacaagactctcggctatggagtccccatgttgttgctgattgttggaggttcttttggtcttcgtgagttttctcaaatccgatatgatgctgtgaagagtaaaatggatcctgagcttgaaaaaaaactgaaagagaataaaatatctttagagtcggaatatgagaaaatcaaagactccaagtttgatgactggaagaatattcgaggacccaggccttgggaagatcctgacctcctccaaggaagaaatccagaaagccttaagactaagacaacttgactctgctgattcnnnnnnnnnnnnnnnnnnnnnnaaataaaaatactattaactggacttcctaatatatacttctatcaagtggaaaggaaattccaggcccatggaaacttggatatgggtaatttgatgacaaataatcttcactaaaggtcatgtacaggtttttatacttcccagctattccatctgtggatgaaagtaacaatgttggccacgtatattttacacctcgaaataaaaaatgtgaatactgctccccnnnnnnncaanncacacccacaaacaatcacacaatcaacccaaattccaagggatttctatgtccgggggcggg

SEQ ID NO: 174059 - DNA, 751 bp, Homo Sapiens
  misc_feature (480)..(501): n is a, c, g, or t
gggactaaggaccgagcaccaaataaccaaggaaaaggaagcgagttaaggacgtactcgtcttggtgagagcgtgagctgctgagatttgggagtctgcgctaggcccgcttggagttctgagccgatggaagagttcactcatgtttgcacccgcggtgatgcgtgcttttcgcaagaacaagactctcggctatggagtccccatgttgttgctgattgttggaggttcttttggtcttcgtgagttttctcaaatccgatatgatgctgtgaagagtaaaatggatcctgagcttgaaaaaaaactgaaagagaataaaatatctttagagtcggaatatgagaaaatcaaagactccaagtttgatgactggaagaatattcgaggaccccggccttggggagatcctgacctccctccaaggaagaaatccagaaaggccttaagactaacacaacttggactctgctgattcnnnnnnnnnnnnnnnnnnnnnnaaataaaaatactattaactgggacttcctaatatatacttctatcaagtggaaaggaaattcccggccccatggaaaactttggatatggggtaattttgatggacaaaataattcttccgctaaaagggtcattggtacagggtttttttattacttttcccagccttatttccaatcctggggggatggaaaagttaaaccaattggttggggcccacccgtattattttttaaccacccctcccgc

SEQ ID NO: 174060 - DNA, 241 bp, Homo Sapiens
atatagaggataccccattgaggtaaggttaccatgaggcttgcagagactatctttaacccattattttaacctgataacaagcttcacactgcctgcataacaatataaacgaaaacaagacttaaaaaaactctacactttaaccttgtccctctgctttttaactttttattgtttcatatctttttgtgctatgtcttgaaaagttatagtcatttttgactggttcatcttttag

SEQ ID NO: 174061 - DNA, 908 bp, Homo Sapiens
attctaacaaagcctgagtttcatagattgtgggcacatctagacagatatgtgcatgcttgatggtgcagagaaactgctgacttccaccaacctcatgctccccctggctggccatacagagggattcgttgtcatattgaaaaggctctgaaagatgagtttctaattgaagctcactatctcaggttggtgtttctactgtgtagtcccaagcctgtatccatatcataaaagtggaggcctggtactcctccaggttatctggccagtgtagactcctccatctgaatatgaacctccagggtaagaatttttcagacatgtctatactgaacagtaggatcctgcactttccaaatgtctgcctccttttgttcttcattgacccattctaattcctgttaggtgtgagaagaattgtcttcagttctctctccattctcattcatgatggaatcattgatccattgaccagttgagaaatgattgatgctgaagaagtggtattctattggtaaggcttattaccaaacttccgataatgaagcaggctaccaaaaacttatccagcccaccctaggagtgtttggatctgatcatggatgtagcatacaccaaaatccaccgagacctttgcaaaattaggctacttgttttattttgccagattatcatgggagagtctttaactagttctgaatatttgtaagtctgagtacttcatagaattataaagaaggtacagctgaccccttctcaccatgttgtaaatatttactgagactgggtgcagtactgagggataataatcttctgatttatcaaatcctgactggctagagcaaattgtacactctctttgtgaatggtccctgtaacgtgtatgaccacattttctgggttgc

SEQ ID NO: 174062 - DNA, 373 bp, Homo Sapiens
ggaggatccccttgtaattaacttctaaattgactcagcatagcaaacagcggtttgtggatacagaaatcatatattaagcagaaatgtgtccaatattttgaagcacataaaaagtacgggcgagtttggaactggaaatgtgagcatctacaagtaccatcataactaaatatacccaacgctgctcacaccttagagttgagaaaaggtggctcagagaagcaaagtgactttctctaggatgtttggctcttattgcattatagttcatcataataggcctgtctctcctacatgagtgtgaggtccttaaccatgagaattgctgacctttgcatttctgggagtgaacacagggcccagcacatag

SEQ ID NO: 174063 - DNA, 446 bp, Homo Sapiens
cgggacttaggttaaaaccttcaagacccagtgccaagctggggaacaacacaaaagttcctccctgtcctcaccccatcctgaataatggtttggatgcctcgtccccctcccaaatcctcatgttgaaatgtaattccccagtgttggaagtggagccctggtgggaagtatttggatcatgagagaggatccttcatgaatggctcagcaccatctccttggtgatgagtgagttctcactcaattcacatagatatggttgtttaaaagagtctgagacctctcccctctttctcgccatgtgatatgcctgctcccccttcaccttccgcctttactgtaagcttcctgagcccctcaccagaagctgagcaaatgttggtgccatgccagtacagcctgcagaattgtgagccaaaataaatgtcttttctttataaatt

SEQ ID NO: 174064 - DNA, 570 bp, Homo Sapiens
  misc_feature (372)..(407): n is a, c, g, or t
ccggtacgaggcgcgcgctcggggtcccggtcgcgaggaggaggaggatgtggcgcgcggaggggaaatggctgccgaaaacaagccggaagagcgtttcccaaagtgtattctgcggaactagcacctactgtgttctcaacaccgtgccacctatagaagatgatcatgggaacagcaatagtagtcatgtaaaaatctttttaccgaaaaagctgcttgaatgtctgccgaaatgttcaagtttaccaaaagagaggcaccgctggaacactaatgagagatcatgatgcagccgtccttttggatttctttttaataatgtgtgacccttcacctttgatcccctgacctgcattaccttggtaaccnnnnnnnnnnnnnnnnnnnnnnnnnnnnnnnnnnnnggtgtacaagctgtaacatttcatctttcaaagtgtaacacgctgatttcctcaaatagagatacccctttgagtgataaatttgcaaaatgctgtcttcattttctgtattaaaattcatttcagttttaaaataaagtgtaatctgtgttttcatccttat

SEQ ID NO: 174065 - DNA, 296 bp, Homo Sapiens
tcagagattagttagtattactcaagattatgaacaaatagcacttaggttacctgaaagagttactacaaccccaaagagttgtgttctaagtagtatcttggtaattcagagagatactcatcctacctgaatataaactgagataaatccagtaaagaaagtgtagtaaattctacataagagtctatcattgatttctttttgtggtaaaaatcttagttcatgtgaagaaattccatgtgaatgttttagctatcaaacagtactgtcacctactcatgcacaatcgcgtg

SEQ ID NO: 174066 - DNA, 403 bp, Homo Sapiens
  misc_feature (226)..(236): n is a, c, g, or t
tgcggtcgctctgaggatcccccacgagatttgtgctaggaagtgttctgttagttgactgcaatctgaattgaggtttgcatcctgtgtttttctttctctgacaccaccccatactgttctcttctcagtagactgagtttcaggtcactgtctttatctctgtccattgtgcctagaatattgtagctgctcaaacatacttgagtgaatgtattcaagtccnnnnnnnnnnngagaccatgatagtgagattggattacctgggagttcatctgggtcttttttgtttctcattctcatgtcagaatttaagatttgaaaactgaatttcacatgtatagttttgggaaaagtcatctcttaaatgaaccctacatttatggcaaaatctgcgtggggt

SEQ ID NO: 174067 - DNA, 446 bp, Homo Sapiens
ccgattgtgcagagtgcgccctctactggaggggtgaagaaacctcatcgttacaggtattaaacaaacaggaaaaaaatgggacaaagtctctcttgtatgtatccatataatttaacaaaaagatggataacaggaaaactttttgctttagagaaactttgtttttcatttgaacacttaactactgcttaaataaatgtactgtatgatcatttatatataaagttaagtattaggttttattgaaaacgtttaactttgaagccataatcttacctggaggtctaaggagacctcgtatatcactgataatgttaatgggatatattgacattttagttaactattagtaattctttaaaaatagttaagtgttgctttcttgaatacacttttgaggttatctttcctagtttttggcaaaatcgcgtggggggtcctca

SEQ ID NO: 174068 - DNA, 212 bp, Homo Sapiens
acgcagattttgctaatttaataggacaaatatagtcattcactactgtttggtttgcatttttaaaattattagcagggccagatattttatcattgtatttactggtgatctcttattctatctgtctgtccataccttctgcccatttatctactgaggtttaacaggtttttctatttatcaattttagcatttgaaaaaacattaat

SEQ ID NO: 174069 - DNA, 518 bp, Homo Sapiens
catgataccagaacatagatggaaaaaattgtggttccagacttatatttgtagtagactacagtaccctgaggactctgataataccacttcctaccttatatttatttactagtctagaggataatagtgactgctgctgtctctaatttctatgtaacattacctttatagctcctctatcacttatataaccagtttcttgctaaaatttccttatgatatgaatacctgaaatcatttctattttcctggagggacgttgagtaatacaggtacaatgatcactgaattatattcagtattcttgtttatatagtacatattttacgttacatacaaaaaagtttgaattataactgttgtatatcagctattatgttaaactgcaattagtaccgaaatcataatgaacagaattataattcattaggcgttagttgtatgaatatattgtatgttaatttctcaggaattgagtctgactggattgtatggttatgtgcaaaatctgcgtg

SEQ ID NO: 174070 - DNA, 340 bp, Homo Sapiens
cagatttgtgcccagttggggcacctactttacccttgtgcatatcccctatttatctgtgcccaggacattttgcgtgggctacgtgtagaggtggtggccatacatagttatctttattctggcataaatcagatgtcacgttctcttttgccatatgtaataatcaagagtacccaaaagtgggtcttgaaatataattgtttctgagaggaacttattctcaggatatttttgtaagagggacaaaactaccttaacagtgtgtatccttgcaataagtatattaatgaatacgatacaaccattttatacaggcaaaagatggtttaatgccaaa

SEQ ID NO: 174071 - DNA, 221 bp, Homo Sapiens
aacgctgattgtgcgtctcattgtaaaagaaaacagatattattgaacttatgtaagcaaccatattgccataaattaagaatattcacaaatagtttacaaattctacagaaatcaggcagagagagaaatgtgcttcaaattctattgacaagagtacactctactcaattgctaaaggttgtaaacagctcaaaagaaaaagtgttctccagactctg

SEQ ID NO: 174072 - DNA, 248 bp, Homo Sapiens
taaagtaattatcataaaaatccttcaaggagcaatttcaaacacccttgaaacaaattaaaaaatagaaatgtctcagcaaggaaatagaagatagttttaaagcctaatagaaagttcagaactgacaagcataataacctaagtcaaaaactaattggaagagctcaaccacagaatgtagacagcaaaataaagaatcagtggcgtcaaacatagacccaaaaaagtcatccagcacaagtcgg

SEQ ID NO: 174073 - DNA, 397 bp, Homo Sapiens
acatcctggttactgttcctcaaatcctccataccgcggatatgaatggaaacactctggtaaaatactcatcttaaatgcaacactttaaatataatatatcacagatttttacattaaatagaagaaaaacaattatactctcattcaccagtgtcttattttttgtggcaacttcagaatcggcacattactcctgctttctgtttaaacttctcgacagcagaagttagaacaacaaacaatagacaatccgctgcctgttgtatatactgtgagtgtttggaaaagcaagtagaaaaaagactaaggcactcctaatgttcacccaggtgcacggtcaaacgatttgagtcttcatctgtaatgctagcaccgggggaacgggcacaaaata

SEQ ID NO: 174074 - DNA, 1116 bp, Homo Sapiens
  misc_feature (850)..(873): n is a, c, g, or t
ggagcgaggcctgggtggcgaattcggcacgaggcaaagccctggacgatctgcacaagatgaaccacgtgacaccccccaacgtgtcactgggcgctaccggggggcccccggctgggcccgggggcgtctacgccggcccggagccacctcccgtttacaccaacctcagcagctactccccagcctctgcgtcctcgggaggcgccggggctgccgtcgggaccgggagctcgtacccgacgaccaccatcagctacctcccacacgcgccgcccttcgccggtggccacccggcgcagctgggcttgggccgcggcgcctccaccttcaaggaggaaccgcagaccgtgccggaggcgcgcagccgggacgccacgccgccggtgtcccccatcaacatggaagaccaagagcgcatcaaagtggagcgcaagcggctgcggaaccggctggcggccaccaagtgccggaagcggaagctggagcgcatcgcgcgcctggaggacaaggtgaagacgctcaaggccgagaacgcggggctgtcgagtaccgccggcctcctccgggagcaggtggcccagctcaaacagaaggtcatgacccacgtcagcaacggctgtcagctgctgcttggggtcaagggacacgccttctgaacgtcccctgcccctttacggacaccccctcgcttggacggctgggcacacgcctcccactggggtccagggagcaggcggtgggcacccaccctgggacctaggggcgccgcaaaccacactggactccggccctcctaccctgcgcccagtccttccacctcgacgtttaaaagccccaaccttccacnnnnnnnnnnnnnnnnnnnnnnnnccggctggaaacaagactccgattcatattggaatattaatataattggggaaattttaccagggaaggggaaaaaagggggggccaattcccggcgggaaattgggcccccgtcgcccctgggacttcaagccgccggggggaaatttggggaaaaggaatctctcctgctccttggccctacccatctgtattcgtccgttgctgtggggtacagctacattcgccctctgtcgtatccag

SEQ ID NO: 174075 - DNA, 294 bp, Homo Sapiens
  misc_feature (275)..(275): n is a, c, g, or t
tctgctggaaacagactcgattcatattgaatataatatatttgtgtatttaacagggaggggaagagggggcgattacggcggagctggccccgccgcctggtactcaagcccgcggggacattgggaaggggacccccgccccctgccctcccctctctgcaccgtactgtggaaaagaaacacgcacttagtctctaaagagtttattttaagacgtgtttgtgtttgtgtgtgtttgttctttttattgaatctatttaagtaaaaaaccntaaattggttctttattat

SEQ ID NO: 174076 - DNA, 1382 bp, Homo Sapiens
  misc_feature (1320)..(1324): n is a, c, g, or t
  misc_feature (1330)..(1331): n is a, c, g, or t
  misc_feature (1344)..(1344): n is a, c, g, or t
gctgcgggcgcggggagggggcgccgcgccgcgggggccatggcggagccaggaagccgggagtccgagacccgggcccgcagcccgagtgtcgccgccatggcttcgccgcagctctgccgcgcgctggtgtcggcgcaatgggtggctggaggcgctgctgggccccgcgcgctgggcagcctctgcagctgctggacgcctcctggtacctgccgaagctggggcgcgacgcgcgacgcgagttcgaggagcgccacatcccgggcgccgctttcttcgacatcgaccagtgcagcgaccgcacctcgccctacgaccacatgctgcccggggccgagcatttcgcggagtacgcaggccgcctgggcgtgggcgcggccacccacgtcgtgatctacgacgccagcgaccagggcctctactccgccccgcgcgtctggtggattgttccgcgccttcggccaccacgccgtgtcactgcttgatggcggcctccgccactggctgcgccagaaacctcccgctcaggctccggcaaagaagccaaccttgctcccgccgagttccgcgctcagcttcggaccccgccttcatcaagacctacgaggacatcaaggagaaccctggaatcccggcgcttccagggtggtggactcccgagccacttggcaggttccgctggaacagagccctgagccccgagacggcatttgaacctgggccacaatcccaggtaccgtgaacatccccttcacagacttcctgagccaggaggggctggagaagagccctgaggagatccgccatctgttccaggagaagaaagtggacctgtctaagccactggtggccacgtgtggctctggcgtcacagcctgccacgtggcactaggggcctacctctgcggcaagccagacgtgcccatctacgatggctcctgggtggagtggtacatgcgcgcccggcccgaggatgtcatctcagagggccgggggaagacccactgaagctgggcaggacacaggcgagctcaggtgatgccggccaccagcaatgcctggcctggtacgtccgcttctgctttcaccaagagagtgtttcttcactcaactcaggtggcatttggggtgacatctcaaaggccaggaattccgttgacttgttggctgccagtaggggcgggaggaaaggcggaggcgagccctggaggagggaggccacaactccgagctgcccacctggtgctgagctggggccccgcctcctttctgttttatttttgaggaaataaaataaccaagtgctaaatcttgtannnnncacganncccccccacacancccgcccctcgggggcatttatggtcgggtgccggaaa

SEQ ID NO: 174077 - DNA, 917 bp, Homo Sapiens
ggggcaacctcctggttccaagtgggagacatggtgctgtcggagctagcggcgcgcctcaactgcgccgagtacaagaactgggtgaaggcgggccactgcctgctactgctgcgcagctgcctgcagggtttcgtcggccgcgaggtgctctccttccaccgcggcctactcgccgcagcccccggcctggggccccgcgccgtctgccgcggcggctcacggtgcagccctcgcgcccgccagtttcagcctcagtgtcaggtgtgcgctgaatggaaaagggagattttgagacatcatgtcaacagaaatggagatgtgcactggggaaactgccggccgggccgctggcccgtggacgcctgggaggtggccaaggccttcatgccccgaggactagcagacaaacaaggacctgaggaatgtgatgcagttgctcttttaagtctcatcaactcctgcgatcacttcgtggttgatcgaaagaaagtcacagaggtaattaaatggcgcaatgagatcatgcactcttcagagatgaaagtatctttctacgtgggttccaagatttttcggatggaagatcccgacatttgtcttaattggaattcaacgaaccttcccagagaatccgggggcaggcattactcccacaacccacaacagttgtggtcggcgccccgggaccggcgggcggttgtggtgccccttacggcgccaatttcgtgatcgctgcgcccccgaacacgcggacctcgcggcaacgtcgccgcctcggggccatgatcccacggcgccgtggccatcgccgcatcagcgttctccgcctcgcgtgcgccgcacaattttacccccacaggtaaaccaccgctctcggtcgcgccggtgcacgacgcatcccgtcgtcgtgtacc

SEQ ID NO: 174078 - DNA, 203 bp, Homo Sapiens
agatttctccttcacatacaatctgtttaataagcagtataaaagacattacgcaacagatttatctacaagctggaagtagtttatagatttaaatattttaacttcttcccaactacttgctaaaattggtcatttcattgctaataactaacaatattatatgaaaactagtccatttcctaaaaaatgaagtttcttaa

SEQ ID NO: 174079 - DNA, 498 bp, Homo Sapiens
gcagaaaatctgccatgattatttttttaatgaataaggattttccacaaaacaggcttgctctacatgctagatttttaaacagttcagtgacacaatatgctaactacatacacaacagataatatagtaagaaaacactcaacctgatgaaaagttaaaatcttcattaatacactgaaaattgacataactcatgcctttaaaatcaaaaatacaaaaattaaatgttttcctaaaaagatttccttattttaaggattcatttgaaaatgaagctgcatgtaatttgtacagtaagttgtacaagtaaacaggtaatatacataaaaaattaattgacatactcctcaattatcagttgtccacctttaatttccaatactgtactttcttaacaagcatacaaaatatcaaacttctctttagaaaaagtgccgttctttgacatcctttacacaaaaacagtctgagcctgtggcatgttaatgcagttga

SEQ ID NO: 174080 - DNA, 1456 bp, Homo Sapiens
  misc_feature (46)..(118): n is a, c, g, or t
  misc_feature (137)..(194): n is a, c, g, or t
  misc_feature (657)..(666): n is a, c, g, or t
  misc_feature (769)..(866): n is a, c, g, or t
  misc_feature (888)..(922): n is a, c, g, or t
  misc_feature (995)..(1006): n is a, c, g, or t
  misc_feature (1238)..(1248): n is a, c, g, or t
ccgcgtcgaccttgtttcatttgcttgccccgcccccgagacggannnnnnnnnnnnnnnnnnnnnnnnnnnnnnnnnnnnnnnnnnnnnnnnnnnnnnnnnnnnnnnnnnnnnnnnnaagcttgtccaggttgatnnnnnnnnnnnnnnnnnnnnnnnnnnnnnnnnnnnnnnnnnnnnnnnnnnnnnnnnnngggtgagccaccgtgcccaacctcacttgcttcttatccttacactcccccagccccagagaaactgccacatacaccacaaaaaccaaacatcccccaatgaccttagccccattgctccattcactcccaggtgagaattcaggcaaacgtccacaaaggtcacaggcagcgtacatacggttctgttataccccatatattaccccttcatgtcctaaagaagacattttctcttagagattttcattttagtgtatctttaaaaaaacatcttgtgttaacttgcctccatctttttcttgggtgaggacacccaggaatgacccttttgtgtctatgatgttgctgttcacagcttttcttgataggcctagtacaatcttgggaacagggttactgtatactgaaggtctgacagtagctcttagactcgcctatcttaggtagtcatgctgtgcannnnnnnnnncattggtgtactgtgtttgatttgtctcatatatttggagtttttctgaaaaatggagcagtaatgcagcatcaacctattaaaatacattttaagccttttnnnnnnnnnnnnnnnnnnnnnnnnnnnnnnnnnnnnnnnnnnnnnnnnnnnnnnnnnnnnnnnnnnnnnnnnnnnnnnnnnnnnnnnnnnnnnnnnnncaaaacgccagggagagaagannnnnnnnnnnnnnnnnnnnnnnnnnnnnnnnnnngggccttgggccccccgcttggccttccaaaaaaattcttaaacgccttttccggagacggggcgcgcccccnnnnnnnnnnnngaaagaaagtgccaaaattaattttcccgcagagatatcccccgagaagtcccccgggggggtgttgctatcaccccacaaaaataaaacgccccccgccgggagacaccccggccggtggctggaaagaaaaacccccttttagggagtttcccgcggaggacccttaggagggggtggccacacacacgggggcggatccggggcggggtacttctctataaacagtttnnnnnnnnnnnttttggtgacccctcctgtttaccagccagtgtgggtgatacgctttaaaacaccccccccgtggtagaaaaaaagaattcctcctcccccgaaggggggttttattagctgccctcctggtcggcaccctgttgttggggcgcccctggggtggctccaattggggagccacaatttccccccccgggcctagagcgaggcatacaa

SEQ ID NO: 174081 - DNA, 376 bp, Homo Sapiens
aatcagtttacacaactttatatgtaatcttcaactaaaaaaatttgagctcacttttcatgttatatagcttcaagataaagacttcttagaaacaaaagttcattctcactttgttcaaataggcttacgtatcaggtaatcactggaaagcaaaacttacattaacatacactatgtcaatcagatgtaaaatctgtgctattatttgaagtacagaatttagaatatattcttaaaaatacaattaacacatccccaactttctatgctaaaaaataaagaagactgtactacagagatgccttgattccaagtatcccacttactttccacaaccaaaagttttgttccagttttcataaagctctaaatc

SEQ ID NO: 174082 - DNA, 339 bp, Homo Sapiens
gtaattatactttctaaacgggaaaccatttcccagttaagtaataagaactgcagcgttttcctaaccgcagacctcccagtgaccacagaaccaagaaagtggactgtgttattgcgagcgtcaatttttgggttttgttttgagtcctttctgaaactgtcacttatcaaagagggaggggagaatccactgggaagaggacaggagtagaaatcaagagaattctgtcctagggtaagctcctgatttatggtgggttcttgtgaatgtgcctaatgacctggccgggcacggtggctcatgcactttaaaggaccgaggttgtgtaaactgatt

SEQ ID NO: 174083 - DNA, 698 bp, Homo Sapiens
acgctgataacccagagaaagtgctgcctgaccattctggaagccaacaccagcaccaaccctattttgggtatggattccagcagcgctggtcgccatattcaacatggccgcacccatcgctccttggcgactgatccggcgatcctgccgacgcatctgtccattcacatcactacgcaaactctcgaaactatcgttcaacgccgagaaccgcgcatctgtatagctattggccgccgccatactgttatccaattgcgttttactcactccatcggttgccaaaatacctgcagccatcgtcacctggcgtacattgagcgagctgcctagcgaatccatgcccaccggaactcgtttgcacctcatcacttactctgagagctaccccccgtcgccgaaatgctgacaccacttcctttcgagagcacctgcgcattggcagcaacactcgaatcagacacagccacaccggaaacaaccttttcacaatgcttctagactgatgtgtctaatacttcctgctgggcaaaatatccacaaagtacagaccactgataactccacccatgaagctcaccaaaaaggaaagaagagcagaatacaacagctgtggctagggtacgcctctctgatttcacttttcctgaaagagccataaaggttacctgatggccaggcgcagtggctcacgc

SEQ ID NO: 174084 - DNA, 692 bp, Homo Sapiens
  misc_feature (639)..(640): n is a, c, g, or t
cccatgtgcagtggctacggcacagagccacccagagtgggcagcggcgctggagacacgctctgcaccggaggctcctgaaccgcaggctgctgctggctgtgaccccttgggtaggggacgttgtcgtgccctgcacacaggcttcccagagacccgccgtagtgcagactcaagcggatggcctcagggagcagctgcagcaggcccgcctggccagcacccctgtgtttaccctgtttacccagctgttccagatcgatactgccggctgcttggaggtcgtccgagagaggaaggccctgccacccaggctgccccaggctggtgctcgggacccaccagtgcatcttctgcaggcatcctcaagtgcccagagcaccccaggccaactcttcccaaacgtgccggctcaagaagcctcaaaagaagtgccagccacaaagggagccgaagactggcgtccaacccggtggagcgcaccctaccccaggcgtccctgctggcttcaaccggcccccggcccaagcccaagactgtgtcggagctgcttcaggagaagcggcttcaggaggcccgtgccagggaggccacccggggcccggtggtgctcccgtcccagctgctggtctcctcgtnngtgatcctccagccccctctaccacttgccacccgtcaggagccacttgcca

SEQ ID NO: 174085 - DNA, 638 bp, Homo Sapiens
cttctagaagactaaggctggtctgtgtttgcttgtttgcccacctttggctgatacccagagaacctgggcacttgctgcctgatgcccacccctgccagtcattcctccattcacccagcgggaggtgggatgtgagacagcccacattggaaaatccagaaaaccgggaacagggatttgcccttcacaattctactccccagatcctctcccctggacacaggagacccacagggcaggaccctaagatctggggaaaggaggtcctgagaaccttgaggtacccttagatccttttctacccactttcctatggaggattccaagtcaccacttctctcaccggcttctaccagggtccaggactaaggcgtttttctccatagcctcaacattttgggaatcttcccttaatcacccttgctcctcctgggtgcctggaagatggactggcagaaacctctttgttgcgttttgtgctttgatgccaggaatgccgcctagtttatgctcccggtggggcacacagcggggggcgccaggttttccttgtcccccagctgctctgcccctttccccttcttccctgactccaggcctgaacccctcccgtgctgtaataaatctttgtaaat

SEQ ID NO: 174086 - DNA, 547 bp, Homo Sapiens
  misc_feature (514)..(514): n is a, c, g, or t
  misc_feature (523)..(524): n is a, c, g, or t
cacccccctgactggggggggacctgcctcctactgactgggggggaacctgccacctcctcttgggacctgccccctcctgactgaaacttgctctcccctgactggaacctgtcaccttcagactgggaacagccccctcctgactgaaaccagccccctcctgacagggacctgcccctcctgacagaaaccagccccaacctgactgaaaccagccccaacctgactgaaacctgccaactcctgactgagacctgtcttctcctgaaggggacctgccctgtcctaactgaaacctgccgcctcctgtcagggacctaccctctcctgacagggacctgctgcctcccgactgaagcctgtcacctcctgactaggacgtccccctcctgactgggacctgccctctcgtgacagacacctggccctcctgcctgaaacctggctgctgactgaaagcagctccctcctaacagggacctgccccctactgacaaggaactaccctctnggtgtgggnnaaatcaaaagtccgagtgaatga

SEQ ID NO: 174087 - DNA, 348 bp, Homo Sapiens
ccgacagctgaaatggagtgctcaggaggaagagacaaggagaaaggaaatcacagtgagggggcaagtcccagtgaggagggggcaagagggggcaggttcctgtcaggaagggactaggtctcagtcaggaggggcaggtttcggtcaggagggggcacgtccttgtcaggagagggcgggtcccaatctggagggtgcaagtgcctgtcaggtggggacaggttccagacaacagggggcaggttcctgtcaggaaaggactaggtctcagtcaggagggggcccgtccctgtcaggtgggggcaggggtcgacccggccgcgaatttagtagtagtagtcgacc

SEQ ID NO: 174088 - DNA, 518 bp, Homo Sapiens
ggaagtggttcctgactttggcccagagcacatgcgtggcttgctgaacccaggctcaggtttatccccaaggccccagctttgagaagggggaaggcccctggtaagttattgatgcccccatatttcagctactgctctctttccaaggccttgcatggaaaggcctagccattgtctgaggcagcaatctttggcatctacaggtggcagcagcctttcaccagggctccatctctgaaaagtctcagccatgactttgagctgagcttgggagaagtaaagcaactgttaaggccagcccttgcccctcagacctgccatgaaaggaatgagccctagactgactcctgcagcacccagcgggacaggctgggaccagctgtttgtctccaggtgtcagagtccctcctcctcctccaacctctccaacctactttgtttggaaataccgagctacacttcaaaatgtattcaagggatttccaaataaatttttttctgtactttaaaaaaaa

SEQ ID NO: 174089 - DNA, 1104 bp, Homo Sapiens
  misc_feature (25)..(25): n is a, c, g, or t
  misc_feature (37)..(37): n is a, c, g, or t
  misc_feature (49)..(49): n is a, c, g, or t
  misc_feature (59)..(59): n is a, c, g, or t
  misc_feature (61)..(61): n is a, c, g, or t
  misc_feature (653)..(661): n is a, c, g, or t
  misc_feature (708)..(708): n is a, c, g, or t
  misc_feature (830)..(840): n is a, c, g, or t
aggttcccgggtggcaagtggctcntaaaagtccggnaaacctactttngatctctcanancagtggctccatccccagactagcctggctgctttccgaggccctccacctgctccccttattgccccattcttgtggcttgccgggccacttggcctcccttcttgccggtgacagcgttccatcatctccccggctccccaagggccaactgcttctcactcaggctggtgtcatttcaggaggaccaaagcctgcgtgagcctttttattttcagtaaaatggtgcttttttccttacttcgagatactatatataaataataatgtaaatgacaccttttcgtacggagctgtttgagtattgctttacagagctcactaaatcagcttcaacaatcttgagctctgtggctcctcaccctgtctgcatggaagaccttgctggacgctctcgggagagcagacatagcaccagaagccactgggagaagtgttttcgatccgtgtctgggccacagtagtattcactgtttagtctttgagttccgtaagcagtctcttcatacatttcttacagtcaggagtgtactgactaaatctgtgtaagcaaattgaaatactctttcttttaggtagcgtcacagtgggnnnnnnnnncctccggataatttctatacaatttcccttactgtcaaagggaccanatccttttcctcactgcggaaggggtccgtgcaggtgggataaaggaaaaacctggccctccccaaaagtgacctgcaccatctcttacctcctcaccctaaaccatgggcgcggttgtagnnnnnnnnnnntttcttcgccccctaccctacgcccatttatataacccccccatctcctctccccatttaccttcgaaccctctccctaattcctcacccatcatacgcctcacgacccgttaatttaccttgcttcatcccttccctatcccttcccccctcacttcttttcccttcttacattgccactgccacgcacgcgatcctttatacctacgcacgccccctcgccgcccaaatgttaccgcaccgtttaaccacgcgggggggtgg

SEQ ID NO: 174090 - DNA, 639 bp, Homo Sapiens
  misc_feature (542)..(542): n is a, c, g, or t
  misc_feature (546)..(546): n is a, c, g, or t
  misc_feature (568)..(568): n is a, c, g, or t
  misc_feature (583)..(583): n is a, c, g, or t
  misc_feature (609)..(609): n is a, c, g, or t
  misc_feature (623)..(623): n is a, c, g, or t
tggcaagtggctcctgacagcggccagggacccctgggtcccccaggcctgcagatgtttctatgaggggcagagctcctggtacatccatgtgtggctctgctccacccctgtgccaccccagagccctggggggtggtctccatgcctgccaccctggcatcggctttctgtgccgcctaccacacaaatcagccccagaaggccccggggccttggcttctgctttttataaaacacctcaagcagcactgcagtctcccatctcctcgtgggctaagcatcaccgcttccacgtgtgttgtgttgggtggcagcaaggctgatccagaccccttctgcccccactgccctcatccaggcctctgaccagtagcctgagaggggctttttctaggcttcagagcaggggagaactggaaggggctagaaagctcccgcttgtctggttctcaagctcctgtgagcctcagtcctgagaccagagtcaagaggaagtacacgtcccaatcacccgtgtcaggattcactctcaggagctnggtngcaggagaggcaatagcccctntggcaattgcaggancagctggagcagggttgcggtgtctncacggtgtttttgncctgtcccattggcca

SEQ ID NO: 174091 - DNA, 483 bp, Homo Sapiens
gagaatcctggcactcaccaccctagtcaaatgatcagagtgaacatcatcagtaatgggataaaacaaaatcatgaaccacctgataggttgcaagaagaacaaggcatcttttctgtcatatttttgccaaagatgtgcaatctgaattgagttcaaggaaatgtcaggtaaacccaaattaagggacattttacaaatgtctggtttatcatctttaaatgtaccaaggtcataaaaatgaaggaaagcagaaggaactgtttcagattaaaggagactgaagaggtagggcagaagctaagcacaacacatgattctggactggatacttttgctataaaggacatattagggacaacaggcaaactgtgaatggagtctaactccatttgatgtcagtaacatatcaaagctaatgtcctgatattgatggtttcacagttgaccctccatatctcgctagatccgataggggatcct

SEQ ID NO: 174092 - DNA, 445 bp, Homo Sapiens
caggctcccctatggatctagcgagatacaatagacttacatagtacacatggtactgtatagcaggagtatacacatgatgagtaagtacaaggcttttgctttcagatatgacagtccacagcacacaatgtaaactgcttcattaattaaagggcaaaacatgaagatataagagaaaagagagtaggcataaggctggtttaccagaaagatgtgatcaatcttggacccactatttcacaaataagccttctttgttaccacatcatctgcttagttagaagcagtttccaaactcttaataatccaaataaatgaccaaattccccactaaatctgtagtgagaatgtttcaaagtaacaaggtaggagggagagggtgggggtcacagaactctttgaggatctaatgaaaatcctgcacatatggggctagagcaga

SEQ ID NO: 174093 - DNA, 658 bp, Homo Sapiens
tacggatctagcgaaagctcaaaatgcacaaagccctccttgccagggatgtctgcaggaattcaaagcctagggtgactgtggccctgactgtccagcaacaatgtggctcaaaggcaagacaacattttccaatctcacagaaaacttccaaggaaagcttgttgttttggtttttgaattgttcaatataaatttaatgtaagatacaatgattagaaaaactatgtacggttttatagtaagaggaggaagacagaaagcagagaacaggcctataattctaatctaataccatgcttactactaacagcaagttctccagatttcactttagtgcgctgtgggctccatgaaggaagagtgactatggtcacagaagtctgtctttctttccattttcagtctctatcatcataaagagttgcactgactctgccaagagcttgcctgagaatacaagtggagcacaagtctcatagttaaggcagattctgtttgtggcaaagtttttacactacagatgtttctgcactagaaaaatgactctaagtaggcccctcaaatatattccctagtatttgtgattcagtaaactacaagcattactttccaaaggccatggacataatcaactccaaatgagggagaactctcc

SEQ ID NO: 174094 - DNA, 360 bp, Homo Sapiens
acttgcgagacaagcacttagaacaaaatggctcccttaaaaaactgcgacaaaccagtggggaggtgggtctggccccaacagacccagtcctgcgagagatggagcagaagcttcagcaagaggaagaagaccgacagttggctctgcagttgcagcgcatgttcgacaatgagaggcggactgtgagccggcgaaaaggaagtgtggatcagtatctcctacggtccagcaacatggccggggccaagtagcacctaatgaagtgttacctatttttaaaaggattggagaaggtacctggatccttgtggactgccactgctggctgcctcctctccaactcatcttgaagacact

SEQ ID NO: 174095 - DNA, 397 bp, Homo Sapiens
atgtcttcaagactctctaaaaaataataaggtaaaaggagtacctgtggatgaaagcagcagctaacagctctgtgattcagctagacctagatattgtgcccattccttcccctcagtccattttctgtagcccctttaaaaaccaaaaaacaactttgaagtcactttgggtttaaaataaatagtggtaatttgtataatcaataaagagttcactctgctcttactgaggggacttgtctgaaagctggcttagcggtgtccaggccagagaacatcctgtgtggactcttaacaatgaaacaggagccgcaatggacaaggtgttctgatctccaaacccagctacagggattgaagctaactaccgccactccttcctctcttgaagaca

SEQ ID NO: 174096 - DNA, 355 bp, Homo Sapiens
agtgtcttcaagatgtgcatagccaaactgggatagaaggcaaacctccccaaagactacctgctggttttgagaggggtggtaagacatggcaattcccaggagtagtagaaaataatatgcctgactaccaacagctcaagtatgcttatttgcacatcctagacttggtgtctataagactcagttaccacttttatgttcctgtagctaggagttagcaaaaggaactggggccttccagccgagccactaaacctgtcttatttggaatggggattgtccagcaaagggagcaaacatgaattagatgttaagctattgagctgaagaaaagaaagcagttcacatttag

SEQ ID NO: 174097 - DNA, 677 bp, Homo Sapiens
aagtgtcttcaagacttagttattgtcacactaattgatcgtttaaggcataagatggtctagcattaggaacatgtgaagctaatctgctcaaaaagatcaacaaattaatattgttgctgatatttgcataattggctgcaattatttaatgtttaattgggttgatcaaatgagattcagcaattcacaagtgcattaatataaacagaactggtggcacttaaaatgataatgattaacttatattgcatgttctcttcctttcacttttttcagtgtctacatttcagaccgagcttgtcagcttttttgaaaacacatcagtagaaaccaagattttaaaatgaagtgtcaagacaaaggcaaaacctgagcagttcctaaaaagatttgctgttagaaattttctttgtggcagtcatttattaaggattcaactcgtgatacaccaaaagaagagttgacttcagagatgtgttccatgctctctagcacaggaatgaataaatttataacacctgctttagcctttgttttcaaaagcacaaaggaaaagtgaaagggaaagagaaacaagtgactgagaagtcttgttaaggaatcaggttttttctacctggtaaacattctctattcttttctcaaaagattgctgtaagaaaaaatgtaagccc

SEQ ID NO: 174098 - DNA, 451 bp, Homo Sapiens
  misc_feature (28)..(28): n is a, c, g, or t
  misc_feature (36)..(36): n is a, c, g, or t
  misc_feature (52)..(52): n is a, c, g, or t
aaaccagaattgtgcttccaagaaaganccataggnaagaacgcattttcancttgctgcaaaagttgcaatagaagatctgaaaggtttgaaatgggccaatgagtatcctcatcattgaagcattctatggaggctcccataaacagctggtggatcttcttcaagaagagttaggagactgtgtcgtttatacccttcctgcaaagaaatggcattggagagcccggacatctgctttatatttctctcagaccattcccatcagtgagcattacaggaccctctttgcaagttcagtgcttaacctgaccgaactggctgccttcggcctgaccttgggaaactgaaaaagattctgtattttcacgagaaccagttgatatatcctgtcaagaaatgtcaggagagggatttccaatatggatacaaccaaattctttcatgcctg

SEQ ID NO: 174099 - DNA, 347 bp, Homo Sapiens
aaacttaaggaggagcagaagaatctgtgaatcctcttacaccactgtgtggcattaggccagtagctttacttccgtgtaccataatttttctatctgtaacatggaggatatctctagttttttaaaacaaagacacaaaatattacctatgatgtcaaatacacatatatacatatatgcatataaacatatagaaggactagaaaatgtgactgacttcatcattttccagattttacaaaaggacatttatttctaaaatcagaaaaagtaacttctcaaaaaaaagctgaatagcctaaatgtttacttgatggaccatacgtaaatttcttgaagacact

SEQ ID NO: 174100 - DNA, 341 bp, Homo Sapiens
agtgtcttcaagacttgcaaaaatagaagtaaaatatcactttttagaagttattgatgacagttgctatcacattttaaaatgggcaacaccaaattattattacagacacaatttgaacatctcttacaaacataatgttgagtgaaataaattagacacaatgtatataaactgtaggattccatatatatatgtattatacataatataaagctttgataaaaggcaaaactaaactatggtatttttttaaccttgcccctgcccccaaactatgatattaaggccaaagatattatggcaaaactttaaaaaaagagattatgattacccaggca

SEQ ID NO: 174101 - DNA, 467 bp, Homo Sapiens
ctcgacctgggctcaagtgatcctccacctcagcttcctgagtagctgggaccacagatgggtccgctgtgtgcagaggctccatgggatgtgttgtcttcatagtagcagggcgctgaaccatgggtccgcaaggtgggatttttggactgttgtctggaatatgtttctttgcatcctgcagagtcatgtgctgttcctggggcttggatgatgtaggggaagcaaggtgaaagtggtatcccgtggttccacgttctgtcctgctgtggggctgtccctcacatgctttcagtggctgttgcagaggaagagcctccggaaatctgcgtgggtaaagtgagctccccgggggaaccgtcctcctcccttgagcgctggtgtgtccatagtgtgctgtgatctggattagcagtgagtttttctttcgcggtgtgtgtgtatgatgtttggaccatatgctcctg

SEQ ID NO: 174102 - DNA, 351 bp, Homo Sapiens
agtgtcttcaagatgtctctgtacaaagatgtacaatatgtacaatcactgtaagtgcaagctgtgcaaagcagagtctagaacactaattcatgccaaggcttacaaaaacatttcaacacataagagctaaagcttgaaacagcgttgtggttttttccctgggcaaatgattattttataaacaagtatatgtatatgtcatacagaaagaagagtttgactcctcagctcagtcagtaccatgcagctgactggatacattacagggctgctctcctaggcctctttcttcaaggcgccattttgccacactcaacagttgtctcatcactgagtggctgccactgc

SEQ ID NO: 174103 - DNA, 446 bp, Homo Sapiens
gatttcctgaaaaaccgaggctggtgctccacatgattttcttctaagacccgccgcctttctctctgcagttgttcaatcctctgcttttgtatttcagcttcttctaagttcccttcctctagaaacctctggtctggcctaaatcgagtgtcaataggtggcaataaagactttgatgatggatccatttcatttaattccagcgcaaactgtgtgaagctatagtattgctcgtagcctttcggcataggatttgctctccatacacaggcagaagaggagccgccgccacagtagatgctttcatgccatttcccaaacagccgatgaaccgcttttccactcctgtcaaacactgtgccgttcaatctcatgggcattagtgctccagtattttgcctttataaaattcactttgcagtagcaggaatcatcatgcaggt

SEQ ID NO: 174104 - DNA, 395 bp, Homo Sapiens
gcagtgcaccttgattctgtagtgctctagaggatccgatgttctcaagagcgcggctattggaaaatctcctgaaattgctgcttccctctggcagtcattggaatacactcagatactgcagaccgtgaggattcctatccaaaggcaagctattggtattgaggttgaactagataaaatacaatcccggtgtgaagaatacccattgactcgtgccttttgccagcttattagtactctggtggagagctcatttccttctaatttgggtcctgacttgcagaaccccttggcgttgacccttatttgcagttccttagagactctgtgtttctacgattccgtacaagagcttaccggagagcagctgaaaaggttatgttcagagaaaa

SEQ ID NO: 174105 - DNA, 736 bp, Homo Sapiens
ctcctagagtatacccgagtgtctcagaaacacgtacttaaagtttttatgcttatcaccgcaatgatggcaaacagtaattttatttttcatagtttaggtgtcattgttgccagcacctttagtgctcagtcttcagtgaaaaatataaagtgccaaaaaaatcttgcaagacagaatccatacttaacactctttccaagacactgtgaccatgtacagtagctatttcctgatgaccaaatctctcaacgaatcatgttattaataaatatttttagcactcatcagtattctccaatgtgaccttctcattggagtacacagaaggaaagcaaagaagagcatctgacttctagctctggcttacagcctctctaccaggccgaagcaagagacccgcggcagcagctccccgccactcagacctgggtggtgataacctcaaagaatggctctgttttctattgacagaaaacccacttgattttgcttctgagttagcagtcagaagaccctctaagtacaatagaagtgctcttaacggactctgcctgtgtgactcccaggccccggagtctccatctctctcgtaagccacctgccacagcacagctggaggctgttctctggtgttctcagcgctccggctccctacctggagttgtgcacccgtcccaaacatcctccatgcaagttctgcttcctcttgaagacagtggggatactctaggaa

SEQ ID NO: 174106 - DNA, 720 bp, Homo Sapiens
agtgtcttcaagacaatttggaaacgggagagtaaaaacatatctaaatgaaagattgaaaatggctcaggaatcagtcagcaagttgacttcagcagaagaaagtggagacaaagaaaatcaatcccactgctagcctgaaagaaagactgcgtcagaaggaagccagtgtgaccactaactaagatgaagacacatggaaatgatggcactggaggtgaaggaccttgcacgcatactctttgtgaccacagggttgcaggacgttcttgaaagatgtgtcactaaatgtttgtttttgctcatctctttctgaggtcatctgcagagagtgccccatgccttctttaagaagtccctcattaagccgcaggaacaatggaaaactatttaagggaacattgcagaaatatttgatgactgtttcttgtggaagcccaaagtccactctaagagcagaagaaataccaaaatgtttccaaaatttttttaaaagctgagatttccagctttataaccaaagcttgatatatgtcacattgtcacagaagagagaaaagatcattgaggacagttgccttgggaaagttcaagtctttgtcgttacacactgctgttttgattattggtcttagttttgatcctgttgcagcaaaatcctgcagcatctttctctccaataatgttgcaactcaccaaaactatttcttgaagaacata

SEQ ID NO: 174107 - DNA, 525 bp, Homo Sapiens
taaggaaaacaaaatcaaacaaaatacagctacagcaactcaaatacacaatccttccaggaaggattctttgatagttcatttaaaaacaaatcctcaatttttcaatggctcagaagactgctgcagaccatatgtgctatacgtaggtaataatggaactggaagtacagggaaaagttcaagcctcaaacataatttacagatgggcagagctgattcaactgtaaggacctgtatcagataggtgactgctgcaatacttgcttttcttactaattgaaaagtatatatgaaatttgtccaatacgctgtaggtaggataatgacttaatatgatgaactgcactttttaattgaaagaacattacgtgtatcataaatcacaaaggaaaactaccacactaatacgtggcattctatacctcatgttctaaaaacaaaatgctctatttggcttgggcctcaaaagtctcttcatgttctagattagtcctgaagactgcggggatactctaggagtca

SEQ ID NO: 174108 - DNA, 184 bp, Homo Sapiens
ctcactctgtagctactctaagcaagtaagagtatcttcctgtgcaaagttgctatatcttagaatttaaaaaaaattctcatatatatcatcgatatttcaaacctgattgggtccaaagaaaaaaagtcaggttaatttttagcttggtcaaggcttagattagaaagattttacaaggaat

SEQ ID NO: 174109 - DNA, 761 bp, Homo Sapiens
tcctagagtatcaccgcaggtctcagattatcatgatttcagttgtgctgtgcccggtgtattgttctggtttgctattgtcccctccctgaaacatggaattgttgctaagtagttcatgtttaaaacatgtaagggctccacaacaaaggagaacaagatcaagctctttgtcctgttgcttctcttaccatactcctgtggcctaccgctcacaagaagtaaaaacttgtcacctagccaaggtgttcttaaattataaaggcaaacatttttaagctttacaaattgaggcaatacaactcttctgagttcttcttaaaaacgaacaaacagaactgctatacaataaaagccagccattctagagacggaagaaacagaaagggttgaaaaacaaacatgcaaaagaaggattaaagaaatttggactattgtgcgccaaataaaagaaaacacttctactgtaaaagatttccacatactacactgatattgatgcaacacactgcctatgtataaagtctacagtaaaatattacatgaaaagagatgcttggtgataattaaatcaaataaatgtggttaacacgatactcttatcactaacatgtcataatactatgtaaatgtctactctatatagttatcatacaccttcactgcctgaggatttggcaacaacctaactgaaaatcccagagttggtgtttgaaccaccggccagctctgtcttgaaacactcgggatacctctaggag

SEQ ID NO: 174110 - DNA, 1101 bp, Homo Sapiens
cgggtggcgatttcggcacgaggggtggctgggccagatcagataccaggctttctgactcctgctctaggattctcaccacgtactggctagatttatacttctcaaatcttaatttcctaaaggccggtcatgcccaacatggtcttcattggaggtatcaactgtaagaagaggaaagacttgtctcaggaatttgaagcctacattaatgcttctggagaacatggaattgtggttttctcttggggatcaatggtctcagaaattccagagaagaaagctatggcaattgctgatgctttgggcaaaatccctcagacagtcctgtggcggtacactggaacccgaccatcgaatcttgcgaacaacacgatacttgttaagtggctaccccaaaacgatctgcttggtcacccgatgacccgtgcctttatcacccatgctggttcccatggtgtttatgaaagcatatgcaatggcgttcccatggtgatgatgcccttgtttggtgatcagatggacaatgcaaagcgcatggagactaagggagctggagtgaccctgaatgttctggaaatgacttctgaagatttagaaaatgctctaaaagcagtcatcaatgacaaaagaaagaagcagcagtcaggaagacagatgtgaagagctggagcatgttcagatgagaggagacggaacacggggacacaccaacttgagcaagggacaacaggggaggactgatgactgacttcccaccttttgagtacaaggaaaacatcatgcgcctctccagcctttcccagggacgccccggggggaaccgctgggacttggccctgttcctgggtggaattttgtgatgaagggccaagggcgggccaaaactgggcccccgaagccccacgaacctcacctggtaccaatacccattccctgggacggggattgggtttcctctttggccgtccgtgcttaaaaaggggcccttcatcacccttttaatggtgggggcttatgtggctacccggaaaatgccttgggggaaaaaagggcccaagattaaaaaaagcccccacaattccaagaaccccttggaaa

SEQ ID NO: 174111 - DNA, 420 bp, Homo Sapiens
gggtatcaaagtgtaagcttactttccatccccaagccagcctgccccctgccccatttcccatgagcacacttctggggaaggaaaacaggctcctggccttcactctcagcagagctctggagatgccccaggcatgccctgagctccttctgtgtacctgctcccacttctgagccacccgctgcccctccgcactgctggcaaacccagttcctgcctcagccaggtctccttccctggtttccagtcacacagagcccagcagctttctctttcagtcccataagggcagccttgtgtccctggccacacttccacccgccagggtcttcctccccatctttccatccttcctgctgagcttccacagagctcgtttgcaaacagggggattaaagcatcactgcgcattcgaaa

SEQ ID NO: 174112 - DNA, 443 bp, Homo Sapiens
aaagcataagggatgcagaacagaactgcacttcttgtccctctctcacacttacaaagcttcagaaaacattaaaaagtgcattacctcctaggaattacaaaagatcacccaactgtacaaaactagatatcgctgaagcagagactctgattcctcagttactactgtaaagtgctttgccactctttttgagactccagagactaggaaaatggagatgcacagagagacataaggagctgttttccaagacatcacctgtatcttaaggaaaaaaagaaattcaactggtgggaagtttgaaaagtgaatgtcatgtagactttggaaatccatttgttacatctttaacagaaactgctctgtctctcctggaccgaatgtcacatcctctcgtccgattcctcctgtggatgtaccccgttctgcctgagcatttt

SEQ ID NO: 174113 - DNA, 628 bp, Homo Sapiens
ttggaggcaggaatatttgaaaattcagactggaattccaggccaaaagctcaagaccaccagcctctcctcctgcctggaaaaataagcctttgtgaaagactgatttaccatgtcttggaaaacagctccttatgtctctctgtgcatctccattttcctagtctctggagtctcaaaaagagtggcaaagcactttacagtagtaactgaggaatcagagtctctgcttcagcgatatctagtttgtacagttgggtgatcttttgtaattcctaggaggtaatgcatttttaatgttttctgaagctttgtaagtgtgagagagggacaagaagtgcagttctgttctggaattccttattgctttcaacggacactctttgtgaaaaatccaagtaatattttagttcaaacttgatcttgagccaaggcccactgccacctctgggatgggagtcggacctacataccaagtgacaagttcaccttaacatctgcttccagaatggctttgattcagccgtgccaggcaacagaacagggtcagactcctgctctgttattggcttgaagactaggatcccaaaggggttggaggcagggaatatttgaaaattcaggctgt

SEQ ID NO: 174114 - DNA, 250 bp, Homo Sapiens
cctagttttagaagtttcaatagcagtgtgtgtctgtggccgtctcctggtagccagcatttcagaatgtactatcactggctgagaaaatctcacggtgagaagagtagtgtgtcataagatctgaacaaaaaagctaccaagttgatcagtctcagtatgattcaggatatgattttcaattagcaaatggtgcgactgaagcagagagtggctttgttttgctattgaaacttctaaaactagggga

SEQ ID NO: 174115 - DNA, 406 bp, Homo Sapiens
cggagagtatcgatactggggccaagtggtaagttggtacgctgtctaattctttccttcaaatcttgaatacctcctgtgccaatggatctcttttgatggtttttcgaatcataatagcgctgtaggatcatagcacttctgcttttcaaatatccagtctccacctcaatatagttctccaaataggaaatgaaaatggatttgataagcttagacaagaaagtctgtttatcagtacctaaattaaactccatcagcttgctggaaagattggtggttcttgtatacagatcatagagatttttgagatattgctctgcatcggacttcctacattcttctaactgctctttcacaaaactctgtagtttgatttcaaatacattttgaataagtttagcca

SEQ ID NO: 174116 - DNA, 795 bp, Homo Sapiens
  misc_feature (774)..(774): n is a, c, g, or t
ggactgatctttttctaaatcagaaagtgattaaagtatgcacaaccaaaggcaggtttttctttttcatttattcagcaactatttattaagcatcaactctgtgccaggcacgttactagctgctacatactgtctgaacatgacatacggttaagtaactttacaattattatcaaatacttcaatgtagatatttcttcagttgaaatagcattaactaggataatgctttcatgttattttattgtcttgtgatagaaattcaacttgtaccatctaaaactaggttgctataaaaataggaggatgaagtcaataaagtttatgccagtttaaaaactggaaggaaaaggtaagagctctccattataaaatagttgcattcggttaatttttacacattagtgcattgcgtatatcaactggccctcaatgaagcatttaagtgcttggaattttactaaactgacttttttgcaactttgggagatttttgaggggagtgttgaaaattgccaaacactcacctcttactcaaaacttcaaataaaatacacattttcaagagggagcaccttttatatttgataagttttcattataaaccttataataccagtcacaaagaggttgtctgtctatggtttagcaaacatttgcttttctttttggaagtgtgattgcaattgcagaacagaaagtgagaaaacactgccagcggtgattgctactttgagtagttttttacaactaccattttcccctccatgnaaatatgtgaaaaattatttc

SEQ ID NO: 174117 - DNA, 206 bp, Homo Sapiens
ccgttgtttttaacacgttgtttatagtcaaaatcattcttagtttttgagccaattggatttggcctgctgttcatagcttaccaccccctgatgtattatttgttattcagagaaaatttctgaatactactagtttccttttctgtgcctgtccctgtgctaggcactaaaaatgcaatgattattgatatctaggtgacctg

SEQ ID NO: 174118 - DNA, 742 bp, Homo Sapiens
tccccgtgtgaagtaagaatgcagagctgccaagtatatagggtgctgtgagtgaagaagcttgagtttgccccatcagcttctgcaaggttatttttacatagtctcatgcttatttgtatggggaagttctttttcctggaaaagatttaactaagcacaaaactaaaatccagagcagggataagggaagaatgcaggtgttcttagtggaaatatcagcatcagggaatctttctcttaaacactggaactggtagagttgaagaacttcttctgtgaagcagaaacaaaaacaaaattgtcatgtttagagaaacacaagaaactgtggctttcctctggagataccgggcaaggactcttatgtatactggcatctagtttggtttactgagctgctggaatgagctacccctactccatctgataagcaataacagtgaaaaacacacatttgtcttaggaacttctcataaattcaagctagtccctattttgactgcccaggaaagggaaactcttcagtacaagttggaatctgaaaccccttgttatgcctaacttactttctcaatacttccatcattctttgtatccattcagcttgagggtccacacacacaattgacttgttcttcttccagactctggggggaaataacaattaaatattcaggcctaccttttagtcaacccatactttcataagaaagagttgggtggacatatttccagagag

SEQ ID NO: 174119 - DNA, 360 bp, Homo Sapiens
cccgttgtagtgcaacagatagacattttaaagatattgtgatataactttagaagtgagccaatcttggagtaagttatttggttgttctccaatgcacgtaaatgttatcaacaaaacactaacctctgacatgtgaggccctcgcagctttggattcaaccccaccagctcacacatactgttccacaaatggttgttctcttattcctctgaccccatactacaaatcacctattccagatcccaaactgcccagctccaatttcacttcatctaggaataattattttcataccaaactcttttctttattaaaagtataggattgactaaaaagtaagactgaattatttaatt

SEQ ID NO: 174120 - DNA, 1377 bp, Homo Sapiens
  misc_feature (1345)..(1345): n is a, c, g, or t
  misc_feature (1363)..(1363): n is a, c, g, or t
acaggaataacaaactcacagaccttaattcctgactgtcagaagaaatggattcagtcaataatggatatgctccaaaggcaaggtcttagacctattcctgaagcagaaattggattggcggtgattttcatgactacaaagaattactgtgatcctcagggccatcccagtacaggattaaagacaacaactccaggaccaagcctttcacaaggcgtgtcagttgatgaaaaactaatgccaagcgccccagtgaacactacaacatacgtagctgacacagaatcagagcaagcagatacatgggatttgagtgaaaggccaaaagaaatcaaagtctccaaaatggaacaaaaattcagaatgctttcacaagatgcacccactgtaaaggagtcctgcaaaacaagctctaataataatagtatggtatcaaatactttggctaagatgagaatcccaaactatcagctttcaccaactaaattgccaagtataaataaaagtaaagatagggcttctcagcagcagcagaccaactccatcagaaactactttcagccgtctaccaaaaaaagggaaagggatgaagaaaatcaagaaatgtcttcatgcaaatcagcaagaatagaaacgtcttgttctcttttagaacaaacacaacctgctacaccctcattgtggaaaaataaggagcagcatctatctgagaatgagcctgtggacacaaactcagacaataacttatttacagatacagatttaaaatctattgtgaaaaattctgccagtaaatctcatgctgcagaaaagctaagatcaaataaaaaaagggaaatggatgatgtggccatagaagatgaagtattggaacagttattcaacgacacaaaaccagagttagaaattgatgtgaaagttcaaaaacaggaggaagatgtcaatgttagaaaaaggccaaggatggatatagaaacaaatgacactttcagtgatgaagcagtaccagaaagtagcaaaatatctcaagaaaatgaaatcgggaagaaacgtgaactcaaggaagactcactatggtcagctaaagaaatatctaacaatgacaaacttcaggatgatagtgagatgcttccaaaaaaagctgtcatcgactgaactttagatcactggtgattaaaaactctacttccagaaatccatctgggcataaatgatgattatggtcaactaaaaaatttcaaggaaattcaaaaaggtcacatatcctgggagcagggaaaacttccacacatcattgggagggtccaggtcctaataggctccttcatggcttcggaaaggnttacaggaactaggaggngttggccttagggc

SEQ ID NO: 174121 - DNA, 715 bp, Homo Sapiens
tggagctggctcgcctcaagtctttcgttttcccaggctaggtagggctgtgaggaatgcattaagagggtttgggagtttctgagaacctggaggagcaaagcttgattcagatcctgtctgcctcgctgggtccttggcaggtcccctgtcctcctgggtgggagcttatggggtggtggggcagaaggactgaaggtaattcactcctagatcgcagtggctggctgcttggccagggacagtgatgccaccagggagagcttccgcttggtgaccagggacatgtcccagatggacatagaagcccctctctgcctccctgggattttttagacttttacttttgatttccctaggatggaagagtataggtgggagataagggaagtggggtgagaggagaaaggaaatgttggcatgggcctgtgtgatgtccctgaggcagaagagccggggactgatgggttcaggtgggagctgctgggtgaggcagggaacccttttcactcccattccttagctttagtctaatggagccaaggactgctgggaccttcaaccctgatcttttgtcttccagtcttctcttagtgtcctgctcctaggtttccctctcttctggttcttctcccaggtattctcttcccaggcctctctggccactgctttgtatcagggtttttcacgcttttgtagaactgaggtttcaata

SEQ ID NO: 174122 - DNA, 252 bp, Homo Sapiens
caatttgtggaggctgcttcttggactcaactgctttcaggaattcagtaaaatattctggctttacaattggacgtccacaaatgagtgcacatattgttttaatggtaactttcactgataccatgacaaggtgagtgcattcttctgtccaattgtttacagtaaatcctccaagttgcaatatagcttgatttaaagcagttttcccagagacatctaaacaagaagagcatgcaacggggaggaacg

SEQ ID NO: 174123 - DNA, 738 bp, Homo Sapiens
agcaggagtatagagaatcattgaaatatgtattaaaaacaaagactatttcgagccttcgttataccaggcggggaacaggggaacggagggaagtagagtgcagcctcctcagtagatatgtatatactgtcattgtcctataccaaagatatttctgcaggtagaatctttgaatccttaaacttgttcaaagagattcagaacatgggtggtccatgagtgatctcatttagtaattaccaattaaagtctttccatgaaaaacataggcacctacagggagaatcaagcctgatgttgtggaacctcatggtataacacaggaagacataaccacaaacgctgcttcgggcaaagccatacttccaagaaaaccaaaacatttcttcaaaacttttataaaccaaggagctctccaacacatagtagcccaagggccgcctgttgtttctgataggttttctgcaatttcacagcaaaatcacaaataagatgtggcttctaatgagatatgattctgcttcaggttttctttggtatttgaaatatacaaaaagtaaatcaataaatacaaaaacataactgccagaaggttcttccagaaatgcagcagttagtcgtatttctcccacttcacttctaacttgtctttcaatttttgtgtggtttgccttaactaatacctgatgagctccagagacttccccctcacggggagaacgggtaccgagctcc

SEQ ID NO: 174124 - DNA, 311 bp, Homo Sapiens
  misc_feature (59)..(59): n is a, c, g, or t
  misc_feature (74)..(75): n is a, c, g, or t
  misc_feature (94)..(94): n is a, c, g, or t
  misc_feature (115)..(115): n is a, c, g, or t
ttaaattagaattatggtcagtgctatgaagtagaggcatatagtgctacggctgtgtntgtaaaaagatggcnngggactttttttatgaagnggtgcacttgaggatgtacgngaacacattggtgacttccttcagccacacttggcagctgagatacaggaatgaaggtagttgagttggtttagaagtagggttttgtcagggggaaatgtcccagtctgggagactcaaaaagaagtgttatctgaggaagtagcaattgagctgtgctctaaaacaaaatggagatgaatcaacggggagaacg

SEQ ID NO: 174125 - DNA, 568 bp, Homo Sapiens
actccccgttgagctgtatctgatatcttaaacctatcttcaaatatttaaataccattccaagtaaaagcaaatacccgcctagcatgatcagccattccttacagctgacattatgtgggtgagacagggggaggataaaaaaagatcagtattattgcaatgaaccaaagaaaccctgaaaagaatcctgtgttgccggaaacaaacagaagactgtgtgtgggtgttccagctcgatcacccttgtacctttaggcttccagaaggagggaaggccactggaatccttgcaaatccttgccaggatgctaataaggttattctgtaatcatcaaggtggagtcttcctttccgtgtcattttgagtgtttaattttaacatgacaaagtagattggaaaaagcatcatgaataatgtatactgctccgattaaacactgacagcagaatgatggacatactgaggaaagaacaattagctaattcacaaatgtggatctatctaggcttctatttccaaggctaactgttcaaaattctacacctcgaatttagccaatataaa

SEQ ID NO: 174126 - DNA, 396 bp, Homo Sapiens
cccgttgagaaaaactgaataatgataaactcataatataatggcagcagaaaagaaaggctaggtttagtaactttttcaattaacttacaactgtaaaccagtggacacacctagcttcttcactattagaagccctaataaatctggctacagtttctaaatccaagccttcaagacaatcaaggatttctaaaacttcctatctataataggaaactgacagacaacccaatttcttcctctattttctcctgtggacatgattcaatctctcctaataattaacaacagaaactgcatcatttggtcctccaaaaaccccccactgccacttatccaaggcacaagagcaggcagcagtgttccggaagcagctggcgtcaccacaccaga

SEQ ID NO: 174127 - DNA, 237 bp, Homo Sapiens
cccattaaaagaggcctccttcctccactctctcaacccctctgttgggtaacatgaaaaagactgtatttccctctaaaatggttggggaattgatataccgtgattttaatcctgccaatagggggggaaataacccaagggggaaacctggggttattgaaaataatggggaaattgccaacccccaccaaaaatttttcttcccctttaaaaagagcggtgtgaaatggggtt

SEQ ID NO: 174128 - DNA, 542 bp, Homo Sapiens
gagacgagaagaccgaattcctacccaagacagagagagttacagtcagcctgcatggcatcatcgtggacctccacaacgggattggaaatgggaaaaagatggctttaataatactaggaaaaacagctttccacattctttgaggaatggtggtggaccaagaggacgttccgggtggcataagggtgttgcaggaggctcctcgacttggtttcacaaccatagtaattctggaggtggttggctttcaaatagtggagcagtagattggaatcataatggtacaggaaggaattccagttggctttctgaaggaacaggtggcttttccagttggcatatgaacaacagtaacggaaactggaaatccagtgtacgtagtacaaataattggaattacagtggccctggagacaaatttcaaccaggcagaaacagaaattctaactgtcaaatggaagacatgactatgctatggaacaagaaatctaataagtcaaacaaatacagtcacgacagatattactcgctaacgggga

SEQ ID NO: 174129 - DNA, 305 bp, Homo Sapiens
cgcgttctccccgttgaggggagccgggtctgtgatatatagaaaatggaagaatcagacccggaaagttctaaacggcactgagaggaaaactcccatggaaatccatctttgttttcccagttcggaggcgcgtgggccctgcgtgcgcgggcctcggtctgagcggccggcctcggcagagataattaaaacatttcatgattatgacagccacattctgctgctgcaagctggaggattcatgccacccaaatatttagcaagcatcaaataaaacactggtggcaaaataaaagtaatag

SEQ ID NO: 174130 - DNA, 542 bp, Homo Sapiens
ccgttctccccgttggtcaggcggctgctgactcaggcacaaagtggtttacccgcaggtgctcaaggcccaccttagtgttggcgtgtcttccccctttgtagaccactttgttgatggcgtcaataatctgcctcttggtagagaagtccttcaggaagaattcgtcagtggggtcagagttgtactggacaagccccacttggatggagtcgccatcttcataaactgtgtccactatttcagacacaaaacgaagcacttcctggaaactgtccctcctgaagttgatggaaccatccaacaggaacacaatgtctgctttcttcttctctggccgtgaaggaggaggggtgtccacccctggaggtgcaggagtggctgcggagggtccaaacgagttcatgattctttcttctatgttgggaagctctctgaactctcgcactgtgaagaccagtctggggtcattggtgatggtctgcagctctgttctgtcgatgttccgtctcctacccctaactcacacggggagaaacgga

SEQ ID NO: 174131 - DNA, 645 bp, Homo Sapiens
  misc_feature (571)..(571): n is a, c, g, or t
  misc_feature (574)..(574): n is a, c, g, or t
  misc_feature (582)..(582): n is a, c, g, or t
gaggcctgaggcggcggcgcgaggcagtatggtttgaagtggtgaacatggatttttctcggcttcacatgtacagtcctccccagtgtgtgccggagaacacgggctacacgtatgcgctcagttccagctattcttcagatgctctggattttgagacggagcacaaattggaccctgtatttgattctccacggatgtcccgccgtagtttgcgcctggccacgacagcatgcaccctgggggatggtgaggctgtgggtgccgacagcggcaccagcagcgctgtctccctgaagaaccgagcggccagaacaacaaaacagcgcagaagcacaaacaaatcagcttttagtatcaaccacgtgtcaaggcaggtcacgtcctctggcgtcagccacggcggcactgtcagcctgcaggatgctgtgactcgacggcctcctgtattggacgagtcttggattcgtgaacagaccacagtggaccacttctggggtcttgatgatgatggtgatcttaaaggtggaaataaagctgccattcagggaaacggggatgtgggagccgncgncgcaccgngcacaacggcttctcctgcagcaactgcagcatgctgtccgagcgcaaaggacgtgctcacgg

SEQ ID NO: 174132 - DNA, 624 bp, Homo Sapiens
ccagttcataatttggcttcagtactttggccctggttgaaaagtactcatctcctggtctgacatccaaagagtcactctttgctcgaataaatgctgctcatggattctcccttattcaggtggacaacacaaaggttaccatgaaggaaatcttactgaaggcagtgaagcgaagaaaaggatcccagaaagtttcaggccctaagtaccgcctggagaagcagagcgagcccaatgtcgccgttgacctggacagcactttggagagccagagcgcatgggagttctgcctggtccgcgagaacagttcaagggcagacggggtttttgaggaggattcgcaaattgacatagccacagtacaggatatgcttagtagccatcattacaagtcattcaaagtcagcatgatccacagactgcgattcacaaccgacgtacagctaggtatctctggagacaaagtagagatagaccctgctacgaatcagaaagccagcactaaagttttggattaaagcagaaacccatctcaatagattccgacctgctctgtgcctgtgaccttgcttgagagaaaagccccagtcacgccatatttaaactcaccggtcttagcat

SEQ ID NO: 174133 - DNA, 468 bp, Homo Sapiens
ggggatgtcttctgaagaaatgggcacaaaggaggccttctacaacataaagaacaaaataagggaaagggtaaatgcagttgcatttatcaggataatttaatttgatgtggcatggggggtggtgtataaagtgagctaatacaaaatgatgctggatacagatcatggatgtattgtatacacagtggaaagctggttttatttgggagacaatgggagcttttacattgttgagcaaaggagtgacgagatcagtcttgctttttagaaagattagtttggcagttacttatttgtaaccagaattagacagcaaatcggatgcaggggagaagtcaggtgactattagtctgcgaagtaattctggacaagagcagtggtaatggaattgaaaaggattaaaagtgtttaccaggtttcgccatgattctcacactcacgggagtatagggacggacaggact

SEQ ID NO: 174134 - DNA, 706 bp, Homo Sapiens
ggagggacatgcgtgtccctgggcgtcgtctccggacggggccctgacacggcaccctactgcctggaggccggggagccgacgcctggtttaagtgacacttctccagatgaagggttaatagaggacttgaccatagaagacaaagcagtggagcaactggcagaaggattgctttctcattatttgccagatctgcagagatcaaaacaagccctccaggaactcacaaccaagttgtattgttagacacactggaacaagagatttcaaaatttaaagaatgtcattctatgttggatattaatgctttgtttgctgaggctaaacactatcatgccaagttggtgaatataagaaaagagatgctgatgcttcatgaaaaaacatcaaagttaaaagaattcaaggacgaagatatcaatgaccagcacagagatgtaatcttcctctcggccacacacctgggtgtttcccttatttttttgctgcgtgtttccttcatgtcgtccaatttcttttcttattctcatatttggctagatttttaataccagatctatgtcagctccttctcaaacctaaaattcagagccccagctctgttgagcgtgtattatatttcagttgctttatacatgttatctcataacagcaactaggaggtactacttgttataccattttacaggggagaacggaccga

SEQ ID NO: 174135 - DNA, 634 bp, Homo Sapiens
gcagtaaaaaggatagtttacaaaaagggaagtctttatacaaaataaggattttattttccatttgtaaagagaatccactgtcatgtttgccttgtcaagtcaaaactcaaatagctgtgtatgggtaaaattattccagaaacataatccagacaaaatcaataacgtcatcagcttcctaaccatgtttaagaggaataacttcatgaacattttgccctgaactgaagagttctaaatacttgtaaacctttaggaaaaaatgactgctcgcaggcagctgactggtaagagggtacaccagagactccgggtcactcactgtcagaatattcttatacatacaatgagtctccacgcctgtacaatgagtgtacgtgcaacataattggagtaatggcctctaaaattttacaagtaaactttattgtggccacagatgaacaacaaaacatgacagttaaggttcagactctccccacctattttatcatataaattaaatatggagaggtacacacaaactctattcaaaatgagaagttgtttgccaactctcatttcctaggataacacacatcacactgtttaagagtgggggaaagaatagtcatactgttagagcacaatc

SEQ ID NO: 174136 - DNA, 1148 bp, Homo Sapiens
  misc_feature (377)..(386): n is a, c, g, or t
  misc_feature (470)..(603): n is a, c, g, or t
  misc_feature (669)..(680): n is a, c, g, or t
  misc_feature (789)..(821): n is a, c, g, or t
gtaaaaaattttaggggccctattaccccccaattatgttgccccgtacacctcattgtaccaggcgtggagacctcattgtatgtaataagaatattcctgaacagtgagtgaccccggagtcctctggtgtacccctcttacccagtcagcctgccgcgagcagtcattttttccctaaaggtttacaagtatttagaactcttcagttcagggcaaaatgttcatgaagttattcctcttaaacatggttaggaagctgatgacgttattgattttgtctggattatgtttctggaataattttaccaaaacaagctatttgagttttgacttgacaaggcaaaacatgacagtggattctctttacaaattgnnnnnnnnnntccttattttgtataaaggacttccctttttgtaaactaatcctttttattggtaaaaattgtaaattaaaatgtgcaacttgnnnnnnnnnnnnnnnnnnnnnnnnnnnnnnnnnnnnnnnnnnnnnnnnnnnnnnnnnnnnnnnnnnnnnnnnnnnnnnnnnnnnnnnnnnnnnnnnnnnnnnnnnnnnnnnnnnnnnnnnnnnnnnnnnnnnnntacaatggccaataactgtttcccaaagagcaccggaccagaaagcggtgcttgggctcccccccnnnnnnnnnnnnccgttttcaccccaaaccgctcggagccgcgcccgacaggggagacgtgagggcatttattgatatgtttcccccggagagccccaggggggctgaaatatcggcgtgnnnnnnnnnnnnnnnnnnnnnnnnnnnnnnnnngtaatcgccccccacctttttttacaccacttccccgcccggtggattgttaccgccgtacccgcccacgggggttttgatggccaacccggcgccccgccggaaaggggggttctatatcaacttttcttttttcgccccccgcgagagctgttagatatcttccgccgccctgggggtgcgacacagcgatggtctcattagaacacctgcgcccccatcaatgtgtggcccatctttcttcataccggcggagttgtgggtggaactactcgctctccgcgggcaggcgggtgttagaaaccacacaggggcggtttgtcggcg

SEQ ID NO: 174137 - DNA, 617 bp, Homo Sapiens
  misc_feature (456)..(456): n is a, c, g, or t
ggatccacatcatgttggctacagggagatgctctctttgagaggctcctgggcattgattccatttcaatctcattctggatatgtgttcattgagtaaaggaggagagaccctcatacgctatttaaatgtcacttttttgcctatcccccgttttttggtcatgtttcaattaattgtgaggaaggcgcagctcctctctgcacgtagatcattttttaaagctaatgtaagcacatctaagggaataacatgatttaaggttgaaatggctttagaatcatttgggtttgagggtgtgttattttgagtcatgaatgtacaagctctgtgaatcagaccagcttaaatacccacacctttttttcgtaggtgggcttttcctatcagagcttggctcataaccaaataaagtttttggaaggccatggcttttcacacagttattttatttnatgacgttatctgaaagcagactgttaggagcagtattgagtggctgttcacacttttgaggcaactaaaaaggcttcaaacgttttgatcagtttcttttcaggaaacattgtgctctaacagtatgactattcttttcccccactcttaaacagtgtga

SEQ ID NO: 174138 - DNA, 358 bp, Homo Sapiens
aggtggtcccaggagcctttcctttactacagaggaggcaccagcaggggaactctcttggcacacagttggagtcctcagaaaatgttgattctcatggactcctctctgtctctaatgtacaagcagtttcaagcaggggttcaaggttcctgtggctgctgttgtagtcccataactttaaaatcattctatcatcttggagtactttctcttagtggggagatgatggaatttgttgatcataagaagtatataatgggagaaatctcctttgatttgaagatcacagtgcttgagaaagtgtagatccaacatccaaacatagtcgccatcgggaaggaactggctatacttt

SEQ ID NO: 174139 - DNA, 918 bp, Homo Sapiens
  misc_feature (721)..(745): n is a, c, g, or t
caggctggtccggcccggaattccgggatatcgtcgaccacgcgtccgattcctccctctatccagaactagctgatgtccagtggtacgggcaggaaaaagccaagcccgggaccctcgtgtgagccagcccggcctaatctgaccgcctcaacgccattctgagatcacctcactgcctctcatttgccttacccagacgcaccgtcaccctgcaccagctttggccctcagcactttttttctcctgtctccgcattccctcccccttgaaaacctgactgaggagacattctggaaggttccggtcccactgtgtgtcccctggcgctcttgcccatagagagccagacaccaatcctcaatggcaccttggtggcttccctctgccatgacagcccctaggccaggaaccatcaggggggccagccggcatccaattcctgcggataagtagcgttgggagagaacgggaaaggggacttgagttacagggtgacccagaaagacgattcagctgtgtccagcctgcacccatacgtaggccaaccaagcacttcatgaagaggaggcctcgtggcatattcagtttacacctgaaatattccttgatgggacagcttgtggggatggctatgggggaaggggaggttgagaaaggaagttctcgacaccagaaatgcatcggaggaccacaatcagttctatgctgccaaagatnnnnnnnnnnnnnnnnnnnnnnnnnttaagaggggccaagaggaagacattctttctgcaaggaaatttcttttaaattctgaactgctactacacacaagtgaaagtcaaccctatgtaaactggtgtcccctctctagccctctcccttactggcccacttctctctccgtagagagcctgaaaaactgccccaac

SEQ ID NO: 174140 - DNA, 366 bp, Homo Sapiens
ccgcttgacgtgagaacgatgagatggctttgtcggtatagacactccgtcaacctgctcgtagtagtctagaaacggcctgattgcgtcaatgatcccgggttgcaatttatccatctcgtctaaatatgaaaacagagttcgcacatgcactcacattaccgcggatccactcctgtaactggtcctggaccaaccatgaaagaagaaataggatgcgaagctcaaagggtgcaccaagaggcgcgcaggctccatctgtctcctcatgcactgaaggacgaggtcagagctcttagaatggtaccctcacccccactcgctaggtagcagcctttctaaaaccttatctctaaaaagtggaaa

SEQ ID NO: 174141 - DNA, 468 bp, Homo Sapiens
ttctcttcactgtagaaagtcatgctttagctaatccatcccccactccaatatcttttacaaagaatcaaattttctatgaccttgcaaatctgaaaatatttttactccgaaattcaaagttgggctaagcatgcaatcttaggttgaaaatcagattcactttgtattttgaatgaacagcttcattagagtctaagtttccactgttcctaatggtaagtctaggactattctgattcctaaattttaaaggtagtatgctacctgccttccctcctattgccccctatcccagacaggaactttctgggagttttactttatcgcagaagttctaaaatttcagtcagtgtggcaatttttacattttttaagctagtctctctcaatggtgtacctttgcaaactgaaggctcctgctctatcagttcaaggaaatgttcctgtctttgtgagtttctcttc

SEQ ID NO: 174142 - DNA, 421 bp, Homo Sapiens
tttctccacacatttctcctttcactgctgtcaatgacctgggacatctgcttgggagagctggctttaatactctgactgtggacactgatgaaattcaagttaactatcctggaatgtttgaattgatggaagatttacaaggtatgggtgagagtaactgtgcttggaatagaaaagccctgctgcatcgagacacaatgctggcagctgcggcagtgtacagagaaatgtacagaaatgaagatggttcagtacctgctacataccagatctattacatgataggatggaaatatcatgagtcacaggcaagaccagctgaaagaggttccgcaactgtgtcatttggagagctaggaaaaataaacaaccttatgccaccggggaaaaaatcacaataaatatttattcagtgtta

SEQ ID NO: 174143 - DNA, 600 bp, Homo Sapiens
cagtctcatcttggatggtgggcaatccagcaaaccctgcggagaaaatcatccgagtcctgtttcctgggaacagcacccagtacaacatcctggaagggttggaaaagctcaaacatctagactttctgaagcagccactggccacccaaaaggatctcactggccaggtgcccactcctgtggtgaaacaaacaaaactgaaacagagggctgatagccgagaaagtctgaagccagccgcaaaaccacttcctagcaaatccgtgcgcaaggagtcaaaagaaaaaacccctgaggtcacaaaagtgaatcacgtggaaaagccacccaaagttgaaagcaaagaaaaggtaatggtgaaaaaagacaagccagtaaaaacagagaccaaaccttcagtgactgaaaaggaggttcccagcaaagaagagccatctccagtgaaagccgaggtggctgagaagcaagccacagatgtcaaacccaaagctgccaaggagaagacggtgaaaaaggaaacaaaggtaaagcctgaagacaagaaagaggagaaagaaaagccaaagaaagaagtggctaaaaggcggacggacaccc

SEQ ID NO: 174144 - DNA, 683 bp, Homo Sapiens
tcgcgttctccccgtttgggatactgtgcgcagtgagaactcccgtgccctgggctcggcaggagagaggctcactagtttctgaatcagaagagatagaatcccgtgaagagccagagcccaggctagaagatgatttctttttggagcctgagaagacaaggcgtccccctacagacgcaggattcacagaaagatccaaggcagctgcttcttgttcttcctcctcatcctcctcttctagtttgacatttttaagctcttcaaatttgacttcagtggagtcggaataatctgggaaggtaagaccaccctcaacttgccgcacagagctatgggtgggcctcacaggggcgagggctgccgggcactccgtcatctcatactgctcagaactcagatcccccttggggaagagctcactctgactcacctcctgtggtatttcaagacaaactcggtgcctctttgtccctattcggtgcttggccaggcttgtcttcaggtctccttcctctccatcctccaccccttccatgtcctcctctgggcactcctcctcgttgccagctcttggaggcgggtcactctcctttagaaactcagttgcttctggcgtgggcagagtatggtcataactgtgttgccttcccagctttcaagtttgtgccttctgggtggac

SEQ ID NO: 174145 - DNA, 1275 bp, Homo Sapiens
tgtgtagcaaattcattcccgtcgtatctatttatagttccacaacttgacatgtccatctatgactggcagctaataataaaatgtgttctcatggtccatatcgctcgagtggctctcaatctaccacaccacaaaaccaatattctctgtattaccttccattgtttggtgcataccacatgggtgataacatctctatgcatgtaactgcgctcatacatggatgcactggggagataatcaagatagactctatcaaactctaagagcttagtgattcatcacagactctcatgagttttccagttacaagatctgaaaattctgacttctctatcagaaccaatagtagctattttcttcccatctggtgaaaaacatacgctggttggataagccttacacttggcaaattcatataaatcagtgtcagttttatattcccagttcacatttttggggaatttatattcatgaggaggcccagtccagtattcaatcatcccagatttgtcagaagacactactgctttgtaaactgggtttagccgtatctgagtaagaggtgatgtatggagttcgtcaaaaatatgaagtgggtggttatctcctcggccatcataaatgaaaatttttcccggtactctgtttcggaagcagcaactgaagaaattgcatcccctgggcaatagatccactcacactgtccaggaaaatagccaagtttcaagcatgttgatcatgtcaaagttcactacatcaaacaccgttcattgctttatcatcacccacagaacagaacaatgctccctcagagctaactgcaatactctcaataactcccaggtgactacgaaaatgtttaacaaattcaattccctcttctattttgtttccagaacttgacatgtccatcatgactggcagtaataataaaatctgttttggtgcataccacatgggtgataacatctctatgcatgtaactgcgctcatacatggatgcactggggagattatcaagatagactctttcaaactctaagactttcctcttcttggccagtgttgcctccacaggtaaaggtccaacccagcgctcttcgttctcctcatcgttctcctgggacaccgccactgctactgccagctctctttcgctgagttctgttttttccggttcctccgggtcccggcgccttctacgtctctgctgaaaatcgctaccactttccgccgccatgttgttcgcatcgtcagaaaaggcgcccc

SEQ ID NO: 174146 - DNA, 913 bp, Homo Sapiens
aaagagcaatcggatagaagaacagaatgacaagattagtgaactaattgaacgaaatcagaggtatgttgagcagagtaacctgatgatggagaagaggaacaactcacttcagacagccacagaaaacacacaggcaagagtattgcatgctgaacaagagaaggccaaggtgacagaggagttagcagcggccactgcacaggtctctcatctgcagctgaaaatgactgctcaccaaaaaaaggaaacagagctgcagatgcagctgacagaaagcctgaaggagacagatcttctcaggggccagctcaccaaagtgcaggcaaagctctcagagctccaagaaacctctgagcaagcacagtccaaattcaaaagtgaaaagcagaaccggaaacaactggaactcaaggtgacatccctggaggaggaactgactgaccttcgagttgagaaggagtcccttggaaaagaacctctcagaaaggaaaaagaagtcagctcaagagcgttctcaggccgaggaggagatagatgaaattcgcaagtcataccaggaggaattggacaaacttcgacagctcttgaaaaagactcgagtgtccacagaccaagcagctgcagagcagctgtctttagtacaggctgagctacagacccagggggaagcaaaatgtgaacattttgttggcctccgcccaaggatgaagcacctgcagcagtaccagggaagggtgcgccacaaaaaagaatgccttaccagccagaaagctggggaccaacttttcggggaaaaagtgtggtttatcttccttccaggggccccaaatttcaaaaggttttctccccccccagggccaaaaaatgggaaaacaggccccccctttccgagggggaaactcttagaaag

SEQ ID NO: 174147 - DNA, 1627 bp, Homo Sapiens
gggagacttccggaaggactttggcgagggggcagccattttggggggtgctgatggatacctgcggggtcggctatgttgccctgggggaggccggccccgtggggaacatgactgtggtagactctcctggacaagaggtgctaaatcagcttgatgtcaagacctcttcagaaatgaccagtgcagaggcttccgtagagatgtcattacctacccctttgcctggatttgaggattctcctgatcagaggaggctccctccagagcaggaaagcctctccagactggaacagccagatctttcttcagagatgtcaaaggtctcaaagcctagggcctcaaagcctggccggaagagaggtggtaggacacgaaaaggccccaaaaggccccaacagcctaatcctccatcagccccactggttcctggtctcttagatcaatccaaccctctgtccacccccatgcctaagaaacgaggtcgaaagtccaaggcagagctgctgctgctgaagttgtcaaaagacctagatcggccagaatctcaatctccaaagaggccccctgaggactttgagaccccttctggggaacgaccccgccgaagggctgccccagtggcacttctgtatcttcaggaactggctgaagagctctcaacagccctgcctgcccctgtgtcctgtcctgagggccccaaggtgagcagccccaccaaaccgaagaagatccggcagccagcagcctgtccaggtggagaagaggtggatggtgctccacgggatgaagacttttttctccaggttgaggctgaagatgtggaagaaagtgagggcccaagtgagagctcatctgaacctgagcctgtagtgccccgaagcaccccacgaggatctacttcagggaaacagaaaccacactgccgaggaatggctcccaatggcttaccaaatcatatcatggctcctgtttggaagtgcctccatctcaccaaggacttccgagagcagaaacattcatactgggagtttgctgagtggattcctttagcctggaagtggcacttgttatctgagcttgaggccgctccctacctgccccaggagaagaagtctccattgttttctgaacaacgtgaagggctacctgaagatggcaccctctaccgaataaacagatttagctcgatcacagcacatccagagcgctgggatgtgtccttcttcacggggggaccgctctgggctctggactggtgcccagtgccagagggggcaggagcctcgcaatatgtggctcttttctccagccctgacatgaatgagacacacccactgagccagcttcattcgggtcctgggctgctccagctctggggccttgggaccttgcagcaagaaagctgtcctggcaacagggcccactttgtctatgggattgcttgtgacaacggctgcatctgggacctcaagttctgccccagtggagcatgggaacttccaggcacccctcggaaggctcctctcctgccccggttgggtctcttggctctggcctgctcagacgggaaagtacctgctattccagtctaccccatccggaggcctgctggctcagaaccccc

SEQ ID NO: 174148 - DNA, 414 bp, Homo Sapiens
tgagcaaccatcatgcatgaagtattaattaagcaagtaattcctggtgtgtgcctatctctgtgctggttgctatgggtcaaactcagataagatgactatccttggcattcttagcaatccaaagaattagtgaaatataaagcagtttgtcgtgcagttaaaaactgtggactctagactgtgagtgctaagggagtgagagaaataaaggtcattaaggggcttggctggtcagacctttgtggaaaaggcatgtcttcatgtgggccatgatagatcggtaagatttgagaagggaagaagacagtccataagggagtggagacagtttgagcaaaggcacaaaggaagagtatccttggacaggtttattatgccctgtataccttggccacagagaatggtctgcat

SEQ ID NO: 174149 - DNA, 597 bp, Homo Sapiens
tgaaagcagacagatgtcatgaagaaactcaatgatcgtgtcatgagagtggagtatcacttcctctctccctacgtatctccaaaagagtctcctttccgacatgtcttctggggctccggctctcacacgctgccagctttactggagaacttgaaactgcgtaaacaaaataacggtgcttttaatgaaacgctgttcagaaaccagttggctctagctacttggactattcagggagctgcaaatgccctctctggtgacgtttgggacattgacaatgagttttaaatgtgatacccatagcttccatgagaacagcagggtagtctggtttctagacttgtgctgatcgtgctaaattttcagtagggctacaaaacctgatgttaaaattccatcccatcatcttggtactactagatgtctttaggcagcagcttttaatacagggtagataacctgtacttcaagttaaagtgaataaccacttaaaaaatgtccatgatggaatattcccctatctctagaattttaagtgctttgtaatgggaactgcctctttcctgttgttgttaatgaaaatgtcagaaaccc

SEQ ID NO: 174150 - DNA, 577 bp, Homo Sapiens
ggcagactatatgactgaatacacaacatgaacttttaacttgttccgcaatttccccaaaaggtataaactgattttataatttagaggaaaaagaagtttaaaaagacacatcctaaaggcagtgtactgtgacccagaaaaaaatgaattcagaatccagaaatctgaattgctgccctgatgttacaacagactagctacttatttgaacctgagattctgccccaattgaaaatgttgacggtagttcaaagcgatcttgggaacaacaacaaaaatatgtaaatacaagaaacagtattatctttgcaagcctcaatttaatcaatttaggaagtaactgaaaagtttttaacaagaaaaaggatacaattaaacgtatacttattgtattgtatactttgtttctatattactgacatttactttcactccattctagaattaaaccctcctaaaaccaagataagtttacaaaacctttataatactttatatgaggaattaaggagaaaattactcattaatctcatcatgactctgtagggccagaaagaacctgagatcagacttg

SEQ ID NO: 174151 - DNA, 668 bp, Homo Sapiens
  misc_feature (357)..(451): n is a, c, g, or t
cccatctcgaaagaggaggagggagtaaaagctgaaaaccaacaggaatggagccagtggcaaaaccaaccgacgccactgaccaggcctgaggttaaatgaggagttacggtttaatgggcatagaatttcagttttggaagatgaaaagagttctagagatctgttgcatgacaaacgttacctgacagttaaggagaggagctgctaaatgggtcgtgtgtttctgaatgggttcctgatagtcctgtgaccatgcggaagccagcactcctcatccccaccaacataattcatcatgaggagagacagaaagaaacctttgtggtgtcaagcagcaaaacaaaacaaaaagannnnnnnnnnnnnnnnnnnnnnnnnnnnnnnnnnnnnnnnnnnnnnnnnnnnnnnnnnnnnnnnnnnnnnnnnnnnnnnnnnnnnnnnnnnnnnnatagcaaggctctagataactgggctacagatgaactctggaagcagctgaagaacggttggctgttccatcctaagcagttactctgatctagtccattatgctatatactgttttcgctcatctcttttcagattggaagcctgccttttacacattgctttttaccacacgtttccagaaagtaaatgccgggtagagggtatcactccggcga

SEQ ID NO: 174152 - DNA, 493 bp, Homo Sapiens
ctttgagggagttagcaggcggctagaacttaaaagctttaaataccatactaacgataatagtagactttgactggtaagcagcagtttttaagacttaaaagcaaatggagggacacagtctaatggaaggtttttagacagatcactcagttagcaatgcagagctaaaaacaatcctgatactatttagccagtagtatgacttataaaatatgaggggaatgtccctataccatctctttcactgcttggtttaataaacaaaagtcattaataatttaacagtgagtcttcatacttcactagattatgtaatttgacgtagacaattaaaatgtcatgctttcttctgttgctgattcaattactttggggcaaggtaacaaaagtgaaaccactcaatatacgaaaaccaggtctttaaaaagagaaacatctgaagtttatcatgcttaatattaaaaaacaattaatagtaactccctaacga

SEQ ID NO: 174153 - DNA, 362 bp, Homo Sapiens
taaccaagattaaaaactttaaatccattttgctatatattttccattctaaacctcaaggtagatatatgcaaagtggacaaactgcattaaagcttctagattaaatttttctgactacctgagatagtacatcaatgaagctgcagtggctctttttgcataaaatgatgagccttctagcctctggcatccttttctccttagttcccctcttgcttgtcctctcaagtttgaaacctatctgcttacagcaaaaatgatttaagacaagtacaaaggcgtaccacattaaaaaacgtcttctttaaagaattccaagactttggcagaggatgcaaaaatctttaactccctaacga

SEQ ID NO: 174154 - DNA, 353 bp, Homo Sapiens
acgttacggagttaaaagttatcgttgttagtgctgaaacgagatttgcccgtaattgtaacgctctctgtgattcaatgttgcaacttttgggcggattaagaatggacagacccaacattgctgtcactgttatggctgctaggtacaaaagtgataggtagataaatatgttgtagtatctgccctaaagggactcatagtcaaataaattgcactaggacaacatggtaagggagagtgatgctgtcgagtggtatttgttattctcaaagagcatttccacataatattaagccttaggtaccaaagcaccaaaagtgaaaaataaactaccaaaacccgagttattt

SEQ ID NO: 174155 - DNA, 506 bp, Homo Sapiens
tttaggagttagggaggatatcactccaccttatttttttggaatagtttcagtaagattggtatcagctcttctaccaacatctagtaaaatctggctatgaatccttttggttcaggactttttggggttggtagattttattatgtattcaacgttataactcgttattggtctgttcaggattttgatttcttcctggttcactcttggaaggctgtgtgcttccagatgtttatctatttcctctaaattttctagtttgtgcacataaaaatgtccacagtagtctctaaggatctttgtatttctatggtatccactgtaatgacatctttgccatttctgtgcttatttgaatcttctctcttttcttggttcatctagctggcagtctatcaattttgtttaccctttagaaggacaaacagaactttccgttttgttgattctgtgtgtaattttttggtctcaattctgtttagttctgcacaaatctttgttat

SEQ ID NO: 174156 - DNA, 611 bp, Homo Sapiens
acgaagatcaaaaataaagagggaaagggtcttctctggcactcgttagtcttttacaacattctaaaaaacaatgtaggtaatggaaaaaggctaatttataatcaggcaaacaaatactacaacttcctaggttacagctatctgttagtgactcaagtcctataatcacattcttttaaggctcaaaataatttaaagtttcaacagctttggtcttgaattacttattttcattaaaaaaagacatcaatgccagagttaattatattctactggtattgaatattcgaagactatgccattttccataaaccttgctcaccccgtcaagcaatccttctccttaggaaccctttatgcatcacacggtattctacagaatatggaaaccagcctagctcatagactcttatgggatagtaagtgtgagaatattaatgctgtttatctctaactttatgttacccaccagcactttgggaacagacataattcagtgtaactgaaaataaacttccatgaagttcaattcagatacagtatcttcttgaatatgttccaacattgctccattcaattggtttattgatccataactccctaaacga

SEQ ID NO: 174157 - DNA, 369 bp, Homo Sapiens
aagggttaaatattgctagaagggcatctcattatcaggctgcatgcatcatgcatgttgctagcttcccctacagcactcatctgctttcttaataaaggtactctcaagttaagggccttattcagtaacaggactccctgaccactccagagcaaatatccttcttctcctaccaacagtgagggagctagttttctgtacaggatgtatttctttttgtgtgtattcacacttgcaattattttcattccatgcactctgggattgaaatacaacttgggtaattgggaattggttgtgcattttctccaaacaaaatcagtttagtctgtggtttgggttgttctcctgcccaaaatcacatca

SEQ ID NO: 174158 - DNA, 242 bp, Homo Sapiens
cagcacatggggtactgctgtttcttagcaggttgctcaataggagaggccctgaccctctccagaagtaagctcacccaaccacccagccaccctttcccatttgcagaggcatttaggaaactccccagctgaatctacagaggcacaaattttaagtaatttgactgactttaaaaatctgaaaattggaaaatagtttgccagtttcttacgaacacttaaccatatgacccccaagg

SEQ ID NO: 174159 - DNA, 357 bp, Homo Sapiens
gctcgcacagaatactatcagattgcatcccaggacagtcacactagttgacacattacaccagaatagtgcattaacgtgagcgttctcccacattctgtaaactgatatcttcatagtttcaatcttttatttctctttatcactaggaatgttgggcatctcttcaattacatattaactgttcatcttacaccttctgttgagttgtctgttaatatcatttgttcatttgtcttttgaatctcatgcctttttcctcttgattttcagagttccttttacagttgatattgtaatccttagccctttgagaagatgcagtgtcttttgcaagtcctttcccctttgagtagt

SEQ ID NO: 174160 - DNA, 346 bp, Homo Sapiens
atgggaaaagctaaagagccacagtggtgagatggttgctcactctagcaggtaatttcagtttgaaaggataaaatatatgaatcatagttcacattaaccaaagtacagtgatgaaataacttagactctgaccattccatttttttcttaaagattgccctaaatctatagatgctaatacagtatttgccacaggtataaaacttgtagttactgtcattcaattaagattcttatctgtacagatatacaaatcagaaacttttaaaataaattgaactaatggaattttggctccaatatttagtcactacaatggaaatattaaagcaggcacacgaag

SEQ ID NO: 174161 - DNA, 1344 bp, Homo Sapiens
  misc_feature (1102)..(1102): n is a, c, g, or t
  misc_feature (1211)..(1211): n is a, c, g, or t
gttggtcatggctgctgccaacagattacggaaagaaggaggccagtatggcttagtggctgcgtgtgcagctggagggcagggccatgctatgatagtggaagcttatccaaaataatagatccagaagaagtgacctgaagtttctgtgcaacactcacactaggcaatgccatttcaatgcattactaaatgacatttgtagttcctagctcctcttaggaaaacagttcttgtggccttctattaaatactttgcacttaagccttgccagtgttctgagcttttcaataatcagtttactgctctttcagggatttctaagccaccagaatctcacatgagatgtgtgggtggttgtttttggtctctgttgtcactaaagactaaatgagggtttgcagttgggaaagaggtcaactgagatttggaaatcatctttgtaatatttgcaaattatacttgttcttatctgtgtcctaaagatgtgttctctataaaatacaaaccaacgtgcctaattaattatggaaaaataattcagaatctaaacaccactgaaaacttataaaaaatgtttagatacataaatatggtggtcagcgttaataaagtggagaaatattggaaaaaagaccaacgcgccaaatgaccaccttacaaaccaccccgcccacacagacgccaaccccaaagaaccaaccgtcgcacacgcagcgaaacaacccgaccaccaaccacggcatagagatcttgttccgcgcccccgccgccccccaaaaaaactttctcccaacacacattggcttgggcgagccccagggccccccccggaggaaaagggggcaccgggggaccccgacaccgctggtcccacacagacaagaaatcccggcggctccttgcaacaaaagggcggggtttggcagtatgttccgccccaccctatttataaacaaacacccccccgccgggcggccctttcaaacacgcaggagggaattcctctccaataacacacgtccacccacaagagggagaggcgtcctccaagaagagcgtactctataactggtagagggaacccagcggacaagcgcnggggtatgctctcacacgccgcgccgagtgtctcttcattctaatcgcagcatatataacccgctccacccgacacacacgggtcaagagcaaccagtaccgcggaacnagacgaacctcgaggtgcagcaccattctcatcgctacagcgctcgtctctataccgtccacccacatcaaactcaaaaagcaacctaccctctgtcactacgcacccagtgctttatcagacactacccccg

SEQ ID NO: 174162 - DNA, 603 bp, Homo Sapiens
  misc_feature (478)..(478): n is a, c, g, or t
  misc_feature (518)..(518): n is a, c, g, or t
  misc_feature (527)..(527): n is a, c, g, or t
  misc_feature (534)..(534): n is a, c, g, or t
  misc_feature (543)..(543): n is a, c, g, or t
  misc_feature (548)..(548): n is a, c, g, or t
  misc_feature (564)..(564): n is a, c, g, or t
  misc_feature (579)..(579): n is a, c, g, or t
ggagaaaaggcaggattaaccatgaatgatatcgatgcttttgaatttcatgaagccttctcaggccagattttagcaaactttaaagccatggattctgattggtttgcagaaaactacatgggtagaaaaaccaaggttggattgcctcctttggagaagtttaataactggggtggatctctgtccctgggacacccatttggagccactggctgcaggttggtcatggctgctgccaacagattacggaaagaaggaggccagtatggcttagtggctgcgtgtgcagctggagggcagggccatgctatgatagtggaagcttatccaaaataatagatccagaagaagtgacctgaagtttctgtgcaacactcacactaggcaatgccatttcaatgcattactaaatgacatttgtagttcctagctcctcttaggaaaacagttcttgtggccttctattaaatgagtntgcacttaagccttgccagtgttcttgagcttttcaatantgcagtttnctgctcntttcagggnttttntaaggcaccaggaatnttcaacatggagatnttttgggttggttgttttttgggc

SEQ ID NO: 174163 - DNA, 442 bp, Homo Sapiens
  misc_feature (81)..(81): n is a, c, g, or t
  misc_feature (89)..(187): n is a, c, g, or t
ccttccaacatctcatttctgcatattccctgtatctgtatcgttcttcatcgctgttgaaaacacttggtgtaggactgngatcacgnnnnnnnnnnnnnnnnnnnnnnnnnnnnnnnnnnnnnnnnnnnnnnnnnnnnnnnnnnnnnnnnnnnnnnnnnnnnnnnnnnnnnnnnnnnnnnnnnnnggcataatagtcccactgcttgctggtgtccacaagactaggccacgaaggagcagaaccaggaagatggggaaaggcaacattgccatatggaaatgcacgtgcagaacgactatcataaccagaggaatgtccactttctattgttggtataagagatggaggtggagcgcctggtggaggaggaaaacccggtggtggaatcagaggtggagcagtgctgacagtcggaggaggtggaagaaatgagatgtt

SEQ ID NO: 174164 - DNA, 817 bp, Homo Sapiens
  misc_feature (135)..(176): n is a, c, g, or t
  misc_feature (436)..(531): n is a, c, g, or t
gactataactatcagccgagtagaaggcaggcgacgggcaaatgagaacagcaacatacaggtcctttctgaaagatctgctactgaagtagacaacaattttagcaaaccacctccgtttttccctccaggagnnnnnnnnnnnnnnnnnnnnnnnnnnnnnnnnnnnnnnnnnnctccgactgtcagcactgctccacctctgattccaccaccgggtattccaataactgtaccacctccaggttttcctcctccaccaggcgctccacctccatctcttataccaacaatagaaagtggacattcctctggttatgatagtcgttctgcacgtgcatttccatatggcaatgttgcctttccccatcttcctggttctgctccttcgtggcctagtcttgtggacaccagcaagcagtgggactattatgcnnnnnnnnnnnnnnnnnnnnnnnnnnnnnnnnnnnnnnnnnnnnnnnnnnnnnnnnnnnnnnnnnnnnnnnnnnnnnnnnnnnnnnnnnnnnnnnnggagcgtgatcacagtcctacaccaagtgttttcaacagcgatgaagaacgatacagatacagggaatatgcagaaagaggttatgagcgtcacagagcaagtcgagaaaaagaagaacgacatagagaaagacgacacagggagaaagaggaaaccagacataagtcttctcgaagtaatagtagacgtcgccatgaaagtgaagaaggagatagtcacaggagacacaaacacaaaaaatctaaagaagcaaagaaggacaagaagcgggcaggagcctggccc

SEQ ID NO: 174165 - DNA, 429 bp, Homo Sapiens
cagttagagactgaatcaaggtccagagaaggtggaggaatcctgatactgagcgaaatcttcccaaggctgcagacaccgacggatttgctttgggagccagagtactgccgccaccagagtccggagccatgagcgggtttaattttggaggcactggggcccctacaggcgggttcacgtttggcactgcaaagacggcaacaaccacaccgtgcctgaccagggctcttttagcaaggaaaacgtgaggaatgaatggctgttggtgtgcaacaaatcatacttgctacatgttgtgaaacctgaagttatttgttagtctgtatgaagaatgtaccccagagatgcaccctgtatctgccttatgtctcttacaatggaggttctctcctgttatattgctgaataaactatgtgaactgctaa

SEQ ID NO: 174166 - DNA, 917 bp, Homo Sapiens
cgaaagggcgggaaaggcagttggagaagaggtaagcggttactcactccatggctgcagcaaggagaggcggcggcggcctcggctgaagaaagaagaaacccaccttgtcccatccacatcaggacatcccagctggagttcaaccttcatcccttctgtggcagttaggagactgaatcaaggtccagagaaggtggaggaatcctgatactgagcgaaatcttcccaaggctgcagacaccgacggatttgctttgggagccagagtagctgccgccaccagagtccggagccatgagcgggtttaattttggaggcactggggcccctacaggcgggttcacgtttggcactgcaaagacggcaacaaccacacctgctacagggttttctttctccacctctggcactggagggtttaattttggggctcccttccaaccagccacaagtaccccttccaccggcctgttctcacttgccacccagactccggccacacagacgacaggcttcacttttggaacagcgactcttgcttcggggggaactggattttctttggggatcggtgcttcaaagctcaacttgagcaacacagctgccaccccagccatggcaaaccccagcggctttgggctgggcagcagcaacctcactaatgccatatcgagcaccgtcacctccagccagggcacagcacccacccggcttttgtgtttgggcccctccaaccacctctgtgggcttccagctaccaccatctgggagggcttctcatttccctggggggaaacaacggccccaaacccctcccgggtttcaaccatttgggcttccaaacaagggaaattttcaggcccccagccccccaccggggaaccccttggccccaccgtttggggcccccttta

SEQ ID NO: 174167 - DNA, 1049 bp, Homo Sapiens
  misc_feature (671)..(681): n is a, c, g, or t
ctcctagaggaaaaacccaatgtcgtccaggactccattcaggcagtaacagttcagaggaagtgacacgctctaaatacaagtctaatgatacagctgaaacgttaactcagagggtcttttggagcaagtagttttcagaaagcgtctgctctctaggacggtaaggatcctctacaagggcacgtgcagatccagggcgctggagcgtcaggcatgggcaccattttcatgcttcaactcaaactccagggtggtagtgagctcaacggtccctcattccacaaaacatgacagcaaattcatcttctaaaaaaagttttgttttgtttttacccattcaacaggaaaaaaaattagacacacacgatgaaatttacaaccagcagcatcatccatcacactgtctgtactaccagatcctacacttaaagctcagcattattggtataaaaacttaagacggcattagaattcttaagaaaaggtgtaaaatttaaaaagatgtgcaaacaacaaagaatgcccgaccctgaaccagacctaaagcaccttccagttcctccacacatcatgccccaacaccatccagcccaatcggacaccaggacagtgagggacgggtggctgttcagtgggcaacagatctggaaggaaagattttccaaagnnnnnnnnnnngtgtctgccaaatttgaaaaattaaaagttatctgtctagcagaaaaatcaaatgggtaaattagcactttagaccgataacagataataaaatgacaaatcagaatgaacaaaaaatcattaaccttttgatttcagtattttcaagagattttatcagaatactctaaatgacaaaatgactcatggtttcttatgtttgctaaaaagcaataaagggatgagaaatatgaagtctcacagaatatcaaatgactgaatttaagaacacaatttctgccaaaatagatgctttgtttttaaggatacttacatttcacattagatcagtctgattgataagctgacaaaaaaaatactcctttatt

SEQ ID NO: 174168 - DNA, 379 bp, Homo Sapiens
tctctagagtctccccgcgctaactgtgaaaagaaataagcgcaccagtgaggttatgggagaatacctattgataggctttcaattcatacattcttattgaaagagaggcacacacacacacgttttctaagctgtagtctttcagtgctttgctttccttttatatatactctttatgtctctctatgactgtcttaaattttcactattgagattagtggttttcaaccttaacatattagactcacctggggagtccattttatcagcattttatttgaaggtttgaaaattacactatgaattgtatgacatgcacaagccctaaactccaaatcaggaaacgttgaacctattgagtttcacatttggcgcg

SEQ ID NO: 174169 - DNA, 358 bp, Homo Sapiens
agctcggtacccgcgccaaatgtgaaatatgttggctttaagtttttaaatcagactgctttggtaaagtaaagccgagaaagttctatattatatagccagctcactcttctctacttttaaagattagaaaacaaagaaatgctttcaagctctttagctctcatgaacaatttaaatttaatctgtgcaacgaaaaacaacttccttcaacaccaatcaaaaaatgatgtatttttaccgaattatcttctcagaaggctctaaagctccaggtactcccacacccaccacaccactactctttctccaaagcttaataggaaccattagcgaactgcagctttcacatttggcg

SEQ ID NO: 174170 - DNA, 491 bp, Homo Sapiens
aattgagagaattcttcaccagaaagtttgtcttgctagaaatgataacagataatctttagagagaaagaaaatgatttcagtcagaaatttggacctacataaggaaagaaagcacattacagaaggaataaatgaaggcaaaataaactctttttcttattcctaactgacagacaacagtttgttcaaaacaaataatagcaacaatgtgtcagtgattacagcttatggataagtaaaatgaatgacagcaataaggaagaggacaaaggaattgggaatattctgttataaagtaattgtactacttgttaagtggtatagtgtcatttgaaagtgaacttagattagttctaaatgtacatagagtgtccccgtggtccgtgacttacagtttttcaacttgaccattgtgcaaaaccagtatgtactggagtacctataaaaccagttcgtttttcacatgtggcgcggggatactctagagt

SEQ ID NO: 174171 - DNA, 574 bp, Homo Sapiens
ccctctctagagtatccccgcgccaaatgtgaaaaagtaaagccagtatttgaggaaccaccaaatccacaaatgtggaaataagcctgcagcagatgaaagccaaggatcctagcttgcaagaagtcaacctcaacaacattaagaacattccaattccaaccctgagggaatttgcaaaggctctggaggccaacactcacgtgaagaagttcagcctggccgcaactcgcagcaatgaccctgtggccattgtgagtaaaattcttagaaatataacatgaagttatttaattcactggaaactctaattactttgtttcattagctaacaattttttagatctggaaaacttaccttctacacagttagtgagcaaaattatagttacaatgcaatagttaaacttcagaactgaactgtcagatgctttaagttatctggaattttgtcagcattacagttttcagagaaagaaacaagataagtttggcatttaactaactgaatatttagagtttgctctgtgcttaggatacattttctaaaactttcacatttggcgcgggtacc

SEQ ID NO: 174172 - DNA, 1202 bp, Homo Sapiens
ttggcgcatggggcctgggagggcccctatggccctatacccttgagggtcacaggtatggggctccaaaccggggctagtgacagtgaggtccctgattgagtgggtccacctgcttggcccccttttcgtcccagctgcccctgtagccccctgccgtatacttgcttgcccaggggggggcccgcctccagggtaaatggataaagatagccagcctgcgccctgctgcagacagatccagttggctaaggccaggaagggaaggcccggccaggccttgccacctgcccccagaggcctgtgggaaaaggacaggtcaggaagggtggggacaggggctcgaccggctcagatccaagatggtgccacgcttgcttgctgagtcccccatgagctggggtactgcactggggccagcgactagttagacaggaggcagcagcttctcaagaaattccttcacagctgccatctcctgaggacaggagctgtgcatgacacccgggtatgtcttgaactggaccctggcaggtgtgacaacagaccggagcttctcagccgtcagggccccaaaccgtacgggcaccatggggtccagctccccatggcactggagtatggccaggtccttggcactgccattagctgcctgggggaaggcccggtgcagaggcagccagcagctcaacgccacgatgccagccagagggtgggggcaggtgagggccgtgtagagggacagggccccgccctgtgaaaagcctcccaggacgattcgattggcagggatcccgttcttcatttcatgctcaatcaaggccttgatgttctctgctgccttcttgatgccagcctcgtcctctggggcatctggactcagccccatcaggtcaaaccaggagggcatcaccatcttcatgttgagggtcacagggatcctaggcgcatggggacagatgtacttgacgtgagggagccggatggtggagagggcgtcagcccagctgtgccctgtgtctccaagtccatgtaaaaaaataaccgcggccgtttcccgctcagctccagacacggtggcagcatcggtgagcaggggcacagacatggtgttaccacacatacaccacacggctccacggcgggggcctccactgcctgggacttccgaggccgcttgggcgattctcctctttctcccg

SEQ ID NO: 174173 - DNA, 361 bp, Homo Sapiens
  misc_feature (341)..(341): n is a, c, g, or t
cgagtgggtccctgcctttgagcatgagtaccgcagtggctcccagcacatctgcaagaaggaggaaatgcactacaaggccgtccacaacacggctgtgctcttcctacagaacgaccctggctttgccaagtgggcgccgacacctgaacggctgcaggagctgagtgctgcctaccggcagtcaggccgcagccacagctctggttcttcctcatcgtcctcctcggaggccaaggaccgggactcgggccgtgagcagggtcctagccgcgagcctcaccccacttaacatatcctgcggggaggaggagccccaggggtgctagtctggactgctnggactcgggcccctgggctt

SEQ ID NO: 174174 - DNA, 830 bp, Homo Sapiens
cgagtgggtccctgctgctcggcatgttgcgggcgatctcggcctgaggtgtgcccaggtccaccagcagggtggtgatctgggcctggaactccaaggaagccgggtgcttcagcacactcaacaggtgcagcttcagattcttacgcacactgctcacctgcgatttggccagcgtcgggggcaggttggcatgcagagtttcataggcctggatcacctcagacatgaacatgggtctctggcgggcgatattggcaagggagcccagcgctgtggtcagcttgatggaggagatggcaggtgtgcaccatgaaccttaagcagctgctccaagcctgccttgccctctttcccatagcacgttgtactggatgtaggggtggtcacgaggaatgcggtccaggctgatatcatgctcctggcgtcggggtatctctgagtcagccatgcggggtgacagggtgacaatgaggccctccacaaacttgatggcgtgggtgcggatgccgtcattgtcagagtccaatagcaggatgatgtccccccgccatggcagataccatgtcccagcaggcctcctgtagctcgctaatgacccgtgactttaccatccactgcagggccaccttgtagagctgggtcatggtgaggatagccttcttcaccacgttcacattctcgtccctcaagagcatgttgaggtttgcaatgagtttcagcagcaactcaatgtctcgcttgcatgcctcctcgatgaagccgatgacaattttcgcacttcgattgacttgtctgcttggaatgcgatgatctcatccaggaatttg

SEQ ID NO: 174175 - DNA, 1138 bp, Homo Sapiens
ggggtttaatagtatctgagggatttggtggcttcatgtaatgttctcattaatgaatacttcctaatatcgctggctctactaatattttccaatttgctgggatgtcacctagcaatagcttggattatatagaaagtaaactgtggtcaatacttgcatttaattagacgaaacggggagtaattatgacacgaagtacttatgtttatttcttagtgagctggattatcttgaacctgtgctattaaatggaaatttccatacatcttccccatactattttttataaaagagcctattcaatagctcagaggttgaactctggttaaacaagataatatgttattaataaaaatagaagaagaaagaataaagcttagtcctgtgtctttaaaaattaaaaattttacttgattcccatctatgggctttagacctattactgggtggagtcttaaagttataattgttcaatatgttttttgaacagtgtgctaaatcaatagcaaacccactgccatattagttattctgaatatactaaaaaaatccagctagattgcagtttaataattaaactgtacatactgtgcatataatgaatttttatcttatgtaaattatttttagaacacaagttgggaaatgtggcttctgttcatttcgtttaattaaagctacctcctaaactatagtggctgccagtagcagactgttaaattgtggtttatatactttttgcattgtaaatagtctttgttgtacattgtcagtgtaataaaaacagaatctttgtatatcaaaatcatgtagtttgtataaaatgtgggaaggatttatttacagtgtgttgtaattttgtaaggccaactatttacaagttttaaaaattgctatcatgtatatttacacatctgataaatattaaatcataacttggtaagaaactcctaattaaaaggttttttccaaaattcaggttattgaaaatttttcatttttattcctttaaaaaactagaataaccggatattttaaaagtgtttaatcttttgtggctaatatgggaatggaaatacactaattggacctccggtgtttttggaatttatttaaagggttcctaacaaaaggc

SEQ ID NO: 174176 - DNA, 500 bp, Homo Sapiens
  misc_feature (45)..(45): n is a, c, g, or t
  misc_feature (91)..(91): n is a, c, g, or t
acccggtccaaaatagggcatcagtccttggatttcacaaaatgnaggtgactgccctggctattcacactggctgctttaaatgtatcangccagtgaagtgactattccctacataccctatggctgactgcaaattcctccctacacagtaggaaatattaagcacatacctcttatagacttgagaattgcattgagtgtaacaaggcgaataatatgaagtgtttattgtatttaaaattctttaaagatatctaattctggccaccactgcagccctacatacagttgaaaaaaaattccattctgttaacatttgttttataagttttcacgcaatacacaaaaaacccctctgcacttcttgtaaagaacaaaaaagatacacaacagttaagcgtaaagatcacaggcaatagcattcaaacatggatgtgggtagagaaaggagtacctggcatgagtacctgcttagtttgactgaatccttgattttt

SEQ ID NO: 174177 - DNA, 1031 bp, Homo Sapiens
gggaattccatgtgtggatgctggattgatttcaccactggtgcagctgctaaatagcaaagaccaggaagtgctgcttcaaacgggcagggctctaggaaacatatgttacgatagccatgagggcagaagtgcagttgaccaagcaggtggtgcacagattgtaattgaccatttaaggtcactgtgcagtataacagatcccgccaatgagaagctcttgactgtcttttgtggcatgctgatgaactatagcaatgagaatgattcgcttcaagctcagcttatcaatatgggtgttattcctaccttagtgaaattactgggcatccactgccaaaatgcagctcttacagaaatgtgtcttgttgcatttggtaatttagcagaacttgagtcaagtaaagaacagtttgccagtacaaacattgctgaagagctagtaaaactcttcaagaaacaaatagaacatgataagagagaaatgatttttgaagttcttgctccattggcagaaaatgatgctattaaactacagctggttgaagcaggcctagtagagtgtctactagagattgctcaggcaaaaagaggatagcgacaaagaagatgatattactgagctcaaaactggttcagatctcatggttttattacttcttggagatgaatccatgcagaagttatttgaaggaggaaaaggtagtgtatttcaaagggtactctcttggatcccatcaaataaccaccagctacagcttgctggagcattggcaattgcaaactttgccagaaatgatgcaaattgtattcatatggtagacaatgggattgtagaaaaacttatggatttactggacagacatgtagaagatggaaaatgtaacagtacagcatgcagcactaagtgccctcagaaacctggccattccagttataaataaagcaaagatgttatcagctggggtcacagaggcagttttgaaatttcttaagtctgaaatgcctcctgttcagttcaaacttctggg

SEQ ID NO: 174178 - DNA, 488 bp, Homo Sapiens
aatgcgcgcacaaacagaatggtcagcaccacgtaggggaacgtggccgtgaagtacaccactttccctgaagacttgacccctcggatgaggcagaggaagacgaccaaccaggagacaccgaggcagccaaggaggggcagccgcacctccccaaagttcccaatgtcatctgacagcttcagcacgtacagcctccagtactcctcgctggggctggtcctctggaggctgtggttgagcaggtgggagaggttgctgggcaaggcggctggccgagagccattggtgaggttggaggcgtccagtacaccggcgcagtcatgcgtgttccaggggttattgcagtaggcccagggcagcacgtgcgtcatggacgagaagaagtagtagaaggcgacgcagatgaccacattgtagtagatgccgatgtaggtggacaccaccatcataccatagcccactcctttgaacatggggctgatcct

SEQ ID NO: 174179 - DNA, 972 bp, Homo Sapiens
taaatatgcaagaaatcgttattcacagtgacatggctacatagaatgcattattctatgcatattctttccgttggttgaatttcaagataaaaagcacttgttttctacaggttcacaaaacagcgtaataacaagaacgatcaaggagaatgtaatgtaggcgttaattgtagattaacaaacttatggcccaatgcttatgtccactgcagagtacttccaaatccaaacaatggttacagaaaccatttcccatctttcctaacacagagaaaaagtcttgcctgctttccaagaaaccaattctttataacaacaatctttcttgttcaattaacgtccataggagtatcacatgtagtccatcttttatagccaaatttaatgtcactacaaaagaaagcaaattggacgatagtcacatgtattagcatctagaaagctgtaatggcatgaagatatctatataaatcaggggtttaaaatttttttccttaacagtctcaggtatcaaccagaagaagttgctgatgacccatttactgatgattttcgaggtctattggcaaaagaagattggtggttaccgctggggctgttgctggttccattcatagtactggaaatgtgaggaaactgtggatgaggagactgcactggagtactggggctaggcaaacaagaagaggtggagggaatacctcctgctgggctgttggccttgtcactcccagagtcactttccagttctccagcatttgtcagtccatctctctggtgactgatcttcattcttttacaagtaggtcgaactctgtatttcaatggaagtggaccattccttctccaggtataaatgtaggcaatatccattagtgtataataatcctttaaaggttcctcctcatacatgacatcaatctggcggacgcgtgggtcgacgatatcccgggattccggaccgtacca

SEQ ID NO: 174180 - DNA, 470 bp, Homo Sapiens
  misc_feature (59)..(338): n is a, c, g, or t
tcatggccatagctgcctcctgagctgaaaactacgcctaagcaagagagtaaacatgnnnnnnnnnnnnnnnnnnnnnnnnnnnnnnnnnnnnnnnnnnnnnnnnnnnnnnnnnnnnnnnnnnnnnnnnnnnnnnnnnnnnnnnnnnnnnnnnnnnnnnnnnnnnnnnnnnnnnnnnnnnnnnnnnnnnnnnnnnnnnnnnnnnnnnnnnnnnnnnnnnnnnnnnnnnnnnnnnnnnnnnnnnnnnnnnnnnnnnnnnnnnnnnnnnnnnnnnnnnnnnnnnnnnnnnnnnnnnnnnnnnnnnnnnnnnnnnnnnnnnnnnnnnnnnnnnnnnnnnngagctagccaccataccagtcagggcgcatatcttaaggatactcctgaggtggagctgggctttccctgcagaaccgcctctgggaattgtgccctttaccctccttgttacctagggaactacattacct

SEQ ID NO: 174181 - DNA, 492 bp, Homo Sapiens
cgagtgggtccctgcagccatctgggccctatcccaacactggggcgccactcacagtcctccccatggaagtcacacagaagggggctgtccaggtgggtgcaggcagtggccctgtgtctctgtgacccatagcatgactaggctctgtacacagccaccttctaaacaaccagtagtttgggaagagctgaatatcttctcagcggagcagctgtaggagacaaaaactcagccccctttcaaggggaggtagcttctcatctaaaaaagtccaagctgctatatcactcttacctgagccaaatacccagcagcaccaaccagggcaattcaagatttcctcacctatatgtggggtgaccattaataattacagcaaacaattagttatcgagggcttcctgcgtgcagatagtcttttaagtgctccctgtagattagcttattgcattttcttggtaaccttatgatgcaaatacaaccatagct

SEQ ID NO: 174182 - DNA, 877 bp, Homo Sapiens
  misc_feature (794)..(794): n is a, c, g, or t
  misc_feature (832)..(832): n is a, c, g, or t
  misc_feature (843)..(843): n is a, c, g, or t
accccagggcaggtaccactgatctgcatcagagttgcctgctattctctggtgtatccttcacatctaggtgccctcaagcagctgtgtgagtgttgagatctctgccatctctggctgagatactgctgtcctgtgaagtgtttcccatgacctttttcttcccctttgaatccctctgtctggagtagtccttgcctcttcctgctccagtagggccttttccctaccccagcccctgtgccaggctaagctggtacaagagctgccaacctcacagagtgtttgctaggcgagagaggtgcagggaagaggcagaggtatgcaccttcccccttgaagagaggggaaaggcctacagtggcccacataattgcctgactcacacttcagctacctcttaatgcctgtggagggactggagctgctggatcccagtgtggtggtgtaggaggccacagtgagcaggtggccccagctgggtttcccaggtcaggaatgtgggccccaggcaaggtgcagcctttgctcacagctccatccatgtctagaccttcaggccagtctgcagatgaggttccctacctttttcttctcttcattgaccaaatcaaccaatcactacagctgctctgcttctgctttccaaagtagcccaggtcctggggccagatgcaggggaggtgcctatccatgagtgaaggccagtgtcttcctcacctggggtggggtcccacacttttggaccttcagtttttagggaccaagatctgtgttgggtttcttaggatttnttagctttttccttcagggggaccacagcaggtgaagntcaagagcgcntggttctgttaattagtaaaattgtttttcaggg

SEQ ID NO: 174183 - DNA, 1082 bp, Homo Sapiens
  misc_feature (131)..(170): n is a, c, g, or t
  misc_feature (343)..(421): n is a, c, g, or t
atcggaacgatggaaagagcgtacaggagggccacacggggcggctagggaatttggggcggagggggtatatccggcgagcggcggggcggctatagacaccgggcgaccgcgcgtgggttacgtgaatnnnnnnnnnnnnnnnnnnnnnnnnnnnnnnnnnnnnnnnncaaacaaggtaaggcaacgcgggaagtggcgcaacccctgcgccccgcgggaacccccgccggggggaaacatcgggctaggtagggtggtagattagggagagaaggtattcgaggtggtccgccgaggcagagtaagaagagggggtcgggccctgttaggcgagggcccnnnnnnnnnnnnnnnnnnnnnnnnnnnnnnnnnnnnnnnnnnnnnnnnnnnnnnnnnnnnnnnnnnnnnnnnnnnnnnntcgcccgaggccccccaggggggggattgcgccaatggcatccctcaagtgtgcccaaggggaaagagtggatcccggtcgcgtgggggatattgggaccggagaagtcaggcttaaaaagccaaacccgtaagaatgggggatatatgcggccatagttcacgcgtccccattttctctaccagaaggtccggagtggctccagctttccctgttaggttcagagtgatcacattgtttcgctcaaggactccctgggggatcccatccgcagcaacatatgctcgatcgtggactccattgaggggtgaagagagaggtgctgggttgctgcaatcttgaggaagtgttgtccggtacagcacaaacccataatgctgtttcacctggataaatgtcaagggataaaggcttttgatgggcccagagggacacagaatgtccagagctgctcccactgtctttaacttttccaaagtgacctttccatatgcaaactttggtgtagatggagggataggaccttctggtactttttcaaacttgcccactgagtactggagtcaacactcaagttttgttctgtctctctccaaagcttctccaatctgtgactctacctctcacacaatactgggcgactcttctggatgatgtttcg

SEQ ID NO: 174184 - DNA, 818 bp, Homo Sapiens
tgtataaagccgggtaatagcaggctgtacggtcggaattccgggatatcgtcgaccacgcgtcggccggggttcctggttcgcatcctccttctgctgctggttctgctgcttctgggccctacgcgcggcttgcgcgttgaaaatgaatatggcagctactttgcctgtgattttgactacctgcgcttcctgcagaagcgctttcgccaccatctgggggatgatgtggttctgtttaccactgatggagcacataaaacattcctgaaatgtggggccctgcagggcctctacaccacggtggacttggaacaggcagcaacatcacagatgctttcctaagccagaggaagtgtgagcccaaaggacccttgatcaattctgaattctatactggctggctagatcactggggccaacctcactccacaatcaagaccgaagcagtggcttcctccctctatgatatacttgcccgtggggcgagtgtgaacttgtacatgtttataggtgggaccaattttgcctattggaatggggccaactcaccctatgcagcacagcccaccagctacgactatgatgccccactgagtgaggctggggacctcactgagaagtattttgctctgcgaaacatcatccagaagtttgaaaaagtaccagaaggtcctatccctccatctacaccaaagtttgcatatggaaaggtcactttggaaaagttaaagacagtgggagcagctctggacattctgtgtccctctggggcccatcaaaagcctttatcccttgacatttatccaggtgaaacg

SEQ ID NO: 174185 - DNA, 594 bp, Homo Sapiens
ctctgccaaggggaggagttggagagcacagttgccccgttgtgtgagggcagtagtaggcatctggaatgctccagtttgatctcccttctgccacccctacctcacccctagtcactcatatcggagcctggactggcctccaggatgaggatgggggtggcaatgacaccctgcaggggaaaggactgccccccatgcaccattgcagggaggatgccgccaccatgagctaggtggagtaactggtttttcttgggtggctgatgacatggatgcagcacagactcagccttggcctggagcacatgcttactggtggcctcagtttaccttccccagatcctagattctggatgtgaggaagagatccctcttcagaaggggcctggccttctgagcagcagattagttccaaagcaggtggcccccgaacccaagcctcacttttctgtgccttcctgagggggttgggccggggaggaaacccaaccctctcctgtgtgttctgttatctcttgatgagatcattgcaccatgtcagacttttgtatatgccttgaaaataaatgaaagtgagaatcctcaaaaaaa

SEQ ID NO: 174186 - DNA, 512 bp, Homo Sapiens
  misc_feature (36)..(36): n is a, c, g, or t
  misc_feature (44)..(44): n is a, c, g, or t
  misc_feature (74)..(74): n is a, c, g, or t
  misc_feature (83)..(83): n is a, c, g, or t
  misc_feature (88)..(88): n is a, c, g, or t
  misc_feature (99)..(99): n is a, c, g, or t
  misc_feature (197)..(197): n is a, c, g, or t
aaaaaatccctttccccttgcaaggtgtcattgccnaccccccnatccctcaaccctggaaggccaaatcccangctcccgantatgnaatgaactaangggtgaaggtaaggggtggcaagaagggaagatcaaactggagcattccaagatgccctactactgccctcaacacaacggggcaactgtgctctccnaactcctccccttggcagagaaactggtcctgcagtttcaggactagacgagcgtggggtagtggcaataaaggggcttgtatgagaaagatgtttcgcctctcatccctaggggcaaaaagtgaatcatctaactggtccaagtcactaatggcaatccttcttccccaagaagactgagtttcctttgtcacttcaggaagggaagaagagaggttagctgagccacccagattaggcccagatttagccaccaacctagaacagggcaagctggaagtgaaagaacttgaaatactgactttttccttctta

SEQ ID NO: 174187 - DNA, 966 bp, Homo Sapiens
  misc_feature (269)..(283): n is a, c, g, or t
  misc_feature (297)..(467): n is a, c, g, or t
gacgacgatattggagaatacagcatagttaaataaactgttacagtaaatctacacttggatttgctgcacctctaccatatagccttttgaatgactgaaactgttaacagagaaagaggcatgtctgcagaaagagatagctaatattttttggtactttatctgaaatccaagatgctgcttcccctgcaggttgttttccttcttacgatcctcattgaatcccctctgggagcacaggacagttagtagaactctccatttcnnnnnnnnnnnnnnnagacggagtctctnnnnnnnnnnnnnnnnnnnnnnnnnnnnnnnnnnnnnnnnnnnnnnnnnnnnnnnnnnnnnnnnnnnnnnnnnnnnnnnnnnnnnnnnnnnnnnnnnnnnnnnnnnnnnnnnnnnnnnnnnnnnnnnnnnnnnnnnnnnnnnnnnnnnnnnnnnnnnnnnnnnnnnnnnnnttcaccggtctttggggcccgggaagggtcctttgaaactcccttgaccctcgggggggaattctggccccgcccctttgggcctctccccaaaagttggcctgggggaatttaccaggggcgggttggaagccaaaacttggcctttcccttggggcccccaaaaaacacattcctgcttttcctaacaaattacacccttttgaatgttagcggtgggccaattaaaaaaatggcaccttgggcccctctgtttttaacaaaaacccgggaaaacttttctccccaaaataattttccccaattccggagaaaatcccccaaaaagccccccaaatggggggctttccctccaaggtggggaaagaaaaacccgccaaatcttaacaataactcttcttcggggaaacctcaaattgtggttaataaataaaaacttccagcccttttcccctccggctactcaccgcccctgctcacatatcacccactttttgta

SEQ ID NO: 174188 - DNA, 1252 bp, Homo Sapiens
aaaggatccggtgtagtgattattatggatgtctattcttattctgagaaggaacttatatgccacaatcagttctctctctttcttgttggctctggaggctttggtggaaaacggacatcagacaaagtcaaggtagctgtagccatacctaatagacctcctgatgctgtacttacagataccacctctcttaatcaggctgctttgtaccgcctcagtggagactggaatcccttacacattgatcctaactttgctagtctagcaggttttgacaagcccatattacatggattatgtacatttggattttctgccaggcgtgtgttacagcagtttgcagataatgatgtgtcaagattcaaggcaattaaggctcgttttgcaaaaccagtatatccaggacaaactctacaaactgagatgtggaaggaaggaaacagaattcattttcaaaccaaggtccaagaaactggagacattgtcatttcaaatgcatatgtggatcttgcaccaacatctggtacttcagctaagacaccctctgagggcgggaagcttcagagtacctttgtatttgaggaaataggacgccgcctaaaggatattgggcctgaggtggtgaagaaagtaaatgctgtatttgagtggcatataaccaaaggcggaaatattggggctaagtggactattgacctgaaaagtggttctggaaaagtgtaccaaggccctgcaaaaggtgctgctgatacaacaatcatactttcagatgaagatttcatggaggtggtcctgggcaagcttgaccctcagaaggcattctttagtggcaggctgaaggccagagggaacatcatgctgagccagaaacttcagatgattcttaaagactacgccaagctctgaagggcacactacactattaataaaaatggaatcattaaatactctcttcacccaaatatgcttgattattctgcaaaagtgattagaactaagatgcaggggaaattgcttaacattttcagatatcagataactgcagattttcattttctactaatttttcatgtatcattatttttacaaggaactatatataagctagcacataattatccttctgttcttagatctgtatcttcataataaaaaaattttgccccaagtcctgtttccttagaatttgtgatagcattgataagttgaaaggaaaattaaatcaataaaggcctttgatacctttaaa

SEQ ID NO: 174189 - DNA, 851 bp, Homo Sapiens
  misc_feature (751)..(751): n is a, c, g, or t
gggatacaaagacaaaacatgtttgtgccagcaaagacctaatattaagggaaggtagcataaacaaaaacagttccttctttctcctgtagtgaccctttgtgatttgtaaagtatatatcttaataagatcctcaggggtctccaagttttcaaatgccatattctcatctgttacctcacccctccctcattaaatgctgtgaagtatgactgaaattgttatggactctttcagaagcttagttattaataaatacagagctaaaaatcaacagtaagatgcctgtaatgaattctgccactaagagaaaatgaatacaatctctttcttcacttctgaaataagattagctgtgatcttataggtgtctataaactcaaggtgatggtggtggttgcagaccatgacctgagccactacagaactggaagttccacttctttacctcaaatttctgtattcttgtatttctatattttgctttttttctaaatgacagataatgtataattgatagatagaatatgtgtagaataagtgccacattaacatggaaactatagaaatgtctgcattttacttggtttattttaccctcattctgtcggagaaaaaaagatacacattggtttcttccctatttttcccagctattgacctgaaaagtgggtctggaaaagtgtacaaaggccctgcaaaaggtgctgctgataaaacaatcatactttcaaatgaaaatttcatggnaggttggccttgggcaaatctggaccctcaaaaaggcattccttttatgggcaagccttgaagggcccaaaggaaaacctccttggcttgagccaaaaaa

SEQ ID NO: 174190 - DNA, 737 bp, Homo Sapiens
  misc_feature (57)..(57): n is a, c, g, or t
cctcttctctcctgacatagccatgctttttgaagaagcctttgtgcacctgaaacnccaggtttgtctgccattgtggatttcctgggcagagtggagtgaaggtgccaaaagccaagaagacactgaggcagtctttaagaaagctctcttagctgtcataggtgccgactcagtaaccctgaagaataagtacctggattgggcttatcgaagtggtggctacaaaaaggccagagctgtgtttaaaagtttacaggagagccgaccattttcagttgactttttcaggaaaatgattcagtttgaaaaggagcaagaatcctgcaatatggcgaacataagagaatattatgagagagctttgagagagtttggagccgcagattctgatctttggatggatctatatgaaagaagaattgaaccacccccttggtagacctgagaactgtggacagatctactggcgagcgatgaaaatgttgcagggagagtcagcagaggcatttgtagctaaacatgctatgcatcagactggccatttatgaagatgaagaatacagtcagctttgtgaaatagtattgcaagcaacccccgtgggcaaatttgtattgagtccatctgtaatttgctcagtgatggcagacaagatggctgtctggttttgagacacactttaattttatgttaacttgttaaatctttttaaaaattaaaaaatttttatgattga

SEQ ID NO: 174191 - DNA, 623 bp, Homo Sapiens
aaccaaattcttagagatactatagaatccaaatgagaactgaattggacctcaagtcttctattcctgctaatagagttctttgtgatggtaactgctgtgtcgtttgttttccacaagttgggatggattcatgtcgatacatccccatgcccttgacctcttctggcattctcctgtgctctgacaaactgagccagccttttagatctacatgaataaacaaactattttaccaagaaaaatctcagcttgcttactgcttaattaaaaacctacaatttacacacctccctgccttcaagactgtgagctttggatagccctgcttaaatgtttgtcaacaacaagagtcgtaatgtgccagtacattgtagctcctttgaaatttaactctttctgtgttacatgaattgttttaaggagtccggcaaacatgtttcttcacttccatgagaatggtgccaagtgtcagactctaatgagccctcagctcaggttttaatttctattgaatgctaacattcttctgattttttggtatcttttataatcatatcggtttctgctgtattaatgacaattattcatgaaaataaaaaatgaaatattttgtatactta

SEQ ID NO: 174192 - DNA, 543 bp, Homo Sapiens
  misc_feature (38)..(38): n is a, c, g, or t
aagagtgccaggcgaagggcaaactgtagatcgatctntatgctgttattacaggagaagtgacatactttatatatgtttatattagcaaggtctgttttcaataccatatactttatatttctatacatttatatttctaataatacagttatcactgatatatgtagacacttttagaatttattaaatccttgaccttgtgcattatagcattccattagcaagagttgtaccccctccccagtcttcgccttcctctttttaagctgttttatgaaaaagacctagaagttcttgattcatttttaccattctttccataggtagaagagaaagttgattggttggttgtttttcaattatgccattaaactaaacatttctgttaaattaccctatcctttgttctctactgttttctttgtaatgtatgactacgagagtgatactttgctgaaaagtctttcccctattgtttatctattgtcagtattttatgttgaatatgtaaagaacattaaagtcctaaaacatctaaaa

SEQ ID NO: 174193 - DNA, 447 bp, Homo Sapiens
aggatcccctcttctcccctgacacgtaaaattccactgtttcatcttcaatttctgctttgttcttagtattcacctgaagcactaatttctcaacctcaggagtaaaactgatgaatgaaattcctcccatagaaatgatcttcacataacaagagatgctgctcttctgttatgaaattctttacttattaagctctggcaaatctgagtaccagtgctcttaactaattttattttcttcctcttctagtcatatcttagtttctgagtccagtcttctttgcatgaacttcatgtacagcaggttcttggagaacttggtcttgtgctcaggtgccatgctggcttcagcttgtgctgtgttcaggccacctgctgtttcttagttaagagactagaatgagaaagttacatgtaaggatgtcaggggaaaagaggggacgg

SEQ ID NO: 174194 - DNA, 514 bp, Homo Sapiens
cccttgaatgttagtgaatactgtgtgcctagaggaaaccgtaggcggttccgcgttaggcagcccatcctgcagtatagatgggacataatgcataggcttggagaaccacaggcaaggatgagagaggagaatatggaaaggattggggaggaggtgagacagctgatggaaaagctgagggaaaagcagttgagtcatagtctgcgggcagtcagcactgatccccctcaccatgaccatcacgatgagttttgccttatgccctgaatcctgatggtttccctgaagttaatagggagacccctgcttcctaaacttacacatttgtggtgtacctttgtcgtaaacgttttgatgttacctatttcttgtgggtctcctattaccagcttctaaatgaatgttgtttttgacccagtttgtaagtttctgtcagcaggagagttttacctattgcatggaaagatgctcattatatattgtgaagttaataaaacagttttaaaaacgc

SEQ ID NO: 174195 - DNA, 777 bp, Homo Sapiens
ggggtcttacctcgttgtggcgtcagaaccgccgtcgctcgctccattctcggcagtggtacctgctcccggtggccctgaggacgtgcgggccagggacggccccgaaagtaggaagcggagggggagcagtctgcaggtttgcggggccaagtgttgcggcgacgcacctcacgtcgagaatcgggaggaggagactgcaaggataggcccaggagtaatggagtccaaagaggaacgagcgttaaacaatctcatcgtggaaaatgtcaaccaggaaaatgatgaaaaagatgaaaaggagcaagttgctaataaaggggagcccttggccctacctttgaatgttagtgaatactgtgtgcctagaggaaaccgtaggcggttccgcgttaggcagcccatcctgcagtatagatgggacataatgcataggcttggagagccacaggcaaggatgagagaggagaatatggaaaggattggggaggaggtgagacagctgatggaaaagctgaagggaaaagcagttgagtcatagtctgcgggcagtcagcactgatccccctcaccatgaccatcaccatgagttttggccttatggcccggaatcctgatggtttcccctgaagttaataagggagacccctggcttcctaaacttaacacttttgggggtggaccctttgtccgaaaacgttttgaatggtacccaatttccttggggggcctccctattaccacccttctaaatggaatgtttgttttttgaccccc

SEQ ID NO: 174196 - DNA, 158 bp, Homo Sapiens; identical to SEQ ID NO: 78702

SEQ ID NO: 174197 - DNA, 387 bp, Homo Sapiens
  misc_feature (71)..(139): n is a, c, g, or t
ggggagacgctgcagacccgcgacccggagcagctcggaggcggtgaataatagctcttcaagtctgcaannnnnnnnnnnnnnnnnnnnnnnnnnnnnnnnnnnnnnnnnnnnnnnnnnnnnnnnnnnnnnnnnnnnngttgaagaggcagagcctgaagaatttgtcgtggaaaaagtactagatcgacgtgtagtgaatgggaaagtggaatatttcctgaagtggaagggatttacagatgctgacaatacttgggaacctgaagaaaatttagattgtccagaattgattgaagcgtttcttaactctcagaaagctggcaaagaaaaagatggtacaaaaagaaaatctttatctgacagtgaatctgatgacagcaaatc

SEQ ID NO: 174198 - DNA, 854 bp, Homo Sapiens
  misc_feature (72)..(140): n is a, c, g, or t
  misc_feature (648)..(671): n is a, c, g, or t
gggggagacgctgcagacccgcgacccggagcagctcggaggcggtgaataatagctcttcaagtctgcaannnnnnnnnnnnnnnnnnnnnnnnnnnnnnnnnnnnnnnnnnnnnnnnnnnnnnnnnnnnnnnnnnnnngttgaagaggcagagcctgaagaatttgtcgtggaaaaagtactagatcgacgtgtagtgaatgggaaagtggaatatttcctgaagtggaagggatttacagatgctgacaatacttgggaacctgaagaaaatttagattgtccagaattgattgaagcgtttcttaactctcagaaagctggcaaagaaaaagatggtacaaaaagaaaatctttatctgacagtgaatctgatgacagcaaatcaaagaagaaaagagatgctgctgacaaaccaagaggatttgccagaggtcttgatcctgaaagaataattggtgccacagacagcagtggagaattgatgtttctcatgaaatggaaagattcagatgaggcagacttggtgctggcgaaagaggcaaatatgaagtgtcctcaaattgtaattgctttttatgaagagagactaacttggcattcttgtccagaagatgaagctcaataattgttcacattgttctttnnnnnnnnnnnnnnnnnnnnnnnnaaaattgggtcttagattttgatttactagtgtgacaaaataactacatcctaatgaaaatcaagtttgatatgtttgttttgaaagtagcgttggaagagttgtagggggttttttgcatccatagcactggttactttgaacaaataaataaaagctttctgtagttgcttcctttatcag

SEQ ID NO: 174199 - DNA, 354 bp, Homo Sapiens
gtggagcaagagagaccaaaacctaacctgagttacaagaaacaagacagtaatggctataaagggagtgaccaggagcaactgggacactcctttacctcccatatccaatgtatgtgtttcacagaaaaacaacaaaattaacaaattcacaaaatacaacagctagaattacaaaatccattcatccaagggtggtagaaggcaggatggaaaggtggaagggtaaatggcacagggagaaaaacaaagtgttccaatcagtccaggcacagggactggcaaatgctagaaaatagctgcagaaaaacctgtggtcctttcagactcacggtgatgttaaaaatccacaca

SEQ ID NO: 174200 - DNA, 481 bp, Homo Sapiens
tcccctcttctcccctgacaaaataaagtcacagtctttccgtatgtccactctagagtgctatcttccaatctaaaacagaggaactgttttcaaacatcattagtttagcggtctccactaacaaagacatacggataaagtaacatgtaagtcagattaagaatctcaactttttaagaaaaaccaaatgactaaaggcatatttttattctatactttttgtcctataggtactctaggtccttgtgtaattattgaggacaaaacgtcagttaaaggtgagagggaaaactaggttgcagactagcagctgttttgcatctcacaagaacaaaggccttaacaaaccgtatactttatgcaaacaaagtgatgcctcactgacttaggagacaagtcacatgccatcagtgtgtcagaaaatttctttcttcagtgatagttaaggtaacctcgccagctactttccagagacagc

SEQ ID NO: 174201 - DNA, 648 bp, Homo Sapiens
gagactgcccctcttctcccctgacaggtgtctgtgatttctaattaatcaccgctggccattacaccggttttgttgtttggggtggggagggggcttttgttcccttttgacataatatagtcaatgcactaacaattatgtatattcaaacttgattattttaaattcgatcttcagctgtactgtaaatagggtactgcatcgtagtctccatatctgtattacttttctgtaatatttaagagttgcttaaaagcatacaaaatgtactggtactaaaacagctaattatttctctctccccctatgacaggaaggggcttcagttgttcctccatggctagaaccataataaacaatgtacccgtaatttgtaacataaagtattgcaatatgttagtaacaatcttgcagccttcctttccgaagttcattttattttgatcagttcagtatattgcactaattattttaggtattttcattatatgaaagctaccatgtgtcagagatgatttaatctatttaagtgttggactgctaggagaacttgtacatttatgataatgcagaattaggaaaacggttcaccagtgtttagttttatattgaggtgctcaggttggaataaagtggtataaaaag

SEQ ID NO: 174202 - DNA, 201 bp, Homo Sapiens
  misc_feature (171)..(171): n is a, c, g, or t
tgagccaccacgccccgcctaaaatccatattcaaagaagcaatttcagttcctttctaagctttgtcagtcaaggggctccactgacttcctaggccctgtaatttaaccagtctttaaggttttgcaggaaagtcccttcttccaagtggtttttccaaatcgcacaantgcaaagccaaaaatatggaagaaacattc

SEQ ID NO: 174203 - DNA, 760 bp, Homo Sapiens
  misc_feature (49)..(49): n is a, c, g, or t
  misc_feature (54)..(54): n is a, c, g, or t
  misc_feature (91)..(91): n is a, c, g, or t
  misc_feature (96)..(96): n is a, c, g, or t
  misc_feature (112)..(112): n is a, c, g, or t
  misc_feature (127)..(127): n is a, c, g, or t
  misc_feature (138)..(138): n is a, c, g, or t
  misc_feature (161)..(161): n is a, c, g, or t
agcaaatccaggtccctggaaaaataaaaatgttacaggaatgcagtgngctcnatctccttaaatagtaaatccccctgtatccaaaccnggtcncttgttctgccttttnaaatgttcatgtagnaaattaatganctataggaatagctctaggagancaaatgtgctttctgtaaaaaggcagaccagggatgtaatgtttttaatgtttcagaagcctaactttttacacagtggttacatttcacatttcactaatgttgatatttggctgatggttgagcagtttctgaaatacacatttagtgtatggaaatacaagacagctaaagggctgtttggttagcatctcatcttgcattctgatcaattggcaagaaagggagatttcaaaattatatttcttgatggtatcttttcaattaatgtatctgtaaaagtttctttgtaaatactatgtgttctggtgtgtcttaaaattccaaacaaaatgatccctgcatttcctgaagatgtttaaacgtgagagtctggtaggcaaagcagtctgagaaagaaataggaaatgcagaaataggttttgtctggttgcatataatctttgctctttttaagctctgtgagctctgaaatatatttttgggttacttcagtgtgtttgacaagacagcttgatatttctatcaaacaaatgactttcatattgcaacaatctttgtaagaaccactcaaataaaagtctcttaaaaaggaaaaa

SEQ ID NO: 174204 - DNA, 497 bp, Homo Sapiens
atcgagctcggcaccctgaggtgctatgagcctctgcccctggagcacggtgtgctgctgcagcatctcgaagttatacttctcgtccgtggcatgctggtccactatgaagatatcctcattcagtttggttattataaatcccaggttaaactgaccaatgatttccatttctgcaaacatcgttttacttatctcttttcttagttcatcttcggctgcttgattttctccaggacaaatctttgccctaaacttcctgtaattctgttccccttcactttgctgtgcttcatgatgtaactgctttattcgtttagctaaagaactcatagaaaagtccaggggcacaactttcttattaattttcacagctacatcaacctgagaggctgacatgtcctgagtatttactaacttttgacaaatgtcagaactggaaagaatttcttctttttttaaaacgctttgtgtttggggttgcgagattagttggc

SEQ ID NO: 174205 - DNA, 1992 bp, Homo Sapiens
  misc_feature (1276)..(1315): n is a, c, g, or t
  misc_feature (1421)..(1481): n is a, c, g, or t
  misc_feature (1502)..(1692): n is a, c, g, or t
gcaggtcccgcgcggtctgcgggagcataggccccagagcgcccgagcctggaggacacagagccgtcggattccggggacgagatgatggacccggccagcttggaggcggaggcacgaccaaggccagtgcccgccagatccgccatcagtaccgggcgctcatcaactccgtccaacaaaaccgtgaggacatactgaatgccggtgacaaattaacagaggtccttgaagaggctaacactctgtttaatgaagtgtcccgagcaagagaagcagtcctggatgcccactttcttgttttggcttcagatttgggcaaagagaaagcaaagcagctgcgctcagacctgagctcctttgacatgttaagatatgttgaaactctactcacacatatgggtgtaaatccgctagaagctgaagaactcatccgtgatgaagatagtcctgattttgaattcatagtctatgactcctggaagataacaggcagaacagcagaaaacacctttaataaaacccatacattccactttctgttgggttcaatatacggagagtgccctgtgccaaagccacgagttgatcgtccaagaaaagttcctgtgatacaagaggagagggcaatgcctgcccagttaagaagaatggaagaatctcatcaagaagcaacagagaaagaagtagaaagaatcttgggattgttgcagacatattttcgagaagatcctgataccccaatgtccttctttgactttgtggttgatcctcattctttcccccgtacagtggaaaacatctttcatgtttccttcattatacgggatggttttgcaagaataagacttgaccaagaccgactgccagtaatagagcctgttagtattaatgaagaaaatgagggatttgaacataacacacaagttagaaatcaaggaattatagctttgagttaccgtgactgggaggagattgtgaagacctttgagatttcagagcctgtgattactccaagtcagaggcagcagaagccaagtgcttgatgctagctgaaggactcaaatggatagtgaagtccaaaacggaaagcggcatgtattgtacatattgtatgattcaacatttttaaaggcagattgtttttagtaaaatgtagcttttgatagttaataaatttgtcatggttgtctttgattaaaggaaactcaccgccatattcgcggggaagaggaccgggggacgggcggcggacccgctgagtgggtcggcggannnnnnnnnnnnnnnnnnnnnnnnnnnnnnnnnnnnnnnnaaatgtatcttgtggcggcccggcgttggggcctcaggaaggtttttgcaagagcctcccggtgtgggggggcggccgggccccggtgaggggagaggggaaacannnnnnnnnnnnnnnnnnnnnnnnnnnnnnnnnnnnnnnnnnnnnnnnnnnnnnnnnnnnnggattccgccgccgacggtannnnnnnnnnnnnnnnnnnnnnnnnnnnnnnnnnnnnnnnnnnnnnnnnnnnnnnnnnnnnnnnnnnnnnnnnnnnnnnnnnnnnnnnnnnnnnnnnnnnnnnnnnnnnnnnnnnnnnnnnnnnnnnnnnnnnnnnnnnnnnnnnnnnnnnnnnnnnnnnnnnnnnnnnnnnnnnnnnnnnnnnnnnnnnntggtgggcaggtgggccgggagggcatctccggccgccacgagggtgaggggtagagtcgggcggggggcgcgcgggaggcggagggcgggatggtgtgtgtcgctcggaggccgcgcccacccctctggtgcgcgcggacgggaagcctagggtgttgacggggtacaggctgccgagaggagaggcgtgcgcggcacgacgaatatctcgtatggcgtgcgacgcgcgcaccgtgggcgatggcgcgaggtgcgggcgggctagtagattctcccgccggtcgcgtccgtcggctctc

SEQ ID NO: 174206 - DNA, 538 bp, Homo Sapiens
  misc_feature (427)..(427): n is a, c, g, or t
gagttggtatggaaaacgatttgatctaaatacaaccaacaataaatattagcattgaaacttccttttaattgacgagtagtaatatggatgtcttcattagctgcaatgtcatttctattttactttcctaaatgtgaaagaaaagatgaaagaccatttcttggacatatcaaatgatttttaaggaatttctggtgattatttaaattttctagttaagctgtctaggtcagaattcatcattcaaaaatgctgctcaaacttgaagtgggtaggaatttctggggattttgattaagatgcagattctgactcattaaatctgagatgggcaagagtctgcatttctgacaagcacataggtgatgccagtgttcctgactacacattcagtagcagagttacagattatcccacattttgngggattttggagaatgatcttagtagaaaagataacaacagatgtttgcagtgatttgcctggatgtagttggtctgagatttaaaactatgataaatgaagccacgtcgg

SEQ ID NO: 174207 - DNA, 759 bp, Homo Sapiens
  misc_feature (41)..(53): n is a, c, g, or t
  misc_feature (411)..(411): n is a, c, g, or t
gggaacattataattattttaagtaatgttaattgaaaaannnnnnnnnnnnngacaatataaaaaacattttaaatttcctagaaatgtcttcagggtaatgccaatttaagatctctcttaacttgtggccaagaaattctagattttccagctgactttggtataatatatatttatcaggaacttctctcagcagagagtacccattcttcgagtccaaagcacaattttaaacatgtaaaatggatatataatttgccaaaggtaattaatttattctttttttcttaaagaagaaaaagacattggttgttgttacaaaaagtctaaattactgttggttgaaacacagcagctgtggagttcagtccaggcatgaagactaaatctgctttaccaagtaaggtngtaaggttgcatgtttcagtcctctaccatcctgcactgtgagcagcactataccctgtgcgttgtctgaaagccttccgtatattctccagctaaatggtcgtctggtagcctttgcatttaacaaactagcatgaggctttttatatctaaatgctacgtgatagacaatttcagctagccacatattgtatggatgagattcataaagactttcaatcatttcattttcagacaactgaaaattttgtttagtatgtggaattctttttttgaaatgtataatgaataggatgttggcactggtgggcaattaatcatggagcctaataaaattaatttggaccc

SEQ ID NO: 174208 - DNA, 852 bp, Homo Sapiens
cggtgctccaaaacagtctggaaacacgcctgtgatccaggattatccacgtgatttatgaaattattttttggggaaaacacttcaaatgctgagagaaaaattatcgagaaaaaaactgatgttacagttcctaatttgaaaccactgactgtatattgtgtgaaagccagagcacacaccatggatgaaaagctgaataaaagcagtgtttttagtgacactgtatgtgagaaaacaaaaccaggaaatacctctaaaatttggcttatagttggaatttgtattgcattatttgctctcccgtttgtcatttatgctgcgaaagtcttcttgagatgcatcaattatgtcttctttccatcacttaaaccttcttccagtatagatgagtatttctctgaacagccattgaagaatcttctgctttcaacttctgaggaacaaactcgaaaaatgtttcataattgaaaatataagcacaattgctacagtagaagaaactaatcaaactgatgaagatcatacaaaatacagttcccaaactagccaagattcaggaacattattctaatgaagatgaaagcgaaagtaaacaagtgaagaactacagcaggactttgtatgaccagaaatgaactgtgtcaagtataaggtttttcacgcaggagttacactgggagcctgaggtcctcaccttcctctcagtaactacagagaggacgtttccctgttatagggcaaagacacaaaccatcttcagatccataggtcctaaaaatacgggcaagctcttaactatttacaacatgaaattacaggcccggcacgggggctcacactgtaatccag

SEQ ID NO: 174209 - DNA, 967 bp, Homo Sapiens
  misc_feature (569)..(586): n is a, c, g, or t
gtattgaactggcatctgccctcactgtggtgattgcatcaaatattggccttcccatcagtacaacacattgtaaagtgggctctggtgtgtctgttggctggctccggtccaagaaggctgttgactggcgtctctttcgtaacatttttatggcctggtttgtcacagtccccatttctggagttatcagtgctgccatcatggcaatcttcagatatgtcatcctcagaatgtgaagctgtttgagattaaaatttgtgtcaatgtttgggaccatcttaggtattcctgctcccctgaagaatgattacagtgttaacagaagactgacaagagtctttttatttgggagccagaggagggaagtgttacttgtgctataactgcttttgtgctaaatatgaattgtctcaaaattagctgtgtaaaatagcccgggttccactggctcctgctgaggtcccctttccttctgggctgtgaattcctgtacatatttctctactttttgtatcaggcttcaattccattatgttttaatgttgtctctgaagatgacttgtgannnnnnnnnnnnnnnnnnaaaccatgaagagccgtttgacagagcatgctctgcgttgttggtttcaccagcttctgccctcacatgcacagggatttaacaacaaaaatataactacaacttcccttgtagtctcttatataagtagagtcccttggtactctgccctcctgtcagtagtggcaggatctattggcatattcgggagcttcttagagggatgaaggttctttgaaccacagtggaaaatttaaatttactaactttttttgccagccagtttaatttgactgtttattgctaaagaagaaagttaggaaaagaaaaaagcctggttggcaaatccttgggttaatttcctttaaaaaatttctgggcaagtgttggggatgggataga

SEQ ID NO: 174210 - DNA, 353 bp, Homo Sapiens
ggcaacttcccttgtagtctcttatataagtagagtccttggtactctgccctcctgtcagtagtggcaggatctattggcatattcgggagcttcttagagggatgaggttctttgaacacagtgaaaatttaaattagtaacttttttgcaagcagtttattgactgttattgctaagaagaagtaagaaagaaaaagcctgttggcaatcttggttatttctttaagatttctggcagtgtgggatggatgaatgaagtggaatgtgaactttgggcaagttaaatgggacagccttccatgatcatttgtctacctcttaactgaataaaaaagcctacagtttttaga

SEQ ID NO: 174211 - DNA, 783 bp, Homo Sapiens
  misc_feature (614)..(614): n is a, c, g, or t
ggatcctcgggtcgttcttagaaccaagggaaatactgctccccccatttgctgacatagtgctctcatgggctcacctgggcccaaggcacagccagggcacagttaggcctggatgtttgcctggtccgtgagatgccgcgggtcctgtttccttactggggatttcagggctgggggttcagggagcatttccttttcctgggagttatgaccgcgaagttgtcatgtgccgtgcccttttctgtttctgtgtatcctattgctggtgactctgtgtgaactggcctttgggaaagatcagagagggcagaggtggcacaggacagtaaaggagatgctgtgctggccttcagcctggacagggtctctgctgactgccaggggcgggggctctgcatagccaggatgacggctttcatgtcccagagacctgttgtgctgtgtattttgatttcctgtgtatgcaaatgtgtgtatttaccattgtgtagggggctgtgtctgatcttggtgttcaaaacagaactgtatttttgcctttaaaattaaataatataacgtgaataaatgaccctatctttgcgcccacccacccgtagcgttagtgcggnggccgtggtgggccggcctcgggcccttcaagaaagtttctaagaccttttcgttttggcccgggggggccccagtagggtaacgggaaacccggggccactaacctggtttccttaaggggaaatccccgggccaatgaccaaggggctttggaattccccccccaac

SEQ ID NO: 174212 - DNA, 1106 bp, Homo Sapiens
  misc_feature (304)..(304): n is a, c, g, or t
tttagggtgtaatttttattgggttaggtgttcccaaaaaaagggtgggaaaggttataaaccccatttggggggaacccagggggcccctatcttttttaacttgggggaaccgccccaaaagggaagggggaacccattttccaacccctttatctcatttttttccaaaccagggaggttcgggggccattaaaagggaaatttttttccagaggggtgagggggggtggcttttatgggcaagtttggccctttattccacaaggttcaggcccccaacccctttaccagaggagacttntaggtgtacatctgacttggcaggacttagacggagttggagtccactgttagctctgggatataccgttaaaattaacctcaaaaatctcttccccaggactcttgctcaagcaagtcacgccaaatccaaccttcctaacaggggttttcagaaaaatgccctgcagaagcaacaggatctggtccctcacagtttcctccatgctgcaatgctctagttctcatcacgcccatagcatctggcatcaggttaccctgtacagtcaacggccatagaagtcgccagcagggaaattccagaggtttagaattctatcagcacatgtgtcactggaagccatcatgggagtactatgtcagagcgtatgtaactagctgtcaggtctttccccgttgcctcagcctttctacacagactggccttcaacttcccctgagtccagaagtagactctttcagcaactctattcaggaatctgcagcaggaaaactgcttcctctattaacatctatgactgaagcacagatgtgtctagtagaaatcacccttcacccaaaagctgggcgcagaaagggaagcccttagctgactataggaggtgcctcttgtggctccacgtgcttcttacacaccaccccccagcttgagcgatgcctcagccagctcaccctcattcacacaatcgctagaaaacatgcttcaaatattctatctttgaaaagacaccatgcagaaaataagctatcctatgatgtgcggtattttcttcaatgctagatctctcagagttcatgttaac

SEQ ID NO: 174213 - DNA, 1448 bp, Homo Sapiens
  misc_feature (208)..(225): n is a, c, g, or t
  misc_feature (227)..(327): n is a, c, g, or t
  misc_feature (381)..(475): n is a, c, g, or t
ggctaacacctctgcacagggcagttagccagctcaagttctttttcagagaaagggacttggccagtggtttaagtacctgccccttcacctctcagacgaggcagctgacgaggcagctggcccagtcttgggagtctgctcaggacagtggtggagctgggtcttgaaccccagtctgcacctaaaaaaactaaaggaaatggannnnnnnnnnnnnnnnnngnnnnnnnnnnnnnnnnnnnnnnnnnnnnnnnnnnnnnnnnnnnnnnnnnnnnnnnnnnnnnnnnnnnnnnnnnnnnnnnnnnnnnnnnnnnnnnnnnnnnncccccaccagctgggactacaggcacatgccaccatgcccggctaatttttttnnnnnnnnnnnnnnnnnnnnnnnnnnnnnnnnnnnnnnnnnnnnnnnnnnnnnnnnnnnnnnnnnnnnnnnnnnnnnnnnnnnnnnnnnnnnnnnggaaaatgggtcattttcaaaggggcaacagtgataccatccctgcactcctgggtcctgctcttccaatgcccaaggcatggcatggtggcagctgtgcccccgcccattgctttggagcacagatgactctgggggcagaggtgggctctgtttaggagggcagtgagaccacccagccaaattgcttctcaaccctagacaaagcctttggccaagagggaggtgctgttagttgggcagcccttctgggtttcagagaccggtgttggctctagactggtctcatctccattgccttaatgccaggtggcccaggagtacccatgcacagcagctgtggggtgtgggcatcttcaggtggtgttctggtaaaatcgttagaatagctgtatgaaggaaaccagtgggaggaaatgaagttttcaggatggtgggatgtgatttagacagtgcacatgctgttagggctgtcactagggagtggccttcatggagggtggtaacagcacctcagtccagccaaaatgtttagaaacactcagtctctggtcccagaggatggcttctcagggcatgccacaagttaaaggtccaccttcctgaaacgatgcaactgagaaaagctgcccattctcaagactcatctgcctagaggagggtcacagaggcaggatgtaagaaacactgtgttgcattcttgcacaagtcatgaaaatggagccagagagcctggacatcagggacttttgcccacagcacatgacaccgacagctgcccagcctgttcacattgctggggaccagcacaagcacctgaagccatgtggggacagttgggctttgttcattcttagccacggggattaaaggggatctttgcattgccgagaattatactatatccggcgtaatgagccatctcaataacattattctcactgcaaaaaaatacaaccaccaccaaaaacag

SEQ ID NO: 174214 - DNA, 652 bp, Homo Sapiens
ggtggcccaggagtacccatgcacagcagctgtggggtgtgggcatcttcaggtggtgttctggtaaaatcgttagaatagctgtatgaaggaaaccagtgggaggaaatgaagttttcaggatggtgggatgtgatttagacagtgcacatgctgttagggctgtcactagggagtggccttcatggagggtggtaacagcacctcagtccagccaaaatgtttagaaacactcagtctctggtcccagaggatggcttctcaggccatgccacaagttaaaggtcaccttcctgaaagatgaatgagaaagctgcccattctcaagactcatctgcctagggagggtcacagaggcaggatgtaagacacactgtgttgcattcttgcacaagtcatgaaaatggagccagagagcctggacatcagggacttttgcccacagcacatgacaccgacagctgcccagcctgttcacatgctggggaccagcacagcacctgaagccatgtgggacagttgggctttgttcattctagccacggggatgaaagggatcttttgcattgcagagattttatatatattttgtttgtaatgagccattctcaataaacattattctcactgcaaagataatatagcaacaaag

SEQ ID NO: 174215 - DNA, 427 bp, Homo Sapiens
ttcgagctcggcacccgcttgtcccgctcctgctggataggatgctcccagggcccaggcagcgactgaggatcatcattttcttcacaaaatgacagtgctgcttccactgctgccacatccagcacttcaggatgatcatctaccttgtcctcaatgatggcaatgatgtctccaacagtctcaaaatccagctcttcacctgtgtaagacacagcaatatccatcttctcagccagatctaattctcccttcccatctatgctgggagcctttgatccaacaggagcctctgctacccctgatcgaaaacactcttctttgatagaattgatgatcatggatatttcactgctgtccatggaaacagtcacagtatgtggatcccccacagcctccatggagaacgacccacggtgatcctcta

SEQ ID NO: 174216 - DNA, 591 bp, Homo Sapiens
  misc_feature (33)..(34): n is a, c, g, or t
  misc_feature (99)..(99): n is a, c, g, or t
  misc_feature (529)..(529): n is a, c, g, or t
agggatattacttagtttcactgtgtatcctgnnagaaaaggaaatgcagacaggatattaggaattttctcttctagagctaaaatggtttggagtanaatcacatctgcaaggctcagctgattaccaacaagaaagctttgtccgtgaccccttaaaatcttttcaaacacaggaaagtatctaattatagccttctgggccatgttaaccacttccttttgctgatcatctggttttaagaaaggatgcatgataagcagttccagcagatccagtgtcccctccacgtacatgtcaatcagggttctctccttgaggttcttgccaaagagattgtgcttgtctgctatgtagtggagaatgcttcgggtctgtaccaacttcatcccgtcaatttcaaccatgggcacttgtaggaacagcaggtggtcaccatcctgcaacttgtacaactgttcttttgtttccagaaattcttcatcaaactcgactccggcggcagctaaaacccatctcacggactcnatccggcctcttccgttgggatagtggagcttggccttgctgccatgatagcttttcaggct

SEQ ID NO: 174217 - DNA, 557 bp, Homo Sapiens
agattgacccatgcctgccctcttctcaacagctgagtagggaaccagccatctgaatgagctgatcgttgtttatgttcaaatgagtaaatgtccagaccacttaaaactacagctgcttttctggcagtctcgtctgcggggccaaaacttaataaaccacaggaaatagactgtcattcttagtttgctgccagggcttattttagattgagagcatactggtacatgagagcagtagtgttgtttgctcttattttcaaccagggagctatctggcaccttttgtgctcctggcttttttcaatcatagcactattgcatctcctagctatttcttttgcccagcagggtaatattgagtcccattgcaagtatggacaaggcctctggttctcctcaccacccaccttttcagccatagaacatcactgaaaatgcctaatgcctggatctgtgttctactttagtttcactgggaagtctttcagtgggagatgaataaatgttatacattgttatgtccagttatgtcaataaacccactaatagagatt

SEQ ID NO: 174218 - DNA, 525 bp, Homo Sapiens
  misc_feature (479)..(479): n is a, c, g, or t
ttcggctcggacccgatcgttctccagtatctccctccatgggttcagccctccttctcctgagttgtcaaaaggacagtgaaataaatatgacattttaggttctccaatcccaaagcctatcccaaatcttatactcagtggagagagccctgatccaatcagtccaatagtgctgttgcttcttgcatctaccagtgttgcctcctggccctccagagtttggtgatgaagctagtctgttctgtaagggacctccatgacccatgtctctggggagtaagttgtggctgttgaagggaggtgatactatcaccttttcttagaccattttgtgttgctataatagaatacctgagactgggtaatttataaagaacaaagacttacaggtttggagcctaggaagtccaaggtcaaggggcctgcatctggtagaagccttctttctgtgttatcccctggcagaaaggcagagnggcaagagagaagagaggggccaaactcatccctttatcagaacga

SEQ ID NO: 174219 - DNA, 684 bp, Homo Sapiens
  misc_feature (501)..(531): n is a, c, g, or t
gggcagtctagaggatcccatcccccctatcaggtggtttggagaaacaggaaggcggaagaatggagtgcaatgtgtgagcagaaaggggggcaggaatcccgggtgctccactgcttaaaccacgggacctggttaactcctcaccaagcttcccacgaccctggttgccaatggggcgcgggagacattgtatacacatcatgctatttaaaatacgttcaaactatagtgtaaatgctaattaaccatataggtatataaccggaattttatattaaaagggggcctcctttttaaatatatgccgtgtaaaaaatgtacttataggaacatctctttggaaattggatttcttggatattacataacttagagagaagactccttttagccaggaaaagcctttttttggctgtgggctggaaataaatcatttattaacttggggaatccccatttttggacccctaataaataaaatcctggggcaaggccccnnnnnnnnnnnnnnnnnnnnnnnnnnnnnnntaccttggtgggggcgccccccggcccctccaaaaaaatttttcataaaacatttttccttttggggcgccccgggcgccccctaaaggggaaaaggggaaaaattggggcccaaaacctgtgttttccccaaagaaaaaaccccgggggcac

SEQ ID NO: 174220 - DNA, 438 bp, Homo Sapiens
  misc_feature (234)..(234): n is a, c, g, or t
  misc_feature (349)..(349): n is a, c, g, or t
  misc_feature (364)..(364): n is a, c, g, or t
  misc_feature (377)..(377): n is a, c, g, or t
gcattgccatgattttattattagtgtccaaaatgggactcccaagtaataaatgatttattccagccacagccaaaaaagactttgcctggctaaaagagtctctctctaagtatgtaatatacaagaaatacaattcaaagagatgttcctataagtacattttttacacggcatatatttaaaaaggaggccccttttaatataaaattccggttatataccaatatgggntaattaggcatttacactatagtttgaacgtattttaaataggcatgatgtgtatacaatgtctcccgcgcccattgggcaaccgggggtcgtgggggaaggcttgggtgagggngttaaccgggggccngtgggttttaagncagtggggaggcacccggggattcccggcccccccttttctggcttcacacaattggcact

SEQ ID NO: 174221 - DNA, 1194 bp, Homo Sapiens
  misc_feature (13)..(13): n is a, c, g, or t
  misc_feature (27)..(27): n is a, c, g, or t
  misc_feature (32)..(32): n is a, c, g, or t
  misc_feature (42)..(42): n is a, c, g, or t
  misc_feature (101)..(101): n is a, c, g, or t
  misc_feature (639)..(652): n is a, c, g, or t
aaaaaaagcgctntttttttaaatttnagaanttggcctttntactgtgggtgggctgttgaaattccatcaagaaaaagcatttctttccctgagttcanggtgactgaggaaagagccacaaaacaaaacacaacaaaaccaaaccacagaatcatctttaacccaactttttatacgatgccccagttccccataactttgcacacaagcttctgtgttcagttgaattgtaactgctttttgtatttggagagagtgactattgaacttgaaaccttttattccgggcgtcttggtagtttctggtgggattcagtgggtgagagggaagaaggggaggttggggggctccttcccttcagaacttgaagtttctcccactgcctcctctccagtggtctcccaggtgccagacccaaaagcttttcctacagtgataccctttatttttacttccccttgactcatatgttttaacatgattttaacaaactgcacttattaagaaatgtgtttgcccctgggcccccaaacagcacgccgtggaggagggcaggcgccgcgacccggcgcgacgccggagagtgggtagacatcccgatcccgcggagaacgtaacggcccttggggccgcgnnnnnnnnnnnnnnaaaaaaatttttgtaaaacccttttgtttttgggggccggggggccccccggcagggtaacggggaaaccggggcccaaaattggggttccccaaagaaaaacccgggggaaaagaaaataagggcgtgggaattccccgccaaaataaaaaacccccccgggggggaaaacccgaagcgtttttcgaaaaacaaattccccaagggggggtttctccgaggggccctttatcgggggatctcttcccaacgggggggtgtccaaggcggaaagcgccgcaatatcctaaaatttaagcccccccgcggcccgtgtggccatttatcttttggaggaggaacgggggtggggagatattcgccttaaagggtacctttcccggcccccacaattgtcggaaaactaccttccccatagagagggcccattgagaataaacacccggtgaatctcccccccgtggcggtggatatttagagcgcacacttttgtgggcccgcctcttgtagctgataataaaataatttgtcggcccgcgcgg

SEQ ID NO: 174222 - DNA, 483 bp, Homo Sapiens
  misc_feature (196)..(196): n is a, c, g, or t
  misc_feature (373)..(373): n is a, c, g, or t
  misc_feature (393)..(393): n is a, c, g, or t
  misc_feature (444)..(444): n is a, c, g, or t
gggggtcgccctgcttcatcagcaacaggacaatatcaggaacaaccaagagcctgcccaggtggtctgccatgccccagggagctcccaggaagctgatctggatgcagaattagaaaactgccatcattacatgcagtttgcagcagcggcctatgggtggcccctctacatctacagaaaccccctcacgggnctgtgcaggattggtggtgactgctgcagaagcagaaccacagactatgacttggtcggaggcgatcagcttcaactgtcacttcggctccatcctgcacaccacagggctgcagtacagggacttcatccacgtcagcttccatggacaaggtttacggagctgccgtttttagtnggttctggatcacagggaangagtctgtttgtgggttcgcttgttgaggggggaccctgttttttgcaggntgttcctttacggacctgttcagcgggagagttgaggtt

SEQ ID NO: 174223 - DNA, 271 bp, Homo Sapiens
gtagtcttattagctgaataaacaatttatgcaatgcaaattttgaatgtatatgcacacatgtgtacatgtaagtataatatatctagaaagcgagacatatgacatttttttcaagcttatcacccgatggtgtccacaggtccactcaagttacctggctgtctatcttctgcctgacccctgaagcgacgcctgcggctacgattgcgtcgctggggttttttttcactatcatctgtaattgcaaagtttaccatgaactattctg

SEQ ID NO: 174224 - DNA, 804 bp, Homo Sapiens
  misc_feature (157)..(169): n is a, c, g, or t
  misc_feature (177)..(306): n is a, c, g, or t
ggtgttgttttaagccccctcgggtcccccggggggtgtttttttggggggagtcccagcccatttttttgcccgggttttcttggagaacgattgggcccttttccttttccttgtgggggccgggccccaaaaaaaggttttaaaaaattttttnnnnnnnnnnnnnccgccccnnnnnnnnnnnnnnnnnnnnnnnnnnnnnnnnnnnnnnnnnnnnnnnnnnnnnnnnnnnnnnnnnnnnnnnnnnnnnnnnnnnnnnnnnnnnnnnnnnnnnnnnnnnnnnnnnnnnnnnnnnnnnnnnnngtacaacttaataatttaatgatttctgtactttcaagtttaagaataaaaggtgacagttaatgtttaaaactggaaaccagataatcacacaaaaatcacatttatttcaagagctcaaagtgcaaatacagcaagtcagttcacaaagtttcaagatacagtttttaatgacaatggaaatttgatatacaaaaatggaagggtaaatagaaataaagctcctcaatttttaaaaaaattcaagtaatttgaaaagcctttagactaaaatactccacttacatccattcagaaatgccagtactgcactgcaatcaagaaggactcttcaaagagagaatcagctcaaactggtcagctctagattagaatggaagttcttggtgccggcttttcttgatttggaagcttcagtcactcactgctatcaattgatgaggttcaatccatgatattttgatctttaggcgaattctaaaacatgtttaaagttaa

SEQ ID NO: 174225 - DNA, 456 bp, Homo Sapiens
agtgcatctgaatgcatttccaaagatgattctgcattcaaagaaataccagatttaaagaccataatcataaagggcacaacaccgaataattctttatatattcaaaataattcactgtctgattttcaaaacattccagtacaggacagtttaggaagttcaaataatcctttgtacttaactagctcgttggaaaatatgactgttgataatttaaatgctagtaaagaaactgaagttggaaatgtttctttagttgaacaaagtgccaagaatcacacttttaaaaatgataatttgcagttttctcagtgtgaaagtccatccctaactgaactgtttcaggaacacaaagaaaacaatataagccagtgctttactttatctgacctttgtaaccagtcatctgccagtttcacagatctaagtttgggatcctttcgacatgtcact

SEQ ID NO: 174226 - DNA, 785 bp, Homo Sapiens
acccgaaagtctaatagtgcagcaaccaagtaaaagatgcatgagaacagagttctcaggtgacttcttgatgtttctgtaaattatctgtctggctttggaataagcacttatttgtggaaaatgtattatttacagtttggagtaaatgttcatagaaaagttacccagtttgatgctttgtcgagagctggatttaagtttaaatcttggttccccacttgctagctgtgtgacgtatctgttaggaatagatttagctttaagtagtaacagtggcaaaactacaaaggggtttatttttctcacataatgagaaatctttttcagtgacagtaattatagtaatgttcagcgatgccagggctggaatctctgtgattcttcgaactttttctaataaagaaaacctggctgctttagcttgaggcgtcatatccacatggtgggctgggagaaaggagggaagggcaaaggcagcttttatcaggacaagataattttgcttatgtctttggccaagtccaggttatgtggttaagtccagctgaaagactggctggcagatgagtaattagctttttagcggctgaggtagaggcatgcaaggaagagtttgggaatggacgtggggttggtcagtctacagagtctgccacagtgaccatgagtgccactggtaacctgaataagcctcacttttctcttgggtatagtaatagaaccactgggggtgggacttggactttttgtgtgacactaaatctctagcatcaaacgctatt

SEQ ID NO: 174227 - DNA, 355 bp, Homo Sapiens
accatcgagctcgcacccgatcttaacattaggtataacacttttgcctgcaaatctatcagcaacctctattacccaccacattatggctccttgattgagttcaaggaaggccccttgttttattcaaattggtctcggcaggaaaatgttctcgacatgatgagagtaataacacaggaccctcgcttgaaacggcgtttaacttggggattaagcaaataaagtcattatgtgggggctgctattcagtggagaggtgatttgctgtaattcgctttcatctgtatgaaatgaactaaaaagttgtatttttccccgaaataacagataatgttagagatacgggtggcga

SEQ ID NO: 174228 - DNA, 867 bp, Homo Sapiens
ggggaggcgacctggagtttgtgacgctgtgatggtctagaggctggagattcaagatctgggtgccatcattttctggttctgttgatgaccctcttccaggttacatacagcttacatcttgcatcctcaagcgtttttcttataaggctaaaaattcacaaagcatatatcaatgaatcaggaggatctagatccggatagtactacagatgtgggagatgttacaaatactgaagaagaacttattagagaatgtgaagaaatgtggaaagatatggaagaatgtcacaataaattatcacttattggaactgaaacactcaccgattcaaatgctcagctatcattgttaattatgcaagtaaaatgtttaaccgctgaactcagtcaatggcagaaaaaacacctgaaacaattcccttgactgaagacgttctcataacattaggaaaagaagagttccaaaagctgagacaagatcttgaaatggtactgtccactaaggagtcaaagaatgaaaagttaaaggaagacttacaaagggaacaacggtggttggatgaacagcaacagataatggaattctcttagtggactaccccgggaatttgaaaataaggggttgaacctttttcctgagtccagaaatcttttaatggcactgaaaaactcaaaatggctttaatattcagaggacttttgagggggaaagcttcttgggataccctttgggccgaagtgtccctagaaagaaccattgtttccctcctcggcctggcgataacaagcggggtgcatgcgacggaagcgcggataagaggctctttctacgtacattcctttctggtgaagaggaccattgac

SEQ ID NO: 174229 - DNA, 450 bp, Homo Sapiens
gggacggcggcggcagctccagcggaggccacaagtcctcctcttccgggtccgtgggcgagtcttcatctaagggaccaagatactaacaaaaccagagtaatcaagacaattattgaagaggtggcgcccgacggtagagttctttcatctatggttgaatcagaaaccaagaaacactactattaaactgcatcaagaggaaagagtctcccttcacacagaccattatttacagatgcatggaaaacaaagtctccaagaaaacacttctgtcttgatggtctatggaaatagaccttgaaaataaggtgtctacaaggtgttttgtggtttctgtatttcttcttttcactttaccagaaagtgttctttaatggaaagaaaaacaactttctgttctcatttactaatgaatttcaataaactttcttactgatgcaaactaaa

SEQ ID NO: 174230 - DNA, 541 bp, Homo Sapiens
cagtatgaaaaatgaggtatactgggacttaagaggtagtagtgtgttttgattgtacaacatacaggaaataaaagtgtaactttaccagagatggaaatcactcggtgcaccatgtttggccaacatgagcaattgcttccattttatgagctggccaatgaggtttctaaaaggcccatccaaagatatggaatgcgacttttatttttatgagccactgtttatttgcttatttaacgcacagttaacagtaatgttgagttttaattctctccatagctcctttggtgattcacaacagtgagcgatctgccagtctcagagaggtatgtggcctttgaaactacctccctgaagcagctggaagagagatggttttgagtttcatttggcttcagtactaaaagccatactgacaaagccgtcatgagaaactacctcctggcccagttgataataccatgttaaaaagtcagcacactcactaggagagaaaggcataaaaactctacataagaagcgtttaaaataaatctgc

SEQ ID NO: 174231 - DNA, 230 bp, Homo Sapiens
tgaaaccacagcaacgtacagatttatctgtagggatctttaagctagagtttataataggaaaatgctggaaacagctgaaacgctataaagttagggcatgttcctctggtgggaaggccatgcaggacctaaatgtaaaatgaaatggaagagtgatgcctgatgttttctcagtgtaatctgagacactgctgctgaaattgagaatacgtaatgttaaatatggg

SEQ ID NO: 174232 - DNA, 352 bp, Homo Sapiens
  misc_feature (268)..(283): n is a, c, g, or t
acccgtatctctaacattagagcaagtaaatatcaaagactggtcctcaatgagcaattctgtaaatatccaaccctcttaccttccaaacggaaaaaaggaaggtacgaaagtatttatgccgaagtaactgttcaagacatactttccccatctcatctctaatatagaagtgaaaaaagccatgtaatcccacatataacaagagttctgtattaataaaatatggaagtgtcaaccacttaacaaatttgaagattcccccgannnnnnnnnnnnnnnnggtatcttcccccgccttccaagacagagtcttgctttgtcacccagtctggagtgcagtggtgcaatc

SEQ ID NO: 174233 - DNA, 194 bp, Homo Sapiens
cccgtatttctaacattagcacgttctatcaagtctgtttacaaaagacttgccaaatctaacccctctccatctctactctcatctatgcagcatcatctcccgcctggcccagtaggcaaccttccagccccgaccaacagaagtctaatgtgagccacgtatgtaatttaaaatgttcaagtagccacatt

SEQ ID NO: 174234 - DNA, 278 bp, Homo Sapiens
tgatgaggaagacaaactttataggaagctgcaaaagaaatgagcagagcgagatatttgtggtaagggatacaaagaacatacaattgtgtacttgagaggtttcatggaacattatgacccatccaatgaagacatcaacattaacaacaaaaattaattgaggaagagcagtatgaaaatattctaatgcagtgctgtccaacagaactttctgtggtgatggaaatgttccatatctttgtgctaatacagaatctaccagccacatgaatacc

SEQ ID NO: 174235 - DNA, 777 bp, Homo Sapiens
tacaccttgtcttaaaagcaggctggtacggtccggaatccgggatatcgtcgaccacgcgtcgctccagagtggtggtttccatgcacagatggccctaggggtgacctccagttttgcgtgtggaccgtaggcctctttctagttgaatgaccaaaattgtaaggcttttagtcccaccgacattagccaggctcgtagtgaggcctccagagcaggttgtgctgtcccctgcctctggaagcaatggggaatttggaatcttgtgtaagtgcccaaataagtctgagtgctttcctcttcttcaacactcaaccctcaatcccttagcactgattgattagagaggtcccccaaagaaaccactggttttgacccatgaagcattagaactgcattgttcattcaggagccactagtcacatatgactatttaaatttaaagtaaattgtatgaaaaattcatttcttcaattgcattagccacattttgagtattcatgtggctggtagattctgtattagcacaaagatatggaacatttccatcaccacagaaagttctgttggacagcactgcattagaatattttcatactgctcttcctcaattaattttgttgttaatgttgatgtcttcattggatgggtcataatgttccatgaaacctctcaagtacccaattgtatgttctttgtatcccttaccacaaatatctcggctctgtcaattctttgagcttcctataaagttgtctttctcatcagtttgcagtg

SEQ ID NO: 174236 - DNA, 613 bp, Homo Sapiens
ctctaacattaaatgcaaaccacagaggctgaacaaacctgttatgttcagggaaacaagggacagccataagtgtcatttggcgatgtagcaagatggcaaaaagcaaatggggttacagtttgagatttataaagagcaaagttgttgaagaattttaagtagcaaacggacatgactagatatgccttatattaagatcactgtggaagcagtatgagtattaaatggaaatcagacactaatagaagactaatacagtaatcaggatgagaaagctaaggtatgaaacaagaatacagaaacaatcagagtagaacaggagtcaacaaactatgctcgtgggacaaatctggcttattgcttgtttttgctaataaagtgttaatggaacacaaccacattcattcatttacatattgtctatgactgttttcctgcctcaacagcagagttcagtagttataactgaaactaaatggcctataaaatctaaactatttactatctgtctcttcgcaaaaagtgtgctggtccttagatgagctgatttccaagttttccagttgaatagtggtgctccacagcagctaacaaacacaggagaagatat

SEQ ID NO: 174237 - DNA, 413 bp, Homo Sapiens
cgactcgcacccgtatctctaacattaaagcaatagtagcaaatgagcagagtgttggctcaagcctaagcttgagcctaagcttgactctatggtaaagtcaagtcaagggagaatagaaagggggtcaccataaaggtcaaaagtgggtttagtggttgtgtgggaataggcagatcaagaaaagaatgaagttaggaaaggagatataagtgttgaatgaccattacaaaaagagacagaggaaagaaaaatgaagatgtatcaaaagaagttgctaatatggatggcaaagtagatgtttttaagaaatcatgacaccagagtcttggaaaagtcataggatgatgcaggaaatggagaagagggaaataaagccaggtgctgaagtcttgatgtaatgttagagatag

SEQ ID NO: 174238 - DNA, 585 bp, Homo Sapiens
gtgtttttaaattaaaagttaaaaacatgagctgcacttcaaagtatctgcaggatggagaaatacatcaagaaggctgtcaaaaacagctctcagagttagagttgcattttcaactgaggttttctgtgttcaaaattcacgatcaatgcctccactgagatctttcaccactccctctttgaccagctttgagaggaacttggtttccgttgtcacattatgcatggtctgaaagttcatagcagccatgcattgactgtcgaagtagtgcaaaggtgttctgggttgattgaggtcatatccaaaacccgccaaactgacttcatcgcacagatgtgtggctaagacaacggcaatgacaccgattgtggggacgttcttatctcggccccagaaccttgactgaggctctgagtactgaaggatgtcaaaggcagtctctttgatgataactggattcaaaatcctgaaatgttttggctgcagtgggatttttggtgccacctgcttccaaaagaagagtcgcccccagaatggcagggtttccttttttaccagtgcttgaatgcagttggacgcacc

SEQ ID NO: 174239 - DNA, 142 bp, Homo Sapiens
cgggcggatcacgaggtcaggagatacgttatatctaattgaattctaacacctttaaattctaaggacgcccttcctatcttgctttttattatatgatactagggagtgcagtattttttaaatagaaatattatctagg

SEQ ID NO: 174240 - DNA, 479 bp, Homo Sapiens
  misc_feature (20)..(21): n is a, c, g, or t
acacatcctctttgctgagnnaagttggagtagttctacctctgttatggcatttaaaaattgtatatttaatttttcagtgtatttaacttctctttgtcctcttgaagttgggaacattcagttgtactctgaaccagtggatattgtgacctggcgctgtgccacttgggccagcttttgcttccttaatgaatgcacttccttcatctgttagtgataagcaggcaagtgaggaattcttatctgcatctatggattgaacatctgtttctattccactgtgtttcagtttcaacttctttgcttagaaattaatgtgagcaagtgagcctcctctttttaaagccattttggattgagagtatttgttttctgagcattttatatgcattaaattgataatttagattttttcctctaatgttttgagtgagacagaaatcgtcatcatgtgaaaacatttgggcagtgaatct

SEQ ID NO: 174241 - DNA, 1058 bp, Homo Sapiens
  misc_feature (824)..(824): n is a, c, g, or t
  misc_feature (1040)..(1040): n is a, c, g, or t
acagctatcaggatgactacggattcactggccgtagatttaaaccaagaaaatggtatcacctttgttatataatatcttttcggctgtgtatgataactatttgggggaccccccgcagatcagggcaacacagaatgactaccttcccagccatgtctctgcagtcatcctgtgtaatcatgtcctagtccagtgttgctcaaacagttaaaatccaggctgcttttggtaaacatacaaattctgatatagagcctctgtggcaaagggaatttctcagttcctgccccagcccccttgtttatcattacacagctaagatttttatttaacttagcattttagcaagttttcttatgaaaatacctttgtgctttctaagtataaagatttaaattatttttaatacggattttagaaccacagactatccctctttttagagcatcctgatcaattgcaagtacttccacttcttccctaaatgcgctttgtgtgttttccacctcagtagccttgcacacatcattacttctgcatccttctttgtgaccaagtgaatacctacctacctcttaggactcagcttcagtgattctgttttcataggctttttaaagcccttttcagtcaaattagatgctcctttgttctggtcctttactcttcccctcccatgttgtcgcactgatcacactgctttgtaattattttctttattgttggtaaactccatattttaaaaatttacctgtatacatagtgcttaatgcatggtaggcccttagtaatgtttttgaattaatgaggcatgattctanatgccaaactttgcacaaaaagttgttgctattggattccaaactgctatgccctctataccagtggctgacaaggcatatagggatatatgccatcctgagaaggagtaagtgtttagattctgaacctgagaaaagagaacttttctcttagaaagttggaaacttcattttacccttcgtgaccctgggtaaaccacttggttctcactgggntggtacaatttatgaaga

SEQ ID NO: 174242 - DNA, 607 bp, Homo Sapiens
cggctcggcccccccatatggaatcctgtgattatctgaataataaatgccatcacattgtacttttaatacatacttcatctctttcacctagtgcactatgaattactacgaggaagaatctgtgtgcctatcttcctgtcttcagtgatgatatactgaaagaatggtgtaggagtagaaatattctatttaccagtgctaactctttttcacaaaaccaggcagagatctgctcatttttactctgtaaacttggaaaagttaatttattcaatctctattttgtcctaactagactgatcatcttattactaagatgaaggaatctattgcaagttacacgttactatcatcccctggtatgaaagagcgattttgaacctgaacatataaaagcattcaagatagtgtctggcacagtagaacagggattaacaagacactggacttgatcctcaaattatttaagccacagaagggattcagactctggccttttgattgaccaccttttaagattgcttgaaaagacaacgcccttcctattagcacagctgaagccaatccagaactaaacatcagcacacaaaaaataccaggatcc

SEQ ID NO: 174243 - DNA, 420 bp, Homo Sapiens
gggaataggcgtttttctgaatccaatataaatttttcatcacgataggttctttggaaatagcttcctggcacgggggaggtggacagtaacagcagtcaaaggtcatggccaggtgttcatgggtcagcctacggcccagtttgcttggctctacaaggcccaaaacggtttggacttttccacttaaggaagacatttctgatggtaccaccaagagatgttctaaaaagaggatttcttttttctgtagtcgcagctactcaggaagctcaggaggctgaggcaggaagttcgcttgagctcaggaggtcgaggctgcagtgagctgtgatcgcgccaaatgcactctagcctgggaagcagagccagaccctgaatctcgggtaaaacgcgctgccttctccctgggaacttccc

SEQ ID NO: 174244 - DNA, 559 bp, Homo Sapiens
atgatcgggccctatttcctccctaacatcacctcctcccattccctagcccctctccagctatactgaactacttacgtgagttccggcagtttcccaccatagtgctagctgttttacaccccggtgtctatagagctcttagaaggcaatatacaaaaacccattaaacaaggctgtttatggtgatacatattaaaccttttttttgaaaccaaacatttatttcgcatttgatttcattggttcaaatgtttaaaagctggagtaaatccacctgtctttcttctgggctcttcctccaatgtgtgttaatctggccaagtatggcatatgctgttgctgaatcctggtcctctaaggcctaagaggctcatccccaggcagggcccggagtcaaagcaaatgcagaaggcggccacaggtacagtctcagtagcatcagacattgtttgggctgattcctgagtatctatcctgtccctcaggacagccagggtttggcactctaagtagctactggctcacgatcataagatcactgcaagaacatcatcct

SEQ ID NO: 174245 - DNA, 414 bp, Homo Sapiens
ttggaatccatttaccaaatcctatacattcttcaaggtcaagcttaaatgatccttcttccataaggataaacacaaatttcctatgtaaaaacaacttctctctttttgcctccctaagtacattatctacacctgtcttctgcaatttagcatgccttaacttgtgctgtacatggcttacatagtttattacctaccagacagtaagtcctttataagaatgaggtacacgtttgactcatcttttacttttcccacagttcttttcatagtgctttagaataaatatttattgaacaatatttattttatatttatgaatatcatagaaattacagtttaaaatctttgatactggttattttatgattttatgattgcagaaaaaattcttaacggatacttttgttg

SEQ ID NO: 174246 - DNA, 428 bp, Homo Sapiens
  misc_feature (402)..(402): n is a, c, g, or t
tcagctgtgatgacgctcactttacaggggagcaaataaagcagagaggttgagtgattggcgccagtatacacagggctggaggcaaagccaggctgtctgaaccactgtgggttactgaacgatagtgatactgaagcactgttgattcctggccaggtgggggccagttccccgacagctcacagccctcccaacccagacaatgacagagagaaaggaaagaaccctcaggggaggcgttggtcctagcagcatgttctggagaaagaactggagaaggaattggtgatttactgtcctgccagtatctgagctgctgagagggcaccctgggatgctctgagaagattttgccaggagatcccgctctgtatcaaaaaatttgaaattggaaatggnggaccaaatgctgggctgggtaatgc

SEQ ID NO: 174247 - DNA, 662 bp, Homo Sapiens
  misc_feature (190)..(331): n is a, c, g, or t
  misc_feature (649)..(649): n is a, c, g, or t
gagtcgactaagaaagtacaaaaaattacaaaactagtaattacacatagatgaacaactatatcttagcggagagctttcacatttatttttaagcgccaaaatggtatctagaacattttatagaatctagaataatatttgagggaattttgacactaaatcaacctgaagatgaatttaagattannnnnnnnnnnnnnnnnnnnnnnnnnnnnnnnnnnnnnnnnnnnnnnnnnnnnnnnnnnnnnnnnnnnnnnnnnnnnnnnnnnnnnnnnnnnnnnnnnnnnnnnnnnnnnnnnnnnnnnnnnnnnnnnnnnnnnnnnnnnnnctctcaatatgaaaaaggtatttgcctcatatatgtccaacgtatactgataatacagggatgggataagtgcttgggatattcccactcaaagagtggataaacagctatacgccaggcattaccatagcaagcctgaaatccacatgctgccagttccttggctggagggccgagacctgctctctggaatgattctctgcggatcttggatccaccctccagactcttgttgcaccttctgagttgtcccctttccataagaaatagcactttcagctgaataatcttctcagcttatgtctaacccataaaagnctgggggctctaa

SEQ ID NO: 174248 - DNA, 486 bp, Homo Sapiens
tactaagataaatatgcccttgatgttgtagtgcatgtgcatctacccagataaacaaattgttgactgctgaatcaatgtgattttggtctctattgatatttcatagggccctgtcttattcaaccttacttttaaaatcagtgatttggatgaaggcatcagaaacatctgatttgaggatggagcaacccaatattgctaatataatagatgacagtggcaactgaaaacagtcccagaatgaccccatcgagatgaaattaaacagattagaaatgtaacatactcatttaaattaaataagttgtataagtttgggctgaagaaacctggccttatatcatttcatataaaaaagacgggattttagttgtcctcaggttcaatatgaaccaagtagtattcatgttgttattatatgataacagaaaaattagtggtacttcaggttttatcagtagaagtgtcacagccatttaggta

SEQ ID NO: 174249 - DNA, 1193 bp, Homo Sapiens
gggcggctggctaggctgtcaagtactcccaggaaggcggacctggacccagagatgcccgcagagggcaaggcagagcgcaagccccatgactgtgagtcctctactgttagtgaggaagactacttcagcagccacagggacgagctccagagcagaaaggccattgacgctgccactcaaacagagccaggagaggagatgccagggctgagtgtgagtgaggtgggaacacaaaccagcatcaccacagcatgtgctggtacccagactgcagtcatcaccaggatagcaagctctcaaaccacgatttggtccagatcgaccactactcagactgacatggatgagaacattctctttcctcgaggaactcaatctacagaagggtcaccagtctcaaaaatgtctgtatcgagatcttccagtttgaagtcttcctcctctgtgtcttcccaaggctctgtggcaagctccactggttctcccgcttccatcagaaccactgacttccacaatcctggctatcccaagtacctgggcaccccccacctggaactgtacttgagtgactcacttagaaacttgaacaaagagcggcaattccacttcgctggtatcaggtcccggctcaaccacatgctggctatgctgtcaaggagaacactctttactgaaaaccaccttggccttcattctggcaatttcagcagagttaatttgcttgctgttagagatgtagcactttatccttcctatcagtaactgctccgtgttcagactcctggtttcttccaggcttacagtggacatcatcagcttcctgctttaaaaaatatcttatgtccctaattgcctttcttttacccgactttgtcacctttgttgtctttgaattctttaggctgcatattattttacatgctttgttttgtcatgtatataccaggtattggttttatggtttaaacactatgggataaagggggtttggttttgcacaatttttaataggccatgcactaccataatgaaggttttgggccaaggacagaccaaccgtatatggttggcagtctcataaaattataatactgaatttttaccaatacccttttctgtggttaagatacaaatacccttatgttacagttggcccacagttatttcagggcagtaacctgaatgtacag

SEQ ID NO: 174250 - DNA, 1762 bp, Homo Sapiens
ctacattggcatttaagccaatcaaaaaaggaaagaagagaaatccctggtctgattcagaatcagataggagcagtgacgaaagtaattttgatgtccctccacgagaaacagagccacggagagcagcaacaaaaacaaaattcacaatggatttggattcagatgaagatttctcagattttgatgaaaaaactgatgatgaagattttgtcccatcagatgctagtccacctaagaccaaaacttccccaaaacttagtaacaaagaactgaaaccacagaaaagtgtcgtgtcagaccttgaagctgatgatgttaagggcagtgtaccactgtcttcaagccctcctgctacacatttcccagatgaaactgaaattacaaacccagttcctaaaaagaatgtgacagtgaagaagacagcagcaaaaagtcagtcttccacctccactaccggtgccaaaaaaagggctgccccaaaaggaactaaaagggatccagctttgaattctggtgtctctcaaaagcctgatcctgccaaaaccaagaatcgccgcaaaaggaagccatccacttctgatgattctgactctaattttgagaaaaatggtttcgaaagcagtcacaagcaagaaatccaagggggagagtgatgacttccatatggactttgactcagctgtggctcctcgggcaaaatctgtacgggcaaagaaacctataaagtacctggaagagtcagatgaagatgatctgttttaaaatgtgaggcgattattttaagtaattatcttaccaagcccaagactggttttaaagttacctgaagctcttaacttcctcccctctgaatttagtttgggggaaggtgtttttagtacaagacatcaaagtgaagtaaagcccaagtgttctttagctttttataatactgtctaaatagtgaccatctcatgggcattgttttcttctctgctttgtctgtgttttgagtctgctttcttttgtctttaaaacctgatttttaagttcttctgaactgtagaaatagctatctgatcacttcagcgtaaagcagtgtgtttattaaccatccactaagctaaaactagagcagtttgatttaaaagtgtcactcttcctccttttctactttcagtagatatgagatagagcataattatctgttttatcttagttttatacataatttaccatcagatagaactttatggttctagtacagatactctactacactcagcctcttatgtgccaagtttttctttaagcaatgagaaattgctcatgttcttcatcttctcaaatcatcagaggccgaagaaaaacactttggctgtgtctataacttgacacagtcaatagaatgaagaaaattagagtagttatgtgattatttcagctcttgacctgtcccctctggctgcctctgagtctgaatctcccaaagagagaaaccaatttctaagaggactggattgcagaagactcggggacaacatttgatccaagatcttaaatgttatattgataaccatgctcagcaatgagctattagattcattttgggaaatctccataatttcaatttgtaaactttgttaagacctgtctacattgttatatgtgtgtgacttgagtaatgttatcaacgtttttgtaaatatttactatgtttttctattagctaaattccaacaattttgtactttaataaaatgttctaaacattggcaga

SEQ ID NO: 174251 - DNA, 266 bp, Homo Sapiens
ctttcttgggcatacagtgttacaaaagtgtggtctagcacagttaaatggcaactaaattggttattccagatttggctctgacaataaactgctacctgattttaaatttaccatgacatatttgtgggtctcaaactcttttccaaagacggtaaggagatacaaaaacactttaaatgtctgcaagcaaaataaaattaggccaatatttaaataaaatggttttgaataaacctactttgcgaaagattataaaccacata

SEQ ID NO: 174252 - DNA, 501 bp, Homo Sapiens
atccaaatgcagcttctaaagacagcattccaacagaggttctagcagccagtgagagactttaatcatttgcaaaattaatggtctctttacaacctcaatttctgggaatgctgcatttaaaaattatacggtagagaatttcggtgtattttacaataacaacaataactagcaagataacaaaaattgttttacaataactgcaaaagcacaggttgtgccctataaaattatctttagaaataattatgcccatggatatgaatgttccccagaattaatgactgattatctacagcatgtacaaatcattcttagtacttggtgaaaaatcataataaatttgtttaaatctgaggacatagaaaagatgggctttgctgccctggacaagctaaactcctcagtgtatgtagatagatgtactgcagcaatgatcatcttcctaatggcaaaggaagctataaaacaaggcatcggggaagaggattccaatgt

SEQ ID NO: 174253 - DNA, 498 bp, Homo Sapiens
ttagaagaaaaaagattaactcagggtttccaaaataaaagcaaaagattgtgattaaaactgaattagaatcttgattctctgttatttgctaatagtaaaataaatagctcagtcttaaagaagctttaaagtaagtcccggagcctttgagaacgcttggattttaattaaagaaatacagaataccgtcactttctgtttgtcagtggaaaaaatatgtatttttaaattttcaaagcttagcctagcagcacatggagtacatctgttggctttcagaatttggggaacacaaatggattcagatgtttaggtcctttgtctttactggtctcagctcacctcgccaactgagcatggcacaatccaaacacagtttttgaaaacagagcagctagagttacttctaaagcactctcttggggactgataaagtcaatctctgtttatgtaatgaaatcagggagcaagagggtctgctgtagtactctggga

SEQ ID NO: 174254 - DNA, 479 bp, Homo Sapiens
cattttcagaagaggaattttacttttacccacttatggtaatatttgcaatattagaatataattaggttaaataaatcaaataaggaatccagaagaaactgttcttgagttaagccaagtacacactggcaatttcgagaaaggagaactctacacattaacaaaagaacacacaagctcaaatgcaagtttatatggtgagtgtttttaaaggatttaaaaagcatgctccatcagcataatagctttttctcatttatgtaacagatgcatttctgtctgcttgtgtacagcaaagggttagaacctgaataaacttatttatgatttcagaaatgtgggtattttagaaatgtactccatagaatttacttcactgctcctaccactgattcttcaaataagcaaagtacagaaggccctatcccctgaaaaatgtttttaaacactagcactttaaattgaaacactggtag

SEQ ID NO: 174255 - DNA, 897 bp, Homo Sapiens
tggctgggccagcagctgcacctctcctgtctgtgctcctcggggcatctcctgatgctccggggctcaccccccttccagcggctggtcccgctttcctggaatttggcctgggcgtatgcagaggccgcctccacacccctcccccaggggcttggtggcagcatagcccccacccctgcggcctttgctcacgggtggccctgcccacccctggcacaaccaaaatcccactgatgcccatcatgccctcagacccttctgggctctgcccgctgggggcctgaagacattcctggaggacactcccatcagaacctggcagccccaaaactggggtcagcctcagggcaggagtcccactcctccagggctctgctcgtccggggctgggagatgttcctggaggaggacactcccatcagaacttggcagccttgaagttggggtcagcctcggcaggagtcccactcctcctgggggtgctgcctgccaccaagagctcccccacctgtgaccaccatgtgggactccaggacaccatctgttctcccccagggacctgctgacttgaatgccagcccttgctcctctgtgttgctttgggccaccctggggctgcaccccctgccctttctctgccccatccctaccctagccttgctctcagccaccttgatagtcactgggctccctgtgacttctgaccctgaaacccctcccttggactctgcctgggctggagtctagggctggggctacatttggcttctgtactggctgaggacaggggagggagtgaagttggtttggggtggcctgtgttgccactctcagcaccccacatttgcatctgctggtggacctgccaccatcacaataaagtccccatctgat

SEQ ID NO: 174256 - DNA, 858 bp, Homo Sapiens
  misc_feature (29)..(29): n is a, c, g, or t
tggggaccttctaattcagttgtaccccngtgttccatgtatagaaaaacttcattagaacaaactttacttgatatgaaactcctattaacagtctttttttgaaataaaaagtagcttgagctttcttttaaaatcatgtatcttgattgttgatttaatgaaggatttccttttaatgctgcttttgagcttcaaggtaataggacagcaggaacctaaaatatctgccatcatctgccataggaaagatacccagagacccatcatgttctctttttgttggtacactgttgggtgggtataacaattggaaaatgaacaaactgattgattgtgcaaactactttttatgacaagcctaaaccctcataatgcggcagcttaaaggggatacatatgcactaactttgatcaattatattctcatatctggtagctacacaggctcctattatctcaattgcttatgtgcatatggaatatgttacttaaaacgtgtgcattcttactgaaaatgttttcaaaggaaggtatcagctgtgggctaattgccaccaatttcagcctgccacgattcttggaaatatgtcttccaagtgccatccatcatcagtaggacaagtgtcgggagtttatttttttccagtagcaacgatgggttacatggagccatgaaacctccttctggcctcccttgtgattaatggcatgtgtttgtaaaatggatagctggggttggcagatggctagagaagaatcgcctttggtttaaaatgtatgtggtcccctaatgattgtgaccccattctgtaatcaactgagctagttccaataaagttaagcaggtttaaatcc

SEQ ID NO: 174257 - DNA, 969 bp, Homo Sapiens
ggggcagctgcagtctgggagtctttggagtaagaatggccttggaagggatgagcaaacggaagagaaagagaagtgtccaggagggagagaatcctgacgacggcgttcgcgggagtccgccggaagactacaggcttggacaggtcgccagtagcttatttcgcggcgaacaccattccagaggtggcaccggtcggctggcgtccctcttcagttctctggagccccagattcaacccgtgtacgtgcctgtgcctaaacaaaccatcaaaaaaacgaaacggaatgaggaggaagaaagtacatcccagattgaaagaccactttcgcaagaacctgccaaaaaagtgaaagcgaagaagaaacacactaacgcagaaaaaaagttggcagacagggaaagcgctctagcgagtgctgatttagaagaagaaattcaccagaaacaagggcagaaaaggaaaaattctcaacctggtgttaaagtagcagatagaaaaatacttgatgacacagaagacacagttgtcagtcaaagaaagaaaattcaaatcaaccaagaagaagagagattaaagaatgagagaactgtgtttggtgggaatttgcctgttacatgtaataagaagaagctgaagtcgttttttaaagagtatggacaaatagaatctgtacgatttcgttctctgattccagcagagggaacgctatccaaaaagttggcagcaataaaacgtaaaattcatcctgatcagaaaaatattaatgcctatgttgagtttaaggaggagagtgctgccacgcaagcattgaaaagaaatggggcccagattgcagatggatttcgtattagagttgatctcgcatctgagacctcatctagagacaagagatcgggtttttgtgggggaaatctcccttataaagttgaaagaatctgccattgaagaaacacttttctggaaa

SEQ ID NO: 174258 - DNA, 461 bp, Homo Sapiens
tgcggaccgtagccgatcaacctcaggtttatatatgaaacagaacatttcaaggtgtgctgaacttctgaaatattaggaagtattatcaatggcttgcatgccactgaaagcagaacataaacaatttctaatgaaggttcttattcccatgcatactgcaaaaggattagctttgtttcatgctcagctagcatattgtgttgtacagttcctggagaaagatacaacactaacagagccagtgatcagaggactgctgaaattttggccaaaaacctgcagtcagaaagaggtgatgtttttaggagaaattgaagaaatcttagatgtcattgaaccaacacagttcaaaaaaatggaagagccacttttcaagcagatatccaagtgtgtatccagttctcattttcaggttgcagaaagggcattgtacttctggaataacgaatatattctta

SEQ ID NO: 174259 - DNA, 325 bp, Homo Sapiens
  misc_feature (15)..(15): n is a, c, g, or t
  misc_feature (21)..(21): n is a, c, g, or t
aaataagaacaccanttaaanggctcaattcaaaaaatcttaacttttggagttcctgctttcttccacagcagtgcactcactactctctggtatacaagaagaacagcttgtccccactcttacagtgtaatgcaaattcagcagtataatgaagaaaagtgctgtgtaggaatgactgagctctaagacaaactggtaagaacaattaggtactaaacaatgggagtatagggagaagattcattttgagtgggagatgttggaacactttggaaataacactgaatttgggttctgaaagatggatataattttgatatgc

SEQ ID NO: 174260 - DNA, 787 bp, Homo Sapiens
  misc_feature (33)..(33): n is a, c, g, or t
  misc_feature (113)..(113): n is a, c, g, or t
atgaaggcttccactttgccaagccctccagtnccccattcgccttttctaggattgccatttcccaagtgctattgcaataccagttgatacttcattttaggtcccaaccnttttgagttcaactgatcaaaccaaaggaaaagtgttgctagagaaaattagggaaaaggtgaaaaagaaaaaatggtagtaattgagcagaaaaaaattaatttatatatgtattgattggcaaccagatttatctaagtagaactgaattggctaggaaaaaagaaaaactgcatgttaatcattttcctaagctgtccttttgaggcttagtcagtttattgggaaaatgtttaggattattccttgctattagtactcattttatgtatgttacccttcagtaagttctccccattttagttttctaggactgaaaggattcttttctacattatacatgtgtgttgtcatatttggcttttgctatatactttaacttcattgttaaatttttgtattgtatagtttctttggtgtatcttaaaacctatttttgaaaaacaaacttggcttgataatcatttgggcagcttgggtaagtacgcaacttacttttccaccaaagaactgtcagcagctgcctgcttttctgtgatgtatgtatcctgttgacttttccagaaattttttaagagtttgagttactattgaatttaatcagactttctgattaaagggttttctttcttttttaataaaacacatctgtctggtatggtatgaatttctg

SEQ ID NO: 174261 - DNA, 726 bp, Homo Sapiens
  misc_feature (214)..(214): n is a, c, g, or t
  misc_feature (504)..(563): n is a, c, g, or t
ttttcctgggaaaaaagttccatccaggggttcccactcccgtccccaggaaaaaaggcagggcaaggttgcctgaccatgttcttttgggttgaagagttaaagtttgcgtactttccccaagcctgcccaaaatgattatcaaggccaagtttgtctttcgaaaaataggttgtaagatacaccaaagagactatgcaatacaaaaatttancaatgaagttaaagtatatagcaaaagccaaatatgacaacacacatgtataatgtagaaaagaatcctttcagtcctagaaagctataatggggagagcttgctgaagggtagcatacataaaatgagtactaatagcaaggaataatcgtaaacattttcacaataaactgactaagcctcaataggacagcttaggaaaatgattaacatgcagtctttcttttttcgtagccaattcagttgtacttagataaatgtggttgccaatcaatacatatataaattannnnnnnnnnnnnnnnnnnnnnnnnnnnnnnnnnnnnnnnnnnnnnnnnnnnnnnnnnnngcaacacctttcctttggtttgatcagtggaactcaaaaggtttggtacctaaaatgagtatcaactgttattgcaatagcacttgggaaatgcaatcctagaaaaggcgaatgtgtaactgaggtgcttgacaaagtgaagcatccatcctccatatggtcc

SEQ ID NO: 174262 - DNA, 1022 bp, Homo Sapiens
  misc_feature (882)..(882): n is a, c, g, or t
ggtaggacgaatgtgtttggatcagtattccatgttaccggctactccatggggtgtgtgggaaataatcaagcgaactggcattccaaccctagggaagaatgtggttgtggctggaaggtcaaaaaacgttggaatgcccattgcaatgttactgcacacagatggggcgcatgaacgtcccggaggtgatgccactgttacaatatctcatcgatatactcccaaagagcagttgaagaaacatacaattcttgcagatattgtaatatctgctgcaggtattccaaatctgatcacagcagatatgatcaaggaaggagcagcagtcattgatgtgggaataaatagagttcacgatcctgtaactgccaaacccaagttggttggagatgtggattttgaaggagtcagacaaaaagctgggtatatcactccagttcctggaggtgttggccccatgacagtggcaatgctaatgaagaataccattattgctgcaaaaaaggtgctgaggcttgaagagcgagaagtgctgaagtctaaagagcttggggtagccactaattaactactgtgtcttctgtgtcacaaacagcactccaggccagctcaagaagcaaagcaggccaatagaaatgcaatatttttaatttattctactgaaatggtttaaaatgatgccttgtatttattgaaagcttaaatgggtgggtgtttctgcacatacctctgcagtacctcaccagggagcattccagtatcatgcagggtcctgtgatctagccaggagcagccattaacctagtgattaatatgggagacattaccatatggaggatggatgcttcactttgtcaagcacctcagttacacattcgnccttttctaggattgcatttcccaagtgctattgcaataacagttgatacttcattttaggtaccaaaactttttgagttcaacgggatcaaacccaaaagaaaaagtgttgcctagagaaaattaaggggaaaaaggtg

SEQ ID NO: 174263 - DNA, 1227 bp, Homo Sapiens
gggctcccggcgcagtcaccggcgcggtctatggctgcgacttctctaatgtctgctttggctgcccggctgctgcagcccgcgcacagctgctcccttcgccttcgccctttccacctcgcggcagttcgaaatgaagctgttgtcatttctggaaggaaactggcccagcagatcaagcaggaagtgcggcaggaggtagaagagtgggtggcctcaggcaacaaacggccacacctgagtgtgatcctggttggcgagaatcctgcaagtcactcctatgtcctcaacaaaaccagggcagctgcagttgtgggaatcaacagtgagacaattatgaaaccagcttcaatttcagaggaagaattgttgaatttaatcaataaactgaataatgatgataatgtagatggcctccttgttcagttgcctcttccagagcatattgatgagagaaggatctgcaatgctgtttctccagacaaggatgttgatggctttcatgtaattaatgtaggacgaatgtgtttggatcagtattccatgttaccggctactccatgggggtgtgtgggaaataatcaagcgaactggcattccaaccctagggaagaatgtggttgtggctggaaggtcaaaaaacgttggaatgcccattgcaatgttactgcacacagatggggcgcatgaacgtcccggaggtgatgccactggtacaatatctcatcgatatactcccaaagagcagttgaagaaacatacaattcttgcagatattgtaatatctgctgcaggtattccaaatctgatcacagcagattatgatcaaggaaggagcagcagtcatcgatgtgggaataaatagagttcacgatcctgtaactgccaaagccaagttggtctggagatgtggattttgaacggagtcagacaaaaagctgggtatatcactccagttcctggaggtgtaggccccatgacagtggcaatgctaatgaagaataccattcattgctgcacacaccaggtgctgaggcttgaacgagcgagcaagcgctgaagctctacagagctgcgcgtagccactaataactactgcgtcttctgtgtcacaagacagcagctccaggacagctcacgaagcaaagcaggccacatgcaaatgcccacatcccaactctataccactgaccctggcccaccatgacgccctcgcatcatacgaaa

SEQ ID NO: 174264 - DNA, 547 bp, Homo Sapiens
tgcggtactcacaaagcgtgaggaaacatgtcgagatcaggcttcctgcttgatagtcttgactaccattaaaacgaatagtgggaggtcatgaaagtcattggtaggccattagcattgatatctttaaaacatctaccctaaaccatctgctatggacccataataagaggcctgtggtatatgaaattgtctagaattcaggtgcaggtctttgccggttaagtaagggagcaacacgtaaaatgggagaggagtggggtgtactcacttgcctcctcttttgtcctgatttaaccagcatttttcaaccctgggaaaatttgcagaatctaagttgattgtaatgatttagagctgcagcagctttaactcttaccctttttccacatagttatggtgtttgagttggaaagaaacaactataggtagctacacgtacataattatctctttattcacaaagggtatagtaaaattgattgtaaataactttctaagtgccaatattcaaaacttttggattaaaatgtatttttcaccgtga

SEQ ID NO: 174265 - DNA, 602 bp, Homo Sapiens
gtaaccgatctaactgagcagctctcctgcagaaaacgcaccctccagcctggtcagcctacacgcagcagcttccgtagatatagaccttcttagcgtagcatcagcttcatgctgagatcccttcttcagttgagtcgagtaaattcattgcaaaggttgctacagactcacccctcctagctgccacctctgccatgttttcaccagtgagaaggaccttggtccctgtgtgtagacatgcattgccacagatgtggaaactctcaaagatgctgagattaagaaagctgggagaagcaagtctaaagtgagtgcaggggtgggaatcttattgtcagaacagcatctagctgcctcctttactttccccagaacccaggggtgagatgcgatctgaaacgtttatctttttagctgccttttaaaccttattccataaaattttattactttcacaatggtgagcagatataccagtataagttaagacttttcatatccctttctccctcccccaataaaattcttaagttacgcacaaatatcgtacctcagatccatgcaatctatttttgttgatcgagttacggtccgactat

SEQ ID NO: 174266 - DNA, 443 bp, Homo Sapiens
tagctcgatccaactggaaacatcttgaatatctgtaaagagctggctggttaataaattatagtatatctgattctattaatagttggtgtttgaaaacaaaaagaaataataaattactgaaagtctcatacaatgaaatattattatgcagctactcaaagtataaaacaggtctttagatactgatatcagattactcaaaaatattttttcgtataaaatgcaaagtggtacaaaatattaagtatagtgtgatatttggtttacaaagaaggattgagacatatatgtttaaaaatattataggagaatacaaattattaaccgtagtcacctcagagcaggctaatgggtgatctcatgtaagaatatttttggcatacaagagtacccttccatgctgtggaaaatttttaacacatgtactaattaggtttttg

SEQ ID NO: 174267 - DNA, 824 bp, Homo Sapiens
cgtaccgtaactcgatcaaccctaaagcaaattgagacccagagccaccctcatgccacggttagtggagcaaagaaaaggggtatttccttgagaaagggggaaacttggtttgttgaaataacctgtagacatactagctttgactcccagagttgtgtcagtatagaaatacctggatccatgccaattaccataatcacgagggcatcctaggttctttggatatgtcgggaatttataggatcttatatgccttgaaattaaggaacctctcagttattatttggaaatcttattatcagagagaaacgtattacccggagcgatttgttctgataataccggtaaccccaggtcagggaagatataaaccagaaggtctaatacaggccagttctgccacttaccagccatgtgaatctgggcattatttaacttctctgagcttcaacttcctcacctgtaaaatggggataatagtagcgccctcctcacagagttcctgtggggcccagatgagttcatatatatgtgaagtgtttcaagtgagcctgggacagagtaactagtccataaatattatttgctgttgttaacaatactgttctaattgtgttattatagacccttttataaactattatagaccctattgtagtctatatgtagactctttccccaggaaaaggcttcacacatgtaattgtttatgcagcgttagggactctcagattctgtggtctctggaaggatctgagacccagggatccatagcaactgttcagccaggagacctgctctcagtagatcgagctacagta

SEQ ID NO: 174268 - DNA, 976 bp, Homo Sapiens
  misc_feature (808)..(823): n is a, c, g, or t
  misc_feature (829)..(829): n is a, c, g, or t
  misc_feature (854)..(854): n is a, c, g, or t
  misc_feature (890)..(890): n is a, c, g, or t
  misc_feature (948)..(948): n is a, c, g, or t
ccacacatgcttctgtatttcactctttctccctattagggagttatgcaaaatttgtccccgattttacctttgtctttctgtgtacttttcaaagagtcctaaggagttaaatcttccaggtatttccacttagtattgcagccaaagaatatttaaataaacgtctttgctgcgcttgcatccatgcccagccaatatacaactgtaaagcaaatatagaaagtcggctgttgatacgattgtctgttatcgaacacattcagtgataaagctgggttactgctgcttttggtgctctcaccttatctggaagatctgcaaacattacctaaataggctggcaaggataaacactttctggaacccgagacttggccataaagataatgctgcatttttctgtcagaatcacatatgatgtgtgtcctgtagaggttatttctgcatggaaactcaacttcttggattagccgtcccagtgaaaatcctcattgttggagtgtaaaccaaatacgaagccctcttgcaaagtagcctctttcatcccatactcaaaatacccagtttagcaagcaactgagatttaagtctctctggccctaagaggtttttcctctttgctccctccaatcttgagattgggttttgctttagagtgcaagtatcataattccgtatgatagatggggcctggacacccatctcaacagggtcacttggtaattaacaatagccatataaatgcggatacaggttactaccctcaccctttaccttcctcaggtaacagtcgtagataccagcnnnnnnnnnnnnnnnnaaaatnggctttggccagtagctaaagtgcnaagactgaattaatgagaagattttttaaatgtagncttaggggcacctgaggagcaagggtggccttgaagaggccaaagtaatgttttggcnggattcggggatccccctaagagtccga

SEQ ID NO: 174269 - DNA, 912 bp, Homo Sapiens
  misc_feature (358)..(373): n is a, c, g, or t
  misc_feature (759)..(815): n is a, c, g, or t
atggaaactcaacttctggattagccgtcccagtgaaaatcctcatgttggagtgtaaaccaaatacgaagccctcttgcaaagtagcctctttcatcccatactcaaaatacccagtttagcaagcaactgagatttaagtctctctggccctaagaggtttttcctctttgctccctccaatcttgagattgggtttgctttagagtgcaagtatcataattccgtatgatagatggggccctggacacccatctcaacagggtcacttggtaattaacaatagccatataaatgcggatacaggttactaccctcaccctttaccttcctcaggtaacagtcgtagataccagcnnnnnnnnnnnnnnnnaaaatgggcttgggccagtagctaaagtgcaagactgaattaatgagaagatattttaaatgtagtcataggggactgaggagcaagggtggccttgaagaggccaaaggaatgtccatttgctgagtttcccttccttatgtctccagtctggtgccaggtaggggagtaaacaaaggagacagttaattttttaatctctatgtgcacacttacagtatacatatatatttatatcacaatttacgaaaccagaaagttgagtttccaatggaacccttgttttttaataatcgactttttaaatgtgatcaggactataatattgtacagttattatagggcttttggggaagggcaggatagcgagaagatgctctgggggnnnnnnnnnnnnnnnnnnnnnnnnnnnnnnnnnnnnnnnnnnnnnnnnnnnnnnnnnccatttctgtattgctggcatgtgtgctaagctttacagtggcaaaaataatgacatgtagcaaagattttcaaacaaaatattttttccttttgta

SEQ ID NO: 174270 - DNA, 841 bp, Homo Sapiens
gggtaatactgaagagcaaaagagaggcaggattggggtcacagccgcttcttcagcatggaccaagtgggccttggggattgcagcgttctcgaagtggctgtaggactcgaatttacagaaagccacagaggtgcaacttgaggctctgctagcaagccaccagtgaggctattgggtaaccacctttctatacaggagattggaatctactttgtcatttatccaccacagtgacaaaggaaaagtggtgccgttatgcaatccatttaactcataaacatattactctgagtaactggccagccattcatcggatccttcattgggtactcctgaaatcagacatgttcctgtagaaagaattttaagttaggctttctatgcacctatcaagaatcaagagaatagattgtatcaaacaacggcagggaaatccttcagcaattctaatccactttgggttttcagctgtttttacatctaaagcaatagactagaactgaattatcttctacatagtaaaatcacaattgtggaattacaggaaattctgggtgatattaagggtgaaatacccaaacacaaaaggcccctatttttaacagtttgatgtggacagtaaagtttttaatagaaaccctgtaaacttcatttttgggaaatgctttctccaccaaaataaagggcttttttccccctattttaaggagcccagaatggattggaagaatggtggaaattaaggcagcctggaaaaaccttgattccttccagggtacccccatgttcccttttatttggagcttaaattaataaaactggtccaactttggccacc

SEQ ID NO: 174271 - DNA, 1079 bp, Homo Sapiens
  misc_feature (575)..(698): n is a, c, g, or t
  misc_feature (706)..(723): n is a, c, g, or t
  misc_feature (729)..(748): n is a, c, g, or t
  misc_feature (763)..(842): n is a, c, g, or t
  misc_feature (848)..(908): n is a, c, g, or t
  misc_feature (944)..(954): n is a, c, g, or t
gggtcctgaaattttagtctattctgggtaaataggattttctgacacagatatgagaagttgtagctctgatgtctagctgtagtctccttgatctgctgattgcattattttaatttgcttttctgggaaagcagttttgctaaaagctgtacagactttttcttttgtacctagcagtactttatatagtatagctttgggccatgtagcattttaagactcaattttaaaaaattattaatctgttgctgactcttaattcctatttcaatatgtgtttccttgaagaattcaggatacaacttcttgtgtatgacagctttccttcacacactatttttgtgggtgtgtatatatctgatttgggaagaatttaaaaaacacatagctttttaatttgtttgaaacagactttctgcctgttacatttttgcttttaaccaattaaagaagccaatggcattttagttttatattgtgttttccactagtatatccctgttgatttgtttgtgccttttattaactgccattttctaaaatttttttcaataaaaggaaggaagatgtgnnnnnnnnnnnnnnnnnnnnnnnnnnnnnnnnnnnnnnnnnnnnnnnnnnnnnnnnnnnnnnnnnnnnnnnnnnnnnnnnnnnnnnnnnnnnnnnnnnnnnnnnnnnnnnnnnnnnnnnnnnnnccctttgnnnnnnnnnnnnnnnnnnaaaaannnnnnnnnnnnnnnnnnnngggcccgggcccccnnnnnnnnnnnnnnnnnnnnnnnnnnnnnnnnnnnnnnnnnnnnnnnnnnnnnnnnnnnnnnnnnnnnnnnnnnnnnnnncccccnnnnnnnnnnnnnnnnnnnnnnnnnnnnnnnnnnnnnnnnnnnnnnnnnnnnnnnnnnnnnaaaagggggccccagggggctctcaaattaaattannnnnnnnnnngtggcctttttggggagggggggggaattttattaaacttttcgcgcgaggggggaacccctcccaaagggggggtgaagacccttaatccccccggcggaaaaaaccccttttggcccctttgg

SEQ ID NO: 174272 - DNA, 542 bp, Homo Sapiens
  misc_feature (67)..(67): n is a, c, g, or t
  misc_feature (70)..(70): n is a, c, g, or t
  misc_feature (384)..(417): n is a, c, g, or t
ggttgttaccaagcccaagcagccccaagtttctcgggggaaatgaagcaaaagcccagggtagggncanaactgctggggcctttccttgcctgggaatctgccccaggaagagcttccccactcccatcccccaaattggaaaaaccgtacattcaagcctgtttggccctgaaattcttaagaatctggttaagaattaactcactaatgtcaaaagtcaaaacctcctaggggttgtcctgggagtcaggttcacgggtacagaagatgaatctcagatgtcactcaacctgagccgtcattctctgtggcagggctgccctgggtttctcttactcaatccctggagtgtaagcatttggattgtgtcacagattaccnnnnnnnnnnnnnnnnnnnnnnnnnnnnnnnnnncaatatcagtgcccacaccttactgagtattgagttttagagctttcgcttgatgtgcttgaccaagagacttcttttgtatccttttcttgtcctatgatgtaaataaaagcctcgatttatgt

SEQ ID NO: 174273 - DNA, 645 bp, Homo Sapiens
  misc_feature (484)..(506): n is a, c, g, or t
  misc_feature (508)..(512): n is a, c, g, or t
cccctcccttaatggccggtcatgtgccttgtgacgcaacaccgggagggtacagtataatttaccgccattttcctcctttaaaaattacaatccctggacatagaaccatagcatgggctttgatatgctaaggtctgcatggataattgtgaaatgggaaagactttaaactctgcactccaaaagcttattgggatttttctctggcactgttttgtgtaatgcagaataatgattttatttctacagctttgtagattctaacatttatgtatctttattttcatattgtacagtaattttactttaaattatttaaataggctattttatttatttcaaatgcagttgtattagttctcattattgaactgtctgtgcactgtatgtagcaagcatttttcatctgttgtatacaagtggaaagggtattagaagtgtaactgtgctattatttcaataaagacctcttgacatttannnnnnnnnnnnnnnnnnnnnnnannnnnacctggtcggccgccccggccctcaaaagcttttcaaaaccttcctttggcgcccggggcccggaaggaaagggacctgggccttacttgtttctaagaaaacccgggccttggatagggctggaatcccccc

SEQ ID NO: 174274 - DNA, 980 bp, Homo Sapiens
  misc_feature (331)..(390): n is a, c, g, or t
  misc_feature (393)..(440): n is a, c, g, or t
agacctggttggccgtggtccagctcttggcccctgtgtgagttgagtctcctctctgagactgctaagtaggggcagtgatggttgccaggacgaattgagataatatctgtgaggtgctgatgagtgattgacacacagcactctctaaatcttccttgtgaggattatgggtcctgcaattctacagtttcttactgttttgtatcaaaatcactatctttctgataacagaattgccaaggcagcgggatctcgtatctttaaaaagcagtcctcttattcctaaggtaatcctattaaaacacagctttacaacttccatactacnnnnnnnnnnnnnnnnnnnnnnnnnnnnnnnnnnnnnnnnnnnnnnnnnnnnnnnnnnnnccnnnnnnnnnnnnnnnnnnnnnnnnnnnnnnnnnnnnnnnnnnnnnnnnagcggggcgcacacagagacaaaataccgccgacgaagggaggccaagactaacagagaacaaacagagtcaagtactaacaaaaagaagggacccacaaaaacaagggaagccgacgaaaaaccacaaagagcgagagcgcgaaagggcggccgcggagagataaaaacaacagacagcggacgacgggaggaaaacagaacagacgcacaacgaaagatacacgcgggggagaagacgagaacaaccaaaacggggggagggggacaaacaaaaataaaacaatggtggtgagaaacagaaaagactccacagccccgaaagaacgattaattagtaaacaccaaattatgtgaggaagaaaaacatcaaacatcaccgccataacgagatatgaaccaaaggtagataggcataaacacgacagagctgagatggcaaattcgaatactgggtgaacggtcaagataagactaaatctctctgtgatctatctactgattaattgactatcatatggcagcgccaaacattgtatcg

SEQ ID NO: 174275 - DNA, 296 bp, Homo Sapiens
tccaggatgatacctaaatggctgtatcataaccctgtgctaatgtttgaaaaccttaagtgtgacattttaattctataggcctgtggactttctcctcgagacattaccactattaaacttcccaatgaaactagagacatgttggaaaggtatgtatacttcatgtagcaggaaaaatatgtgtgtatgttgaatgtacttgagactattttttagtttttcttgaacaacatggtcggtataatattatattaaaattaaatttttgactctgttccacagccatttaggta

SEQ ID NO: 174276 - DNA, 308 bp, Homo Sapiens
aatggctgtatgacaggtaccatattaagggcagcattttataacccatatcttaaacatcatctctggaagttgagagcctccaatgggttttctatagagtgcacatgataccacactcaggcagttcatggagtgtaagacatatcttagtgctttgtcatttgacattttaattgagaaaataatacactttgataagtttgacttacagttcccttccccttcaggtatctgctgtgcgtttcagtcaacaatacagcttgtgttcgacaatattccttgatgacagcacagccatttaggta

SEQ ID NO: 174277 - DNA, 349 bp, Homo Sapiens
tgaagtgctgcaggacgacacagtaatggggggcggacttagaggggagggccaacagaggccttctgaaaaaaatgacatcttaaacagacctaaagactgtccaaaagtatgtcaagtgaaaggggaagcaaggcattgcaggcagaaggaaacacgtatgtgaagatcctgaggcaacaggaaatttgatgcattccgagaacagagactgagcaagagaagggaacagaatgaggctagacagggagacaacagctggatcaccgaaggctctgaaagacgcagtcatgagcttggattttatcagaagggtaatgggacagccatttaggtagggtaccgagct

SEQ ID NO: 174278 - DNA, 464 bp, Homo Sapiens
ggtttctgattctgacccagcagtggtcctgaagagagctgatggcaagtcttgtagtcattttgattttaattgaagggtgagcacaaccttgtgaaccagcactagcttgttccaagctggaatttatctaatctatttttgtgtttaaaaaagctgtacataccaaataaataaatagtttataaaatgtattacttaaggtattagctgagtttagagtactttctgcttaattaatttttatacttaactcttcagtagaggtttacaaagagtacaaaggttaaattacaaattcattcccagcctaggctctgggcacatttcctgttcttgtaattctgctcctgaagagggtgaacaaaggggggcagtccaagttgtgagctcagaattactttaaaaagggaggtaacagccagccattacacctaaatttaatttattttattaaattacct

SEQ ID NO: 174279 - DNA, 747 bp, Homo Sapiens
cctaaatggctgtgaaagaaccaccagcagctagagggaccaggcaaagttttctcacagcaactgctgatgaaggatttcccacaccatcttcttccggaagagaggcatctggtgctgagtaaatgtgataggtttgtccctagaaatataatctgcatatttacaagtaaacattccacaatcactcccattcagctgttgaggaatctcgtgtggtttcatgctgtgatgggtccactctaaaagattcagatcactatttcttttggtcttactttcatcctgtaaatactgaaggagaatctcacagatcctgtggcccttttgtcccatagaatccagatatttaagacacttttttcttaggtcaatcaccaccaggctccaatgtaccttccgatgaataggcaccagaataatttcttgttcaaagagatttacccctttggtccatcgtttcactgcattggtaacccccagactttaatttaggatagaagaaagtactgaatacatgaagtgctggatagccttgctttttatttctttccaccagaagattcatgtaaaaattaatgacttcatcattgagccagtgatagttctttaatgtctgaatatctcctcgagtaattcgcaatttgaaagcactacttaggatttcatcctgtgggccatggcctagggcattactgatttccttttccatgtcctctgtaagttcaaggagatcgtccgttcttc

SEQ ID NO: 174280 - DNA, 659 bp, Homo Sapiens
gggaagggctgttaaaagaaaagggaccaataagaaaatccatctaaatggtagctcttgaggaggaaattaacttcttgaggggataaattagagggtaccaagtttatgttctggaatgtaccctggggagggcgctgcccactggtttggtcccagtggactgaaaggtggtgctctcgagtcaggcgcttagtcccagagagagctgggtgccgcggggctcgtggtctgtgcctactcagggaaatgacttaggttctcccaggtgctctgttgataaggatggaagcagaactactttgagacacaagcaacaatcggaagagtttttttaatatgaactgaaatagatctaagagagcctggttaacagtttcctttaataccagttcagattaaatggttactttaggaacctgtgtcactgtgtgagcacccacagaaacaagcaaacttatttcctacaaaaaatgaggggataataaccgatcagagtcacagtcgtgtcaatataaagccttccgaagagcgatgagcagggatcacttgagacacgacgtgaagtccaaggtttgtcagtgatcttaatcacagattgagactgacgtagacatccgtgccttgtaggaaaaaaatatcgcccgaggatggagacc

SEQ ID NO: 174281 - DNA, 657 bp, Homo Sapiens
ttgtttaggtggtttttatttccacatctccaacagggagtctggaaacaaactgacaatactcgtgaaatcaacacccagatgaggtagaccagcactccaggatgcccctccccagtatccctcccctgttaactgttcccctggcttctaacaccatggatcagttttgcttatttctgtactttttgtaggaagagaatcatacaatgaattctctcttgatgatgaggactctgacctcttttgcttgacctcatgtctgtgaaatttatccatgttgctgtgcatagcgatattttcattcatattcgttgctgtgcagtagtattcgaccctgtgacttcactgtagcttcaactgtggatggacatttgggttggtggatggacatttgggttgtttcaggtttggggctacagtcagcgtgtggttagaaacattcttgccaatgtctcggtggacatagctttctgtggtgtacatacccaggagtggaactgctggatcagtttatacgtatgttcggcttcgggtagatactgccagttttccaacagggtcacaccagcttggtccattcaggttacaatgaaacaccttagcctgggtaatttgtaaacaacaaaaaattatttctcaacagcccattaggta

SEQ ID NO: 174282 - DNA, 432 bp, Homo Sapiens
taccaaatggctgtggatggtagtggtgatacatattacctaatagagagaaatgcagagtacctgctatacttcatatgacccaggttttgagggaagataaattactctctgtaaaaagagatgctaagtactacagactattataaatgatagctaattaggggtgtttgactaatctgtattctaatatcctaatttagattggcaacttctcttatctgagtattgggagctccattaatacatggtagtgttctttttgtcagtctgtaggtatattgttagagccatgcagtgaccgtggtgatagtgaagatggctgtcttgagaggtaagcattttttcttgttgctaattaatcattttgagaattggagctcctcacagatttttgaggtgatttttttagatgaatgtcctaactaatat

SEQ ID NO: 174283 - DNA, 746 bp, Homo Sapiens
gttacattacttacacagtatacacaaccgacttaataaactgttagtcatagagaacattcaagaaatacaaatgatttatccacagcacagttcacatccataagaagaaagagaaagggttaagtacttaaactgtcccactgacacctgcttatgaaatcttttcctttctttctttttttaaaggaaactgagattgttagatgaagcaagccgtcctgctcccgcacagcctgtgaaacctccattttgccactttcaaggtcagtgccccacagaccctggcctgttgttgaccataacactagctttggccacaaaagccagggacacctacgcttggaaatgtgcctgcaccactgtgtggtgcctccttaagttgccccagactccagatggtcaaagaaaaggtgaatgtccaggtggctcatggctccttagtatggggtgtttggtggggaatgaccccggcaggttaggagacagcgacttaggccaagcccatattttctggtaatataaaggacacttctattctgacttgttattcctagagctgttccggtcactggcttcttcctgtttatgtggtaggtcagaaccgtgacggagcaaggtgagcgttcacattctcgcatagcttatgggctgcctaaagtgctgccgggagtggggagaccaccattcattccctgggactggtttctttctcggctaaagctagaaggacactgatgtttgcc

SEQ ID NO: 174284 - DNA, 893 bp, Homo Sapiens
tgccatggggggcaagacccaaggttggtggggactcgggccttgttcgcccgtaagcctgaatcatttttcacctaatacaccggcctgggtgattctcttgccattcatcgacagtcagcatgtcatccacaagtatttccctgccccgagcctatgctgtcgccatcccactggctgcaggcctcctgctgctcctgtttgtgggactgttcatctcctacgtgatgctgaagagcaagagagtgaccaagaaggctcagtgaaggtcccgcagggatgaggctgccagccccttctctgcttcccctccagcacagggaccaagtgggggagcctgcagaacctgtccaggcacagtggctcctcaagcctgcctgtcctgcagagtccccatggcatggagcttacacctgactgactggagccccctccccgactcccacttccagaagctaggagggagggatacctggaagactccggtcacctccttcttgctcagggcctaaaagatgctggtcctcccaacctcactctcagactccctgccaccttttcccctgggttctgccgtcttgcctcacttcccctcctgtcacatgctgacgttggacttagcaggttctaaggccacatgtgtgacctctctgacttctcttcctccaccaaggcagctttccttaccctgacacagccccagaccccacaaagccttctggacctggaaagcctggggaaggactgacagaccccaggaccagccctggggctcagggcagccaccccgggccgctgaccgactgacctctcctcacggaggcccagccccaaagccccagggctggcccgtttgggacagctgaccaataaacactgatggtgtgtttgtc

SEQ ID NO: 174285 - DNA, 1161 bp, Homo Sapiens
  misc_feature (60)..(60): n is a, c, g, or t
  misc_feature (112)..(112): n is a, c, g, or t
cagtgtttatggtcaagctgtcccaaaaggggccagcccctggggcttgggggctgggcntccgtgaggagaggtcagtcggtcagcggcccggggtggctgccctgagccncagggctggtcctggggtctgtcagtccttccccaggctttccaggtccagaaggctttgtggggtctggggctgtgtcagggtaaggaaagctgccttggtggaggaagagaagtcagagaggtcacacatgtggccttagaacctgctaagtccaacgtcagcatgtgacaggaggggaagtgaggcaagacggcagaacccaggggaaaaggtggcagggagtctgagagtgaggttgggaggaccagcatcttttaggccctgagcaagaaggaggtgaccggagtcttccaggtatcccctccctcctagcttctggaagtgggagtcggggagggggctccagtcagtcaggtgtaagctccatgccatggggactctgcaggacaggcaggcttgaggagccactgtgcctggacaggttctgcaggctcccccacttggtccctgtgctggaggggaagcagagaaggggctggcagcctcatccctgcgggaccttcactgagccttcttggtcactctcttgctcttcagcatcacgtaggagatgaacagtcccacaaacaggagcagcaggaggcctgcagccagtgggatggcgacagcataggctcggggcaggaaatacttgtggatgacatgctgactgtcgatgaatggcaagagaatcacccaggcggtgtagtatggtgaagatgatcaggctaacgggcgacgaggccgagtcccaccacctggtctgtccccgtggcctggagaaaagggaggtctcagctgacgaagtgaccctctatttcggcgcactaatggaagcggggcgtcgcggcccgatcacggtctaagcttcccattcaacagatggtagaaggctgactagggatcagtttctaggctgggagagaatgctaggcctccgcgttgtcgtccgtacatagtgggggcgggagagcatccccgttccaagtgcccatgccccagctcctgagcagacccgggaccccacccccagacgcccctatctccggcacacggtgccaatctca

SEQ ID NO: 174286 - DNA, 512 bp, Homo Sapiens
cgatatcatagagagtcattcggcattacctaacctcttctgcagttggatctatgtatttcattggtctactgaaaacaaacaatacaattaaaagcactaaagattattatattaattcaactttgatctgatatatcacttaaactaaaggggtgtgtgtggtgtatgcttgtttcctatttctgctctttaaagatactttgaatcaataaaaccattagtctacaaatcaaattgtgaacttaatctctagaaagagaatataactcagccatttataggaatttaggttcaagtacaggatatatgaaatcttttcccagtatttcagaacgtacttaattcacaggcaggatgcttcaatgcgaaatcatgaatatttttaattcaaaactaaaatgtcattaatatgtatgtatgcaaatgttttatcttattttctgaaatgcatctactttcatgggctttgtacgtttctgagatttctcagtgtaataaaaagagctccc

SEQ ID NO: 174287 - DNA, 783 bp, Homo Sapiens
tctagaggatccttacctaaatggctgtaaaccttatcaccaaggcggcaggagctgacttcttcaaaagagttgtggtcccgggcagcggtcatgcccgtgcccatggctgaagggctgattttagtgtgccttattatgttggccctgaggatgcttcgaagtgaaaataagaggctgcaggatcagcggcaacagatgctctcccgtttgcactacagctttcacggacaccattccaaaaaggggcaggttgcaaagttagacttggaatgcatggtgccggtcagtgggcacgagaactgctgtctgacctgtgataaaatgagacaagcagacctcagcaacgataagatcctctcgcttgttcactggggcatgtacagtgggcacgggaagctggaattcgtatgacggagtcttatctgaactacacttactgaacagcttgaaggccttttgagttctgctggacaggagcactttatctgaagacaaactcatttaatcatctttgagagacaaaatgacctctgcaaacagaatcttggatatttcttctgaaggattatttgcacagacttaaatacagttaaatgtgttatttgcttttaaaattataaaaagcaaagagaagactttgtacacactgtcaccagggttatttgcatccaagggagctggaattgagtacctaaataaacaaaaatgtgccctatgtaagcttctacatcttgatttattgtaaagatttaaaagaaatatatatattttgtctgaccc

SEQ ID NO: 174288 - DNA, 444 bp, Homo Sapiens
  misc_feature (25)..(25): n is a, c, g, or t
  misc_feature (43)..(43): n is a, c, g, or t
  misc_feature (51)..(51): n is a, c, g, or t
  misc_feature (67)..(67): n is a, c, g, or t
agtgtagttcagataaaatcccgtnatagaaatccaagcttcnccgtgccnactgtaacatgccccnagtgaaacaagcgaagaggaatcttaatcgttgctgaaggtctgcttgtctcattttatcacaggtcagacagcagttctcgtgcccactgaccggcaccatgcattccaagtctaactttgcaacctgcccctttttggaatggtgtccgtgaaagctgtagtgcaaacgggagagcatctgttgccgctgatcctgcagcctcttattttcacttcgaagcatcctcagggccaacataataagcaacactaaaatcagccctccagcaatgggcacggcaatgaccgctgcccggaaccacaactctttggaagaagtcagctcctgcaccttggtgataaggtttctgctaccatcatgctgatacctgtttc

SEQ ID NO: 174289 - DNA, 390 bp, Homo Sapiens
gggtgctctagaggatcctcctaaacggctgtgaactgcaaacttgctttatgattgacttggtgcaataaagttcctttctaaccatttctggtttagaaaacattcagccatcctagaaactagcaatatttatttttgcctctttcgttttaccttcatttttagatgaggtaaatgtcttgtcttttacttaagggtactaagcaaggtccactctagtgtagctgaagagaatgcatatttggctacactatttccgtttactgtattttgcttcctactttatgtctaaatgctattgtttgtttaaaatcctaataatgtctcatttccaatatgttattttcagataactaaggtttggctactaatgacagccacttaggt

SEQ ID NO: 174290 - DNA, 443 bp, Homo Sapiens
acgagtgtgctgaggtgactctacaggatctttacctaaatggctgtgccatgcactgaggtatgagctttacaagtgacttgtcagctggctctgtacttctattgggctggttccttcaccatttccaaaggggttctggagaccttgcaggaacaggaacagcaccttagccaagagggttccaggcctcctgcctaggcctgggctctcctcgttaggttcccaggaataaattgagttcccattggcagcacttgcaggtattgctagtccacggcaagatctgtcttagggattttctggtacagccgtgaagagaaagtgagggtttaccacataatccgggatttcttggcaatgcccaaagactttctgggccttctaagagcaacagtggatcaagctggtaacccccatcaacactcagaaacgcagcatgg

SEQ ID NO: 174291 - DNA, 1019 bp, Homo Sapiens
  misc_feature (544)..(544): n is a, c, g, or t
gtttttacacagtttattcagaagtttaaaagttaaaatgtgggcattttcccctgaaacaaatcatcccctgccactccccaacacaaagactctcccaacaccgcagttccttctctttacccaggcttaccacacattcttgcaaaacacacaggagtcaacaccccaactatttggtaatacaaagagactacaaagtcacacaaaagaatctcatttacttccttttcactagcaggctatgaatgaaagactgagaggcaaacacatcaccttcatccagagttgacacttccctaaccttttttcttcctctaagaggttaaaatccaaagtagtttcactgacaactgtaactctgatattccatttttctcttctgaatggctaagctaggacatactttcctttcaaagctgatcttcagaacctcaagactggcagaaagcaggctcccagctgcagctcggccacaatactttgcaacaggcaaagttcccacataggtgcaaatgatgctttaagagttatcaaaactttntaaaaaataatgcattaatatggagcctccacatttttctgacgaaattcctctaaaggtggtggcagctgtgaaacagaaggcactttgtgctaaaattcagagggtctctcaagagagaacgccacagcagagagacccaatccgcctaagttgcaggcgaccctttagggtggggaggagtatcccccaggaaggcatctgcaaaggaaaaaattgtaatcatgattccaaggcaaaatggctaaagttgggagagaagaaataccaagagagaagacaaaacatggctgtgccaaggactgaggagtgagctttacaaggacttgtcagctggctctgtacttctattgggctggttccttcaccatttccaaaggggttctggagaccttgcaggaacaggaacagcaccttagccaagagggttccaggcctcctgcctaggcctgggctctcctcgttaggttccccc

SEQ ID NO: 174292 - DNA, 831 bp, Homo Sapiens
  misc_feature (296)..(395): n is a, c, g, or t
  misc_feature (534)..(632): n is a, c, g, or t
tagctgttacctaaactggctgtttacaggtgcatttagttctgatatttataaagatgacatttcacagaataactttaaaatagtttgaaattctatatagtttagacatcgatcacatctggagacaaaataaaatgtgcaatattttttatgtaggcgagctaacacagtgtacctaattgcagaattatctgattaatttgtaatagataagttgtataacattttcatatcttaaaatgttttttagatcaatcttgaagtgaaatattttcaaaataaaattctacagnnnnnnnnnnnnnnnnnnnnnnnnnnnnnnnnnnnnnnnnnnnnnnnnnnnnnnnnnnnnnnnnnnnnnnnnnnnnnnnnnnnnnnnnnnnnnnnnnnnnttgggcggccccccccgcccctccaaaaattttttaaaccttttctttgggggcggggccccaaagggaaaggagaaggggcccaaactggttccaaaggaaaccgggggcaaagaaaaggggctggaattcccccccnnnnnnnnnnnnnnnnnnnnnnnnnnnnnnnnnnnnnnnnnnnnnnnnnnnnnnnnnnnnnnnnnnnnnnnnnnnnnnnnnnnnnnnnnnnnnnnnnnncccccagggcgaggctccatatataaaaaattaggcccccgcccccggggcatattttttggagagaaggtggggggaaatttctataaaaactctttccgccccaaagggggaacccctttccacacacgggggtggggggaacacccgaaaatccccccgcgcggacaataacacccccttgtggcgcccctgtggg

SEQ ID NO: 174293 - DNA, 265 bp, Homo Sapiens
gcttatactaaatgctgttacctaaatggctgtcaccctggccaccaactacacttctctccacacaccggatctcaaaactttctgaatccacctcttacttgttctcagtttgcgccatccattttctgaagaacatcttgtagtagctgtctaagaaaaggtgtcaacaaagaagagtcaaactctgtaaaatatttgaagaaatttattctgagccaaatacgactgaccatggcccattacacagccacagccatttagg

SEQ ID NO: 174294 - DNA, 420 bp, Homo Sapiens
gggagcagcgcaacgagctggaggccctggagtccatctaccctgactccttcacagcttgattgcacattgatccaaccctcctaacaactagtcttccaaaatataaatggactctcctgataccacattctccttcagtagtgcttcacttgacaaggtcctgctaagtattatcagaaaatccacccagcttcaccattactgtgacgtctgaggctgggagaaaatgatgaaactgtccagactaccctcaagtttacatacagtgaaaaatacccagatgaagctcccctttatgaaatattctcccaggaaaatctagaagataatgatgtctcagacattttaaaattactagcattacaggctgaagaaaatcttggtatggtgatgatttttactctagtgacagctgtg

SEQ ID NO: 174295 - DNA, 442 bp, Homo Sapiens
gggagctgtctgggctgctgcgcgccgcctaggtgtctgggcgatctatgggcaagagcaagggccacgatgacagattacggcgaggagcagcgcaacgagctggaggccctggagtccatctaccctgactccttcacagtattatcagaaaatccacccagcttcaccattactgtgacgtctgaggctggagaaaatgatgaaactgtccagactaccctcaagtttacatacagtgaaaaatacccagatgaagctcccctttatgaaatattctcccaggaaaatctagaagataatgatgtctcagacattttaaaattactagcattacaggctgaagaaaatcttggtatggtgatgatttttactctagtgacagctgtgcaagaaaaattaaatgaaatagtagatcagataaaaactagaagagaagaag

SEQ ID NO: 174296 - DNA, 402 bp, Homo Sapiens
tgtacctaaatggctgcacaacactgtgcattacacatgtgctttgattggcttgtaaccacagcagactacaaacctgagaaagtgttcatagttttcattggaatagaatagagacactcatatgttagcaaactttacctaaagtgtgagaagctagtaaaaatatctgtgtagtgttcatgtaggtgttccctttggagttcttcctgagcattatcacgctgatgctcccaggaggtggctagaatgtcagtgttggcgtccaccaggttagggaaataagagcctgaaatgtcatcatttggagcttggtagctgctgattgtgtcgtacagtaggtctagacctggagtgtatctgtaaaagcgcatgcaacagatagatgaggagaaatgtaaa

SEQ ID NO: 174297 - DNA, 420 bp, Homo Sapiens
cctaaatggctgtaaggcaacgaagttatttttttaatcatcagatttatactagctatatggatattagcacatctggtaattatgaatctagaatttttttacatatttttataatactgttagctcagttattggatgagtgaaagataatcatgttggttttaatagtgtcaatttttgtaaaataaaaattaaacttcaaactctttactttataaattgtccataggccacactttaatatcacattataaagggaaggacagtcttcattcctcctggttattggtttgtttgtcattaaagatatattttgaatccatgaaattgctatgctaaacagcctttacatgtatggtctggttaaagttcctttgttccttttgttttaataaaatgtgtcactgattttttagc

SEQ ID NO: 174298 - DNA, 271 bp, Homo Sapiens
gtatatgagagaatatttgagttgtgaaaggcagaaagagaacaagaacaaatgagtaggagagggggctgggggttaagggacagggaaagggaaggagagaggagagagatgccagagtgctctcctctagcctcttgccctctctttccctgtgactgggaaataatgacacctagagcagctgtcttaaactcccaagctaacccaagtgttgaggttggttttgatggccatacacttagccctggactattattggaaacaagct

SEQ ID NO: 174299 - DNA, 574 bp, Homo Sapiens
  misc_feature (124)..(124): n is a, c, g, or t
agaggatcccctaatggctgtacagtaagttcttaatacatgttaggtatagcagttatgttattaatggatatgttgaaggacattagctcaaaaatcttataagcaatctacttggtaccanatactgattctcaaagaagtgctcttaatatttttgctctatttttctgaaaatttctgtgaacaattctatgaattcagctgtcaaacacatccagactgttacagcaatgtgaatacatacatgtattgaaagtggccagtgagtgagcaataataattgaaatgcaaaaccatgcagcatgagaacaacacaaaatataacatgatggagatggcaattccatgctagcatgttggtgggccctgacagacacacagagggggacataagacatcaaaaaacctgtagcaaccttttaagagcatcaggtgagaaagagtaatagtttagtaatggtattcctcagtgagaacaggttcgcagaaaaaccgagagccacgcttgggggtgcgagcagtaaagggcacagtcttcagcactgcattgaaaatgacagccatttaggta

SEQ ID NO: 174300 - DNA, 465 bp, Homo Sapiens
taccttaatggctgtaacattatgttcccgtattcccagaaaaagaatatgaaggtgaaaaggtttctgtcacaacaagattactgatttcccatttaagtggaattcgtcattatgaaaaggacataaaaaaggtgaaagaagagaaagcttataaagccttgaagatgatgaaagagaatgttgcatttgagcaagaaaaagaaggcaaaagtaatgaaaagaatgattttactaaatttaaaacagagcaggagaatgaagccaaatgccggaatttcaaaacctggcaaagaaaagaaatgatttttgaaccagggcgaatttttattttgaaagaaaaagtttgaaaaaattccatttggattcccccttaaatttattttaaaaaaggggacccctttggggttccttctcaacccctggggaaaaccccaaggtttttggggaaattcccaacttttt

SEQ ID NO: 174301 - DNA, 315 bp, Homo Sapiens
gggttgatacctaaatggctgtgcatataaatgtgcagacacagaatcaatcacatactggatcatacatttttcttggcttaacaaatctaatgattttatttgtaatcagtttagaattaggctgggttcctgaaacttcaaatccattagttgggtccaatatttctccagagagctctgagaaattctaattctgggtaaatgtgacaacagccattcattaagagatcaaatatccaattttaaattaagtagcattggataactaacaatgtagttatgtagttcggcagtgatacagccatttaggta

SEQ ID NO: 174302 - DNA, 860 bp, Homo Sapiens
  misc_feature (818)..(818): n is a, c, g, or t
gaagccggcggtggccccgtcagcagccggctgctgagaggccggtaggcggcggcggtcccgaggggcggcggccgcgctgctccctgagaacgggtcccgcagctgggcaggcgggcggcctgagggcgcggagccatgaagctgtacagcctcagcgtcctctacaaaggcgaggccaaggtggtgctgctcaaagccgcatacgatctgtctcccttcagctttttccagagatccagcgttcaggaattcatgaccttcacgagtcaactgattgtggagcgctcatcgaaaggcactagagcttctgtcaaagaacaagactatctgtgccacatctacgtccggaatgatagtcttgcaggtgtggtcattgctgacaatgaatacccatcccgggtggcctttaccttgctggagaaggtactagatgaattctctcaagcaagtcgacaggatagactggccagtaggatcccctgctacaatccattacccagccctggatggtcacctcagtagataccagaacccacgagaagctgatcccatgactaaagtgcaggccgaactagatgagaccaaaatcatactgcacaacaccatggagtctctgtcagagcgaggtgagaagctagatgacttggtgtccaaatccgaggtgctgggaacacagtctaaagccttctataaaactgcccggaaacaaaactcatgctgtgccatcatgtgatgcagcctgccagaggcccaaatgctggaatggcaccatcattcacatcagaactgcagccccctggaaaaagaagagacangccatagacgagggagccaggaagtgggggccagactggcca

SEQ ID NO: 174303 - DNA, 262 bp, Homo Sapiens
ctgttacctaaatggctgttaccaaaatggctgtgatctgtaaaatcttctttggggtattaaaaacactcaggaggctgagggccaaattctggatctcgaagtaatccctgttcactgccctttctgacctcacttagagggaaaaaaattataccttctttgatgccatattatccttccttcctttccttttttcatttcttccctctctatgctttatgtgggatgtaaccaacacttttaggctcaagagctataa

SEQ ID NO: 174304 - DNA, 601 bp, Homo Sapiens
ttctaaatggctgttacctaaatcgctgtgccaggtagaaagccagggacatcaacaaaagtgatgagtggaatattgaatgcatcacagaatctgacaaaacgagcccctttcacagatgaactaatatccaagcatcctgaggccaccttaggttggttgccaacaataccaacagtcctcccattcattcttgcaaaaaccaacaatgatgttcttggcataatagggcatgatctcaaaaaaattcacgctcatcaccaacagagtgtctgatgtccacccatgttgtaggccttggttgattccaaagggacaatagtgtccaggctcaggaaccagagggtcactgggatcgtggcaactcacggaacggagccgggtcctgattgctcagggcaaaatagttgaagaaatcccggagattacacaaggcatcaacatcattctcacaagctctgtgagcaaacctgacattgtgatgtgggtcttggaaccaaccgagctcctcctggttacatcctcattgatgacagaacttcacaaatcagggccagcgataacaagtagtaggtgcctataacatgaacttgagtctgtt

SEQ ID NO: 174305 - DNA, 865 bp, Homo Sapiens
  misc_feature (653)..(662): n is a, c, g, or t
gttatgatgtaacatcagcaagagatatgctgctgttagcatgttctcaggatgaacaaaaaaaatgggtaactcatttagtaaagaaaatccctaagaatccaccatctggttttgttcgtgcttcccctcgaacgctttctacaagatccactgcaaatcagtctttccggaaagtggtcaaaaatacatctggaaaaactagttaaccatgtgactgagtgccctgtggaatcgtgtgggatgctacctgataaaccaggcttctttaaccatgcagagcagacaggctgtttctttgacacaaatatcacaggcttcagggttaagattgctgtttttctgtccttgctttggcacaacacactgagggttttttttattgcgggtttgcctacaggtagattagattaattattactatgtaatgcaagtacagttgggggaaagcttaggtagatatattttttttaaaaggtgctgccttttgggatttataagaaaatgcctgtcagtcgtgatagaacagagttttcctcatatgagtaagaggaagggactttcactttcaagtggaacagccatcactatcaagatcagctcatggaaggagtaaagaaaatatctcaaaatgagacaaactgaagttttgnnnnnnnnnnaatgacttaagtttttgtgctcttgcaagactatacaaaactattttaagaaagcagtgatatcacttggacttcagtgccctcactgtagaatttaaaagccttactggtgattgcccatgttggacttgatggagaaattaaatatctttcattatgctttacaaaatctggttatgtttcaccaaggttgggggaatggg

SEQ ID NO: 174306 - DNA, 864 bp, Homo Sapiens
  misc_feature (781)..(781): n is a, c, g, or t
  misc_feature (813)..(813): n is a, c, g, or t
tacctaaatggctgtgttcagcacaacttgatttaccaagacaagctgtgggctgtatttggtcctcaggctacggcttgctagcccctgctctaatggattgtgttggcggcaatggcaagattcccttgctgagaacatgcagatgaataaccttatagctgggatgcagagaggagaaagttctgtagggtaataagtgcactgtattccctctgagctactttcctgggcatagttacatgtatggccagtgtgtgtacattgagccatcaggctcagacacttgttgaatatacctctcattgcattagtttgtaatttgtgctagtgctgggtgctgagctcagctgcccggatgacctttccaagactgaaggacatactcccctaacagctgggagtgctgctggctggccattttacttccagcccttatgaggagtttccccctgcttgaagaaccctgcctgccccagatcatacccccttcctgcctgtaacccttaccggctccatatggggtacaaagggctggcctcctcaccccaacttgggaaaccctctggggccatcccagctccagagacccttgtggggtcagtgagaactcattgtggccacattacagcccagtgcctctccctgacaagcctgtacccagccggctcagcccacagcactgtcctatgaaccttcctgcacgccattctccacctcagtatctgctttcggggaacccaacctgcgacagtgcttctgtgtgttttcagtcctgcangtttgaactctgactttggagacttttccagntatctccgtggaatgacaggattgtgcccctgtatgatatcaggcacaatt

SEQ ID NO: 174307 - DNA, 299 bp, Homo Sapiens
tacctaaatggctgtgttagctgttgagattcaggttttatcttaactcaagagttagatttaagaccagagtttctagctctttgcctcagtgcttttcatttctcaaatgttcaaagactttaggacttagaaatggaaaatgattcccggagtccagaaagcaccagggagacagagggggtattcatcttgcagtggttgggatgcgtggcatgaaaatgactcacatgtcttcaatacgatagaacacatgaaatttaactctcagtattaaatacaaaacagattatacttct

SEQ ID NO: 174308 - DNA, 403 bp, Homo Sapiens
  misc_feature (349)..(349): n is a, c, g, or t
  misc_feature (379)..(379): n is a, c, g, or t
  misc_feature (391)..(391): n is a, c, g, or t
agttcggctaactccataaactggggccgactacttccgcaggtagtttatcatgcttccgcatatcttgatctagttagtcaaggatatatttcttgtggaagcccagtcgatgtctgtattcccacaggaaactttggtaacattttagcagcagtgtatgccaaaatgatgggaatcccgattcgaaaatttatctgtgcctctaatcagaaccatgttttgactgattttataaaaacagggacattatgatctaaggggaaaggaaaactaggcacaaacctttttcaccgttcaatagatatttcttccaaatctttcaaacctaggaacggacattttacanttggatggggctaattaaaggtgggggccngcttattggacnggatttattttt

SEQ ID NO: 174309 - DNA, 349 bp, Homo Sapiens
caggacaagtacaactgaaccaacaaatttatttagttagtgctgataaagacagcagccttgagagacaagcagtaattacctggtctacttaatgatgccctttgttatattttacaggcaaaaagaatgattcctcagcagtcattgtgaaattttgtgggccacaagtattgtgcacacatgatccttgatttagagtcaacctgatgtccattatagctgtggaaaggcagcaggcagttgtgtcgctcttcacaataaggaaaacatcttgctttcagcatgtgagaggaacaaaagcattgatgtaaatgtgcctcaaagtgagaactgaaaacattaacat

SEQ ID NO: 174310 - DNA, 630 bp, Homo Sapiens
  misc_feature (299)..(336): n is a, c, g, or t
  misc_feature (601)..(601): n is a, c, g, or t
gggtaataaaattgacgctgaaattgcttccttaaaaacactgatggaatctaacaaacttgagacaattcgttatcttgcagcttcagtgtttacttgcctggcaatagcattgggattttatagattctggaagtagtattaatgctcatcctgctgtggctgttggcttcttagaacaccaaaccgggagagatttactttgaacattgtcagttgcagcaaaaatttactacacaagattattcgaagtgtatacggactaaaagaggaagtgttttagaatgagaagagatacnnnnnnnnnnnnnnnnnnnnnnnnnnnnnnnnnnnnnnctttattatattgaaaagctgtcactcagacctggtttgagatagaagagcattttgtccttttgatagttaatagaaattgaaccagagttttcttatgtttgcttgaacagttgtgtaaatcatacaggattttgtgggtattggttgaatatttgtaaaccattccctagcctacatatttattactgaattaactttcctgataaccattgcataattacatttttctataaaatgaaagattattaccaccaaacccacnacccacaaaaccaaccaaaacttgtcggc

SEQ ID NO: 174311 - DNA, 369 bp, Homo Sapiens
  misc_feature (177)..(209): n is a, c, g, or t
ggtcccctgtgcccgctgggccaaactgtgcaaagtgagctctttcgctcccgactggactcctatgttcgctctctgcccttcttctccgcccgggctggctgaagcaacctacctcaagtctcaggagaattcatgtctgcctggggcccttccgaacctgtgccaactaagggnnnnnnnnnnnnnnnnnnnnnnnnnnnnnnnnngcccagagcaacagcctaaaggcctgccctgatgctctcctcctaccagagtgaagcccacagagtccctccacctccacaccaggccctctctccagttttatcccctgcctaatgctgcgagaagcacagaataaactttttgtcactctcaaaaaaa

SEQ ID NO: 174312 - DNA, 820 bp, Homo Sapiens
  misc_feature (630)..(663): n is a, c, g, or t
  misc_feature (673)..(673): n is a, c, g, or t
  misc_feature (683)..(683): n is a, c, g, or t
  misc_feature (731)..(731): n is a, c, g, or t
  misc_feature (747)..(747): n is a, c, g, or t
  misc_feature (752)..(752): n is a, c, g, or t
ggggagttccggtgagtccgtgggtggggtccccacctggttggaaggctgtgggtccgggaacccgagcccaaggagtgggggcggccccggagcgaggctcacactccctgccctgcagatgactgtccacaacctgtacctgtttgaccggaatggagtgtgtctgcactacagcgaatggcaccgcaagaagcaagcagggattcccaaggaggaggagtataagctgatgtacgggatgctcttctctatccgctcgtttgtcagcaagatgtccccgctagacatgaaggatggcttcctggccttccaaactagccgttacaaactccattactacgagacgcccactgggatcaaagttgtcatgaatactgacttgggcgtgggacccatccgagatgtgctgcaccacatctacagtgcgctgtatgtggagctggtggtgaagaatcccctgtgcccgctgggccaaactgtgcaaagtgagctctttcgctcccgactggactcctatgttcgctctctgcccttcttctccgcccgggctggctgaagcaacctacctcaagtctcaggagaattcatgtctgcctggggcccttccgaacctgtgccaactaaggnnnnnnnnnnnnnnnnnnnnnnnnnnnnnnnnnntgcccagagncacagcctanaggcctgcccctgatgctctcctcctaccagagtgaaagccacagagntcctcccacctcacancaggncccctctctcagttttatccccctgctaatgctgcgagaagcacagattaaacttttttgtcactctc

SEQ ID NO: 174313 - DNA, 330 bp, Homo Sapiens
ggggatgtcaggagagctgctgccctcttggcgtgagttgcgtattcaggctgcttttgctgcctttggccagagagctggttgaagatgtttgtaatcgttttcagtctcctgcaggtttctgtgcccctgtggtggaagagggcacgacagtgccagcgcagcgttctgggctcctcagtcgcaggggtgggatgtgagtcatgcggattatccactcgccacagttatcagctgccattgctccctgtctgtttccccactctcttatttgtgcattcggtttggtttctgtagttttaatttttaataaagttgaataaaatataa

SEQ ID NO: 174314 - DNA, 1145 bp, Homo Sapiens
  misc_feature (1031)..(1031): n is a, c, g, or t
gggggacaccgtggacccagtccaggacgagatgctggcccgcttcgtggtgggcagccacgtcagacaccaccccagcaacaaggaggaggaggggctggccaatggcagcgctgctgagcccgccatgcccaacacgtatggcgtggagcccctgccccaggaggtcctgaagaagtacatcatctacgccaaggagagggtccacccgaagctcaaccagatggaccaggacaaggtggccaagatgtacagtgacctgaggaaagaatctatggcgacaggcagcatccccattacggtgcggcacatcgagtccatgatccgcatggcggaggcccacgcgcgcatccatctgcgggactatgtgatcgaagacgacgtcaacatggccatccgcgtgatgctggagagcttcatagacacacagaagttcagcgtcatgcgcagcatgcgcaagacttttgcccgctacctttcattccggcgtgacaacaatgagctgttgctcttcatactgaagcagttagtggcagagcaggtgacatatcagcgcaaccgctttggggcccagcaggacactattgaggtccctgagaaggacttggtggataaggctcgtcagatcaacatccacaaacctctctgcattttatgacagtgagcctcttcaggatgaaccaagttcagccacgacctgaaaaggaaaatgatcctgcagcagttctgaggccctatgccatccataaggattccttgggattctggtttggggtggtcagtgccctctgtgctttatggacacaaaaccagagcacttgatgaactcggggtactagggtcagggcttatagcaggatgtctggctgcacctggcatgactgtttgtttctccaagcctgctttgtgcttctcacctttgggtgggatgccttgccagtgtgtcttacttggttgctgaacatcttgccacctccgagtgctttgtctccactcagtaccttggatcagagctgctgagttcaggatgnccctgcgtgtgggtttaaggtgttagcccttcttacatggggatgtcagggaaagcttgctgcccctctttggccgtgagttgccgttatttccgggctggcttttttgcctgg

SEQ ID NO: 174315 - DNA, 894 bp, Homo Sapiens
ttgaggtccctgagaaggacttggtggataaggctcgtcagatcaacatccacaacctctctgcattttatgacagtgagctcttcaggatgaacaagttcagccacgacctgaaaaggaaaatgatcctgcagcagttctgaggccctatgccatccataaggattccttgggattctggtttggggtggtcagtgccctctgtgctttatggacacaaaaccagagcacttgatgaactcggggtactagggtcagggcttatagcaggatgtctggctgcacctggcatgactgtatgtttctccaagcctgctttgtgcttctcacctttgggtgggatgccttgccagtgtgtcttacttggttgctgaacatcttgccacctccgagtgctttgtctcccacttcagtacccttggatcagagctgctgagttcaggatgcctgcgtgtggtttaggtgttagccttcttacatggatgtcaggagagctgctgccctcttggcgtgagttgcgtattcaggctgcttttgctgcctttggccagagagctggttgaagatgtttgtaatcgttttcagtctcctgcaggtttctgtgcccctgtggtggaagagggcacgacagtgcccagcgcagcgtcctgggctcctcagtcgcaggagtgggaatgtagagtcatgcggaataatccacctccccaaagttatcagcggccattgctccctggtctgtttccccactctcctaatttggggcattccggttgggtttcccggaaatttttaattttttcaataaaacgctgcatccaatttcctccaccttcacaaataaaaaacaccctcgggaggcgaatcctatttttcgcgggttggcccggaaaaaat

SEQ ID NO: 174316 - DNA, 755 bp, Homo Sapiens
aacaagttcagccacgacctgaaaaggaaaatgatcctgcagcagttctgaggccctatgccatccataaggattccttgggattctggtttggggtggtcagtgccctctgtgctttatggacacaaaaccagagcacttgatgaactcggggtactagggtcagggcttatagcaggatgtctggctgcacctggcatgactgtttgtttctccaagcctgctttgtgcttctcacctttgggtgggatgccttgccagtgtgtcttacttggttgctgaacatcttgccacctccgagtgctttgtctccactcagtaccttggatcagagctgctgagttcaggatgcctgcgtgtggtttaggtgttagccttcttacatggatgtcaggagagctgctgcccctcttggcgtgagttgcgtattcaggctgcttttgctgcctttggccaaagagctggttgaagatgtttgtaaatcgttttcagtctcctgcaggttttctgtgcccctgtgggggaagaaggcacgacagtgccagcgcaaccgttctgggcttcctcaatcgcaggggtggggatgtgagtcatgccggattatccactccccacagttatcaacctgccattggctccccggcttggttcccccactcctctatttgtgcaatccgagtttgggttcccggaagtttttaattttttaataaaagttggattacccggcaaaaagggcgcggactgaaaagaag

SEQ ID NO: 174317 - DNA, 266 bp, Homo Sapiens
ttattcgtgttgcacccttcaggacaagtcacattttgtgacagtgagacgccaacaaccctgagaggtagtacagaaagaaaaagatggaggcagggtttgggaagttctggtgttgagaagtttattttcatttctctatggtttccagggagggacagcaagttgtagaatacctcattggtgagctctgagtgtttgagggaccttatattctcgtgcatcacaaaatttagaggcatgtgcaacacgaataataaatcctg

SEQ ID NO: 174318 - DNA, 425 bp, Homo Sapiens
tattcgtgttgcacctctaagttagtggtatttaatgactgaagactggcaggagagaaagtatcaacaaactgagtaaactattcttgaggggcactgaaaagatgttctttgaaacttgatttatatatttttacttgcaaaagaatatactgtgtttagagtatgaaagtgtgattgggtctgttgtgggaaccactgactgatgccataatttgcacttaaaggctataaattacatagttagccgtactttagtactagaaacagtaaattgacatccttgaactaattcctacctttttttggtttctgaagaaataaagagtatattaagcaaagggataatttatatttcaggttggacaatttaccctaaacaaattaaaccatggaaagtgcaacacgaaataaggggtacccga

SEQ ID NO: 174319 - DNA, 906 bp, Homo Sapiens
  misc_feature (43)..(43): n is a, c, g, or t
  misc_feature (183)..(185): n is a, c, g, or t
  misc_feature (187)..(187): n is a, c, g, or t
  misc_feature (189)..(199): n is a, c, g, or t
  misc_feature (202)..(208): n is a, c, g, or t
ttaatttggtggaaggattccccaagcccctttagttcatggncccagggattcttcctaggggaaaccaggttatgggcccacgtttcacttttcccttctgggggccccgcggcgcccaaaacgaaatggtcttaagaaagctttcttcgagggccggaaggcgggccgaacatgtttttnnntntnnnnnnnnnnnttnnnnnnnagtatttaaaaagtttatttctattttaactagcccacagacccccattctttgagggctgatctgatttctgacaaatggtctatagaccctcctctcggaaacttactatccccttccaaaaaagtctgcaccttccatcatgatgcacattttaagttaaaattgccaatacaacccttaaaatgcaagtttattgaataaagctgagaagagcagtaaacagacaaaaaatgcatccacctaaataaaaaaattcacatatttacatagttcagtaactgttaaaagttttcacatgcagaggttaatgcacaggaaaatgttggtaatagcgtctggatgtcttgaaatgcggaaagcaatgtatagacacacaaacacattaaggtttagctataggtcaattaacaaacctatgcagtccccacagagtcacacattctagttccaattcctccttttaggcacaagcaagttgccacattctttgtaatggttcacactgaccattaatggtgttgaacaacagtagcaagtttaaatatcccttcatttacagaaccatccatcccaccagggtagtatgcaacatgcttcaaagaataagaagagaaatgttaaaagcccagattctactcataaaaatatgaatggagaatacaagtagggtctgtgcaacacgaataagtagatcc

SEQ ID NO: 174320 - DNA, 295 bp, Homo Sapiens
ttattcgtgttgcacctagaaccaaacggtcatcacctcagcagggttttttgaagaatcaaatattcactgggatacaaatgacaagaagctacagtggatggaaactctgtgagaattgtggagaggtcttcagtgaacagttttgccttaagacacacatgagagctcagaatggagggaacacttttgagggtaattgttatggaaaagacagcatcagtgtgcacaaggaagcctctattgggacaagaactttccaaatttaatccatgtggaaaagtcttcaccttaa

SEQ ID NO: 174321 - DNA, 855 bp, Homo Sapiens
ctctctaggtcacttcaccaagtctatgtgccccccacaggagtatggctttccagctaccccatttggcgctcaatggagtgggacgggtggcccagcaccacagccacttggccagttccaacctgtgggaactgcctccttgcagaatttcaacatcagcaatttgcagaaatccatcagcaaccccccaggctccaacctgcggaccacttagacctagagacattaactgaatagatctgggggcaggagatggaatgctgagggggtgggtgggggtgggaagtagcctatatactaactactagtgctgcatttaactggttatttcttgccagaggggaatgtctttaatactgcattgagccctcagaatggagagtctcccccgctccagttattggcaatgggagcaggaaggaaagcaacagctttttggtcaaggggcagcttcagacccatgctttcctgtttatctatactcagtaatgaggatgagggctaggaaagtcttgtaccataaggaagctggagaactcaatgtaaaatcaaacccatctgtaatttcgagtgggtggagctcttgcttattggtacatgccctgaatccctcactccctcaagaatcccgaaccacaggacaaaaaccagctaactgggctctctcctaaccatgccctcctcccttttggattaacccgtctcgtttttaattgtgttcattgctctttagaaacccagtgataaaataccagggatactggggtgacaactattgtctgatggataggtcatgagtggcttgaaagcaaacagaatattaggaggttgactgtcagatagccattaggg

SEQ ID NO: 174322 - DNA, 506 bp, Homo Sapiens
ggatcccttatcgtgtagacataaaatacctcttttaaatcactatttaaaatttgtattagaagtaactaaccacgtggcttcctttcggcttgttctttatcagtagacgaatgtaggttactatctcttctatttaaagatgagcttctctccttgtctgttttccttttggcaacggaattttgaaggcctgcagatgacaaaggcatttgtctgattaaagcagaagtaccctgttcaagtttttcagtagatgcagatcgtttattggcagttttgctctcagaattcgccattgcagagcctccccatgaccatcttttttgctgataatcatcagcaagtctcctccgttccaaagtacgataaagaatggctgtaaatttttccttttgtgcttcatccttctggtgtcttttttcttctgcagctattctccgttgttcttctttctcttttcgctccttcagctttctctgtctttcctcgtgcaacacgaatta

SEQ ID NO: 174323 - DNA, 601 bp, Homo Sapiens
gtgaatagtggggttataggaggtggcattgtggctgtactgtgagtcttggagaagctcattttgctatcgccctctgggccactcttagaattcactttagcttctgcttccgcaattttgcactctgcttcccgctcggcttcttcgattttcttaatctcttcagcccactcaagggttttctttttcccaaagaggaaagtcatactgtacttctctgacaacctgcaaacaatcaggcaaggagaagccaataggtagaccaactttagctggtgttttgaatttgtctcctgtcttaaatgggacatcatcaagggtaactgaaagtcccatgaaaatctgcacccaacttcttagaagccatttagaacctgaatgccgctgctgccgccgtctcagaagccgaaaggtgctggcaccggccggcctcccaggctcggtccccgatgagctccctgacagcccctagggagagcgaacgccaccacctccaactctgcccgctccgggccaggccgtcaccgtagccaccgacagtgccgcagccgccatgttgaagtctactttccacaattaccatacgggtaccgagctc

SEQ ID NO: 174324 - DNA, 1450 bp, Homo Sapiens
  misc_feature (677)..(770): n is a, c, g, or t
  misc_feature (885)..(894): n is a, c, g, or t
  misc_feature (1186)..(1186): n is a, c, g, or t
  misc_feature (1236)..(1237): n is a, c, g, or t
  misc_feature (1379)..(1379): n is a, c, g, or t
gggacttacgcgtcgctcttcctcgtttgcccctcgtgttcatgggagctcgttttcttttcctctaggcagagaagaggcgatggcggcgatggcatctctcggcgccctggcgctgctcctgctgtccagcctctcccgctgctcagccgaggcctgcctggagccccagatcaccccttcctactacaccacttctgacgctgtcatttccactgagaccgtcttcattgtggagatctccctgacatgcaagaacagggtccagaacatggctctctatgctgacgtcggtggaaaacaattccctgtcactcgaggccaggatgtggggcgttatcaggtgtcctggagcctggaccacaagagcgcccacgcaggcacctatgaggttagattcttcgacgaggagtcctacagcctcctcaggaaggctcagaggaataacgaggacatttccatcatcccgcctctgtttacagtcagcgtggaccatcggggcacttggaacgggccctgggtgtccactgaggtgctggctgcggcgatcggccttgtgatctactacttggccttcagtgcgaagagccacatccaggcctgagggcggcaccccagccctgcccttgcttccttcaataaacatcacaggacctgggactgcacaggacctgggnnnnnnnnnnnnnnnnnnnnnnnnnnnnnnnnnnnnnnnnnnnnnnnnnnnnnnnnnnnnnnnnnnnnnnnnnnnnnnnnnnnnnnnnnnnnnngtaagagttaaaggcctcccccggcccccaccaaaaccccctcaaaaaacccttttccatcggacgcgtgcccgcccccccaaaaccgtatccacaaaaaaccttgtcactacgnnnnnnnnnngccaaaggaaaaaaccccggggataaaaaactagccagcgcccgggggcgttacccccccaagtatacacaatatgttcctcgcgggccgccattaaccccggaggcgttttcccccggggaaaaacaagtttaaaaaaatacacggccccccttttaccgccacacctcgaccccaaacagacctggggtgaaaactataaaacaaacctcgctgaggggcgtcgcccctcgcggcggacagacgtctcgacttaatacatatcccgagttattttccgccgacgccacancgttgcgcgggcgcgtgcgacagaccgactattagttaccccgcctccgnncccattctgaggttgagtatcctccttccctcctccctccgacacacaaagtcactgttatcttattagcgtctcggtgcaatggagggtggaaacccgttccctgccttttagactaaccgtatcccaccgccctattaanaaatttagtataagctcaggagggagaaataaatgatttggcatcgagacgaccgcacattcctcacctca

SEQ ID NO: 174325 - DNA, 331 bp, Homo Sapiens
ttattcgtgttgcacatattcaaacacaagtgtcagcgtctccttggtatggatgatgtcatgaagtagcactatgttagcatgttttagtccatttaaaagagaagcttccctgatagctgtgaaaggtgtcccttcttcttcctgcagcctgatcaccttcagagctaccaacttcccatttaccttgcttttcccttggtatactgtagcataagatccttcccctagtttgtccagcttttcatatgagtcagcgttttccaaatctgggacattgttggcaagctgggggctggaggcaacacgaataagaaaccctggagagttg

SEQ ID NO: 174326 - DNA, 1793 bp, Homo Sapiens
  misc_feature (1530)..(1674): n is a, c, g, or t
  misc_feature (1681)..(1696): n is a, c, g, or t
tggactgcgaggctcatttctagcaaggaacaaggggtgcccgcttagattttataaatattatgtttacgaagctgtaatatatagaaattgataagacgtgtccctgtccctggaaacgcatggcaccgcgtgtttggaaagacattcatctgggctgtttgacagactccccagttggtgccatgctctgtgcttagggaactgtgagaccccgtggaggggtggtgctaccgggaccgctacgtcatgcctggggtttggagagctggccgtccgtatagagaagcgacctggagacctaagatttttcatgactgactgtgggttcactggaataataaaggaagaaacaatattagcattgcaggcatcgggactgtcacatttgacaagatcaacaacgctgctaggaaaatggacagtgaggttcagagagatggaacggatcttggatttgattgatgatgcttggcgagaagacaagctgccttatgaggatgtcgcgaataccactgaatgagcttcctgaacctgaagcaagacaatggtggcaccacagaatctgtcaaagaacaagaaatgaagtggacagacttagccttacagtacctccatgagaatgttccccccattggaaactgacgcttggctcctttcttgtggatggattttctcaaagtacacagataaagcatggtttgtttcagtctccaaattcaaacctttgagtaataaatcagcactcaaaaatgtacacccatttagtttgtggtagcaaagtgcaatgcgaaattgaatgagaaactgagatttctcagtaatggtgaatatttcgctctttaaacctaaaactcttcattgagtagcttatatttgaacatgattggttaaacatttgcctctacctctgattttgctttgctgtcaaagtttaacaccttccaactacttatgtgtgtcctgtaacacaggtgattgaacgtatgagagggaaaggcaaagaaaaaggaagccagacactaggagaattattaacttctcatacttccccacattgagaagcattcggagtgtatttagcctgtagatgttgtgatatgcaaatatcccattccctggttactggcattcctaagattcttcatggtattttcaaactttggataaatttacagattagaaagatatctgacagttaatctctgttctccttacaaattccttttgtgctgctggaaaggatctttggctaggtggatgactagttttattcaaagccttttctcaaagccctttcagttacaaccaccccactatggaatcagtatttagttatacatttgtataagaacctgtattttgaaaaacacattcatgtatatttattcctggaattatttgcctgttaaacagtgtctttcatgttctctccccagattgtaaactctgtaagaagctgcttgtatctgtatcccttgttgaaactctgaaaacactgaataactaaaatctcttctcatccttttnnnnnnnnnnnnnnnnnnnnnnnnnnnnnnnnnnnnnnnnnnnnnnnnnnnnnnnnnnnnnnnnnnnnnnnnnnnnnnnnnnnnnnnnnnnnnnnnnnnnnnnnnnnnnnnnnnnnnnnnnnnnnnnnnnnnnnnnnnnnnnnnntttgcgnnnnnnnnnnnnnnnnaaaaaattttttaaaacttttttggggggcgcgcggcccccaaagggaaaggaaaaagggggaaataagttgtttccacaaaaaaaccccggcggcc

SEQ ID NO: 174327 - DNA, 837 bp, Homo Sapiens
gggaggagcaagcgtctgccgcggtggccgggtgccgatttgacaagatcaaagctgcaggaaaatggacagtgaggttcagagagatggaaggatcttggatttgattgatgatgcttggcgagaagacaagctgccttatgaggatgtcgcaataccactgaatgagcttcctgaacctgaacaagacaatggtggcaccacagaatctgtcaaagaacaagaaatgaagtggacagacttagccttacagtacctccatgagaatgttccccccattggaaactgacgcttggctcctttcttgtggatggattttctcaaagtacacagataaagcatggtttgtttcagtctccaaattcaaacctttgagtaataaatcagcactcaaaaatgtacacccatttagtactgtggtagcaaagtgcaatgcgaaattgaatgagaaactgagatttctcagtaatggtgaatatttcgctctttaaacctaaaactcttcattgagtagcttatatttgaacatgattggttaaacatttgcctctacctctgatttgctttgctgtcaaagtttaacaccttccaactacttatgtgtgtcctgtaacacaggtgattgaacgtatgagagggaaaggcaaagaaaaagaaatgaagtggacagacttagccttacagtatctccatgagcaatgttccccccattggaaactgacgcttggctcctttcttgtggatggatcttctcaaagtacacagataaagcgtggttgttcagtctccaaattcaaaacctttgagtaataaatcagccctccaaaaatgttcacc

SEQ ID NO: 174328 - DNA, 1059 bp, Homo Sapiens
  misc_feature (41)..(41): n is a, c, g, or t
  misc_feature (274)..(505): n is a, c, g, or t
cccccaggatcattatcgtgttgcactactctgctatgtantgcattttgggactgcacttatgtatgtttttgtttaacgtggacaaagacttacagataggtgcaaaaaataaatcctcttttgcaacccagaactcattgttcagtatgagttttgatacatataagaagggatattatgatacctgagacagttgattgatgggagtattgatagccataaaggttggttccaggccaggtgcaatgggtcaagcctgcaatccccacannnnnnnnnnnnnnnnnnnnnnnnnnnnnnnnnnnnnnnnnnnnnnnnnnnnnnnnnnnnnnnnnnnnnnnnnnnnnnnnnnnnnnnnnnnnnnnnnnnnnnnnnnnnnnnnnnnnnnnnnnnnnnnnnnnnnnnnnnnnnnnnnnnnnnnnnnnnnnnnnnnnnnnnnnnnnnnnnnnnnnnnnnnnnnnnnnnnnnnnnnnnnnnnnnnnnnnnnnnnnnnnnnnnnnnnaaaaggttgattccaggcctgtagaatagataaacagcatgggatatgagggaaatcctcagcagtattaattttgcattccaatttcatgttgatgatatacacaatggcttttgttttaaaggcttttatctttgagaaacatggtgtctggagttaaaggtattggccatactccaacacatctgtaccattcttgagtgatcgcttaggaaatgaactgtgatttgaactcattcatgttgagagggtgtcaaattgagaaccaggtagatccccaacagctacagttaacaaaggaccctaagagtaaaattggattgaacgaacatgagatcccaaagattctggttgaatctgaaggtctccatcagtatagtccatataaaaacgagactgacagaaggccaaaggtaaattatggggctgacaggacaaacggattcagtttcatttacaaacagggcacactttgaagaataaatctttcgactcccaggctccttcgaaggatcttaagttgacctggatggaaacgggacagaatcacaccg

SEQ ID NO: 174329 - DNA, 821 bp, Homo Sapiens
ggggatgcaacacatcttgaagataacgaatgtgatatcaaattggcaggggatagtttcatagcttttatcttgagaacatggtgtctggagttaaaggtattggcatactccacacatctgtaccattcttgagtgatcgcttaggaatgaatgtgatttgaactcattcatgttgagagggtgtcaaattgagaaccaggtagatccccaccacctacagtaaaaaggaccctaaagtaaattggttgaagaaattagatcccaaagattcttggtgaattttgaagtcttcatcagtatatccatattaaaacgagatgacagaagccaaagtaattatgggctgacaggacaactggatcagtttcattaaaaagggcaaacttgaagataaatcttttgactccagctctttagaggatctaaagtgaccttgatggacagtggaagaaatcacaacatggaattcctcgaataacaatttattgactttaaataattttgtctaatgctacatatacacaattaaaaaacctttacactatttctagaaagtcagcatgtatttttggctcgaagtttctctagtgttttcttatggaattcttttgcccttgctctgttttgggcataagcttcttgttttgttttttcttccttttgttgtttcacttcagctagttgattgtataaccttagacccctttgggtgccttagagcctgtgtaggtctttctgtcttcagggaaaagatgctctgactttattcacggccctttaggacggactcacaggatggaacttataggatggggttc

SEQ ID NO: 174330 - DNA, 1084 bp, Homo Sapiens
  misc_feature (314)..(371): n is a, c, g, or t
  misc_feature (902)..(1012): n is a, c, g, or t
tacccctcaggctcttcccgagcagcgtggcacacgtcacgggtccacttggctgtgagctgcaccctatcagaggagaagctgctcctggggatgccaagacgggcttctcttgattgtctggcattaggtggggacctctaggacccccgtcctcagggaagctacaaaactctgttatacatcagctggagcacagggacaaggagtcacaggcctgagccccacacaggccagggcacattcttggattttccattccttggtcatgctggaatctctcaatgtgacatacttatgtaaatattgttacnnnnnnnnnnnnnnnnnnnnnnnnnnnnnnnnnnnnnnnnnnnnnnnnnnnnnnnnnntgaaaccaagcatctatagaaaccaagaaagtcagcatgtaagcgtcactggaaaaactggtttaagcaaatagagccgtctgggatttgtaactgaggtgcaactgtcatgaggcccaggcagctctgtaacatcttctatagatgcccctggctaccctgttgttttcatctacctcagacccctatcatggggctctaccctgtgacaagagccaaacccattctccatggcctatgaaaccctcactgaagtttgggccctgctgcaatggggatgagatggttttttgtagaattatacttacgttccttggatgatctctagttgattttttaagttctgagttgatgctgttaaggtacccggggtagccattggttcttggatctgtgttagaatgagtgctttcccttcctactgatgtgattgtggattaggaattcgtgaccgagtgatttttggccagtggttgggtttaaaattcctattaaaatttgaagtttgggctgggtgctgtggctcatacnnnnnnnnnnnnnnnnnnnnnnnnnnnnnnnnnnnnnnnnnnnnnnnnnnnnnnnnnnnnnnnnnnnnnnnnnnnnnnnnnnnnnnnnnnnnnnnnnnnnnnnnnnnnnnnttagccaggcatggtggcccatgcctgtagtacctgctattggtaaggctgaggtggaaggttcacttgagc

SEQ ID NO: 174331 - DNA, 445 bp, Homo Sapiens
cgtagtagtagactgatcctgcagtcatagctttccctgtgtaataccatcaaattatggaagatcttcctcaactagagtcataggatttagacatttctataccaacacggacattagtgttaagtgcagttgaattaattacactgaaaactgtattccaggacttcagaacagaagcacgggaatgaaacacacatactaaaataacctcagcacaatttgtgatacatcacactaggaacaggaaactacttttataaatgaactttttgaactgtacatacacagggctaacaatgtaagataatccagattcttatactctcatgattacacataaagtttctcaattattgaataatctatttcatattatggaagcatatctattctgtaagactcactgatatatataatactgagtgcaacacgaataagggtc

SEQ ID NO: 174332 - DNA, 258 bp, Homo Sapiens
taggtgccattgtactcctgcctggacaacacggggagacctgtctctaaaatgtatttataaaaaagttaaaaagatgtgctactaaccggcaactttcaggtttcatttttttaaacagtaaattatatagctccttataatattatcattcatatgatataaacatcttaaacatactacaaatatccaacagaattcagaacatcacacattactatctgaacatgactctttttcttgtgcaacacgaattaa

SEQ ID NO: 174333 - DNA, 537 bp, Homo Sapiens
  misc_feature (56)..(119): n is a, c, g, or t
  misc_feature (126)..(127): n is a, c, g, or t
gcacacatactcacatactcaccttcccgtcttgatccccacacatctttccagcnnnnnnnnnnnnnnnnnnnnnnnnnnnnnnnnnnnnnnnnnnnnnnnnnnnnnnnnnnnnnnnnctgaatnnccagccagcggggcttctcctgcctccatcacatcacagaagtacctcctgcttctggttttaattagagccttccccgattacaattgtcctctgaatttttacctatctacatttgatctgtcatgtttaaaccccctacttctaagggaacttctctaatctcttatcctcatccccaaatagtgttttcttcctctgggttcttataatgttggtatcaatctcacagcatttagtgcttcctgcctggtgtgacagttacctgtgtgcatgtgcaatttctaatttcccacgctagactgtgagcttcctaaggcaagaatcatgccttgttggtttctgtattcctcatggtgccaaacacagtgccttctacattgcaggcgctgaataaacatttttaaagc

SEQ ID NO: 174334 - DNA, 122 bp, Homo Sapiens
ataacaagtaaatatgctcattatcccttagaccaaactatcctacttctggcaatgtgtcactctagggtattctacaaaatgatatgtatatggacaggacattggtactatgtgtaagt

SEQ ID NO: 174335 - DNA, 844 bp, Homo Sapiens
ggatgtcagctggaggctatattatgattctaaattcttaaaggtttttttccctccataaatcaaaaattaccttatgtaaaccaaaaattagttggtatttatggtcatgatcttaattctcaagtttagcttaatcttgtatttcattgtttgtcttctaatatgacagcttaaattcagatttttaagtgactcagcaaaataggaggagtgtcccaatttattagtgttgtacatattgaagaaaacctttttgttccttcagatttagaaagaaacagtttaaccattcatttctaggtatactgctgctgtgaataggtttacttatactattaaacatatattgtgtgactacgcaagtataggtcctgttgtatagcattaatctttaccagtaactaaacatcacaaggttaatattggtttggctggaaagaattatgcagtaaagttatttataagggaacatgatgactttattcaatatttttcttctttgaaacatctcattactaacttttaaggattatttcataatcccttatacctgaaccaatgaaatattttgaactctacttaagaagcatgaagcctatattataaacctaaacaacaaaagcaccttgtaaacttgttttaaataaattcccatggccttatttttccaattttttgacaaccggaaaaagggccattttttcctggtcgaactggtggaagccaaattctcccccttttttgcccttttaaatggaaaaataaggtgccatttaaaggtaacccccatttggcctggccggaaaatttattaaagacccaaaatttaggccctaaacac

SEQ ID NO: 174336 - DNA, 570 bp, Homo Sapiens
aaagaaaagaagaaaaagaaatctgcactggatgaaatcatggagattgaagaggaaaagaaaggaactgcccgaacagactactggctacagccgtgaaattattgtgaaaattataaccaagtaaactgggacgaggaatatcataacgaaaaaggctatggttaatgaagtaattgacaaatatacagctgttgtgaagatgattgattctggagacaagctgaaacttgaccagactcatttagagacagtaattccagcaccaggaaaaagaatctagtttaaatggaggctacagaggaaatgaaggtaccctagaatccatcaatgagaagactttttcagctactatcgtcattgaaactggccctttaaaaggacgcagagttgaaggaattcactatgaagacatttctaaacttgcctgagtttgaaaatttgttaacaatacattaaaatcttaaagcatcaaattggtgttcgccaaaggcattatgagactctactgtgttagggtatatacttttgtataaaacaaacaggtctacgacaaatattactcgtata

SEQ ID NO: 174337 - DNA, 1198 bp, Homo Sapiens
  misc_feature (1015)..(1132): n is a, c, g, or t
ggcgttcacaaatggatggattaatccctggggtagaaccacgtgaaatggcagctatgtgtcttggattggctcacagcctgtctcgatatagatagaagtttagcgctgataaagtacacacaatgatggttcaggcaatttccttgttagatgacttggataaagaactaaacaactacattatgcgatgtagagaatggtatggctggcatttcactgaattaggaaaaattatttcagataatttaacatactgcaagtgtttacagaaagttggcgataggaagaactatgcctctgccaagctttctgagttgctgccagaagaagttgaagcagaagtgaaagcagctgcagagatatcaatgggaacagaggtttcagaagaagatatttgcaatattctgcatctttgcacccaggtgattgaaatctctgaatatcgaacccagctctatgaatatctacaaaatcgaatgatggccattgcacccaatgttacagtcatggttggggaattagttggagcacggcttattgctcatgcaggttctcttttaaatttggccaagcatgcagcttctaccgttcagattcttggagctgaaaaggcacttttcagagccctcaaatctagacgggatacccctaagtatggtctcatttatcatgcttcactcgtgggccagacaagtcccaaacacaaaggaaagatttctcgaatgctggcagccaaaacccgttttggctatccgctatgatgcttttggtgaggattcaagttctgcaatgggagttgagaacagagccaaattagaggccaggctgagaactttggaagaccgagggataagaaaaataagtggaacaggaaaagcattagcaaaaacagaaaaatatgaacacaaaagtggaagtgaagacttacgattccttctggtgactccacacttcccaacctgtttctaaaaaacgcaaaatagaacaggtagataaagaggatgaaattacnnnnnnnnnnnnnnnnnnnnnnnnnnnnnnnnnnnnnnnnnnnnnnnnnnnnnnnnnnnnnnnnnnnnnnnnnnnnnnnnnnnnnnnnnnnnnnnnnnnnnnnnnnnnnnnnnnnnnncacattaaggaagaaccactttctgaggaagaaccatgtaccagcacagcaattgctagtccagag

SEQ ID NO: 174338 - DNA, 906 bp, Homo Sapiens
cttttaaatttggccaagcatgcagcttctaccgttcagattcttggagctgaaaaggcacttttcagagccctcaaatctagacgggatacccctaagtatggtctcatttatcatgcttcactcgtgggccagacaagtcccaaacacaaaggaaagatttctcgaatgctggcagccaaaaccgttttggctatccgttatgatgcttttggtgaggattcaagttctgcaatgggagttgagaacagagccaaattagaggccaggttgagaactttggaagacagagggataagaaaaaataagtggaacaggaaaagcattagcaaaaacagaaaaactatgaacacaaaagtgaagtgaacgacttacgatccttctggtgactccacacttccagacctgttctacaaacaacgcaacactagaacaggtacgataacagagcgatgacaattcactgaacaagacacagcccaaaacacagtccaagaatcaaacgcttaacacgctgaaggaacgaggaagcaacgcaacacagtggcagaaagacagacagaacacatctgtgaagaagaagaagaaccaggggtaaacacagaacacacattaaggaagaaccacttcctgaggaagaaccatgtaccagcacagcaacttgctagtccagagaaccagaagaacaagacacaccagagagagaacgaggattaaccgaacggaattacgattatatcagccggacacacatcatgcttaagatccaactgggagcataccaggcatgctctctaacgtatcaacgcgaaggttcagtaagacaaagtgactcatcatctatactccaacccatttgcctgactcaatgcgtgaagcttatgtcccattcttgagccttgatcg

SEQ ID NO: 174339 - DNA, 1701 bp, Homo Sapiens
  misc_feature (555)..(596): n is a, c, g, or t
  misc_feature (730)..(750): n is a, c, g, or t
  misc_feature (760)..(813): n is a, c, g, or t
  misc_feature (1189)..(1189): n is a, c, g, or t
  misc_feature (1229)..(1229): n is a, c, g, or t
  misc_feature (1269)..(1269): n is a, c, g, or t
  misc_feature (1438)..(1438): n is a, c, g, or t
  misc_feature (1564)..(1564): n is a, c, g, or t
  misc_feature (1611)..(1611): n is a, c, g, or t
ctcaagtaccacatgaccaaacacaaggctgagactgagctggactttgcctgtgaccagtgtggccggcggtttgagaaggcccacaacctcaatgtacacatgtccatggtgcacccgctgacacagacccaggacaaggccctgcccctggaggcggaaccaccacctgggccaccgagcccctctgtgaccacagagggccaggcggtgaagcccgaacccacctgaggacggcagtgaggatgagcacctctagcagcctggactccgcagtggctgtgtcagcctcacccttcgtgtgcactcgcatgggagggtcggagggtgctgcccgcccttgctgctggaggcgggcttggtgtacggctcaagtagccttcctctgctctgggaccagtggtttattttcccgcaaacgctgagtgacttggggccggacagttcataaataattgattcctttccccactaaagcagtcgaggagatttgtaatccactttctagtgcaacaagagctccatgttatgcttgtaataaattatttacccggnnnnnnnnnnnnnnnnnnnnnnnnnnnnnnnnnnnnnnnnnncacgcaacagaacaatcaaaaccaaccccctaacaaccagacgccatccaacaaaaataccaaacgggggaaacgcgacagagcgcggggggcacgcctgcctcaagaagttgccccggccacaaaaggcactnnnnnnnnnnnnnnnnnnnnntggcccggcnnnnnnnnnnnnnnnnnnnnnnnnnnnnnnnnnnnnnnnnnnnnnnnnnnnnnngagtctgagaagaagcgcgaaggggtgtggtacgggccgcgcccacccccaccgggccttggcggttgcgcagcctgtggccggtgctccgctttaccctaataaaaaaccgcgccccccccgcgcatgcccgacggcgccgcacccctccccctcgcaaggggtgcgacacaccgggcgggctgccagcgctacagcagggctgcgccgggggccctcctactcagatgaggcggcgcggctggcgcgggccgcgccgaagggaggcggtcgcgcgctagcaccggccagctgtggggcgcggcagcgggtgtcgcgcgtcctcccacctatgtgggcgaccgcggcggacgcggtggcgcgagggacgcggcgngggtcataacgcgcgcagctacgctcgctagcgcggcgcncgccagacagcatgccattctagcatagaccgcgagagtnacggcgggggaggggggtcagtcggctggtgtatgtacgcagacaccgaacagacgctccccgaccgcgctgtgtgcctcagactggatcgttatcgagcatggcgcgggtcgcgcgctgctacggtgatttcgtctctcgctacggactgcgcagcgcacgacgcggngcgcgagggcggcggcgctgcgagcggcggcgagcgctcgaccgtgcgctgtctgctcgacggtcgcgcgactgtagtccgacgcgccacccagcgcgcgcgtgccgagactacgcactgcgcggnccggtgcgtgtgacgcccacccgagcgtatcacccgcttgcgtcgtnatgtgagcgcgacgctcggccgatgtgctggactacgacatcgagtgacgaccgagaggggacggagcagggctgagaacactgggtcag

SEQ ID NO: 174340 - DNA, 580 bp, Homo Sapiens
  misc_feature (384)..(384): n is a, c, g, or t
  misc_feature (450)..(474): n is a, c, g, or t
ggacttacttatcgtgttgcacattctggggacttagacaggataagcacacgagtagatctaagtcactggaaatacctggttttgctgttggaggggggcttgcaggtgctcgttatattattacgctgttgtagtaaaacgatgttagttacagtattaaattgcaaatgtcagtatccatcaccgccaaaacagcgtgcataccactagcatatgatttttgtagatttttaatgttaagttttgtaatggagtggcaccaaacctaaattatacattggctgaagttatttgttttaaaggcagtacttgctctatggcccagcctggaatgcaatggcctgaatcattggctccactggaaacctccaattccttggncctcaagcgaaccttctgggcttaaccccttctttaaaagggaactgggaattaaaggggggtgannnnnnnnnnnnnnnnnnnnnnnnntttttgggcggaaatttttaacccaaattccccggtaaggggtaacccccaaaaaaatgccccttcccggacacaattttgaaaaccggttttcccttttaccccc

SEQ ID NO: 174341 - DNA, 584 bp, Homo Sapiens
gcagcccctcacatacctccagcccctcacatacctgatactcttcatcatctggttcagcacctgagaggcgagctgctctggccatgaaatatggaggcagctctccgattgctgtaccgataccccacatgcaggcttcaatcctaacttttgagatgatactccacaaagaaatggttccttcagtgccctcttcatctggacaaataatctgatcaggatagggtggttcgggaaaattaactgaattgcattcataagcagctaatgtaactgaggctatatgtggacccagataaagcagaaaggtgtgcagccctgttccaagcccaacagaagacaaaattcctaagcctatccagtaggcatacaaaagaaactgtttctctatacgttgcacatactgttgatgcactccttcaacataatacgtagctataagcacagcaagcagcagtaaaaaagacaccacaatgctttgacgatgccataattttgaggtccattccttcaagattacaaggatttccagagaaaaatactgcaaggtatgtgagggctgggggacctctagatcgatt

SEQ ID NO: 174342 - DNA, 965 bp, Homo Sapiens
tcaagtaagtgacttttatttttctctgacatttcacagtcaatttctgcaaaacttcatactttctcaaaagaattcacatttgctaaataaatttctaccctaaagaattcatagctgaaaaaccacttcaatatatgcacaaaagttacttttctgctaaaggaaccatagtagaaaataaaaagtcagacaatactataatcaataaaaaccaatgagtgtaataaattacaaatgtcattaaattccattcccataaccattgcaatcagcaacttttcgtatatatatttcaataatgcccaacaaaatctgccaaaagttctcttaagggtggctctgagctaaaaatggcttctcaccttcagaaaacagcagctctgccacagtacttcatagccaattacgttattcatcgctaaaaccatcactacttacagccttgggcaaccgatggagatctttctggtcacctccgaggttcctccatttgctgatctggcttctggactcaatggatctctccttccaagatctatcttctctacttgggttcatctgcttacagctccaacagagaacaaatgcccatggtaatagcctggagagacttctagcactaagttacaagattagaaaagagctgagagtggtgcatgcttctccctgccactcagccagtgaggattgatagtggctttcatcatcttttactgaaacagggagggaaatgcaagccttaatctaggaagaagagtccaagaggcttatagctccacagagggtttttccaatggaataaatttggttctcagcaagtgttttcagatttttgacacagtaagactcatgactggtgcccaggatgttctgaatgcacctgtctctatagctttgctgccaaacatattctgccaaaaaggaagcttcctagcatggtgcacagagtagagctgctatcc

SEQ ID NO: 174343 - DNA, 890 bp, Homo Sapiens
  misc_feature (866)..(866): n is a, c, g, or t
ccatggtggtcttgcgggcggggaagaagacctttctcccccctctctgccgcgccttcgcctgccgcggctgtcaactcgctccggagcgcggcgccgagcgcagggatacggcgcccagcggggtctcaagattctgccctccaagaaagtcttgccatgattggataggacccccagataaatattcaaaccttcgacctgttcacttttacatacctgaaaatgaatctccattggaacaaaagcttagaaaattaagacaagaaacacaagaatggaatcaacagttctgggcaaaccagaatttgacttttagtaaggtcagaaagcaacattgaatgcagaagaaatggcggacttctacaaggaatttttaagtaaaaattttcagaagcacatgtattataacagagattggtacaagcgcaattttgccatcaccttcttcatgggaaaagtggccctggaaaggatttggaacaagcttaaacagaaacaaaagaagaggagcaactaggagtccactctgacccagccagagtccaggtttccacaggaagcagatggagctcctttcacaggggctctgagaaaaactggagctgatctcaagaagccccacatcttcctaaggggccccatggcctgtttgggggcagggtaggtcctggggcactgtgggccgcctgcctgctgatgtgggctctaggccagcttgttgtcacgtacgtggtgtgaaataaagcccaagcactgggtgcccgttttcctgtggtttcgaattataccaatttcaaaacagaaacctatttaaaaaatattgggccagggcacgggtggcttcacaacctggtaatcccaancacctttggggaaaggcccgaaag

SEQ ID NO: 174344 - DNA, 1042 bp, Homo Sapiens
  misc_feature (257)..(257): n is a, c, g, or t
  misc_feature (352)..(352): n is a, c, g, or t
  misc_feature (374)..(374): n is a, c, g, or t
  misc_feature (389)..(389): n is a, c, g, or t
  misc_feature (811)..(855): n is a, c, g, or t
  misc_feature (971)..(983): n is a, c, g, or t
accccgtgttgcacaaggtgtccagtttcagtaccaaagccttctctttttgtgcacgtaagactcacacatgtgatgagggcttgttacaacgcacgtgaggccgcggcggatggccactgcccccttccttggtgaacagtggagcaatgttaacctttggcctcaaccagcacagtatatggttttctagaatattgcgagtgttgagtgttgattaaagatgctttcatttcagacccctgggacttttcaancaaattcgccttcttcagaaccccatggcttttcagtgccacctgactcattctttggaagtcacctgcatgctggaaatggcagccacccccgnctcaggtcgcacaggactctcnctctgggacagcagntcgagtcaagcagggagacggctttcctcacaacctggaagaccatcagtcatcatgatgtacaacgagcaaggcataaaataaaacactgggaagcaggaagagtgacaagaaaatgacagggagcaaggagggtgcaacccagttcccatctggcaagtgcctaaagccccgctcagcctctgttccagctgggtgatgtttaggcaaagtcactaccccgccccactactgtgccccaagacagagtctgtggtataaactaactgtgctgactttgggcaataaaggacctagaattctaagtactgaattaaaaatacagaacctactaacactactgtattaacaagctgactcctataatcttttggagatgacagatgatactggtttttaaaatacccaatcacatatatgcnnnnnnnnnnnnnnnnnnnnnnnnnnnnnnnnnnnnnnnnnnnnnctcccatttcctcagtgctctttagcaatgagtttttatgttaaacacttccaactgtcagtattaccatgaaatcaacattagaaaataaggtagaaaactgagtgttttgcttnnnnnnnnnnnnnggattaaatagctgttgtatccaaacatcacgttctgcttccatctctacattccaccc

SEQ ID NO: 174345 - DNA, 348 bp, Homo Sapiens
ttattcgtgttgcaccaactgcagctggacaatgacgtgcttcgacaacaggtggaagatcttaaaaacaagaatctgctgcttcgagctcagttgcggcaccacggattagaggtcgtcatcaagaatgacagcaactaactatggggattcaggggctttgggcccaagaactgcagatagcccaggagcaacagcctaatcccgtgcccctttccttcactgccccacttctggcatgggacagggggaagttcagaaggtgtgtccttgaaactgaggccctgtgatatggcggcctgcagtggtgtgaaacacacaatgtggacgtgcaacacgaataagggt

SEQ ID NO: 174346 - DNA, 757 bp, Homo Sapiens
  misc_feature (64)..(69): n is a, c, g, or t
  misc_feature (73)..(73): n is a, c, g, or t
  misc_feature (77)..(80): n is a, c, g, or t
  misc_feature (83)..(83): n is a, c, g, or t
  misc_feature (86)..(86): n is a, c, g, or t
  misc_feature (157)..(158): n is a, c, g, or t
cgcgcccaaaacgaattggtctaagaaaagctttttcgaggggccgaggcgggccgaccagggnnnnnntttntttnnnnttnttnttttttgattttaaaacatttttattataaaatacaaataaaaacattgagaaaagacaaagtcatccatnntctgcctcctatcccactataaccagttagtaatttgatttactttgttatctttttatcatatgcttggtctgttatttcagccatgattacacccacttatacacttttccgtcttgcaatttttacttaaggtaatattttcatgtatttaataatattcattactaatttttaataagtacattatgtatcatatgtatatatctgtttattgactatttcctagaaccaggggatgacaaactatggcaccacatttgtaaacaaagttttacaggaacaaagccacgcccgtatagtatatgtattgtctatggctgcttttgtgcttcatacagcagtgttgacaagttatgacagagacagtaggtttaaaaacctaaaatagttactttctggccctttatagaaaaagtttgccaatctttaccccaaactttaaagtggtttataatttgggctactaaaagtaatgtcacttggaacatctttgtgcatataattttttatactttgtacaatttgagagacattaacaaaagtggaataactgggtctaattaatgaagacatttttacggttgattctctccccc

SEQ ID NO: 174347 - DNA, 1515 bp, Homo Sapiens
  misc_feature (724)..(724): n is a, c, g, or t
  misc_feature (739)..(739): n is a, c, g, or t
  misc_feature (743)..(744): n is a, c, g, or t
gggggcatggaggagcgcggcgattccgagccgacccccggctgcagcggcctgggtccgggcggtgttcgcggctttggcgacggcggtggagctccttcgtgggcccctgaggacgcctggatgggcactcaccctaagtatctagaaatgatggaattagatataggagatgccacccaagtttatgtagcgttcttggtttacctggacctcatggaaagcaaaagctggcatgaagtaaactgtgtaggattaccagaactccagctcatctgccttgttggtactgagatagaaggggaggggttacagactgtggtgcctacccccatcactgcttccctcagccataacaggataagggaaatcttgaaggcatctagaaagttgcaaggcgatccagaactgccgatgtcttttactttggccatagtggagtcagattccacaatagtctattataaacttaccgatggatttatgctgccagaccctcagaatatttctcttagaagatgacatccatgtttcctgatgcttgttttattcatacaagattggatttgagacccatcagactgcttcatcttttatctcagaaatagggttgacgtacatagtgagggttgacttccccattccataaggttttcattctgaagagtaaaacttccccaggtagaagacttttctccttctcaaaaaatataggggtgatttnctttaaaactttgtntatnnctagagacagtttaaattacagttatatacaggtttatgcctaggatgtattcagatgggtgggacctgtgtgctgctttggtcatcccacactcaaagttgtctctttgtttcttgctgccactgccagctcattgttgagactgccatttctttctcttactcagctctccccagtgcctttgggccactgcagctaccgtagaatggcattttatatgtaccttgtcacccacttctgtttactttttcctctccagtaaaaagtaaaagatttctttcaattggtcttcccattgcagttactgttatttctctttttggttaactttaaatcaaaactcaaaatatgttcatccagagtgtgtcttaagtaacttacgtgtcttaagtaacagggaccagagacatgttacctacaagagttctgggctatccttttcattcttatcacatatcatagcttgaatattacaacagtgtgggagagaatcaaccgtaaaaatgtcttcattaattagacccagttattccactttgtaaatgtctctcaaattgtacaaagtataaaaaattatatgccaaagatgttccaagtgacattactttagtagcccaaatataaaccactttcaaaggttcggcgtaaagattgccaaactttttctataagggcagaaagtaactattaagggtggaaaactagtgtctcggtcataactggtcacactgctgtatgaacgcccaaaggggcatagacgattcttatct

SEQ ID NO: 174348 - DNA, 527 bp, Homo Sapiens
  misc_feature (11)..(11): n is a, c, g, or t
ggtgactctgnaggatcccttatcgtgtgcacatagaacctataagagatagccctctgattttattacagaagtgctgtggagggcacagtcttctatcttttacaggatctcacttcgatgagggcctgacacagctatttcttctggggcctgaaaagtaatactgatgatgatgatgatgaaagtttaacactttttatagaacttactatgcgccaggcagtgttctaagctttttatacatatcaactcatttaattttcacaacaaatccataaattaaatactgtgattatctccatattaaaaataaagaaatgacaaaggaattatatggaaagtacaaagatattttgcagaagtaacataagaaaactttcaagaagaattatcagagaaatttgaagattccactatgtccttctcacaagtaagaaagttcaagattgctaggcgttgagtccttccagggtatctgaccaaagatagcttggtacttagcagctggcgtgcaacacgaataa

SEQ ID NO: 174349 - DNA, 629 bp, Homo Sapiens
  misc_feature (15)..(15): n is a, c, g, or t
  misc_feature (82)..(82): n is a, c, g, or t
acctagaagtgatgncctctgccattatcctccggaccattccaaaatccaagcggttaatcctaataacccacagtaggtnaccattaaaaatcactgtatatttggatgttaaaagcaggtagtaatacagcaggaaaagtgtttctaattcacagtttcaaaactaaagggtgcagttttcaaatatctgattgcttaaattggtcactcaatttaacaactgcctccttcaatacatgtaaactatgtttgcacagcattaggagatgtcttttatttcagaattagttcttactgttacaggagcaccacaaattttaaggaagaggctacagtgtgaaatgagctcactgaaggatatgttaaataaaattttaactacaatataaggtactgcaaaagctttgttccccagcacagatcccttaatcaggaaaagtagtgaacacttacccaatacaatatgtaaattcgctctacaggagatggggaaaaacctaactcaactaaaagaaaatactattattagctaacaaacctgtgatagctggcttcagaattttcctaaaaataaaattcaaaagcatacacagtatttatatcctttgatagtgcaacacgaataa

SEQ ID NO: 174350 - DNA, 636 bp, Homo Sapiens
aacccattccataagctcctactttaattggtcctagttgggatttcatttccttctggaaaattttattgtttattggcatgtgacccttgactgatggcttcattagcattttgtttttctttttggatccttaatagaaaactcaattctgttagggatttccaaataggatagggcaaagtcgcacttagtatatcctccacagaaagaaagaagcaaaatcaagccaagagggccctttacttgtcctcttgctaagttaataaatagactggtggatggtggtagatggagaaacaaaaatgtaagggcagagaagggtccaaatggggaggaagaaagcaatgacagccaggctgtccggctcattcctgttcattcacatgcagaccacccatgatctggtcttcaaatttcttctgaattccaccccactaaatacagtagcagttactactttaaactactactaaagcacttgttctccaaatgacctgagaaatccccttgcctcagctctgggacagtagttcctacagctgtagggaggtctgttaatgcacctggctgaacaggaggtaacaagagtaagtaccttctctcacttgtgcaacacgaataagggatcctcta

SEQ ID NO: 174351 - DNA, 1177 bp, Homo Sapiens
  misc_feature (1080)..(1084): n is a, c, g, or t
  misc_feature (1086)..(1087): n is a, c, g, or t
  misc_feature (1089)..(1089): n is a, c, g, or t
  misc_feature (1092)..(1098): n is a, c, g, or t
  misc_feature (1100)..(1100): n is a, c, g, or t
  misc_feature (1102)..(1102): n is a, c, g, or t
  misc_feature (1104)..(1110): n is a, c, g, or t
accacgcgtcgggaagcttaagttccacgagcagaagctgctgaagcaggtggacttcctgaactgggaggtcaccgaccacaacctgcacgagctgcgcgtgctgcggcgttaccggctgcagcggcgggaggactacacgcgctacaaccagctgagccgtgccgtgcgtgagctggcgcggcgcctgcgcgacctgcccgaacgcgaccagttccgcgtgcgcgcttcggccgcgctgctggacaagctgtatgctctcggcttggtgcccacgcgcggttcgctggagctctgcgacttcgtcacggcctcgtccttctgccgccgccgcctccccaccgtgctcctcaagctgcgcatggcgcagcaccttcaggctgccgtggcctttgtggagcaagggcacgtacgcgtgggccctgacgtggttaccgaccccgccttccttgtcacgcgcagcatggaggactttgtcacttgggtggactcgtccaagatcaagcggcacgtgctagagtacaatgaggagcgcgatgacttcgatctggaagcctagcggatctcccactttgcatggctgtcttttacagatgggaaaactgaggcctgatgctggagattctatgagggtgctctcctcaagggtatcagacggtcgtaggttcttaagaatttgattcatcagtggcaggccatgcatagagccacgggaggtgcgtccttgttttccaggaaatgttcttagaacttggactactgattattaattgactgtgccttgggaaacagtgggaagtaacttggtgcagcactggggtattgttggcttcttgtgttggaaactttgtaatgtaaaaggaaaaactggaaatccccacgccctgtttccctttatcgtcttgtggttggactggttcaattcgtttaactcgaattcttgctcctggccgtggttaagctgtgtacagatgatggagagtttggcctcaagtttttataaactgagcgagactagtgttcaggatctcctcccttgtttaaatgtcaataaatgccccaactgcttttgtaagtccnnnnnannanaannnnnnngnanannnnnnnccctggtcggccgccctcggccccttcgaagaaccttttctaaaaccatttcgttttggccgccccg

SEQ ID NO: 174352 - DNA, 796 bp, Homo Sapiens
ggaagcagtggtatcaacgcagagtgcccattacggccggggatgccagaacgcgctctcagcttcgggtcctgcggctgcggctgccgccatcatggtgcggaagcttaagttccacgagcagaagctgctgaagcaggtggacttcctgaactgggaggtcaccgaccacaacctgcacgagctgcgcgtgctgcggcgttaccggctgcagcggcgggaggactacacgcgctacaaccagctgagccgtgccgtgcgtgagctggcgcggcgcctgcgcgacctgcccgaacgcgaccagttccgcgtgcgcgcttcggccgcgctgctggacaagctgtatgctctcggcttggtgcccacgcgcggttcgctggagctctgcgacttcgtcacggcctcgtccttctgccgccgccgcctccccaccgtgctcctcaagctgcgcatggcgcagcaccttcaggctgccgtggcctttgtggagcaagggcacgtacgcgtgggccctgacgtggttacccgaccccgccttccttgtcacgcgcagcatggaggactttgtcacttgggtggactcgtccaagatcaagcggcacgtgctagagtacaatgaggagcgcgatgacttcgatctggaagcctagcggatctcccactttgcatggctgtcttttacagatggggaaaactgagggcctgatgctggagattctatgagggtgctctcctcaagggtatcagacggcgtaggtcctagaattgattctcagtggcaggcatgcttagagcc

SEQ ID NO: 174353 - DNA, 926 bp, Homo Sapiens
  misc_feature (789)..(789): n is a, c, g, or t
  misc_feature (802)..(802): n is a, c, g, or t
tgccatgatcacccggaaggtgggggccgccctggcagccggctgtactgtcgtggtgaagcctgccgaagacacgcccttctccgccctggccctggctgagcttgcaagccaggctgggattccttcaggtgtatacaatgttattccctgttctcgaaagaatgccaaggaagtaggggaggcaatttgtactgatcctctggtgtccaaaatttcctttactggttcaacaactacaggaaagatcctgttgcaccacgcagcaaactctgtgaaaagggtctctatggagctgggcggccttgctccatttatagtatttgacagtgccaacgtggacccaggctgtagcaggggacatggcatctcaaatttcagcgaacactggtacagacttgtgtttgctcaaaccaattcttggtgcaaaggggcatccatgatgcctttgtaaaagcattcgccgaggccatgaagaagaacctgcgcgtaggtaatggaattgaggaaggaactactcagggcccattaattaatgaaaaagcggtagaaaaggtggagaaacaggtgaatgatgccgtttctaaaggtgccaccgtagtgacaggtggaaaacgacaccaacttggaaaaaatttctttgagcctaccctgctgtgcaatgtcacccaggacaagctgtgcactcatgaagagactttcgggcctctggcaccagttatcaagttcgatacagaaggaggaggctatagcaatcgctaacgcagcctgatgtttgggttagcaggntatttttactctncagacccagccccagatctgggagagtggcagagccagctgggaagtgggggcatggggttggcgtccaacgaaaggataaattttccctctggtgggagtgccccctttttggtgtggaaggg

SEQ ID NO: 174354 - DNA, 454 bp, Homo Sapiens
  misc_feature (48)..(69): n is a, c, g, or t
ttggccccctccccccaaacttggggacaaaagaaaaatccctttccnnnnnnnnnnnnnnnnnnnnnngagttgttttctcatgttcattatagttcattacagttacatagtccgaaggtcttacaactaatcactggtagcaataaatgcttcaggcccacatgatgctgattagttctcagttttcattcagttcacaatataaccaccattcctgccctccctgccaagggtcataaatggtgactgcctaacaacaaaatttgcagtctcatctcatcttcatccagacttctggaactcaaagattaacatttgactaaccctggaatatctcttatctcacttatagcttcaggcatgtatttatatgtattcttgatagcaataccataatcaatgtgtattcctgatagtaatgctacaataaatccaaacatttcaactctgt

SEQ ID NO: 174355 - DNA, 900 bp, Homo Sapiens
catgcaccccattccgaggggtgaagaagatgggtggggaagaatttagccggcgttacctgcagcagttggagagtgaaatagatgaactttacctccaatatatcaagcacaatgatagcaaaaatatcttccatgcagctcgtaccccagccacactgtttgtagtcatccttatcacatatgtgattgctggtgtgactggattcattggtttggacatcatagctagcctatgcaatatgataatgggactgacccttatcaccctgtgcacttgggcatatatccggtactctggagaataccgagagctgggagctgtaatagaccaggtggctgcagctctgtgggaccaggctttgtacaagctttacagttgcagcagcaacccacagacatctgtatcatcaagctttccctacaccaaagtcggaatctactgaacaatcagaaaagaaaaaaatgtaatgcaaattttaagaaatacaggtgcatgaccaattgtcaattaaatattcagttttatgtctccatgcaaacattcaaagtgcttccatcagaacggagtaaaatactaaacacctctgaagactgcaaactggattagttcttttacttcagtgtttaataagcagatgtatgtatgcatggttatactattttgttaacatgtacaatttcctgatttttcttcaaaaatgctgttataaagtatttgtctatttatgataacagtacacgtgttctgcttgaatttactaaattctactactgggttataattaaatcatgtgatattccacgtttggatatgctcatttaatttctacagaaaaaattttaaattatttcacattagccatttgttaaaacacagcatcatagcgacagcaggca

SEQ ID NO: 174356 - DNA, 521 bp, Homo Sapiens
  misc_feature (139)..(151): n is a, c, g, or t
actgcttgtcgctacagtacagctggagagatatacattttccaatgtacctatgggccaatgaatcccaccattttcaaataaatccttaatcagactccactcagttggaaagttttgctgaaaatatttctggatnnnnnnnnnnnnncctcatgttggaaatcaactgtccttcccatttggaaacattaaaaggagtccccaggcaacactggtaataggtgaaaatggttcctggagtcaccagtgttgtacacacacatggggaagacaccacagcttagatgtgacaaagttccttctcatatgactgttccctcaaggtaagactaagatgggagggggagaaaaagaatcctaaaaaagccaatttttaaaaattctgctttggctgattttgtgctataatggaaagctcacttctaaaaatcatatttcttcaaagagttaaaaatcgaaaggaagactaaatgtaatgtgcctttcctagcgacagcaggcaggggatctatagagtc

SEQ ID NO: 174357 - DNA, 591 bp, Homo Sapiens
aggtgacttagaggatcccagtcggttctaccatggactctcaagcactttacttcgagaagtaccaggctatttcttcttcttcggtggctatgaactgagccggtccttttttgcatcagggagatcaaaagatgaattaggccctgtacctttgatgttaagtggtggagttggtgggatttgcctctggcttgcggtatacccagtggattgtatcaaatccagaattcaagttctttccatgtctggaaaacaggcaggatttatcagaacctttataaatgttgtgaaaaatgaaggaataacggccttatattctggactgaaacctactatgattcgagcattccctgccaatggagcactctttttggcctacgaatatagcaggaagttgatgatgaaccagttggaagcatactgaagtgtcttggtgggcctgagccaagcacaggtgtttgaggactacagttcatctcagggtttcttggagtacaagaccagtgtgaagttattctgatttcttgggaattttgctttttgtcttcccttctaccctacatcttaaactttatggtagaaccgact

SEQ ID NO: 174358 - DNA, 371 bp, Homo Sapiens
  misc_feature (71)..(71): n is a, c, g, or t
agtcggttctaccatgccaaatgaagaggacccttcattagatcgccctttcatttcagagggtactacgnttgaaagacttaattcatgatatgacaacgtcaggttctggctcaggtttaccattgcttgttcagagaacaattgcgagaactattgtgttacaagaaagcattggcaaaggtcgatttggagaagtttggagaggaaagtggcggggagaagaagttgctgttaagatattctcctctagagaagaacgttcgtggttccgtgaggcagagatttatcaaactgtaatgttacgtcatgaaaacatcctgggatttatagcagcagacaataaagacaatggtagaaccgactgggta

SEQ ID NO: 174359 - DNA, 189 bp, Homo Sapiens
cctgctgtcgctatgttaacgtacgttatggtagaaccgactagtcggttctaccatatagagatttttgttccttgctccttagggtttgaaagaaaagttcagtgttgagagctggacttcagggataggggtaggcaagagtagagttgaatgctgtttgtatttagaaattcaacaattttactt

SEQ ID NO: 174360 - DNA, 321 bp, Homo Sapiens
agtcggttctaccatcttgcagatggcagatcatgggacttctggcctccataattgcctaaaccaattctcataataaatctcctcttctatatctctatatatcctattggttctgtttctctggaaaactgactatacagtcatcagacaaagtggctccatagttaaccaagaaaatgaagcacgtagagcaataacatattctaacaacaacttgcaagctcactgctaagaggactgacatgtttcctacctctccttacagagactaaaaaatattctcagaaagtagagaccaggctgggcatggtagaaccg

SEQ ID NO: 174361 - DNA, 393 bp, Homo Sapiens
aggatcccagtcggtctaccattcatctctcaatacaagcatttttaagtcagtacttaaagatttggttaacttcctaacccaagtatttcactaaacataatttcctttaaaagctcctaaacatcctctaccttctctagtatcagtcgcggtgaaaaaagatgctgacagcagtcacttcattgagcccttcctggaaactagcagaatgtcaaataaaaactgcagttgctgtattctacaggaaataagaaatgctgagaatgcagcattcctttagttctaccatcaacaggataccaaccactgttttctgtaggctccacagatttcaagccaacaaataaaaatgccttaacccttgtaccccacagttaaacatatagtttt

SEQ ID NO: 174362 - DNA, 631 bp, Homo Sapiens
agtcggttctaccatataactccagcccaccagaagaatgataaaatgagtcagtcttttctgcaccttgattcagtccaaagccatctctgttaatattgatggaaacagaacctgtgactcgatgccaccgtcgaaccaaaaatttcaattctggaaatgtgcaatggatatactctgacggccgacccgaaacctggtgaagccctttgggcgattggtgatcacctctagatccgtgaaagctggctgcccccccatccgggcaagcagggccaaggtggcatcttcacattcctggaacccacccagtaacagcagcaggtatttcttctggtaaatgagagcctttcgaaaactttctgccctcaagtatttaccataaattctctttaaagtgacatgttcagaatcagggctcagagtttgaagtaaagagtcatttcttagttcagctttcagtttgtatacttcagcctctgcccttttcaaagatttctggagagtcaatttttctctgttccatacttctttttcagaggcaatgatggcttcaatgttggcaccaccattcaatgaaaacctggaagaattatctctaccagctcctgtctgtcgataccacctgacc

SEQ ID NO: 174363 - DNA, 400 bp, Homo Sapiens
ccatatatatgggacctgccatatgccaggtactgttcttacctcctgtggaattagcagaaaggtaattctatgtccctgctctcagaaggtttagaatgagataaggcaggctactgagttggcttaaaaactaagaggaaactagtgaagtgtagttgcccgttcacatttttatttttaagtattttatgcccagggaaaactgtgggactgggacttgaattctaattttatgttttcttgggttattctttaaaacagggtcttagactagtaattaatacagtgtcactctctttcaccttcctcaattcctttgcatgcttgttaggtcattcagagtggcactaaggtaaactttggcatatgaaaataacctgcagcagatggtagaccc

SEQ ID NO: 174364 - DNA, 292 bp, Homo Sapiens
accatgccgcgcgtatgcggacgactagaacgggtaacctgggggtaaatctgaacggaccactgtctaagacaacacttggtttgtgggtctgacatacacgtagaatttacaggcatgataataacagcacaaagactgataaaataatagcacaaactaacaataaggaaagaagaataattaggccacggcacagtggctccatgccttgtaagttcccatgcactttgggcaggctgattgtgggacggactgcgttgagccaccaggagtttaaggaccacgcctg

SEQ ID NO: 174365 - DNA, 978 bp, Homo Sapiens
  misc_feature (868)..(868): n is a, c, g, or t
  misc_feature (920)..(920): n is a, c, g, or t
  misc_feature (964)..(964): n is a, c, g, or t
ggcctgggtggcgaattcggcacgagggctgaatgaaattgtcgggaatgaagacaccgtgagcaggctagaggtctttgcaagggaaggaaatgtgcccaacatcatcattgcgggccctccaggaaccggcaagaccacaagcattctgtgcttggcccgggccctgctgggcccagcactcaaagatgccatgttggaactcaatgcttcaaatgacaggggcattgacgttgtgaggaataaaattaaaatgtttgctcaacaaaaagtcactcttcccaaaggccgacataagatcatcattctggatgaagcagacagcatgaccgacggagcccagcaagccttgaggagaaccatggaaatctactctaaaaccactcgcttcgcccttgcttgtaatgcttcggataagatcatcgagcccattcagtcccgctgtgcagtcctccggtacacaaagctgaccgacgcccagatcctcaccaggctgatgaatgttatcgagaaggagagggtaccctacactgatgacggcctagaagccatcatcttcacggcccagggagacatgaggcaggcgcatgaacaacctgcagtccaccttctcaggatttggcctcattaacagtgagaacgtgttcaaggtctgtgacgagccccacccactgctggtaaaggagatgatccagcactgtgtgaatgccaacattgacgaagcctacaagattcttgctcacttgtggcatctgggctactcaccagaagatatcattggcaacatctttcgagtgtgtaaaactttccaaatggcagaatacctgaaactggagtttatcaaggaaattggatacactcacatganaatagcggaaggagtgaaactctctttttgcagatgggcaggcctccctggncagggctgtggtcagaaagaccatgggcccccgggtgggccagntttagaagccagac

SEQ ID NO: 174366 - DNA, 966 bp, Homo Sapiens
ggaggtggaggccgtctgtggtggcgcgggcgaggtggaggcccaggactctgaccctgcccctgccttcagcaaggcccccggcagcgccggccactacgaactgccgtgggttgaaaaatataggccagtaaagctgaatgaaattgtcgggaatgaagacaccgtgagcaggctagaggtctttgcaagggaaggaaatgtgcccaacatcatcattgcgggccctccaggaaccggcaagaccacaagcattctgtgcttggcccgggccctgctgggcccagcactcaaagatgccatgttggaactcaatgcttcaaatgacaggggcattgacgttgtgaggaataaaattaaaatgtttgctcaacaaaaagtcactcttcccaaaggccgacataagatcatcattctgggatgaagcagacagcatgaccgacggagcccagcaagccttgaggagaaccatggaaatctactctaaaaccactcgcttcgcccttgcttgtaatgcttcggataagatcatcgagcccattcagtcccgctgtgcagtcctccggtacacaaaagctgaccgacgcccagatcctcaccaggctgatgaatgttatcgagaaaggagagggtaccctacactgatgacggctagaagccatcatcttcacggccaggaagacatgaggcaggcgctgaacaactgcagtccacctttctcaggattgggttcattaacaagtgagaacgtgttcaaggtctgtgacgagcccaaccactgctggtaaaggacgatgatccagcactggtgttgcatgcaacattggacgaagcctacaagattctgctcacttgtgggcatctgggtactcaccagaagatatcctggggcacatcttcagagtgtgtaaactttccaatggcaaatactgaacggagttatcagggaatggttcccccactgaa

SEQ ID NO: 174367 - DNA, 335 bp, Homo Sapiens
gctgaccctagaggatcccttcgcgtatcataatcaaagaaaagaataaagagtgaagtaaaaactgaacatgaagagattaagttattaaaggaaaatgaagtaaataaaaagagtgaaaaaccattgggggtggaagtcaaacaagcctagacatttgattggaagagaaaagatcaaatatgaagttcacaaaccaaaagtttataaactcaatgcaatacaaatcctttttattgtaaaagctgagttgaaactaaaagatctataaaaactgttacttttggccttaaacagtaccaactcttatgataccggggagggtaccgcgctcg

SEQ ID NO: 174368 - DNA, 692 bp, Homo Sapiens
attactggaggaacagagctaaaggcctaaagaaggccttacagtatataacagtaaatagaagagtaacatctttatacaataaactgttagaaatgataagtgtaaagttgtgcgtctctgcggctcctgaacttgaagattattatgaatagatgggaccagcattatatattaaaaactttgatacttagaactttccaactttaaaattcagaatcataaatggtgacaacagtagtagtattgaaccaaaaatagtcaagtaaataatgtctcagtaaagcaaaagcattatcttctcaaatacaaaaaatacaaaattcatttcttttcttgaccttgaaaatttctgttttccaaatacctaggaaaaatgaataccttctgcgttgaatccatgtagcaatctgatgaagtcatctatgtccatggaacgggcccgtttgtcactaaaacctgtgctggttaggatttgctgtattttatctgctatgctgaaatcttctggtattataatattatggactgaacagtgaattctgtagtttttgtccaagagttgttgcactgcacttgatttaaatgcagcagagagtgtcttgtttttcctaacaaaggttatccttactagaccatcgcattcctgaaaattgatgggtggtggtggattgcttaggcttctatccaca

SEQ ID NO: 174369 - DNA, 814 bp, Homo Sapiens
ggacagtaagtacaggttagtaattacctgggtaattaattgaagccttattctgttttcataagacttacttgcttaattcaagcaaaacaaattttggtctaaattacctagataattatgacagctttttacttgagaagtgtagaacttgcttcaggctacaaaactgtattattcctaaatggataaccaggtaggattctaactggcattattgtatgcttaagattgatttaacaacagctattcccagtaaggaaattttaaaaatcagatccagttacatgtattatgatttttctaccttatggactattttggagggataagctattaagactaagactatgaatgagagttggggaaggagcaggaagggaggaacctgcacaccacattggaacctgcacaccacattaacacaaaggcaatcttctggctcggactgttctttactactgttcttaaagaaaatgttcattctgctgcagctaactagcctccatcttctacaccaaatactattccatgccatggaagtgctatgcaataactctcccaggtagcaccttataccgcttaaaagcctttaaaatctccaatctgaaggtgtcacagtaaagaaatgtaaacacttaggaaaacaaaaatgtaattacctgatgaagtcatctatgtccatggaacggggcccgtttgtcactaaaacctgggctggggtaggatttgctgtattttatctgctatgctgaaatcttctgggattatctatccatataagattcaaaataaatgaacgacatatctctat

SEQ ID NO: 174370 - DNA, 120 bp, Homo Sapiens
atttgtccctaaagttaaacatctattccaatgatacatactatagccacatatagtggcagctgctaagtgtcaacctaaacccattctcccctccctaagaccctagggatcctggag

SEQ ID NO: 174371 - DNA, 410 bp, Homo Sapiens
tgatgctgaggtactctacaggaattctagggtcttagggagagtaaatagctaatgaaggattataaagcactttgctaatataaaatgcaacatcaaagctgaataataatcttaatttagggtgaagggtttccattagcagagtaaaaataaaaaggacaaagggtagtgttgctttgtacctttgataacagttgtacaaattcacaaagtgctgctattgaatcctcattgccctgtgaactctcaacccaggaattttggctccccctcccctaaacttctctaaagtacttcctcttacccactcagtgttggtgaatgggcaaccttcccttaagaacggggtacccgaggctcgaaattcggtaaattcattgggtcataagcttgttttcctgttgtga

SEQ ID NO: 174372 - DNA, 780 bp, Homo Sapiens
ggggaaggttattttgggtgcctgtgggggaggtgaaacaaggtcccatgactgtttaacagaaccttgtctgtggagggtagaggttgcggcagggccctgtggcacttacttggtgagaaggtaggtctagctggctccattcagtatttgagacatttggaatttgtctgcatttaaaaccaagagatcacacacacctgtctggatttggagtttctcttgaaaactcgccagtccggccgtctgagcctgcactgacgcctggtgaagctgtgcaggggccgcccctctccctttcgccacagtcctctccactccctttcgcctctccctggcctgctgcactcactgataggaaattctgaccccagactcggagcagccttcccgtggttcggtttttgcttccgcgaaaaagccaaaggccttggccagagagccagctgttcctacctctaccccacgcttccaaggcaaccttctccacttatcttaagccgagagacagctcttcaaaaacgtacatggatcctgattttcctcaccaagtcccaatggaaccctgtgctgttgaaaaatcagtgtgtaaaactctctgtgtccctgttgggctgaccagacagtctggactcttgtaaatttgagaattaattaaagggaaaccaacccaaataggacctgcggaaccattttaaactaaaatctcccccccatcccttggggaactcacgacaccaattctactatttccccaacccccgcactaccccaataccc

SEQ ID NO: 174373 - DNA, 813 bp, Homo Sapiens
tagggtcttagggagcacacgaaccctgccaggcccccgctggctcctccaggcacgtcccggacctgtggggccccagagaggggacatttccctcctgggagagaaggagatcagggcaactcggagagggctgcgagcatttccctcccgggagaggagatcagggcgacctgcacgcactgcgtagagcctggaagggaagtgagaaaccagccgaccggccctgcccctcttcccgggatcacttaatgaaccacgtgttttgacatcatgtaaacctaagcacgtagagatgattcggatttgacaaaataacatttgagtatccgattcgccatcaccccctaccccagaaataggacaattcacttcattgaccaggatgatcacatggaaggcggcgcagaggcagctgtgtgggctgcagatttcctgtgtggggttcagcgtagaaaacgcacctccatcccgcccttcccacagcattcctccatcttagatagatggtactctccaaaggccctaccagaaggaacacggcctactgagcggacagaatgatgcccaaatattgcttatgtctctacatggtattggaatgaatatctgctttaatatagctatcatttcttttccaaaatacttctctctatctggaatttaattaatcgaaatgaatttatcttgaaataaggagcatatgcctacctggaaatttctacctccttatgggtggagaagaaacctccggggtggagaaatcacaaaataatttaaattgggggccaattaaaccttctggattttcca

SEQ ID NO: 174374 - DNA, 531 bp, Homo Sapiens
ttcaccaacgcagagtcacagaaactcatctacaccttcactgccaccttcacccggcgcctggtccccttcctgtggctcaagtggccaggaacacgcctcctgctaagaccctgagccctgacatctgcccccagccccaaccctcagatgcttcacttctttggaattccaggactctcaatggggggacgggatgcccagccaaattgatctcccagtcttgtccttacccattccaagtgctctgccagcccctgttcatccaagttttaagtcctccaccctgttctaagagactgttccaacggctctgggcctcagtggtcacttgaccaccattgtctcagagctgcccactttgtgtgtgtcacatgctgcctgagtcacatgtacatcttatttctgcctctagttttgtaagctcctggagggcggataacatcttatactactcttgtattctcatggcacctagtgcagtgctgggcacagagtaggtgctcaataaagacttgttgaatgaacagc

SEQ ID NO: 174375 - DNA, 1179 bp, Homo Sapiens
tgccatgagaatacacagagttagtataagatgttatccgcccctccaggagcttacaaactagaggccagaaataagatgtacatgtgactcaggcagcatgtgacacacacaaagtgggcagctctgagacacatggtggtcaagtgaccactgaggcccagagccgttggaacagtctcttagaacagggtggaggacttaaaacttggatgaacaggggctggcagagcacttggaatgggtaaggacaagactgggagatcaatttggctggagcaggggagcttgtgttaaactgtgatgatgaggggcacctggacagaggttgggtccgtgggcaatgagaagacatgttactccctctcttgacatgaagacctggtgggcttgtggcctcctgctgccttcctttccctgtcttcccatctccactctctcctaggaaagtggaacctggatgctggtagggccagagacagaggcttaacaccctgctggggaacccggtcagaactcccgaggcaggagaggttctgctccactggatgtttgtcttggtgtttttggatgtgctgatcaagagcaagatgttctggattcttaaaactcccctcacaaggaccaatctagagataatttattgatcagtgatcacagcttgtaccccaaagccgtgtatgtctggatccttccctaagaccacagatagctccagggagtcccacctccttggctatggaaatatgctcagccctggtttcagagaagcctggactccactctggaccccatgagatgatatgcgctggtactccaggctttaaatggcctgggaagcctcagtggattttgtttattttcagcattgccatgtatgcttaactctgagttggggtggggtaggtctgtttaaaatgccagggaaggtgggcagcagagtggatttgtgcaagaaggaacctggggggtttaaggacagcaaaatgatcttaggcgtaattgactggtttttctgaggtcttgccacactgggcaagaaaatgctgcatcgggcccttattccagagagtgcagagctggggccaaggtcgtggtcaaaaaggaaaggagccctcatggactccagggtcagaagttccctcgggaaaccagcaggaggtgggaaaagagccccat

SEQ ID NO: 174376 - DNA, 928 bp, Homo Sapiens
tctagggagacacacgtagtgtatcaaatgctcaaacttttggcagccgaaagttgttttttaaagctctttataatctgctcaagtagaatttctaacacaaaacccttttttgcttaaaaagcagatgacaaaggaaatgtcaaataatgcacatgaatcttcagctattttccaacccccgaaatgaagatatggggctgcacagcattcactacagatccctagtttttacaactgtcaactgtacattctcatgtttaggatactccagttcactgcgtggatatttggaaaactggacaaaatcaggcagcccacccctcccttgtcccgagcttcctcgatctccattcaccatgaccaattttttcccccacaaaagcactatcacctctaatagtagctggaaacacctatcagatattctaaacagcatgtatttttaccaggtagatgatttctgaagatcacaggaagtctaccactctcttcccagttctgaactcctctggttacgcttcattttaaatcgggtgcttctttcccgcccaaaatattctatttggcctgccccagtggttcccaagctgcctggtgatcagaatcccttgggaaatgttgaacacacagcttcccaggctttctggaaaactagttagatctgtctgacaatctgtaagctgaggcgattcttccacagctgacccagcgctaatctagcatttggcaaccaaatgtctgtacctcaccagtcacacaaggctcacaatatgctgggagcatttgaatgatagctcaagaattattctttcactccatattcttctctctcaagaagattgggaattttagctagggaactatgtgcatactgaaacaggtaaatgaactcatcacagaaatataataccctgggccaatgcac

SEQ ID NO: 174377 - DNA, 284 bp, Homo Sapiens
tcttagggaggttgtcagttgttcctccgcttgctgaggcctcaacggtatgagtgaacataggaggggccaaattgtctgggtggatgcaggtttcagaatgggattgtcttggggcagcttggtgttcagcatcttgtgcccagcgtgacttctcaggggaccttgggttgatgctggttgattcccgacctcagcactgagctccttgtggcaggcctcgctctgctcatctcctgcatcatccaggatgctccctaagaccctataatcctggagagtac

SEQ ID NO: 174378 - DNA, 571 bp, Homo Sapiens
aaagtcattcatttctgatgagtatatgaatccccctcttgctagtaaggttctatttgggctaaaacaaggctgaatttttaaagagtatttgaatatattttagaagtcaaattgaggctataaattgcatcaatctggacaattccattgcaggaataatatgttaaaaaccaatggggagaagcacccacgatctctcctgtagcactccgtgtctcataagcaatttgaagacacttacaagtaactgattccagtcaaattaggattaactgactcaaaaaaatggtgtcaagtttctttaatgtttttatggttagaagtgagtttaacagacttgaagaaaactgttatcttttcctgctgtgagtttacacaaatgattccagagcagaatgaaagcagaaagctgttggttacaatattcttttaacctctctgcagcattttacacttactgggaaccttatgattcaccgtaagagtggaaatatacctgagttcgtgtcctaatggtctctaattcacattggatgcgtgggcaaatcacctcacctctctgagcctg

SEQ ID NO: 174379 - DNA, 618 bp, Homo Sapiens
gagctcggtaccctagggtcttagggaggactctcatggacaagaccctcaggaggtgacatatgcacagttgaatcactgcgttgtcacacagagaaaaatcactcgcccttctcagaggcccaagacacccccaacagatatcatcgtgtacacggaacttccaaatgctgagccctgatccaaagttgtctcctgcccatgagcaccacagtcaggccttgaggggatcttctagggagacaacagccctgtctcaaaactgggttgccagctccaatgtaccagcagctggaatctgaaggcgtgagtctgcatcttagggcatcgatcttcctcacaccacaaatctgaacgtgcctctctcttgcttacaaatgtctaaggtccccactgcctgctggagagaaaacacactcctttgcttagcccacaattctccatttcacttgacccctgcccacctctccaacctaactggcttacttcctagtcctacttgaggctgcaatcacactgaggaactcacaattccaaacatacaagaggctccctcttaacacagcacttacacacgtgctgttccaccttcctctcagtgctatctcaccgggttac

SEQ ID NO: 174380 - DNA, 525 bp, Homo Sapiens
gcaccctgtaatgcaggagcaggcagctcagcttgagcagacattgggtggggggtggggcgtggttgagggggaagccagcacagtgcagcaaatgtttcttgggaggaagaagcctgatccatcaccatctgcttgactatgtagcttggattctcctttgtacctatccctttcgatttggctttaccttcatctatcttgatcctttcctggccaaatatcctcttgggcccaaatgaacattgtaccatagtcttctggaaagcaaacatgcttcctgctatgtaattgctaacattcatattagatgatgtgctgtagcttgatcttccttagcctactgccactgaggcagtaggttttaggtggtatcgtagtgccttttgattaatttaagtatttaattttcatcttccttctttggatctatttggcctctcaaatgaactgagattcctgttaaaaaagattgatgttattgtctcttgtagaggaaactaataaagtgtgtgtacctgtgtg

SEQ ID NO: 174381 - DNA, 272 bp, Homo Sapiens
ctcttgtagagatgaggtcgccaagaatacgaggaagtgatctgtcccagccagagggttgaagtcctgtgccccaagtccagtgatcctactccacctcattggagaccttcttcacttgccaagagtttgttattcggaatcagtccgcagccactctcgctggatctcatacacactttttctgagaaactcatcttttcagtgttcctcttctccctagcctccactgccgtttattccctttcccaataaaacagtctattcctagg

SEQ ID NO: 174382 - DNA, 1024 bp, Homo Sapiens
agcaattcgtaggcctgtttcccatctgattccatagggggctgggtgtggccttcgggttgacatgagaaaggtctttagcaatcatttctgcaccggagatgagttttatcctgtggtggggagaggtgctcaccctccaccctgtgtccctgttttggtagcaagagtgaccgatgtcaagaacgagcatcaaagccagaatcctgcttgtttgcttaaaaatgtaattgggggcggcgggggaggagaggggaaagagacattcgcttggtttagtgaaacgcaggtgactttgtagctctgtggtcagcctacttgtctgctctgagggagagtgcgtggggagccatgctcaccgtggcaaacacaggaaccccatgactcgcccctcacctggcgtggagctgcctggtttgggctggagcagagctggtttcctggaatgttcctttggcccacatatggttctgtcccggtgagctctagtagtcagaggctcacgggacagaaccacatgctaggggtctagggcccctgtctactggatagtcagtttgctgtgtcagaaagcaacttctgaaagcagactatgagtcaccagacaggcaggatcttacaaaacttgcaccgcctctttggtctgcatgatggccccatgcgtttcataggctgtccactgagcgggattgtctgctgagtgggatgagccaactccagtttcttaaggaaaccactggaatctgcagcccccacatgcatctgtctaacgcatgcctcgtgttcgttttgcaaacatgcctgtggtggagggtggtcagttgtagccccgtgcgtctcaaggctgccttgtgaggccattcccagtgcgtgcccttgagctccttaccaccccttttcctgctcggccctttaatccctgacagacctgggactgtgtgggctgaaggggggacctggcaggcactgcaggaaatgccttttgcgtgggtgccatggaagggaaaggaaacctttgggcctt

SEQ ID NO: 174383 - DNA, 1813 bp, Homo Sapiens
  misc_feature (1086)..(1086): n is a, c, g, or t
  misc_feature (1088)..(1088): n is a, c, g, or t
  misc_feature (1204)..(1204): n is a, c, g, or t
  misc_feature (1363)..(1363): n is a, c, g, or t
  misc_feature (1389)..(1389): n is a, c, g, or t
  misc_feature (1559)..(1559): n is a, c, g, or t
  misc_feature (1562)..(1562): n is a, c, g, or t
tctagaggatccctagggtcttagggaggagagagaggagaagggaggcagggaggggcagcagaaccaaggcaaatattcagctgggctataccctctccccatcccctgttataggggcttagggagccagccagcaatgggaactttttgttcctgcgccattcgccaccagtattcatttgttgtgagctttgggttgcgaagtgcacgcggtgccgtgagtacgggagagtatatatagatctctatctcttagcaaaggtgaattgcccagatgtaaatggcgcctctgggcaaaggaggcttgtattttgcacattttataaaaacttgagagaatgagatttctgcttgtataatttctaaaaagaggaaggagcccaaaccatcctctccttaccactcccatccctgtgagccctaccttacccctctgcccctagccaaggagtgtgaatttatagatctaactttcataggcaaaacaaaagcttcgagctgttgcgtgtgtgagtctgttgtgtggatgtgcgtgtgtggtccccagccccagactggattggaaaagtgcatggtgggggcctcggggctgtccccacgctgtccctttgccacaagtctgtggggcaagaggctgcaatattccgtcctgggtgtctgggctgctaacctggcctgctcaggcttcccaccctgtgcggggcacacccccaggaagggaccctggacacggctcccacgtccaggcttaaggtggatgcacttcccgcacctccagtcttctgtgtagcagctttaacccacgtttgtctgtcacgtccagtcccgagacggctgagtgaccccaagaaaggcttccccgacacccagacagaggctgcagggctggggctgggtgagggtggccggcccgccgcgacattctactgtgctaaaaagccactgcagacatagcaataaaaacatgtcattcttccaaacccgcgcgccccgcacctctgatgattaataaagcgcttggtcggcccggcgctccgggccactgtagaaggtgtttattaagacgtgcttccgttttggagngncacgggtccctaactcaaggttaaatttcccacctttggtgccccataccgctgggatttccccctagagagagacaacctctctggggcccccattacacactaatcgcgcggcntttgacggaatagtgctctcgtccgctgtagtgaccagcactgtacctccgtcccctcggcctggtgcggagacctaaaaaacccgtcacacgcctctcatgtacgctcgctgcgaagaaaacagtaagaagggttccccccacggaaaaggtgttggnaatctggctctcccccccactaatanggttccaaattatacacgtgccgtggaagatcattcccagttactgccccgccgcctcgggggagacaggctctatccgccacctccacaacggactcttcatacaccttcatgcacacaatgtctgtatggggggcacgcccttcgccgctcttcccgtcgcccggtcnttnttacatcccacaagatagaagtccactgccggtctagctgaaaagagggtaaaggcgcggctcgagagagtgatgctcttggacggcggctcatgtcgggtggtgcctctcatcatttcccccccacctcgatcctcccctcatcttgacttcaacagcctctgcgcactgctcccccccgacagcgcggacagtcagcaagacaacgttagcgggcacaacacctgggcgtacataacacaagccgtccg

SEQ ID NO: 174384 - DNA, 528 bp, Homo Sapiens
  misc_feature (265)..(320): n is a, c, g, or t
tttatgtcctcctcatcatcttcctcttcatggctcacccgccgtgccatccggcctgaaaaccgtgctcctggggctgggctgggccaggatcgccaggtcccgctctggggccagctgctgcttttcctggtctttgtgatcgtcctcttcttcatttaccacttcatgcaggctgaagaaggcaaccccttctagagggagccatgagggtctgggcttcagagctaggtctttggggaagtcctggctgactctcttagcnnnnnnnnnnnnnnnnnnnnnnnnnnnnnnnnnnnnnnnnnnnnnnnnnnnnnnnncgctgggcctagcccagagtagtgcttgctccccctgccttgtcccaccagggaggcagcagactcaggccctccatggtcctctttgtcattttgttgacatgcattcctccttttgtcatcttgttggggggaggggattaaccaaaggccaccctgactttgtttttgtggacacacaataaaagccccgtttatttgtaaaaaa

SEQ ID NO: 174385 - DNA, 960 bp, Homo Sapiens
  misc_feature (527)..(546): n is a, c, g, or t
  misc_feature (732)..(740): n is a, c, g, or t
ggacttatggggagcccgagtctgccggcccgtccaggactgtccgccagtcagtgacttcattcccagatgctgacgctttccatcaccaggtgcatgatgacgatcttttgtcttcttctgaagaggagtgcaaggatagggaacgccccatgtacggccgggacagtgcctaccagagcatcacgcactaccgccctgtttcagcctccaggagctccctggacctgtcctattatcctacttcctcctccacctcttttatgtcctcctcatcatcttcctcttcatggctcacccgccgtgccatccggcctgaaaaccgtgctcctggggctgggctgggccaggatcgccaggtcccgctctggggccagctgctgcttttcctggtctttgtgatcgtcctcttcttcatttaccacttcatgcaggctgaagaaggcaaccccttctagagggagccatgagggtctgggcttcagagctaggtctttggggaagtcctggctgactctcttagcagnnnnnnnnnnnnnnnnnnnnaaggcgcaggggcttttatgtggtttttgcttgggggggcgctgggccctaccccaaaaaactgctttgcttccccttgccttggcccatccagggagggcaccaaaactcaggcccctccatgggacctcttttgtctattcggctggaaattgctttcccctcccttttgacctcccctcgaannnnnnnnnaggcgtgactttcacttaagagcgcaagatggtccctttaggtagttgagcgaatacaaagacgtagaaaccgctcttgtcgttccggctcagtttttacgaacattacttcctttccgactcttcaaagtaagtgcctcaacatgttgccaaggtatccacacatgccggtgcggatccgctttgagagccccccgcatatttgtgccacccgagattc

SEQ ID NO: 174386 - DNA, 966 bp, Homo Sapiens
gccaggcctccgcctgagcccgcacccgccatggacaactacgcagatctttcggataccgagctgaccaccttgctgcgccggtacaacatcccgcacgggcctgtagtaggatcaactcgtaggctttacgagaagaagatcttcgagtacgagacccagaggcggcggctctcgccccccagctcgtccgccgcctcctcttatagcttctctgacttgaattcgactagaggggatgcagatatgtatgatcttcccaagaaagaggacgctttactctaccagagcaagggctacaatgacgactactatgaagagagctacttcaccaccaggacttatggggagcccgagtctgccggcccgtccagggctgtccgccagtcagtgacttcattcccagatgctgacgctttccatcaccaggtgcatgatgacgatcttgtgtcttcttctgaagaggagtgcaaggatagggaacgccccatgtacggccgggacagtgcctaccagagcatcacgcactaccgccctgtttcagcctccaggagctccctggacctgtcctattatcctacttcctcctccacctcttttatgtcctcctcatcatcttcctcttcatggctcacccgccgtgccatccggcctgaaaaccgtgctcctggggcttgggctgggcaaggatcgccaggtcccgctctggggcagctgctgcttttcctggtctttgtgatccgtcctcttcttcattaacacttcatgcaggcctgaagaaggcaaccgctttctagaggggagcccatgaggagtctgggctacaagagctagagctaaggggaagtcctgggatgactgccttaacagtgggggtgagagtggggacagggcaaggggcacaaaggtaaggactggggggcagcgggctagagcagaatgtgcaggacccaggcttggcccacg

SEQ ID NO: 174387 - DNA, 354 bp, Homo Sapiens
  misc_feature (258)..(258): n is a, c, g, or t
  misc_feature (338)..(338): n is a, c, g, or t
gctgagaaactggagatgtcttgttagcataagtgtcttcattcccacctggagggtttgggagaggagcaaagcagttgaaaactagttaatgagctacaagagtcaaatagtcctctgaatggagcccccatcacaaaacagtgcccaggaggctggctcctcaagctacccatgcccagcgccctaaagcagcaccagatgctttgggaatggggggtgaaacacccacatgggcagcactgctaggcagcagtngacccttgacttctgggtcttaaagagtccctcactttcagccccaggagctatgggtggggtttaggcagtttttgtcnttaaccttttttagtt

SEQ ID NO: 174388 - DNA, 736 bp, Homo Sapiens
tagggtcttagggaggctttgatgacaaggttgaggatcatggagttgtcatgtcccagcctatgggagtagtgcctggtactgccaacacctcagttgtgaccagtgcgcgagacacgaagagaggaaggggacccatcacctcatccaggaggagtttgttaaatcaaacgaggcagggtgtcaaacagctatgaaatctaagtctcctatacctgggcaaggctacttaggaacggaacggccctcttcagtctcctctgtacattcagaaggggattaccataggcagacgccagggtgggcctgggaagacaggccctcttcaacaggctcaactcagttccctcataaccctctgactatgcggatgctcagcagtactccaccaacaccgattgcatgcgctcccttttttttgaaccaagcagctcctcaccaacagaacaggacgtgggagcgagagcctgccccactgctctcagcacagtacgagaccctgtcggatagtgatgactgaactgcacaaagtgaggggaacagggtgcaggagagggatctccaggttttgtggctcaattcttagtagcagggcaaaaacctgccctcctgcgacttattccctgagacttttcaggagagccagcccacagatgatgaagaaatgactggaagtgtcatttggagagtcaaatgggaaaaaaacaaacgacaaactgcctttatacacggcagt

SEQ ID NO: 174389 - DNA, 607 bp, Homo Sapiens
cggacgcgtgggtcgacccacgcgtccgaggacggcaagatcacagtcgacgagctcaagctgaagtcagatgaggacgaggagcgggtccacgaggagctctgaggggcagggagcctggccaggcctgagacacagaggcccactgcgagggggacagtggcggtgggactgacctgctgacagtcaccctccctctgctgggatgaggtccaggagccaactaaaacaatggcagaggagacatctctggtgttcccaccaccctagatgaaaatccacagcacagacctctaccgtgtttctcttccatccctaaaccacttccttaaaatgtttggatttgcaaagccaatttggggcctgtggagcctggggttggatagggccatggctggtcccccaccatacctcccctccacatcactgacacagctgagcttgttatccatctccccaaactttctctttctttgtacttcttgtcatccccactcccagcccctttgcctctatgtgacagctccctaggacccctctgccttcctccccaatcctggactggctcctagggaaggggaaggcttctggaaggcagcccttacct

SEQ ID NO: 174390 - DNA, 735 bp, Homo Sapiens
tagggtcttagggagaagcaagtacctttataaaagcaaattgtttacctcagagttgggtgtcacagaacatgttgaaggagcccttgcaaaatttgcactgtgggtggggagaaccccaacttcagataataaaattgtccttaaggcttccagcatagagaacaagcaggactggataaagcatagccgcgaactcatacaggagcggacgatccacctgaagggagccctgaaggagcccattcacatccctaagaccgctcccgcaacaagacagaagggaaggagggatggagaggatctggacaaccaaggagacggcagcagccagcctgatacgatttccatcgccctcacggacgtctcagaacacgctggacagcgataagctctctggtggctgtgagctgacagtggtgatccatgacttcaccgcttgcaacagcaacgagctgaccatccgacggggccagaccgtggaagttctggagcggccgcatgacaagcctgactggtgtctggtgcggaccactgaccgctccccagcggcagaaggcctggtcccctgtggttcactgtgcatcgcccactccagaagtagcatggaaatggagggcatcttcaaccacaaagactcgctctccgtctccagcaatgacgccagtccacccgcatccgtggcttccctccagccccacatgatcggggcccagagctcccgggccccaacgt

SEQ ID NO: 174391 - DNA, 823 bp, Homo Sapiens
gggagctgagcctagagtccggctgttggctagagtgggcgcggatctggtgtggggaaggcggcgggactcaggcctgcctgcgaagcattgtcctacataatggtagaggacgaactggcacttttcgataaaagcataaatgaattttggaataaattcaaaagtacggacacctcctgtcagatggcgggactaagagatacctacaaggattccatcaaagcatttgcagaaaagctgtctgtgaaattaaaggaagaagaacgaatggttgagatgtttctggaatatcaaaatcagatcagcaggcaaaataagctcattcaagaaaaaaaggataacttgttaaaattgattgctgaagtaaaaggcaaaaagcaggaattggaagtactgactgcaaatatccaggatcttaaggaagaatattctaggaagaaggaaactatttctactgctaataaagcgaatgcagagaggttgaaaaggctgcagaaatctgcagacttgtataaagatcgacttggactagaaattcgaaaaatttatggtgagaaattgcagtttattttcactaatattgaccctaagaatcctgagagcccatttatgttttccttacatctcaatgaagcaagggactatgaagtgtcagatagtgcccctcatcttgagggcctagcagaatttcaagagaatgtaaggaagaccaacaatttttcagcttttcttgccaatgttcggaaagcttttactgccacggtttataattaacatacaaatagtgtatataaaaacggtttatttttcttctcacaaa

SEQ ID NO: 174392 - DNA, 934 bp, Homo Sapiens
  misc_feature (115)..(136): n is a, c, g, or t
ctcgcctccagcagccccacctgcccccagcctctgtgacagtgaccgtctccctttgtacatacttgcacacaggttccccatgtacatacatgcacatactcaaacatgcgtnnnnnnnnnnnnnnnnnnnnnngcaggactctggagccagagtagaggctgtggcccaggcactacctgctggctcccacctatggtttgggggccatacctgttccagctctgttcccagggtggggcagggaggtgggggttgggggagtagtggggcacggctcctaagatccagcccccatactgacagacggacagacagacatgcaaacaccagactgaagcacatgtaatatagaccgtgtatgtttacaatgttgtgtataaatgggacaactcctcgccctctacctgtcccctccccctttggttgtatgattttcttcttttttaagaacccctggaagcagcgcctccttcagggttggctgggagctcggcccatccacctcttggggtatctgcctctctctctcctgtggtgtcccttccctctcccatgtgctcggtgttcagtggtgtatatttcttctcccagacatggggcacacgccccaagggacatgatcctctccttagtcttagctcatggggctctttataaggagttggggggtagaggcaggaaatgggaaccgagctgaagcagaggctgagttagggggctagaggacagtgctcctggccacccagcctctgctgagaaccattcctgggattagagctgcctttcccagggaaaaagtgtcgtctccccgaccctcccgtgggccctgtggtgtgatgctgtgtctgtatattctatacaaaggtacttgtcctttccctttgtaaactacatttgacatggattaaaccagtataaacagttaaaaaa

SEQ ID NO: 174393 - DNA, 338 bp, Homo Sapiens
agaggatccccacctggtttgtgactcaggaaactttgtcacagagttcttaagttctgagaaaaatggggcactgtgtttggtgctggacaggacacggggcctgcaggcgagcagccaggcctcaagggctcagtgagttgtccaagccagcgtgactaagggttccgctgggacctctcagattaacttccaagaaggaaagccgctccttgcgcatacactttttcttaactctccccggctgggaaactcaggtggcatcgaggccttggcgtctaccccttggtgacacccccatcaggataacgccttggctgggtctccctaagacccta

SEQ ID NO: 174394 - DNA, 765 bp, Homo Sapiens
tggacttattcattatgaatggtgctgggagattataatgtatgccttaaataactctgtagaatgtgtgtaagtaagcttgattgaggagttttcaatcattaggataatggaagaaatataaaaatactgtaaataataagataaagctttcaaacgtattttctagtaatacttagaaatatccacctgaaatattggtctgaatgcaaagacatcaaacatagggtaactttacttggtagataggagaaatattttaaatcgacaaaattttctaaatttcagggtctttctccattactttcattttgagactagagcttgtgtaactgacaccataattttgcaagaatgttgtattatattttaagattgaaaatgatttcatcataatccatccccaccccacactccctgctcccttccctgagtccctttcctccaagcgtgttgatataaaatgagttgcgtcttaatgttttgttttcttaaaaaccaaatgctataccttatgttcagacaattgtggggcatggaaatggaagtgcaacaaaggactaaggcaccttttcttctttcctttcctttccttgtttgccttggggatggaaacaaacaccacaagaacagccagggtggctggtcggtcttatgtctcttgacaatctacgtaccagccactttcactgggtactctgtgtcacaggctgataagccacagacttcaaaccctgctaggaaagaactttcttcttttagaaa

SEQ ID NO: 174395 - DNA, 348 bp, Homo Sapiens
aggatcccctacggtcttagggagagcatgtggtttgagaatcagaacggcacttgacacagccgagagactggcaggggacacccgggaagaccttgagtaccaggctaagaagcatgggctctgtcccaagagtgacagtgaggcaatgaaagcttgccagagactcagccagggttcctagctggccaggtgtcaaggctggggggcaagggcctcaggagcctaagacacagaaggaaaagtctgctctcccatgctggataacaggcggacacacaaggacagagccctcggctgaaagaatgctttcgcactcctagtgctcctctgggccctctgctggct

SEQ ID NO: 174396 - DNA, 465 bp, Homo Sapiens
acatcccccataggtcactgtgtggccatctaccactttgaagggtccagcgagggcactatctctatggccgagggtgaagacctcagtcttatggaagaagacaaaggggacggctggacccgggtcaggcggaaagagggaggcgagggctacgtgcccacctcctacctccgagtcacgctcaattgaaccctgccagagacgggaagaggggggctgtcggctgctgcttctgggccacggggagccccaggacctatgcactttatttctgaccccgtggcttcggctgagacctgtgtaacctgctgccccctccacccccaacccagtcctacctgtcacaccggacggacccgctgtgccttctaccatcgttccaccattgatgtacatactcatgttttacatcttttctttctgccgctcggctccggccattttgttttatacaaaaatggg

SEQ ID NO: 174397 - DNA, 929 bp, Homo Sapiens
cgacttcaggggtccccacggagtctggaccatggaggagcgaggtctggcccccaagttcgacaccacctttgagagcgcgcggcccacgcagacccacatggcgctggtgcagctggagcgcgtgggcctcctccgcttcctggtcagccagaacgtggacgggctccatgtgcgctcaggcttccccagggacaaactggcagagctccacgggaacatgtttgtggaagaatgtgccaagtgtaagacgcagtacgtccgagacacagtcgtgggcaccatgggcctgaaggccacgggccggctctgcaccgtggctaaggcaagggggctgcgagcctgcaggggagagctgagggacaccatcctagactgggaggactccctgcccgaccgggacctggcactcgccgatgaggccagcaggaacgccgacctgtccatcacgctgggtacatcgctgcagatccggcccagcgggaacctgccgctggctaccaagcgccggggaggccgcctggtcatcgtcaacctgcagcccaccaagcacgaccgccatgctgacctccgcatccatggctacgttgacgaggtcatgacccggctcatgaagcacctggggctggagatccccggcctgggacgggcccccgtgtgctggaaaaaggcgctgtgccacccctggccccgcccggcccacccccaaagctggagccccaaaggaagaaatctcccaacccgggaataaacggcctctaatccccccccgggccccaaaaaaggaaaccctggcgccccaagaacaaacgggtttaaaaagacccggcaaacccactaaacgggggaacccggatccccccacgcgcatggcccccccacaaaaaatcccctcataaaaaaggggcgtgtacacgcgccctcagcgc

SEQ ID NO: 174398 - DNA, 931 bp, Homo Sapiens
  misc_feature (519)..(519): n is a, c, g, or t
  misc_feature (904)..(904): n is a, c, g, or t
gggcagcccaccaagcacgaccgccatgctgacctccgcatccatggctacgttgacgaggtcatgacccggctcatgaagcacctggggctggagatccccgcctgggacggcccccgtgtgctggagagggcgctgccacccctgccccgcccgcccacccccaagctggagcccaaggaggaatctcccacccggatcaacggctctatccccgccggccccaagcaggagccctgcgcccagcacaacggctcagagcccgccagccccaaacgggagcggcccaccagccctgccccccacagaccccccaaaagggtgaaggccaaggcggtccccagctgaccagggtgcttggggagggtggggctttttgtagaaactgtggattctttttctctcgtggtctcactttgttacttgtttctctccccgggaggctcagggctctgagagctgtgctccaggccagggggttacacctgccctcccgtggtccctcccctgggcctccangggcctctggtggcgggtcccgggaagaaaccacacccccagaggtgacaagctgagccccctggcaacaccccagccctctggacttgctggggttgtcccaaaaggggagggctggggcccctccccgggtctcccagctttaaacagggaggggaacctcccctctggcccccaagggccctcccttcctggggcgccctaaaggccccacccctaacccctccttccaggggccccctgccaggagggggaaaccccccctttgaaaggggggggatccagaataagggcgtgcgccttggcctctttgggggctgggaaaggaaaacaccgcggctccccccaaggcttccctgggaaacaagcccctctacgggacatnaaaaaacacattttcttctcttgtgcc

SEQ ID NO: 174399 - DNA, 638 bp, Homo Sapiens
tatggcatagctgttctgtgtacattgtatccgaaatccaggggcactggggaagacatcgggtatgcaaagagatatgatgaaaccacgggacaggaggaggctggggtggtgtggattccggggaagacacatacacacagactctcccgctcagaggcaaaagaaccgggggcgtcaatctccgcccccaacagcagccacgagaacatcagggaaagaccaggtgtccacaagactgtttcagtccttcctatcatgaaagcgtctgctgagaggggctgggtcaaggtccctggactctgccttcagggcgcaattagccctgagccaaggcggctttgatggcggccaccaacttcagaaacttgcttcctgtgtccacgtagccatcgcctttcttcttagagtgaatcaaccttcccggctaccattcacttcaaaagaacccggtggcctggggaggtccctccgccgcagatgtccagggcggccggggaactcatcttctaacttctttcttgagctgaagatacttggacttgtagcctcaagcgctacaataaacgactcgtaccgcgagaccatgctctggcctacacaggtatcctctagagcagctcgcaccatccctcctc

SEQ ID NO: 174400 - DNA, 662 bp, Homo Sapiens
gtgatgctgaggctgatctagaggatcccgggtcgacccaagcgtactgatgctctcttggcttccccttgagaaggatgcctgaggcgggatgtccccccaaactccagggacaactggggaagacatggggtatgcaaagagatatgatgaaaccacgggacaggaggagggtggggtggtgtggattccggggaagacacatacacacagactctcccgctcagaggcaaagaccgggggcgtcaatctctgcccccaacagcagccacgagaacatcagggaaagaccaggtgtccacaagacttttcagtccttcctatcatgaagcgtctgctgagaggggctgggtcaaggtccctggactctgccttcagggcgcattagccctgagccaaggcggctttgatggcggccaccaacttcagaaacttgctttctgtgtccacgtagccatcgcctttcttcttagagtgaatcaacttcccggctaccatcacttcaaagaacccggtggcctggggagttccctcgccgcagatgtccaggcgtgccggggaactcatcttctaacttcttcttgagctgaagatacttggacttgtagcctcaagcgccacataaaggatcggacgggagagcatggtcgggctgcacatcc

SEQ ID NO: 174401 - DNA, 648 bp, Homo Sapiens
gtgatgctgcggcgttctagaggatcccgggtcgacccaccgcgtcctgatgctctcttggcttccccttgagaaggatgcctgaggcgggatgtccccccaaactccagggacaactggggaagacatggggtatgcaaagagatatgatgaaaccacgggacaggaggagggtggggtggtgtggattccggggaagacacatacacacagactctcccgctcagaggcaaagaccgggggcgtcaatctctgcccccaacagcagccacgagaacatcagggaaagaccaggtgtccacaagacttttcagtccttcctatcatgaagcgtctgctgagaggggctgggtcaaggtccctggactctgccttcagggcgcattagccctgagccaaggcggatttgatggcggccaccaacttcagaaacttgctttctgagtccacgtagccatcgccttacttcttagagtgaatcaacttcccggctaccatcacttcaaagaaaccggtggcctggggaggtccctcgccgcagaatgtcaggcggacggggaatcatcttctaacttctctcgagctgaagatcttggacttgtagcctcagcgcacactaacgactcgacgggagagcatggtcggggc

SEQ ID NO: 174402 - DNA, 790 bp, Homo Sapiens
ggtgatggtgagagctgttctagaggatcccgggtcgaccacgcgtcaggtgggaggttagtgtggcccgggcgtcgctcctcagcggatgtggcagccccgagccatggctctcgccgtccgagtcgtttattgtggcgcttgaggctacaagtccaagtatcttcagctcaagaagaagttagaagatgagttccccggccgcctggacatctgcggcgagggaactccccaggccaccgggttctttgaagtgatggtagccgggaagttgattcactctaagaagaaaggcgatggctacgtggacacagaaagcaagtttctgaagttggtggccgccatcaaagccgccttggctcagggctaatgcgccctgaaggcagagtccagggaccttgacccagcccctctcagcagacgcttcatgataggaaggactgaaaagtcttgtggacacctggtctttccctgatgttctcgtggctgctgttgggggcagagattgacgcccccggtctttgcctctgagcgggagagtctgtgtgtatgtgtcttccccggaatccacaccaccccaccctcctcctgtcccgtggtttcatcatatctctttgcataccccatgtcttccccagttgtcccctggagtttggggggacatcccgcctcaggcatccttctcaaggggaagccaagagaggcatcaggatgggtgggtttctgattgtggcaacgtttgcaaccgttcacgattcaataaatattggatgaatttaacgggaaaaaa

SEQ ID NO: 174403 - DNA, 932 bp, Homo Sapiens
  misc_feature (91)..(91): n is a, c, g, or t
  misc_feature (95)..(135): n is a, c, g, or t
  misc_feature (137)..(139): n is a, c, g, or t
  misc_feature (146)..(146): n is a, c, g, or t
  misc_feature (149)..(151): n is a, c, g, or t
atgggatgtcggccgggggtgcgtggctgggccgtcctgctcgccgcttttgctgggttgtggtgtctgggtttttggcgcttgtggtttntgcnnnnnnnnnnnnnnnnnnnnnnnnnnnnnnnnnnnnnnnnntnnntgttttnttnnnccgggtaaattccatccaaataattaatgaaatcgtgaacggttgcaaaacgttggccacaaatcagaaaaccccacccatccctgatgcctcttcttggcttcccccttgagaagggatgcctgaggccgggatgtcccccccaaactccagggggacaactgggggaaagacatggggtatgcaaagagatatgatgaaaccacggaacaggaggaggggtggggtggtgtgatttccgggaagacacatacacacagactctcccgctcagaggcaaagaccgggggcgtcaatctctgcccccaacagcagccacgagaacatcagggaaagaccaggtgtccacaagacttttcagtccttcctatcatgaagcgtctgctgagaggggctgggtcaaggtccctggactctgccttcagggcgcattagccctgagccaaggcggctttgatggcggccaccaacttcagaaacttgctttctgtgtccacgtagccatcgcctttcttcttagagtgaatcaacttcccggctaccatcacttcaaagaacccggtggcctggggagttccctcgccgcagatgtccaggcggccggggaactcatcttctaacttcttcttgagctgaagatacttggacttgtagcctcaagcgccacaataaacgactcggacggcgagagccatggctcggggctgccacatccgctgaggagcggacgcccgggccacactaacctcccacctggacgcgctaggtctgcgcgagtccc

SEQ ID NO: 174404 - DNA, 969 bp, Homo Sapiens
  misc_feature (519)..(527): n is a, c, g, or t
ggttgatgacattgagttaatgttttcgaactgctttgaatacaaccctcgtaacacaagtgaagcaaaagctggaactaggcttcaagcattttttcatattcaggctcaaaagcttggactccacgtcacacccagtaatgtggaccaagttagcacaccaccggctgcgaaaaagtcacgaatctgactttgtccttctaaaggatatatttgaagaaaaacaaattgttcatgaaaatggaacattaaatcatgctgtataaagcaataacaaacaattgattgaccacatgaaagtgtggcctgcactatattctcaattttaatattaagcactcaggagaatgtaggaaagatatcctttgctacagttttgttcagtatctaataagtttgatagatgtattggatacagtactggtttacagaggtttttgtacatttttgagatcattcatgtgtccagagatcttggaaaatattttttcacccacgatttattttgttattgatgannnnnnnnnaaagtggtggtattaagggagagttatctacatggatgagtcttccgctatagcacagtttagaaaaggtgtttatgtcttaattaattgtttgagtacattctttcaacactacacatgaatgaatccaatcttataaaccttgaaagtgctgtaaccagtgctgggctgcaggtaataaagtccaagtttattaactagatatttatttagtattgagagtaatttgtgaatttgttttgtatttataaaatttatacctgaaaaatgttccttaatgttttaaaccttttactgtgtttttattcctctaacttccttaatgatcaatcaaaaaaagtaacaccctccggttttcctgacagttctttcagctttacagaactgtattataagtttctatgtataactttttaactgtacaaataaaataacatttttt

SEQ ID NO: 174405 - DNA, 824 bp, Homo Sapiens
acggtctaagtacgagcctgggtggcgaattcttcacgaggggcacacttagtgacagtgatgctctgtgctggtaccaaacaaggcagacttgcaagaaccacggcatcttttttgtttttcaaacctttcctacttcaaacaggcttctcttctgaaatgatgacttaatgtcgaatattgacagcttactgcagttttacagtattcctcacaaagggcttcaggtagattatcagagctgtcagcactacctctccccgctgaaaccagcagttcatggcttcctgtggattccctccctccctggagtgttgagggggttgtacctgccagacttccaggggacgatggaatacccagaacgctccttctgaagaaatggggccctgtagctgcagcacaggggaagggccccgcaccctttctgggtccctcccggttccctgtgggccccatgaggagtccattacttcctttcttccttcatatttgacaggcagatgcttttcttataatctaattacatctttccattgggtatatattacaaaccatcacacttagaaatacttccaggaaagtgctttttggaagtgtgaattaataaagaaatggggtaaataacaaaagaaatttatttgctgaattggccaaggggcgggtgggttcgtggccttgctaatcccgaccttcttttgggaagcgcaaaggccagggttaaaatccccaaagggtcaggggaaattttggaaaccaattccctgggccttaaaaaacgcagggaaaacccccccttggccctggcctaaaaaatttaccgc

SEQ ID NO: 174406 - DNA, 1361 bp, Homo Sapiens
  misc_feature (36)..(36): n is a, c, g, or t
  misc_feature (69)..(221): n is a, c, g, or t
  misc_feature (791)..(800): n is a, c, g, or t
  misc_feature (962)..(1254): n is a, c, g, or t
cttggcttccaagtctttcagaagtaggcttggganctaccaagggggcccggccaaccaacggccggnnnnnnnnnnnnnnnnnnnnnnnnnnnnnnnnnnnnnnnnnnnnnnnnnnnnnnnnnnnnnnnnnnnnnnnnnnnnnnnnnnnnnnnnnnnnnnnnnnnnnnnnnnnnnnnnnnnnnnnnnnnnnnnnnnnnnnnnnnnnnnnnnnnnnnnnnaaatgagccccttgtgagaaggaaaagaatctgctgtccacagaagcccagcgtggagctacttcaaccagaaactgtcacccatgacactctgtgtgggttcagtcacacagaccacgatccattatggaagggagggagaaaaggatcacatcaaatctactgtatgcctcatagaccatcccttatttcaaaaatagaaattcctatttaaatgccgcccgtgtgcgacaggcctgatatttgcttctgcatgtggcagatctgttattgcttacactgtggcctcctggcctgtgctgctcagctggccctgttagagaacatgggaaccacatcaaaatcctaagtcacaaaacaagggctctgtccccagcctgggcccaggggcccacatgcccacctccacagcccagtcaagtgtggggataaggcactcctctgtgctctgagctaagatatggtagagtcccttctgaattttgagttgcaaagaatgattttgtgctaataaattcccagtgcatccaaaatgtacaaaaaccctagaatttccagtttttagattgnnnnnnnnnntttttttctgtagatccagaagaaactttcattgaaactttaaagacctcacctgcacctgctctagtaatgcactagttactaatatacaaacgtaaatctttgatgagtatggtcgggaaaaaactgtctgtccttgtgatcagcaataaatttcttttnnnnnnnnnnnnnnnnnnnnnnnnnnnnnnnnnnnnnnnnnnnnnnnnnnnnnnnnnnnnnnnnnnnnnnnnnnnnnnnnnnnnnnnnnnnnnnnnnnnnnnnnnnnnnnnnnnnnnnnnnnnnnnnnnnnnnnnnnnnnnnnnnnnnnnnnnnnnnnnnnnnnnnnnnnnnnnnnnnnnnnnnnnnnnnnnnnnnnnnnnnnnnnnnnnnnnnnnnnnnnnnnnnnnnnnnnnnnnnnnnnnnnnnnnnnnnnnnnnnnnnnnnnnnnnnnnnnnnnnnnnnnnnnnnnnnncagcaataaatttcttttctatttaccccatttcttattaattcacacttcaaaaaagcatttcctggaagtatttctaagtgtgatggtttgtaatatataacaaa

SEQ ID NO: 174407 - DNA, 800 bp, Homo Sapiens
atccggggagcgacagtcagtattcacatcgctggtctgagcaagcttgcaaggaacttgaccaaatatattaagttaacaaaatttttgtggtggcaacttctgacatgttctccacaagtcttgaagttttttgtcttgatcctgcacacttgcaacttgtgtccattcttcatacagattaaaagtcatcaaaggttcaggcaattcccgtaaataggattttaaagcacctgctacagcatgggggtctgaatagaactcatccaggtgagaagtagaacagtccaaagcagctttcagcttctttaacttggaggccccagccccaattcggaaaaggccctcctccttcatgcctgtctccagaagcagcatgacacaggcttcaatgggcagcgcaatctcgcgcccgctcctcttcaggtgttcttctaggggagtcccaaaggctggtttttccgcccacttatcttgatgggctcgcatttcggggagggtcttttctaagactgctaatgcttttctatggtaatctgcttgggcttctaataacgtaacaaagaatttgccatactccccttctttggccataaagttgtacatgtctgctgcaagttgatccttgcactgttctactttatttccagcttcatccatctcttcctttagagtatctatttttgatggaagcccctgaaagttggttcctgaggatttgtgagcttggttccacctggctctgactgaatcccagtctaacaccaatcttgcaagctgcttcctctgcttctggatcc

SEQ ID NO: 174408 - DNA, 347 bp, Homo Sapiens
agctcggtaccctggaacttccgggggtataagaaacttatgtcaaagtggccacaagattgtttaataggagatagaaggatataactccatgtttactgctagaaaccaaagctttgtgtgaaatcttgaatttatggggacagagggagggtacctgtgtgttctttccctgatcccttcccctcattcctgaactgcaggagactgagctcctttgggctttggtgaccccatcactgaggggtttatttgatagttgattttgctgtactgggtacttcctttcccatttcctaatcattctgtaatacacatgctgactcttttccctcccctccttcttt

SEQ ID NO: 174409 - DNA, 395 bp, Homo Sapiens
tcggtacccaccttcccggggtgggaacttccggggagaggcctcttgggctatgtgggatgaacttgcaacagaatctctgttggaagaacatgaggtatcaactagggctttgggactcatttcactgattgtattttcgagctgtttaatggtctgctccaggctatccaatgttctgtaggtgttttttctaatttcatcagttcttgaaatcggagatgtactctcgatgctgggctgctcttgcctcctcactgtgttttcaggggtgtcttcaggttgagacctagcgatttcgaagcgcttggcttctttgtgctgtttcagggtgccatcctacttcctcgtcttcatagactaccacttgcaaagtcatcttccgcgaggaagct

SEQ ID NO: 174410 - DNA, 217 bp, Homo Sapiens
tggaacttccggggttataggtccgtctgagcaccgaaggttggatgggctccttcttggcgctgagaacgccaaactcgatgggtttaatatcgatgagtggagagctgggacgtcttgactcaagactcgaaatcctccgcgtcaggctgtatgtagacttggatgtgtctgaggacgagcgtcttccatccggggaaatggtccccgggaagtt

SEQ ID NO: 174411 - DNA, 328 bp, Homo Sapiens
gagaccctgtctcagaaacagaaaataaagcaaacaaaaaaaatctattccatagctgactattttctgaaatgattttgttacttttctaatgagaaaaaaatagatctcgtgtgtggagggaattgaagatgtaatttcagactctgcgtacagctaagctcatcgtagttacttaactaacacttaaggaattaaatggcatatctgtgtttgagaggcacactgagatgagacaccagctcattttatttatttctaatggtttgcttggtgtactgataaatttcccccggaagttccaagggaatctctaaagtccgccccg

SEQ ID NO: 174412 - DNA, 311 bp, Homo Sapiens
tggaacttccgggggtagagttattggcatgaaagctgatcaccttaatttgaactactctgaaatgagcaccaggggccaccaagaggaccatttcaaggtgtcatagccaaggagaggagtgtgttgtgtacatctctgcataaaggatttgccggttacgtggaaggatgaagcctccttctgaggacagaggcagcaaagcaagtggaagcccaaagcattgagctttccaaatggactttactaaaatcttgtggatggctcatgctcttaacatacacccatgtacatattggccatataaacat

SEQ ID NO: 174413 - DNA, 381 bp, Homo Sapiens
ttgaacttcccggggcttaaattagtagggatatgttctgacagagggtagaggacattctgtctgaggagcacatgagtgagagtggaaggctaggaaaaagctggagacaagagaaatcaaatccatgaactcaccagaatcccttcaagccctgcagagaaacaatatggtagagaggaaatctcacaggcttagctggcagcaggttcccaactcctggtcagctactgctagttgtatgaccctaggcaaggcatgcaaccttttcaaacttccatttcatcctagcaaaattggtaaaataatactgaatttagtatggaagattagagatgatctgtgtaaaggaagtgacctgtcccccgtgaagttcgggta

SEQ ID NO: 174414 - DNA, 374 bp, Homo Sapiens
taccaccttcccggggggatcacctgtgcctgggagttcaaggctacagtaagctatgatcccaccactgctctccagcatgggtgacagagtgagactaaaaagaaaaagccatacccatcctcttcattgcaggaatgttagaatctgtttcatgagtaataaggcctaaggaactccattttccaaatttgtttagggagcccctcctccctagatctctagtttgtagggcagtgaggcattttaaggaggttaatacctctttaggatgaaagatgattaaatgagaaaatgatgcagacagttgtatactgagaatggttatgattttaaaatactatttgcaagcaagccttaatccccgggaagtt

SEQ ID NO: 174415 - DNA, 390 bp, Homo Sapiens
tggaacttccggggtagagattcaaggaccagagagaaaacctaactggtcaaggtcacgtaaaattcaacaggaaacactatatattctaactgataatactagatctaggtaaatagaactttaagagattttgctacacaacagcattaaacttaggtaataatagcatcagactggctgagcatattaagagctaattctgtttttcataaggaagacagcagaattcctaatcacaggctctaatgaattgtattctcttcattatcataaagctgtgttacatcttgatattcatgagtgagtcttctaatccaaaggaaggaataaaaaacaaaggggaaagaaaaggaaggttccccgtgaagttccagggtaccgagctcg

SEQ ID NO: 174416 - DNA, 591 bp, Homo Sapiens
gttatattggacaaatgtaatcctttttccttgtgataacctttcaattatttgaagacttaccaagttctctctgacatttcagttctctaggctgagaatccctagaaaaccatctaataatgatatccatttaccatcttggtcattttctaagaatctgtttgagtttgtttatgcatttataaaggtagaacctagaactgaaagcactaacactctactgcataggagagcagcactctttcctgtctagttctcagttttctgttttattgcatgtttataatttatgtttcccccccagccatttcacactttcatttcctttaacttaaccgtttactaaagtgcttaagttttcaccttctatttgccttctacaaatgctattgttgagttagatctcacgccttattttgtagtttttgctcttgtttgtattccgctccctcaccagccccaacacacacacagaagagtaattgcagttggagcacttggtgatcataatcatactttattggcagattttgttgtttgtgggagctaagaaatacttttcaaaacttgattctttttttccccgag

SEQ ID NO: 174417 - DNA, 288 bp, Homo Sapiens
tggaacttcccggggtttctagcagcggaagggcccaatgcgagggcgtttttgtcgccgttataccgcacctttaatgtccattccacaaggttgattcgggatggttctggaattgcctctgaattttattcgaactatgtattcgctgggttagaataccagaatagacaattgctatggaatgcactattagaactcttttccaatacactacttacgaaaagaggactcttgacctttgttaaaaaaccaccaagccccggaagttccagggtaccgagctcg

SEQ ID NO: 174418 - DNA, 518 bp, Homo Sapiens
attcgtgaacttcccggggggcggcgggagcttccgggagggcggctcgcaggcaccatgactcctgtgaggatgcagcactccctggcaggtcagacctatgccgtgcccttcatccagccagacctgcggcgagaggaggccgtccagcagatggcggatgccctgcagtacctgcagaaggtctctggagacatcttcagcaggtgggtgctgccactcacccccacctgatgagagggccatccccgtcctgggcaatcccagcaacacaccctctgggagcagcccccttggggaatcccggtcctggggaacccatctggcttccctgtgtgggaggggctgaagtgagagcccaacttggaagcttttactcctgggagtccgagagctcactcccttccaccccacttagcctcctgggttcctccggtggctctgctctcacaactcatgcttttcctcccattggagggcctattccttcacgttttcctgcagccaacaaatattta

SEQ ID NO: 174419 - DNA, 390 bp, Homo Sapiens
gtcatatttgcatgtagcatgttaacactgtttttaaacacagatgactagtcaaatcccccacctcctgctgggatccacattgaatcgtttgtgtatttccagtgataggaaactcattatctcctaatacatcaaaacaaataataaccacattttctcttacactgagcgaaaatctgcctttcttgcattttctagacaggtaatagctatgtgcatgattgagaaatagggccaggatcccttgctcttcccagggagaagagcagaaaaaataactattgagtactagggttagcacctgactgacaaaataatctgtacaacaacccccagtgacacaaatttacctatataacaaacctgcacaagtacccccgggaagtt

SEQ ID NO: 174420 - DNA, 414 bp, Homo Sapiens
aaaaagaggaaataaaggtggcatttgttaaagggcacaaggtaaaattagaacccagtgctacagaattgcttggagtgagctgcaaattctgatctgagcttcatggtggccaaagcaaaaaggaaatgagatcagtggccaggttcacagagttcatgagataaaaacccactagtgactccagagaaacaccggggagtagcttcctccctcgtcctgaggagttcggaagcttcgcccctgaggcatcttgtgagaagtgagaaaccaggtcctcagagtgacaatctggtggccacagagccctcccgtctttccaggactgtgtagtttccagagcatgttcctatccctgatctcttgaccagctttggaagcaggcggtctaatagaaaacccccggaagttcca

SEQ ID NO: 174421 - DNA, 329 bp, Homo Sapiens
  misc_feature (188)..(211): n is a, c, g, or t
ggacatgtcacttagtggtgaaaatgcacaggcagcacatccagccatgcctcctaatacaccccatggcctcagagtgggtaccaatagacctgagcatatgctagagaggcagctccctgcttgggggacagcctctggagggctgagtacatcaacatctgaactcatagtgttagcatagcttnnnnnnnnnnnnnnnnnnnnnnnngattctcatatatgtacatagatatgaaagtttatcaatttatagtactttctcttttaattcattcatcacctaaaataaaattagactgtcacaatataagccccgaaaagttcca

SEQ ID NO: 174422 - DNA, 623 bp, Homo Sapiens
  misc_feature (161)..(211): n is a, c, g, or t
atttgggggagaaatgtgagtttcaggagtttggttgacttctccagggggcggaacattggagcctcaccctgtgtgatccagggaggacactggaatcaggcagatctgggtttggatcctgcttgtatcattttcaactgtgcaaaggagacaccccnnnnnnnnnnnnnnnnnnnnnnnnnnnnnnnnnnnnnnnnnnnnnnnnnnncttccgagggggctgccaggactatctggtgagagggtgcatgtgaagtgcccatctgggcgacgggcacaaagccaggactcatggcagctgctccccctccagctctgtggattctgggcggctgaccccacagtcagctgggggatgacctttgagcttgcagactaatggggattcctcagactccaaacccctatcatttcctacccaagtttgccccagtgccctagacgggggatccctgatggacagactgtggtagcctcatctcttccctgggtctcaagccctcgcagagccaagccagcaagaggtgctggatgagtatttacagaacaaaggatgctggtgacaaccatctggtaggagccactgcagcttctccttaaacagcaccccggaagttcca

SEQ ID NO: 174423 - DNA, 523 bp, Homo Sapiens
  misc_feature (509)..(509): n is a, c, g, or t
gggcttccgggaaatggaggaggtggagggattccaggaccatcatggaatgggtatgcctccgcctcccccattgggatttggagttcctgcagccccagccctgccatttggattaacccccaaaaagctttataagccagaggcgcagctccggaggccaaactggaccaagcttgtggctgaggacctctcccaggactgcttctgaacaaaggtgaaggaggaccgctttgagaacaatgaactttccgccaatcttacccttaccttctctgcccagaccaagacttccaaagccaagaaggatcaagaaggtggagaagaaaagaaatctgtgcaaaagaaaaaagtaaaagaggtaaaggtgttggattcaaagacagccccagaatctctcaatctttttgggttccttccgcatgccctatcaagagattaagaatgtcatcctggaggtgaatgaggctgttctgactgagtctatgatccagaacctcattaagcanatgccagagccaga

SEQ ID NO: 174424 - DNA, 913 bp, Homo Sapiens
tggaacttttcggggagcttcctatgccaaagccaacgcattattacatcaagattgcacggttcatgccccgggtagagattgtgcagaagcacaacaccgcagcccggcggctgtacatccggggacacaatggcaagatctacccatacctcgtcatgaacgacgcctgcctcacagagtcacggcgagaggagcgtgtgttgcagctgctgcgtctgctgaacccctgtttggagaagagaaaggagaccaccaagaggcacttgtttttcacagtgccccgggttgtggcagtttccccacagatgcgcctcgtggaggacaacccctcttcactttcccttgtggagatctacaagcagcgctgcgccaagaagggcatcgagcatgacaaccccatctcccgttactatgaccggctggctacggtgcaggcgcggggaacccaagccagccaccaggtcctccgcgacatcctcaaggaggttcagagtaacatggtgccgcgcagcatgctcaaggagtgggcgctgcacaccttccccaatgccacggactactggacgttccggaagatgttcaccatccagctggctctgataggcttcgcggaattcgtcctgcatttaaatagactcaaccccgagatgttacagatcgctcaggacactggcaaactgaatgtcgcctactttcgatttgacataaacgacgccactggagacctggatgccaaccgccctgtcccatttcgactcacgcccaacatttctggagttctggaccccatctgggtctcccgcctgtttgaccgcgctccatgtattgccggtccccctggtgtcttctcccccagcctaaatcttttacgcggggactgccaattccctggaaaaacccggtttccttt

SEQ ID NO: 174425 - DNA, 1241 bp, Homo Sapiens
ggatatccggggagctcattgctgctatattaccagatatggcactgaatccaataaatgtcaagcgacctgtagagcgaagatttcctatatataaagcagatctgataccgtatcaggacagtcctgaaggtccagaccattcttctgcttcatctggggtccccaaccctcccaaggctcgaacttacactgaaactgtcaaccatcactacttgctctttcaagacacagatttgggttcattccatgatctgctccgtagagaaccaatgctgcgcatgcaggagggagaggggcattctcaactctgcctggacaggctgcagctggaggctattcataaggtacgtttcagcccaaacctggactcctatggatggctggtatctggggggcagtcagggctggttcgaatccattttgtccgtggactcgcctccccactgggccaccgtatgcagcttgaaagccgagcccacttcaatgctatgttccaaccatcctcccccactagacggcctggcttctctccaaccagccatcgccttctgcccactccctagccttggcccacaccagatccttggagtgaagtcggtcaagaacaaatggcccctatgcacagagccataggaactgggggccttccctggacagtgatcatgccaggcctggacctttaggcctgcctccccaggactccttagatcccactctttctacagactcctgtgatcacagccccctgctcatattgagcatattgttaagtgggtaaagccaagtaaaggtactgggtgtttttgtgaccacttgtgaatgggtgtatggagaactgaaaagggtatctgcatgaaggctcctgtctgactattccaggatccaatattactgcccttctgaacttcctctttagggtaaccatcatgtatgcccacgagggtgatagtaattcctgagaactgaagctgcttaaaagtacttttttggaccaaggaataccccagactcccctaccggatagaacagcggggctccaaatccttaccttggcgtcctggtttacaaaaaatattccccacatcactgggctcattctggacccctaaccttgaaaacacttgcgtggaaaaagagcaatggtgttttttaagaaatcccttcgctgtttaatattccccggcccgcgaagagaggaatccacttccgttataaaaaatctttcccacttgccatgg

SEQ ID NO: 174426 - DNA, 418 bp, Homo Sapiens
ggttttatgtaggggagactgaccacaaataagtaaacaagcagacaacagaacagcagactgcaatatgtgctatgaaggaataaataaccggtgtctatcatgacaaataaccaggggagcaaggtggccttagagcgggtcagggaagagatgaaggaagaccattcttggcagagcaaacagcaagtgcagatgccaaggcaggaaagcacttgaagttccaggcaatgaggaggtcagtatgagtgagaatgagtgcagcagggcacaagaggtagcccgggcctagaagccctggtgaggagcaatggacagtcaccgaaggctttcagtagcagcaagacatcagatgggaggagggggtgaaagtaagaaaagggcaacattcacacgtttaaaggacaagagaagagga

SEQ ID NO: 174427 - DNA, 743 bp, Homo Sapiens
  misc_feature (533)..(542): n is a, c, g, or t
cggggataaataatataaactttattgggtggcagcctttccacacccaatttagtttttctatgaaataagatttcaagtggtaaagttactgttaaggagacacactggaaaaagctgaagagtttttttgtctgaaactggaaaacagaaaagtctagggggaaagatgtgagaaaactactataggctacaaagaccacaaaaacagttttggggattagaagggggtgacattgagtgagtgtggggaagagaagggctgggcaaattatctcagaagagggggtagtaggatttcaggtggatgtttaaggtatttgcttggcagatataatctaggaatctcctagctcttgcatttcctgctgtctgtaactttattatgtagtataataattttttatttagcacaaagttcatttggactagagaatcggaaggtgctaattttgtccccggctagcaaagtcatacctgaggtatgcgctggaaaacaactggaagacctaggcaggggaattcaaagttgnnnnnnnnnnaaattttattatcctgtcttggtttccttattgaatagatttccacaggaaaaatactgtgagtttactgatctgctgcagaattggaatttagactcacaataaagagagttaaagatagatccaaaggttcacttaaaataaaaatcaccagacagaacaggctactgaagaaactcttggccgaaaagttccagggaa

SEQ ID NO: 174428 - DNA, 634 bp, Homo Sapiens
tacagcttaacgaggttacgctaagactttgacccttccgtcactggtacatccagaggaagaaattcccccccagataattcagctccttatggggcccggtatgtgggctccatggtggctgatgttcatcgcactctggtctacggagggatatttctgtaccccgctaacaagaagagccccaatggaaagctgagactgctgtacgaatgcaaccccatggcctacgtcatggagaaggctgggggaatggccaccactgggaaggaggccgtgttagacgtcattcccacagacattcaccagagggcgccggtgatcttggggtcccccgacgacgtgctcgagttcctgaaggtgtatgagaagcactctgcccagtgagcacctgccctgcctgcatccggagaattgcctctacctggaccttttgtctcacacagcagtaccctgacctgctgtgcaccttacacctcctagagaacagcaaataaaaagcatgactattgtccaccatcaaatgctgtagaatgcttggcactccctaaccaaatgctgtctccataatgccactggtgttaagatatattttgagtggatggaggagaaataaacttattcctccgtaaaa

SEQ ID NO: 174429 - DNA, 943 bp, Homo Sapiens
aaggatgctctgcaaccaggccggaacctggtggcagccggctacgcactgtatggcagtgccaccatgctggtccttgccatggactgtggggtcaactgcttcatgctggacccggccatcggggagttcattttggtggacaaggatgtgaagataaaaaagaaaggtaaaatctacagccttaacgagggctacgccaaggactttgaccctgccgtcactgagtacatccagaggaagaagttccccccagataattcagctccttatggggcccggtatgtgggctccatggtggctgatgttcatcgcactctggtctacggagggatatttctgtaccccgctaacaagaagagccccaatggaaagctgagactgctgtacgaatgcaaccccatggcctacgtcatggagaaggctgggggaatggccaccactgggaaggaggccgtgttagacgtcaaaaccacagacattcaccagagggcgccggtgatcttggggtcccccgacgacgtgctcgagttcctgaaggtgtatgagaaacactctgcccagtgagcacctgccctgcctgcatctggagaattgcctctacctggaccttttgtctcacacagcagtaccctgacctgctgtgcaccttacattcctagagagcagaaataaaagcctgactatttccaccatcaaatgctgcaaaatgcttggcacctccctaaccaaatgctgtcctcataatgccccctggtggtaaggatatattttgaatggataggagggagaaataaaacttaattcctcccttcaaagcaaagacacggacaaagacctccagggcatctattgttctcgggccgggagaaaaaaaggtaacggaaaggcgcacatggggacaattagttggtatccgcggcacccagctttttcttgggac

SEQ ID NO: 174430 - DNA, 261 bp, Homo Sapiens
cgagctcggtaccctgggggaacaaaaggcctcaggtaaggatgaggaactctgaaatcagatggaaaagagcggtgttaatttttatggtctgtgatcgtagctgtgataagggactgaggaataaattgtgctctttgtcatggcaaccagcttctgaaaagcccactgaaaattgcctgtcctgctggtaactgctacggggtaagatttgccttaacagtactattttctcgccaaccaatatgggtaccgagctcg

SEQ ID NO: 174431 - DNA, 358 bp, Homo Sapiens
cgagctcttaccctattggctggacgaggagaagcagctgtactgggcgtgtgaggacaagtgttggtaggaatggtcttctggggggtagccacaggttctggtgtccagagaagcaggggaattgtaattctctggagcatatgaaggcagctgcactggcgagtaactgtagtctaaggagccagagagaatggaggaatttgaaggtgatcctgggatcaggctctggttaaagcagaaaggggtggcctggaagctgtctgggaaatggtgtggagcactttgtgtggaattgagcaaaggctccgggtgcatctctgtctgaaggtaggaatcaaagatcgtccaaccaata

SEQ ID NO: 174432 - DNA, 383 bp, Homo Sapiens
  misc_feature (152)..(192): n is a, c, g, or t
gttacccactgtctcaaaatggcaaataattctgaaactgaagttttgggatcaaaaagaatttcctggcatgatgcatcattaggatcaaagaaagaaaattcactgagctcagattgtaacagcatgcataagtaggggactcattgagnnnnnnnnnnnnnnnnnnnnnnnnnnnnnnnnnnnnnnnnnccaaaattatactatgtacacatagttcttacttctagagtcagcataactaaaagatgagaggcaccaaactaaagacacatatacaagcagagcagcagtccatcagaagagaatcagaaagattgaactgaaatgtgataacattcgtaagcttagacaacaaaatggtcgtccaggcaatatgcgtc

SEQ ID NO: 174433 - DNA, 385 bp, Homo Sapiens
  misc_feature (174)..(214): n is a, c, g, or t
ttacgcatattgccgggacgaggaacccactgtctcaaaatggcaaataattcttaaactgaagttttgggatcaaaaagaattgcctggcatgatgcatcattaggatcaaagaaagaaaattcactgagctcagattgtaacagcatgcataagtagtgggactcattgagnnnnnnnnnnnnnnnnnnnnnnnnnnnnnnnnnnnnnnnnnccaaaattatactatgtacacatagttcttacttctagagtcagcataactaaaagatgagaggcaccaaactaaagacacatatacaagcagagcagcagtccatcagaagagaatcagaaagattgaactgaaatgtgataacattcgtaagcttagacaacaaaatgg

SEQ ID NO: 174434 - DNA, 875 bp, Homo Sapiens
ctgctgccgcggcgatctagagatcccctgttgcgacaggatttatggtttcctttagtgaactctctgaaggcctcggtgacctgctccctcgttttggtcttcttgaagtcccggttcacggtgccgtcttctttcttgattccctcgatcctgaaccccagggtggccgtggagctgatggtctcccgccactgcatgtaccgtggcttggtcacagcccgctgtgctttttcctcctcggtgggggcctcggggtccacctcgatcatcttctggtacatgtccttccgcaggctgggcttcttccgggccttcgtgagctcctcctccaggtaggtcctgattcccatcttgcagtccatcacacagggcgagtcgaagtcggcccagcaggtcgtccatctggttgttagcgctccccgtccttcaccacatccccatggtaggcaggtacgaagggcctcagcacatccaccatcagccggtccaggcagcgctgctctgactcacagtgcttcttcaggatcctgccattggcagctgccttgaaactccctgcgtgtcctgccagctggatccaggggtacttcttcttgaaggacatgacgaagggagaccagtgcaccatgttttttatcttcctccatgatttgctcactctaggtttctgctggtccagggtatgcaggaaggctgagttggggtccagggtgcgctcagggtcactggagatgtcctcctctgagtcttcgtaggatgaggagaagcccgtggaggaggccgaggaagaggacagtttcctcaggggcaggttgccccgagggcttcctgcgtctcctccaaggccccatcctcctgggtgcccatgtctg

SEQ ID NO: 174435 - DNA, 491 bp, Homo Sapiens
tattggttggacgacagttggggggtgaacatggcgtcctcgacttggtctgagacgtgataggcctgccttctggttgaagatgtggcgagtgaaaaaactgagcctcagcctgtcgccttcgccccagacgggaaaaccatctatgagaactcctctccgtgaacttaccctgcagcccggtgccctcaccaactctggaaaaagatcccccgcttgctcctcgctgaccccatcactgtgcaagctggggctgcaggaaggcagcaacaactcatctccagtggattttgtaaataacaagaggacagacttatcttcagaacatttcagtcattcctcaaagtggctagaaacttgtcagcatgaatcagatgagcagcctctagatccaattccccaaattagctctactcctaaaacgtctgaggaagcagtagacccactgggcaattatatggttaaaaccatcgtccagccaatatgggtaa

SEQ ID NO: 174436 - DNA, 285 bp, Homo Sapiens
tcggtacccatattggttggcgaggagcaagcgggggatctttttccagagttggtgagggcaccgggctgcaggaaggcagcaacaactcatctccagtggattttgtaaataacaagaggacagacttatcttcagaacatttcagtcattcctcaaagtggctagaaacttgtcagcatgaatcagatgagcagcctctagatccaattccccaaattagctctactcctaaaacgtctgaggaagcagtcgacccactgggcaattatatggttaaaaaca

SEQ ID NO: 174437 - DNA, 756 bp, Homo Sapiens
  misc_feature (697)..(706): n is a, c, g, or t
gttaccccgtattactatggtccagacagaggaacagtacatttttattcatgattccattttagaagcctgcttatgtggagaaactgccatacctgtctgtgaatttaaagctgcatattttgatatgattagaatagactcccagactaactcttcacatctcaaggatgaatttcagactctgaattcagtcacccctcgactacaagctgaagactgcagtatagcgtgcctgccaaggaaccatgacaagaaccgtttcatggacatgctgccacctgacagatgtctgccttttttaatttacaattgatggggagagcagtaactacatcaatgctgctcctatggacagctacagggcaaccagctgctttcatcgtcacacaataacctctgccaaacactgtaaaaaacttctgggaaataagggtatgatttatggctgtaccctccatggggatggtaaacgaagtcaaccttgcccccagggctgcccctcaatactgggccaaaggaaaggaatgcttccaaattggcccctttccaaggggaaaggtatggctttggttccatgggactggggaattgggttccacccggaattttttaaggaatttggaattctaacaaaaaccccccgggaggggtgtttttttgtgtggggggaaaccaattttcccaaccccccgannnnnnnnnnttttctccctcccagaaaaaagcgcccttggtaatcccaaaaggggggtc

SEQ ID NO: 174438 - DNA, 447 bp, Homo Sapiens
gttacccatattggctggacgatcttaaaatagctgtgggtttgtatagtttatatgtcagagggacttatttatttttatcccaaggcatatcctgttggggagattgaagagtatataaaataatgttcccatattctccagttatttttggtgttgacgtaaaaactagagaacatggtttttagagattttagaataatttgttgaatgtaaatatttttttacatgacagcataatctaacttgctgcctcttttttgtttttaaacacatttctttcattttggaaaaaattactttacttcaggcactttaaagttttttttggtgtgttgttaaactaataaaacaaatagctaagtccccttagtgttctccttactattatatttcactgcatgtgtatctatacattttaacttactgcttggattgtcaaaattg

SEQ ID NO: 174439 - DNA, 105 bp, Homo Sapiens
ctatggagttctaaaattttactaggaataattgagttcttgacttttttaaatcatgtgattcaacacatagtgagccctttcttcgtccaggcaatatgcgtc

SEQ ID NO: 174440 - DNA, 499 bp, Homo Sapiens
  misc_feature (38)..(38): n is a, c, g, or t
  misc_feature (54)..(282): n is a, c, g, or t
taatattggaactgctggtcattaaagtatgcatgttntggactttcttgatannnnnnnnnnnnnnnnnnnnnnnnnnnnnnnnnnnnnnnnnnnnnnnnnnnnnnnnnnnnnnnnnnnnnnnnnnnnnnnnnnnnnnnnnnnnnnnnnnnnnnnnnnnnnnnnnnnnnnnnnnnnnnnnnnnnnnnnnnnnnnnnnnnnnnnnnnnnnnnnnnnnnnnnnnnnnnnnnnnnnnnnnnnnnnnnnnnnnnnnnnnnnnnnnnnnnnnnnnnnnnnnnnnnntgcctgtagcatcttgtttaagaaatgtttctctatactaaggtcatgagtatcttcctatattaattctaaaagtgttattgttttgcctgcctttctgccatgcctccaggtaataaatcaagtgtctggctatgcataatactgtttctggactccatatggtgttctattggtccatcattattagcctacccagtgccaatattacactatc

SEQ ID NO: 174441 - DNA, 447 bp, Homo Sapiens
  misc_feature (76)..(240): n is a, c, g, or t
gacgcatattgcctggacgaatatgtgaaatatttcgaatatgcaaattcacatatgacactaggcagaaaagcannnnnnnnnnnnnnnnnnnnnnnnnnnnnnnnnnnnnnnnnnnnnnnnnnnnnnnnnnnnnnnnnnnnnnnnnnnnnnnnnnnnnnnnnnnnnnnnnnnnnnnnnnnnnnnnnnnnnnnnnnnnnnnnnnnnnnnnnnnnnnnnnnnnnnnnnnnnnnnnnnnnnttacagatagagacaaatcttcataataaaaaaagagagaatatatttaaatatatctgattttagcaacatattagaatacactggctcagaccctattcctgctacaaggacgtaagattctaggtgaaatataagaaggaaattttaaatgaaaaggtaagcttgatggagaaaagaagacagcatgcgctagaaaggagatca

SEQ ID NO: 174442 - DNA, 331 bp, Homo Sapiens
gagctctgacccatattgcctggacgagagaaaaggggattagccatcctcaaatccgcattatgcacgcatcttaacaacccagggaacagcaagtcttcattaggcgttccacttaacagacaaggaaaccaaggctcagagaggtaaggttacttgcccgaggtcacacagctagggagggacagaaacaggatgtgaacccaagtttatctgaacaattaaagtagtgctaataaccacaacagccacgacacatgccaggccctgtgcaccttagtcacatcacgtcgctggctcctgcaaacatccctaacagtcgtccaaccaa

SEQ ID NO: 174443 - DNA, 486 bp, Homo Sapiens
  misc_feature (463)..(463): n is a, c, g, or t
tacgcatattgcctggacgaccatagcactcctttaaaaatgctcttaaatttattgcctggctttagccatgcgcgagtggccaatattcctggattttaaactcacaggtgaaacctgcaagcctcaactaaggttataacttaaccacaagtatacaagatatcttcaaagtggtgagaagcagtttttataaaatctagaatctttagaagtagctcagaggaaggaagatttaagaagagaacttggaagttgtttgtggaaggcgaagagaatcagcaaataataaaggtcgcacagacattaaccagatagttttcattccctaagccaggatagaacctgggctgctgtggtaagagcacagaccaagagaaagtactgccacgtggttacaatgtcatgctcccaaggacatgactgaccagtttgctgtgccatcttgaacagcgggcttatngggacctaggctcacattctatc

SEQ ID NO: 174444 - DNA, 449 bp, Homo Sapiens
attggttggacgaggaacccttggtagctgtcatgaggtgaatggggacagcggtgcacgggaggcacaagaagggcagccaaagctatacttggggagggtgtgggaagcaagagaagaacattctgttaggggcagagaagaatcccacactcacaagagatgaccaggagtaaacctgcctgcctgccaaaagtaggcaagatttcatgagtcaaagcacaagaccatttctgctcaaagcacagcaaacaatattagcatcagcataatagtgctggttccccagcccatgcccatgggagatgtgctgtgatgggtctagatggtgcctgtgtgcacagccttgtagccgacgatcacagggcccagggctcagcaccctctgtagcaagcagccaaggagcaccctccctccctgaggggtgagtggcgccaagaggcatgct

SEQ ID NO: 174445 - DNA, 287 bp, Homo Sapiens
caatgcatatgttgttacagcaacatatatgagctgggggaaatgaatttgctttcttacccgtgaggttatttcacctgcagaatatgcaagtgggaacgcaaagaggcagctcaaaacacaggtatggaactcagaagagaggtcagagctgccttagaggctaattatggtatatatcacactatacttatgtatggaaggggacaggatttaacctaaatatatctgagtaatcatatactataggttgactagcaaaaggaataaagcctcgtccaaccaat

SEQ ID NO: 174446 - DNA, 207 bp, Homo Sapiens
aaaaagaatggccatagttacattccattcaaacaaagaataatcagcctaagttattatattatctggaatacccaagttatcaatgacaagctcctgatttttctttttgaaagacttagagcaatagttgatggatggaaaaatgcagagtataacaagaagtgacatctccttaccaggagcaactcccactattcccctatc

SEQ ID NO: 174447 - DNA, 509 bp, Homo Sapiens
tattggttggacgatctcttctgatgatcacttctgtgatctcttcgctacacaccagacctcacagtggaaactgcagccactccactagaaaacctgaatgcaataggagtaattggatcccagggtggcaggagacaaggggaggaccctactgctagaggcatggtgggcagagttggcgtgatgaatagcagagtcaaacgagcaaccagaactgtctgactgaaacagacctatggcattgttgagttaattatggcatttctggaaatgaaacaggaaacctactgaattcttacttgatctgtatataagcagaaaagctttaggtcaaatgaacaaaggtctaacttgaatcaaaaatggagaatcatggcccctcaattaactctcagacttgagccaatttacagacctagaacccccggatgaagacgaaggcacatccccttaaagaagtaacctagtaacatgccgaaaatttatactgctgatctttctcaaag

SEQ ID NO: 174448 - DNA, 305 bp, Homo Sapiens
ctcgataccccgtgaaagcacacccaatttagagttagaatgacaagaatctttttaaaacatgcaaaatcaagctggaagagtgccaggcaatgaatttcagaagtatgatgatgtaaacaaaaccatgccatacacaaaaacattctttatgtacacagtcagaaaaaaccccaaactaagtattccaacaggcttcgaaacacaccttgatgttctaaccacccatgtcaaagtcatctttgatgactgcattcagagaacaaaacgagtacaaggggtgtgctttcacggggtatcgagca

SEQ ID NO: 174449 - DNA, 538 bp, Homo Sapiens
gatattggttccacgaactgataatgctatcaagaaccactggaattctacaatgcgtcggaaggtcgaacaggaaggttatctgcaggagtcttcaaaagccagccagccagcagtggccacaagcttccagaagaacagtcatttgatgggttttgctcaggctccgcctacagctcaactccctgccactggccagcccactgttaacaacgactattcctattaccacatttctgaagcacaaaatgtctccagtcatgttccataccctgcagcgttacatgtaaatatagtcaatgtccctcagccagctgccgcagccattcagagacactataatgatgaagaccctgagaaggaaaagcgaataaaggaattagaattgctcctaatgtcaaccgagaatgagctaaaaggacagcaggtgctaccaacacagaaccacacatgcagctaccccgggtgcacagcaccaccattgccgaccacaccagacctcatggaagacagtgcacctgtttcctgtttgggagaa

SEQ ID NO: 174450 - DNA, 1379 bp, Homo Sapiens
  misc_feature (195)..(195): n is a, c, g, or t
  misc_feature (232)..(232): n is a, c, g, or t
gggagaggatattctcccagcaccttcagaacagacttcttcctgaccacacgtactcagtggtctccgggggtgacccactgtgcatcccggagcttacatgggagcagcttaagcagtttcatgccactcactatcacccaagcaatgctaggttcttcacgtacggtaatttccattagaacagcatctganacaaattcacgaggaagcactgagcaaattccagaanattgaaccaagcaccgtggtgccagctcagacaccctgggacaagcctagggaattccagataacatgtggccccggattcatttgctacagatcccctctaaacaaacaaccatcagcgttagcttcctcttaccggacatcacccgacacatttgaagccttcacattaagtcttctgtcttcactcctgacttctgggccaattctcccttttacaaagccttgattgaatctgggcttggcacagacttttctcctgatgtgggatataatggctacacgagggaggcctacttttagggtcggcctccaagggattggcggagaaagacattgagaccgtcagaagcctcatagacagaacgattgatgaagtagttgagaaagggatttgaaaatgatcgaaattggaggctttacttcataaaattgaaatacagatgaaacatcagtctaccagctttgggctgatgctgacatcatacatagcttcttgctggaaccatgatggggaccctgtggagctcttgaagttgggaaatcagttagctaaattcagacagtgcctgcaggaaaatccaaaatttttgcaagaaaaagtaaaacagtattttaagaataaccagcataagctgactttatcgatgaggccagatgacaagtatcacgagaagcaggcacaggtggaagccacgaagctcaagcagaaggtcgaggctctgtcccccggagacaggcagcagatctacgagaaaggtctagaattacggagtcaacaaagcaaacctcaagatgcctcttgtctgccagcgttgaaagtttccgatattgaacccaccatacctgtcacagagttggacgtggtcctgacagctggagatatccctgttcagtactgcgcccagcccaccaatggcatggtgtatttccgggccttctccagcctgaacacactccccgaggagctgaggccctatgtgcccctcttctgcagcgtcctcaccaagctgggctgcggccttcttgactaccgggagcaggctcagcagatagaattgaagaccggagggatgagtgcttctccccacgtgctccccgacgactcacacatggacacctacgagcagggtggctttctcagggac

SEQ ID NO: 174451 - DNA, 540 bp, Homo Sapiens
agctcggttccctgagaaagcacacccacacaggtgaggtttcactgtgcaacagcacataaatgataatctaaatcctagagagaaaagtagatagcaccttgtgcttttccttggcaggtggatggcacaggcttggagacttccatgtcatctccgcttttcctcctctaacacagggctggttggtttcacctgcaggcactactgacttcagggcttgctggagaggagatggttgtgctgcagttcacttggtgactataaacactttgatatgctcggcagtcccccaagtcttccaagcaggaaatcaggtcccccccgacttcccacatgggccaatctgcagcacagacaacataacagcacagctaatccgtgaagacggacagtgaatcaaggctgagttccaggccagtgacttgtgtaccaggggcaagatggaaatgccagataggaaatattaaatccattccattttagaacacaaggctcaaatgcgccttccaaaaacacctagagggggtggtgctttca

SEQ ID NO: 174452 - DNA, 394 bp, Homo Sapiens
  misc_feature (24)..(24): n is a, c, g, or t
  misc_feature (43)..(43): n is a, c, g, or t
  misc_feature (192)..(192): n is a, c, g, or t
ccgaaacataccaaagtgtttaanagtcccccaagtgaactgncagcacaacccatctccctctcccagaaagcccctgaagtcagtagtgccctgcaggtgaaacccaacccagccctgtgttaaaggaggaaaaacggagatgacatggaaatctcccaaacctgtgcccatccacctgcccaaggaaanacacaaggtgctatctacttttctctctaggatttagattatcatttaatgtgctgttgcacagtgaaacctcacctgtgtgggcgtgaaaactgattggcattgtttttgattcagctttttggatggctaattgttttcactgtgctgtgggaatgcctctgtattttttcccctctttggccatctttttctgaaaata

SEQ ID NO: 174453 - DNA, 289 bp, Homo Sapiens
agaaggaaaacagactcactgaccatctttggggtggcagagtgggaccagggcagttacacgtgtgtcgccagcaccgagctagaccaagacctggccaaggcctacctcaccgtgctagctgatcaggccactccaactaaccgtttggctgccctgcccaaaggacggccagaccggccccgggacctggagctgaccgacctggccgagaggagcgtgcggctgacctggaaccccggggatgctaacaacagccccatcacagactacgtcgtgcaaccaatat

SEQ ID NO: 174454 - DNA, 310 bp, Homo Sapiens
aaagcacacccggggtgctactgaccatctactcccaactccaagttgagtgacatcacattagtaacttgaaattggtcagggtgcaaagatttacaccaaaaaagaggctacacatcagggtgtcctttccttggagagctggctattagctttatcagcatatccctggccttaccttgtgggttagggttggtgtaagtttgtaggaataaaacaccagtcacttggaagctaccagcccagctttctttaattgaatcctaaccctttccaaatagccctgccttggggcgtttttgctgtgcct

SEQ ID NO: 174455 - DNA, 717 bp, Homo Sapiens
tttgtgaagcacaccctgagcacactttctagatagtaagaccgaactctacaggctgtacccaatcactttgtgcttctacttttaaaagtccacctttccagaaacaagtctctcaccgttgccgcttgctatagaccaccctctgcccccaggtgtgccctggacaccatatgtgaattgattgaagatagatgggggccagagctcgtgctgctaggtgacctaaactgggacatgcttaccaccccggccatcctacaatctaaagatagatggcctcaatctcacacaaactatcaatgaacccaccaggcacaaccccaaatccgtaaacacgggcactctcatagataacatcctaaccaacttgacctccaaatacacctctgctgccttcaaccaagatctcagtgatcactgcctcattgcctgcctccgtaatgggtccgcgatcaaacgaccacccctaatcactgccaaactctctctaaaacacttcagcgagcaggcctttctaatcaacctggcccgggtatcctgaaaggatattgacctcatcctgtcagtagaggatgcctgattattctttaaaagtaccttcctcgccatcttaaataagcatgccccattcaaaaaaatgtagaaccaggaacagatatagcccttggttctctccagacctgtctgcccttgaccaggggtgtgctttccacg

SEQ ID NO: 174456 - DNA, 246 bp, Homo Sapiens
tgaaagcacaccctcctgaatgaacctctgagtatattcagcttccagcctgaatcggcttgggctggggaaggagagaaagaagaaaaatttgccttaaagttcagagttttgactattatgagactgttttatgactaaaaatgactggagtactttttaatttttctgagtgtctggagaagctacaggaacccacctacctgaggttttactaaggggcaaggaagaaactagcccctgagc

SEQ ID NO: 174457 - DNA, 590 bp, Homo Sapiens
tgagaagccacccagatggtaggctgtttggggtacacagagagaggaggacagtgctttcccacaccagggaacagtataactggctcagcttgctcaaaacactcagacccaattgagagccccactggtttacggagatggaacgaatttcactctgtccaactctgcaagtatgaacaaacatcatgatgtaggcatgggcagcagtgagtgcatgcagcagaggtgtggcctgggctgagagggtagcatcagcaacattgcctgcgcaagccagttctcgcaacaacactgagcccccaggggattcaatggggcggtgtaagggctccagggaggagaggatggagtccaactgaaggagaccctcttgaaggactttgggttcatgtgacagtgtcaatatggatttgcagacacctgcaacagcctgacaggcagcagatgtgggaaagtcaatgggcagattgggaagacccaaaatggtaaccaaaggcaacagtcctttctgattcacaaattcctggcagtggtcatctgttgtattgttgctcagaatagattccacaaatttcatcacattaagg

SEQ ID NO: 174458 - DNA, 388 bp, Homo Sapiens
catgcttgaaatggggcaagggccagtctatattagagtgaactgcatcgattttggtgctaccctttcccacttgtatggccttgggccagtcatctcatatctctatttcctcatctgatcaatggagtttatactcgctgtcttgtaaaaatgttgcattacagtattaaaaacaacagatttgaaagtaacacaatatgtagtagctgaacaagaaatactatttccccttttccaacagagtctaagttaccaaaaagaagaaaaatgcaaaagagagctttttattctccctcatttttttaagtagttaaaactttacaaaatctaaattacctcaaacatctagataaataggtagggggagaagaagtgtgctttcaca

SEQ ID NO: 174459 - DNA, 163 bp, Homo Sapiens
ttccgcaggccagccggctgacggcgctgcgcaacaagccgagcctgaagccaagcacgacgatgttgtcggcttcagcattggtttcagcatcacggatcatctgttgaatttcttcatcagacaggccggagttggccttgatggtgatcttctgctcttt

SEQ ID NO: 174460 - DNA, 925 bp, Homo Sapiens
gtacatcatttaatgtcccagtggctctattctacctgtaagaaaatgatacaaaaccacctaagatattttgaagcctgacaaatcagcttcatggaaaaaggtaaaaaatgcatttttcaaccgaaagggcagatccaatagaagacccgctccttaaataaacataaaatgtaaaaagttggaaaattaagagtaatgttccatctggaaactgaacttttgtccttgaacttgtgttggcaccaagcctcatacacagtgagctcaataactgttgggacaaaggaaggaaggacaaaatgtgtaacttcccagcatctgggagatgctgtctcttgcctcactgagtgttccttttctttgctctcatgtcattccctgagaacaatgaattctgggacaggctaaacatcatgatgaagtttcttaaacagactttcttagtggaaatccatttagatctgggtgtgctctatggggagtgctgacgtcaaagagcaaatgtctataaggggcccttttaaaatgaacattttcctcattgagcaagctgggattctctaatgtagaaatcaagccatctttataatttcacttcagatgtttatgtatgtgttgtggtctccaatgatggtaaaaataaaaactacgcattacttaaaggagtttccctcacatgtaaacactgttaggaagtctggattaagttgaaagtcctgttttaacttcattttctctcatataccaaacactctgtatttctcttaaagaagcctttaagagaaaggcctaatttatatctgacagtaaagtggctgcaagtgtatgagttcaacacattccttgtttctgccctagggacaagtcatggtgtttaagctgggtccagtgttacaattatatcccggaacagccttaaaag

SEQ ID NO: 174461 - DNA, 993 bp, Homo Sapiens
  misc_feature (797)..(808): n is a, c, g, or t
  misc_feature (842)..(851): n is a, c, g, or t
ggggtacgaagccgtcgccaaatgacaacggcaacacgacaagaagtccttggcctctaccgcagcattttcaggcttgcgaggaaatggcaggcgacatcagggcagatggaagacaccatcaaagaaaaacagtacatactaaatgaagccagaacgctgttccggaaaaacaaaaatctcacggacacagacctaattaaacagtgtatagatgaatgcacagccaggattgaaattggactgcattacaagattccttacccaaggccaattcatctgcctccaatgggccttaccccactccgaggccggggacttcgaagccaagagaaactgaggaaactttccaaaccagtatatctcagatctcatgatgaagtttcctaatctacaggaaagtttatttctgcaaatgatgagccaactagttattgaatgcaaaccagatggcaaaacacttcttgattacgggcaaaaacctcaaatgtccttcttaaaacctccacaattgattctccccctgtgatgtaaacttagatatccctagagtttctcagcatctttcttcctgagtggatggcattatccctagaggtcatggaccttacatcctcactgcagtcacctttggaaacaagaccgaggcctgtagaaggaaagcggaaggatgtaagagctgttcatgggaattccattcaccacacatgccagctgatgcaaagaaatttgccagtcactggaagttactgtggctactataaaactatgtaccactctcagaatattcttaggcnnnnnnnnnnnnccagttataaatttgcttaaagtgagggtttttnnnnnnnnnnttttttttggtgggcctttgaacccctcccagtttcccagacaaacttggtccttaaaaagtggcctcattgggaattggacccggggtttttcccgggaaaattttaaaggaaaattttcctgcctttaccaaaatgggct

SEQ ID NO: 174462 - DNA, 1592 bp, Homo Sapiens
  misc_feature (1430)..(1430): n is a, c, g, or t
  misc_feature (1439)..(1475): n is a, c, g, or t
  misc_feature (1486)..(1490): n is a, c, g, or t
  misc_feature (1492)..(1495): n is a, c, g, or t
  misc_feature (1498)..(1498): n is a, c, g, or t
  misc_feature (1505)..(1513): n is a, c, g, or t
gagaggggaagccggaaagaggcaagttcctggtgcaaaggtggctctgcagcataatttaggcattggaggagctgtggttgtaacactctacaagatgggttttccggaagccgccagttcttttagaactcatcaaattgaagctgttccaaccagctctgcaagtgatggatttaaggcaaatcttgtttttaaggagattgagaagaaacttgaagaggaaggggaacagtttgtgaagaaaatcggtggtatttttgccttcaaggtgaaagatggccctgggggtaaagaggccacctgggtggtggatgtgaagaatggcaaaggatcagtgcttcctaactcagataagaaggctgactgcacaatcacaatggctgactcagacttcctggctttaatgactggtaaaatgaatcctcagtcggccttctttcaaggcaaattgaaaatcactggcaacatgggtctcgctatgaagttacaaaatcttcagcttcagccaggcaacgctaagctctgaagaactacctttggctacttttgaaaatcaagatgagatatatagatatatatccatacattttattgtcagaatttagactgaaactacacattggcaaatagcgtgggatagatttgtttcttaatgggtgtgaccaatcctgtttttcctatgctctgggtgaatagagcctgatggtatactactgctttgcggaattgcatacaactgtgcattacaaagttaatatggtaattatggtctggggtaaaattgagtttcagaataaaattaggaacagtaaaatccaaagaactatgtaaacaaaaaagcttttgttttgcttacaaagtatatttaaggattattctgctgaagattcagtttaagagttttccttgggagaactaagtaagaaacacaatgccaacagctggccagtaattagtgttgtgcacttcatgtcattaatcaatttctcaatagttcttaaaattagtgagattaaaaatctaaaaattttgcatttcatgctatcagaaacagtattttcttcccaaatcaaaataaaagaaatatgatcagagcttgaacacaggcttatttttaaaataaaaatatttttaacatgggtttccttattgaaaaatcagtgtattagtcataaaacaccatcattaagaataattgaacaataaagtttgctttcagatgcagttttcaaattataatctcatttcaatttataacgttctcagtcctttgttataattttcctttttcatgtaagtttaattatctgcatttatcttttttcctagtttttctaatactaatgttatttcttaaaattcagtgagatataggataaaataatgctttgagaagaatgtttaatagaaaattaaaataacttttntctggccannnnnnnnnnnnnnnnnnnnnnnnnnnnnnnnnnnnnaaaaagcaaannnnnannnnaanaaaaaannnnnnnnnccatgttcggccggccttcggcccctcgaagaaagcttttctagaacctattcgttttggccgcggcggggccccagaa

SEQ ID NO: 174463 - DNA, 428 bp, Homo Sapiens
  misc_feature (50)..(50): n is a, c, g, or t
aaccagttgattatcaaaagcacctggggaaattataaagtatgtattcnctggccaatcccagaactattaaattaaaatttaaagaatgtggctgaagaaatactcattataccgcaggagcttgtaatacagacagcccagcctacaaaagttctacgtttccacacacttgaatgactgagctgcagtgtctttaaatcaggaacacagaaaaaggatcttacagagattgataatgagttgaggtttgaatatattgaatttaaactacttataggactcccagatgtaaaagtcttgtagacaagaggatatacaggtctggagcccagaagagagattagagctagagatacaacatcctaggattagataaggtcctccagagaaagaatttagcttgagataaggggtgtgctctcaca

SEQ ID NO: 174464 - DNA, 440 bp, Homo Sapiens
  misc_feature (49)..(49): n is a, c, g, or t
  misc_feature (150)..(150): n is a, c, g, or t
agcacacccatggctggtggttgcatttctgcatcctctgctctccttntcctcctcaaccttggtctcatacatatgattgcttcctaaagcaaagctgatgaaactgacccatttcctgttgcttgccaaagtagttcagtaaccagntatgttccttctgctggtgaaacctgacagagaacctggtaattctgacagctgttatgttttgtgggtttcagccactgacttccatggcctctcctaccatccttctttgatggcgtctctgctctctgcttccacctatttattttttcccacttgtctacccacagagccaggactccctaacctacctgtatattctttgactgtgtgttccttgagcgtgtatctgccctgttttacttgtaggtgtgaaggtctaagtggatgaacacacagaaccttctttg

SEQ ID NO: 174465 - DNA, 378 bp, Homo Sapiens
aagcacacctcatagacataggagagacttgggaaatcatatcccaagaggagcttcccagaggagtagggaacacatacttccctcttgattctagatacaaggggtcatcatcattgtagaattctacttactcagagtattttcatgatgcattaagcttagaaatatgctataatgcccaactgacacactgttgtttttaaaaatactacttttgtaaaaatgcatatgtttatgtaaaaaatactgaaacgttatacgtgaaatgtttaacactgattaggtgtaaaaaagagtggtcatttttactaaagcttctacactgattgtcttttatttaaaaagcatttaaaatttttttgacagagacgggtg

SEQ ID NO: 174466 - DNA, 599 bp, Homo Sapiens
cccttctaaaagccatgaagaatcaccttcaatgtctactacttcagcagctgtagcccagccaaccttagtccgcttacgactggaacctggtctcggcaacggacgcgtcgggcaagcctcttgtggcgatgaacaaaggcatcgagcgcaagttgcgcgttgccttcggtgacaagaacctgagcatcagcggtggctgcaatcgtcagttcggcggctttcactatcaggacggagttctgaaggttcagccactggcctctacgctgatggcctgtgacaagagcctgatggaccttgatgcccaagtagggcggctgttcaagggtgatctgcgcgctgtgatcaccggcgataacgtggcgccgatgctgcaactgacgacagcggatggctcggtgctcaagctgcaaggcgaggccaccccgcagacccgctacggtagcgagggtgaggtcaagtttctggaagtggcggccaagacggtcaagtgcagccatcctttgatcccaggttatcagtgcctgcaactgcgcgagcgtcgctatgtcgacgcggaactgcgactggcgacccaagacaccgggtgtgctttc

SEQ ID NO: 174467 - DNA, 344 bp, Homo Sapiens
tacgggtgtttctggtcggcgccgaagagaccgatggcaagctggattttgccgggttgcagcgcggctatacccagttctttggcacgcccgaacagccaaacaaaccggcgcgcaccgcgttgcaagtagtggcgttgccgttgccgggggcgttggtggaggtggaggcgattgcggccagggcggtgtgagcacacccgtcactctgcggcgtggagcctttgctctgtcgcttgatcgatcagtgctcgcaacgcttcgaacaagggttgggcatctgtgtgtctttttgccgtaggccaggttgaaggcgtaatcgaaatcgggaggatacagcccct

SEQ ID NO: 174468 - DNA, 518 bp, Homo Sapiens
  misc_feature (35)..(35): n is a, c, g, or t
gtcagagtgaaggaaatgtagtttgggccagctgngggcaaatgaggagccaacggttcatttttctgctagggttattggaggagaaaggatgtttgcaggtacagaccacagcgcattaggtggggaagaagactttactgagcttctgcttcacattgagtgtcaagcactgagctttatgtatgcataggtatgttagctccactaaacagggactgaaatagctaagagatgacgtgcccaaagtcatagaacttgtgagtggagaaactgggatttggaatggtctcttcactccaaacctttagaactgggtgttctaaataccaaggacaccgctgagttttccctagtgcttgtttgctgaagttttattataggttgtcgtcattggcttgtgtactttttgaaatatcaagcatattataagtatgctgtagtagatttctgtgtagtctttctaacaacactgagactttgaaaagtcttgggacatcttggtgactgttctgtgg

SEQ ID NO: 174469 - DNA, 569 bp, Homo Sapiens
tatgtgggaaattggctctgaaataatcaaatgccaaacaaagcccatctgaaagtccaataaagtaaaattattgtaattgcaaaatagcgttactgagctaaatccccacagtttgaggatctttcatttatagaatagatgctgttgtgttgtcagagtggagggaatgtagtttgggccagctgggggcaaatgaggagccaacggttcatttttctgctaggggttagaggagtctgatgagcaattagtagcccagggttcacgtacagttgctagctcttatgtgttagcacctgtgatttcaaggctattcaagaaaacaacgcatttcaaatgtaaaccagtacagcctctatggaaaacagtatggagagtccttaaagaaccaaaagtaggtctaccattcgatgcagcgaccaatactagatacccagtgatactgggtaaaactactacatattgggtacaatgtacactactcaagtgatgggtgcaccaaaatctcagaattaagaacataattcatccatgtaaccaaaatgacttgtatctaaaacgctatt

SEQ ID NO: 174470 - DNA, 396 bp, Homo Sapiens
  misc_feature (363)..(363): n is a, c, g, or t
  misc_feature (380)..(380): n is a, c, g, or t
aggatatttgtaggcagtcagttaccttcaccttatgaaatgtttcactgagttatttgaggttttttggaaagcctactattgcgtttcaatgtgaactttgaaatcttattgtgcatccttacacaccttccatggtgctttcttggaaagatcattgggatggaaggatcattgattgggtgaagatcattgattaggtgaaggattatttctatccaatttgtgaagaaggaggactttgcttttaaaattaagtatcatctgaattagcatttggggagtgggcgaaaaacaatgtaaaactatgatgtcactcaccattctgataatgttcaggggtgcctttctcctaccaggggnagtactgtgggcttagnagggaaaggaaatggg

SEQ ID NO: 174471 - DNA, 602 bp, Homo Sapiens
gaagaaccttccgcttgacatatcccagggatcagtgagctacatcctcgaaagctcggaagctttgatatgggagccaggcgtagcccacacagtcggcataaggcgtcaagacggcacgctcagcggcccatggacggccacaaggatcagcgactaccaccttaggatccctacgctcgacttcgtccctgatacaagctgggatcgagagccgccccacctgctgttcggcccggtagccagggaatgccaccgcgtcctgatcagcaaagtaaccccgaaaggaagcgaaagcgtttcggttcaaggcctcaactatgacgacagggtttacctgtacgacaacgctactgcacccgactaaataaccaaaaccacacaggcccgccaatgagcgggcttttttgtgcctggagaaaacatgcgatataacacgggcaacccagtaggaaccgacggctccagcgacccgagagatctttacaacaatgctggtgtggctgatctttttgctaacggcttggcggcatcctttcccgatcgccttgaccgcccaagaaagtcaatctatggaatggagcaggactttttccgacttt

SEQ ID NO: 174472 - DNA, 506 bp, Homo Sapiens
  misc_feature (44)..(44): n is a, c, g, or t
atagagtggcaagaatgaaagcaggaagactagtagtagtactntgttctatgctagctttggaggtcctgagaggtggcttaatgcaaaagagaaccaaggatgaggacaataagggaagaagcaatccaggatggttcccagatgattcagttggtccgaaccactagagatggatggctgtgccaaggactgagatggtacactggggagaagcaggtttaggggaggtgcaaggatgatagcaaattttaaaatgtgtaatagacatgttgttaaatatatcaagaattttttaagtattttataaaaattatagatatttctggattaaatacatttaactttcttagcctctgtaaggactattgaccaacttagaaatgttcatttgcttcttctctatttgacaaagatgctaatactgcctttagactcactatatttagtttgacttttttgtggactctacataacccaaagtgagacagcttcttgacttaaag

SEQ ID NO: 174473 - DNA, 275 bp, Homo Sapiens
caaaaaacatataaaaaccagaatgacccaatacaaacagtcattgctaataccaggaaactgatgttgatacagtactgttaactcaggtatagattttatttcagggtgatatttcacaggctgaaaagcactactaatgaggacaggaattcctcagtcttgcttggtccatgcacccatttaacatgggatattttaaaagcagtgctgcatgccggggaccatggatggtagagcttaaagaactactttgtttaataaaacctatccca

SEQ ID NO: 174474 - DNA, 367 bp, Homo Sapiens
gccccttatctcctatgcagcaggacactcaatcagctgcatccttttgatactgttcttcattcatctgtagggcaagcaaaaagtcttcatgctctgccatctctttgattttctgctcatagaactcctgctcttgttgcacagctggaaggagagcacgtcggtcataggacctacaatgtcgtcgcttattttcaagaaagaacatcctcttttctatttttatgtcaccttgttcaaacttgaaatcaatgtaagaatactggttcatttgttttctcttcttcctttttccactggtttctggtgacagctcctgccattttttaatggcatcagaacaaggcctatagggagataaagc

SEQ ID NO: 174475 - DNA, 458 bp, Homo Sapiens
acctcctgttcgagggcaaccgtatttataacgtcacgacgcgtggcctctacacaaggggtttgcatgattttcacgcggaacgtagacaccctgagggcatacacacacggtgtacctgtaaggggacgactttgcacagaacccaggaaatgcaggggtgcagacatgaggaaaccccgctaactagcgaggttcttccactttaagtggttgacatagtggctacggatcgtcaaaaatacttacagagcgcgaaatcagtggccttgcagggcaatgactgacgtaggtaccccggcgattctgcaaaatcggtggtggtgagacctcttctcccctttcctgaggagactgatatcaggattcgaatccccatgaaaagggcagcctgtcaaacagcgttgaaaagtttccaggtaacagcgtccaaaagtttccagttgctcaagcttttt

SEQ ID NO: 174476 - DNA, 525 bp, Homo Sapiens
tggttctggaatcatgggtcagcgcctggcgaacggtaacgatgcgctagcgcttcttgccaatgcgctggcaactggcgcgagcttgtatgtactgatcgtgtgcttctccactttctccggtgcgcacttcaacccggtggtctctgtagtcgactatttgcgcggaggactgagcagtaagcaactgggccaatacgtggcggctcaagcaacgggtgcaatcttcggggtattcgctgcgcatttcatgttcgagctgcctgtggtcgagttctcccatcacgttcgcaccgggccgtcacagtggttcagtgagtacttggcaacgtcggggttggtgctgacaattctgctgtgcgataaatatcacaaagcaaaagtgcctcaggtggttgccgcgtatgttgtcgcagcctactggttcacgtcctccacgagctttgctaatccggcggtaacgattgctcgtgggttaaacgatacgttctcggggatacggatatcagacgccgaccgttcata

SEQ ID NO: 174477 - DNA, 373 bp, Homo Sapiens
tgcggagaaattgctctcatttagggaagtgatacgttagtaataggcattgagtgggcagataactgaatagaacaggttgtaagttggtggcatttgggtcctgaaggttgagcaggattgtgataggacctggttgggaagagcggttgtagtagcagcagcgtgaggatgggcatggcttggtcttgattgaatgtgtctataggagaggagaaacaaagccaggtgagcagactttgcttgctgaatgaaaagggtgtctctgtttttcctttacttctcatctgtcattgtgtgaccctggtggttatagtttggggcagcaaattctgggtccttaccttattactgttataggtgtgctttcaca

SEQ ID NO: 174478 - DNA, 509 bp, Homo Sapiens
aaagtacacagcatagagtattggtattcgtgcagccctggatggaaacacaggagatgagagagtgatacatgatagatagcaggatagtcagataggctacaggctgctgcgacacagtaaggtccaggccctccaaagctaaaggctgctgtggagtctgatggacagttctctgcaatacagaaggagtgggcactggatgccccaaatctgctttctctgcaccgtgtgttgagataggaaatcattttaacttccaggtttgtctcctgtaccctagacaaaaaggacctgctactggatgtcctctatctaggcaggcccttccaggagtcaccctccagcagagcaacttcttgcctttcatccgtcaattctggtcagttggctgagcagtgtccatccagactctccacactgaggcaggcacttctttgggtttccaggcccaagctctgtgtcaagtatgtgactgataaactaaaagcaaaggtgggtgtgcttga

SEQ ID NO: 174479 - DNA, 678 bp, Homo Sapiens
tttgtgaaagcacattcaccatttgtatagcaaatggttattagtaccagctatatacgagagtactaatactagtgatacagagacaatatccagccctagttcaaggaccccatagtttacagggtagacagacaaaagtaaaaattatggtgtggcttcaatgttaagtcagtcactaaatacttactgatgagtatctactgtaggatagatagatactgctgtgggtcctggagctagccagagttcctactctagtatagcttattttctgtagtgtataaggagggagacagaagtgcaaaagccctgaggtggttaaataaggttggtgttaggtatatgtggatcagaaaggccaacctggctggaggataattgcgtggctagatgattagttaggcaagggtaaggtcttgcagggccttgaagaccatggtaagaactttgggttttatcttaagtgttttggaaaggcattccagagttttcagtggaaaaatgacatgatcaggtttctgtttggctaataaacccagaaatgtgtgtgtatggtcgcagaaacactaatgaggaaacctcggccggcccgtacacggtcaggattgcccgattgatagctctttagcgtttgcaaaagtgtgctttaacaagggatcctataaagttcgccct

SEQ ID NO: 174480 - DNA, 365 bp, Homo Sapiens
  misc_feature (225)..(315): n is a, c, g, or t
tcgaaagcacaccccccctcctgctcctgactcatcatgattgccaaccccggcgtggcgcactggcacgggcaccttcaacctcgcgcccgcggatccatccctgggctctgacacaggggcctgtgtgtgagccagcacgtgtcagtgtatgtgtgtactcacgtgtaattgcataagtgggcatgtactgtgagtgtaactatgtgtgcatgtgaatgcatnnnnnnnnnnnnnnnnnnnnnnnnnnnnnnnnnnnnnnnnnnnnnnnnnnnnnnnnnnnnnnnnnnnnnnnnnnnnnnnnnnnnnnnnnnnacatgtgaatgcatatgtgtgcatgtgtgtaattacgtgggtgggcatgg

SEQ ID NO: 174481 - DNA, 383 bp, Homo Sapiens
ttatcagtgttggatttagttccaactacttgatttacaaaaatgtacaattagagaaggttaaaagaaacagcgagaaatgtaaacattcaaaatgataattgaatctctcagttgtgggaataattatcagagacatgcaactgaaaatgtctcacctttcatctttttttcttaattcataaagttatcttgtagaatttgatgagaccctcctagtcattctcaactggggcggtgctgtcaccgaatggtgtttgagagtgttggggctaggccacatttttggttgacacagcaactggggtggcatttgctgcccagtgccaggaatagtaacattatgaatgccaggacagtgtgctcagtaaagtcttccatcc

SEQ ID NO: 174482 - DNA, 945 bp, Homo Sapiens
  misc_feature (11)..(11): n is a, c, g, or t
  misc_feature (65)..(65): n is a, c, g, or t
  misc_feature (153)..(153): n is a, c, g, or t
  misc_feature (207)..(207): n is a, c, g, or t
tcccaatgacnttaatttaaccaggttccaggacttctgtcttggggaaaggaagagaaagaaancatttgatgctgttttgaccacatcctaaggagtaaatcaggccagtagtgtcattgaatttactttagctgtgggttgcacgcaggntggcagagttccctcaacataaggtggtctagtccccaagttgtgggccctganaatctgattagtgttctgccttcaactggacactgaccgttaaaaaattaagtcttcctatgtcttaacaaggggaaaataaagtaaccatgtcttaggaatgggacccaagggtcatcctggctgtgatactctcgttgttgcatgatttaaatcctaattaaataacctttttcctctcctacaaaatcatgctacatatgtttctttaaaactctccatggagctttatgaaaatgtttccaaattctgtctggttatgaccaatggctcctgtccacttccccacctggagtgcttacaggctcagggaactttttgcaggcacatcctatgcccagcagggagtgtccttgagcaggcagtcagtctcccctacaacccgaaagaagcatgggaaagcagtggcatgaagacaggggaaaggaagaaaagggagtgaagagggaatgggagagggaagccgctcctactgtcaagaaaggtaattggctgagataaggctcctgggggcaacactcccactcaaagcctgcaggctcaatgtttggtaattaattggcacaaccccatgacagccttttgacaccggaggtgctaggaatcctgtctcccaaccagaagtgaactctcgagtgggaggacagtagggaaaaccaccagacctctgtttgttcgacagacgctgtaggtggggcctggctggcaaactgtcaggaatctaaccaaccctccatt

SEQ ID NO: 174483 - DNA, 467 bp, Homo Sapiens
  misc_feature (435)..(435): n is a, c, g, or t
  misc_feature (457)..(457): n is a, c, g, or t
cttatcggagggcaggcctgtgggggacctgcagaaactcgtaaagacgacagccgaggcctccacaaaaaggaccaggttctccagaaaagtgagcagctaaaactgtttctaagaaactcaactgcatccagaacaaagattaagatgatttataaaaatgctaaaacacccagcacgcaacatggtaaaattcgcaatgcctcaggcatcaacccgagagtaccaggcccacaggaaggcagcataataggaccccaaacaaggaggaaaagcagcctcctgaaaccgaccctgatatcagaaccagcagacatgggcactcagcagttcttacaactgaatcccaatctgcaaaagtttagtagagacatgggagacgtaaaggggaccccaaggcaagcctctagagatttttaacatgttgggctgggnttgggtgggctcacgcgtgtcnttcgcaggca

SEQ ID NO: 174484 - DNA, 471 bp, Homo Sapiens
gcgaaccccgtgaaagcacaccccaactgcctctgtctttgctcacattagtaagcctttctgcattatttttccgtttgcctgtaaggtccctttcaccttggcctcaatacttggctcaagtagtacccctttgtaaattttacctgaatgtctcagccagaattaggcatttatttcactgtgctctttaagcaactagtagagatttcatttgaggcacttaatttgtaatcatttatttgcatgcctgacttttaattaaaacatagccattcaggcatagtgttctaaatatgtttatttcctacctcccatagtggtacatggtaacatgtttggtttttcagttaacaatatgttgagaaattgaataagtgaaaatatttacataaatagtgttagtataactaaaaataggtgtctgatgagttcggtgatttcattgagggtacacttagtccattaaca

SEQ ID NO: 174485 - DNA, 386 bp, Homo Sapiens
cgataccccgtgaaagcacaccccacactctgaagatggacagcatgtacttcgccaccgccgatgccacgcgcaaggccagcgaagatgcgctgctcaaagatgccgtggctgcattcaaggcgcgtgcgcaactggctaccgatgcactcggtggcaaggcctacaagatcgtcaacctgaacttcaacactaatggctacccgatgccctacgcccgcaatggcggcatgatgatgaaagccgccatggccgattcagcaccgacgcctgaagtggaagccggcaccagccaggtcaacatgagcgccgacggcgtgatcgaagttttacagtaacttttttagacaggacaacggcgcaaccccacggtgtgtgctttcaca

SEQ ID NO: 174486 - DNA, 355 bp, Homo Sapiens
agcacaccccataactagaagattctactctccagtactgcttcttcgacgtcctctaccaccaactaaagctgaggctgacactggagttgcttgccttcacttgcttcaaagacccttatgttcaatagagtctgcctcactcagcactaaagtgtaccactattcaagtacaagttttcttgttttgcctggtaccttattgctctctgaccccacctgatctccccatacactggagtgcctttaactctctccaggagactcaagttgagctttgtctgcggcaccttctctcggcgctggacagcgggtgattttgctttagcttgggtgtgctttcacggggttcgca

SEQ ID NO: 174487 - DNA, 387 bp, Homo Sapiens
tgtgaaagcacaccttcacacacactgcacctgggcatccggcattcaagccatcacataaactattatactcttatggaggcagggactggtaaagttgagattagaccatattaggctattacctacaattttctcttactgtaaaaatccataataatctcaagctgctcgacaagtcgcctcctcagcaagacttctacaactgctgaaaatgaaactcctttactctacaaacgctccatatgtttagtttgttccataaatcacacatcatttcaatgaatttttgagattcaatccaatttataaatccaaaaaaactgccccatgctaaatagtatttgaaatttgctgcgcctctaattttttttccttaaaaataga

SEQ ID NO: 174488 - DNA, 297 bp, Homo Sapiens
gtgaaagcacaccctcagaaacagcagcagaccccagcagagggggctgcagagaaacacaccagtgccagcaaggatggggccccatgggcatatgtataagtacaagggacatatcccaagacccatgacctatacccccataagcagaaataccctccaacacacgctaatttttctcacacaaaagtaggtagaaaaagcttataaacagagaaagtgagaggaaaaagtaaccggtaagaggaagagtgaccaaatgttgaatattaacatatggggagaggatctgctaag

SEQ ID NO: 174489 - DNA, 393 bp, Homo Sapiens
ttcttccacccttccttctctctacttacaggtggtagtcttgtctcctactgaaaacctctttaagcactaggacttgttttactttcactatttagaaatatttcaaaattacacacattcctgtcttcttcagtaaagtacacctggcttcatttaaccattctctctgcaactgaagatcactatgaaaaaattattctgaggggagccacagagtaaaaatattcaagagatctggatagttgtaataatcatgataatgataatgtgggtaactaacctttattagtgcttactacatgctaaggacacggcaagtgttaacttattaaactcttaccatacctgtaaaaaactgttactattattatccctattttacacatgaga

SEQ ID NO: 174490 - DNA, 365 bp, Homo Sapiens
tgtgaaagacaccctgaatcacattgagaaagttatttcctttgattctcttgtaaacctgatgacttcaaagagaaagtctctgcgtggtgctggtgggtctttaacacctcaccaacacttgccaatccctttctaacaaagggagcaggcctcaagcctggggggccttcagcccgagtggtaaccacctggaaacaacactgttttgttttcaatgtgtttatttttgcagtttccttctattatatttatggccaggggagctgggttttccagttgccatactcttgtcagttttcctttcaaaacttaatttaaaatgcaaactgattcaaaggaaattattatggggtgtgctttca

SEQ ID NO: 174491 - DNA, 474 bp, Homo Sapiens
  misc_feature (324)..(372): n is a, c, g, or t
atagattcataagaagttgcaaaaaataggagagaggtcctctgtacccttcatccagtttcccccaatgataacatcttgccttatcctaaggtactatatccaagccaggaaattgacattagaacaatccacagacctttttcagatttcagcagtttacaaagacttgtatgtggttgcgtagttgtgtgccacttatgtgttcatttgtgtaaccaccatcgcaataaagatacagaactgttctgtcactacagaggtctccctatgtgttccccctttctacttcccactatgtactttgtctccaatcattactgnnnnnnnnnnnnnnnnnnnnnnnnnnnnnnnnnnnnnnnnnnnnnnnnnaacttttaaagcatttttgaaagtgaagattaaagcctaagtaaggtataattactacttttgccaactttataaaaactatggctgggcaccgtagcccat

SEQ ID NO: 174492 - DNA, 842 bp, Homo Sapiens; identical to SEQ ID NO: 4071

SEQ ID NO: 174493 - DNA, 521 bp, Homo Sapiens
gttgtcaagtaagagagtttctaagagcagcaaggttctgccgcgtttacaacccaaatttcttgctcatggtcaagccatcataccaagccactaagaggaggaaaaaaggagcccctcctctagcaggccaaagaggagaaggattttaaagaaatcaaagaagccttgactcagcgccccagctttaggactgccagatctaactaatcaagcttttcttcttgtatgtgcacaagtgaaagggaggccataggggttctgactcaagccataaggtcatggcatcgcctggaggcacatttatccaggcaactagattctgttgcacttggatggcctccttgtcttaaagcactagcagccactgccgtacaggtgcaggaagctagtaaactaactttagagactgtgaatgccctaaatccggctcccttactctcatcgagtcagtgccaggaggtgcatatcattgtggcgtgtacgtggtagaggtagcgtccgcatcacttaggggtggc

SEQ ID NO: 174494 - DNA, 347 bp, Homo Sapiens
tagtgctgaagcagtgtctggcgttcctaagaacaagaaggctgtgatgggccttgcaaagaaaattcgtgtgctagataagttttgttcagactgtgagtgtgccgtgttaatgaatcaacaacatatagttagtaaggtgtctttaaatagaaacacacataaaacaaggttataattgattggttgatgaatgtgaccagaggcccatagaaacctaaccctgtatttcccctaggagcaatgcttcagtatttgctaattcaatattcactgtgattttacggaaacgtaactgcgctgaataattaaaatcaactgtatttactcagtaaaagtcacaatag

SEQ ID NO: 174495 - DNA, 372 bp, Homo Sapiens
atgatcagacccaagcactttaagccataaatcactctgtccattcctccaggtattcgttatctaatagggcaattaattccttcagcactttagaatatgccttgtttcatatttttcatagctaaaaaatgatgtctgacggctaggttcttatgctacacagcatttgaaataaagctgaaaaacaatgcattttaaaggagtccttcgttgttatgctgttatccaatgaacacttgcaagcaattagcaatattgagaattatacattagatttacaattcttttaatttctattgaaactttttataaagcttgtattacttgctgtatttaaaaaataattgttggcaagagtgtgctttcaca

SEQ ID NO: 174496 - DNA, 292 bp, Homo Sapiens
ggaaagtcaccatgaatttaaggcaatgcttgaagattaaaaaaaattcatttcccacataaaattcatttcccatatattaatctattataaattattatataagcagaaatgcggtaggtatttccacacacagatttataaaacaagtcataatctcctcccaactagggcttaaattgggtcagagatggggtgggacaaaggaacaggaaaacaaatttatacaaataatgactatgaaggaaatgcataggatcctaagagaataaaggaagggtgtgctttccca

SEQ ID NO: 174497 - DNA, 334 bp, Homo Sapiens
taagacacatcataaaacagaataacggcaactcaacagtgttaagtcactaaatacaaatcaaaacagcctgcacataagaagcctcaacctctccatgctgttgcacccaggttttattaggccttgataaacaatgaggtaggagctgtgggggccctgctaacaccttagacattcaagtgcagggtggaggagaaaagaggaaggcacggtggctgaacccacatgaggaggcaacatggaactgcagagagagccacttgctgggaatcaggagacttagcttctgtctcacttctaccaccagcttgcgctatgggtgtgcttcaca

SEQ ID NO: 174498 - DNA, 381 bp, Homo Sapiens
tgtgaaagcacaccttctcggcattgcccgggccgtgggcgctgaagttcaacgaatcaccgccacgggcgtagtacatgtagatatggccaccatccagaaacaaagccttacgcttttctgtgtagccgagtaaggcgtggctgcctttttcggccacgtaataggcttcggtttcaataattcgcgccgaaagccagagatcgcccacacgatgacgaatgacttttccgagtaattcacgcgcaagcagttgggcatcgcggtcgaagaagctatcgggcagcgggctggcggggaacagtgggggaaagtcgggcatggcggtcaagggttgatacggctaaatgtgaccgaatcataacaactctcaccttaatt

SEQ ID NO: 174499 - DNA, 1297 bp, Homo Sapiens
  misc_feature (579)..(579): n is a, c, g, or t
  misc_feature (586)..(614): n is a, c, g, or t
  misc_feature (961)..(961): n is a, c, g, or t
atgtttactgtttatgtggagtgaaatataaggctcttggatgtataacatactcaaaagctgttacactttctctgatctgctgtgatccactgaaaatgtgctggggtttgttctgctgtcactgtttatgctgctggaacttagcactgtcttgatttgaagcatatgattgagagccatttgaagcaatcttcattaatgcagataaaacaagtttacatgtgcagagttagaaaatgacatgttcaattctgtaagtggtgactttttgagcacctttcagtattatgtatttgtaaaaaccattgtttttggatataaagctaataagcactttaaaaaggaaaaggcagcctttactattttttctggttgagtcattgctctttagacctagcatcagcaatagatttcaaagataagtattaagcgctaccctaaagtgtgtaagtttttcattttgtcatattgaaaaatgatttgcatagtactgaatgttgacacacagcttatatgtatttacaagaatatctttaagtgtttttttgacacattaaaataaaggaaataaggaanaaaaccnnnnnnnnnnnnnnnnnnnnnnnnnnnnncatgaccacccgccctcatcccctcacaaaagctattctaaaccaattctctgtgggaaccacggccaccacatagttgaaagtggacgcatgcataccaggccggccaatccgttgggaggaccctctggctccctgccccctggggggcattaaaaacatactccaacccaaatgggcaacaccccgccccgctcgtccaaaaccccgaaacctgtctttacgacgccacaaacccccccacaggggccactcccctcaaaggggataaaatataagggggaaaatctattattacaaacaatggggcgagtactccacatggcctgtaagatcccccgactttnttcttttacaatctttatgtgcctgtcttgggtccctcttgtgttcctcactccaccttactctacccagtaacaccgcgcggcggcgtgaaacatcaagactctaacggcaccaatcctcgcaacacaaaaacaatggcaaaacacaccctcactgccctcataaaagcccctccgaccacatctctgagacgcccgcgaagagacccgccaccagcgaagcaccaactcactcgatgaacacacacaacgacggacccgacacaggcccacaataatacagacgtccacgagccccctattgctgacaattacatacctttaacgctccgcccc

SEQ ID NO: 174500 - DNA, 517 bp, Homo Sapiens
  misc_feature (450)..(450): n is a, c, g, or t
  misc_feature (454)..(454): n is a, c, g, or t
  misc_feature (459)..(459): n is a, c, g, or t
  misc_feature (461)..(461): n is a, c, g, or t
  misc_feature (466)..(466): n is a, c, g, or t
  misc_feature (487)..(487): n is a, c, g, or t
agtccttcgggccagcaaagctgcccaggcttagctgcgagcccgtcatggaggaaaaagctcaggagaaaagcagtctgttggagaatgggacagtccaccagggagacacctcgtggggctccagcggatctgcatctcagtccagccaaggcagagacagccactcctccagcctgtccgaacagtaccccgactggccagccgaggacatgtttgaccatcccaccccatgcgagctcatcaagggaaagactaagtcagaggagtccctctctgaccttacaggttcactcctctccctgcagcttgatcttgggccctcacttttgaatgaggtgctgaatgtaatggataaaaataagtaacaagatgccaacttttttcctttggggtaaaaggtacaaaaacaaactaaccacagttgaagagaagggcttccggagctgnattngcagntntgtgntgggttttctaaaataatatnctacaaaggatttttttaccggtaatgccc

SEQ ID NO: 174501 - DNA, 934 bp, Homo Sapiens
  misc_feature (567)..(567): n is a, c, g, or t
ggtatcaaaaaggattcagaaacatataccatctgtgaagaaagtggccctttctcccgcttgcaaaatagacattctcaaattccaaaatgccagccaagaccccaatttacctgaaagcagccaataacaagaaaggaaagaaatttaaactgagggacattctgtctcctgatatgatcagtcccccgcttggagactttcgccacaccatccacattggcaaagagggccagcacgatgtctttggagatatttcctttcttcaagggaactacgagcttttacctggaaaccaggagaaagcacacctgggccagttccctgggcataatgagttcttccgggccaacagcacctcggactctgtgttcacagaaacgccctccccggtgctcaaaaatgccatctccctcccgaccattggaggatcccaagctctcatgttgcccttattgtcaccagtgacatttaattccaaacaggagtccttcgggccagcaaagctgcccaggcttagctgcgagcccgtcatggaggaaaaagctcaggagaaaagcagtctgntggagaatgggacagtccaccagggagacacctcgtggggctccagcggttctgcatctcagtccagccaaggcagagacagccactcctccagcctgtccgaacagtaccccgactggccagccgaggacatgtttgaccatcccaccccatgcgagctcatcaagggaaagactaagtcagaggagtccctctctgaccttacaggttccctcctctccctgcagcctggatcttgggccctcacttttggatgaatgtgcctgaatgtcactgggataaacaataagttaccaagatgccaaacttttttccttgggggtaaaagggtaccaaaaacaaactaaccaacagttgaagaagaaac

SEQ ID NO: 174502 - DNA, 416 bp, Homo Sapiens
gtatcgcccttggcatcggcatacggcaccacgttgtaaaccgtttcgtcatagtccttggtcggcgcacggtaggtttgccagtcggacagttcgcccttggccttgtcgttgaacggcgacacctgcttcactggcgcaacgaaacgcgcgccctgctccaggaacggcgtgctgaagttactgtgatacagggactggtattccttcggataatcgccattgttggtcagcgtgtcgttgagggcgaacaccacactgccaggctcggtgaccagttcggtcgcaacagagaaatcgaccttcttgagcgcctgctctttcaactcgccacgcagggtgatcgcaaacggcggtttttcatcgaaaagcagaatgactttgttcgcaggggggtgtgctttcacggggtttcg

SEQ ID NO: 174503 - DNA, 408 bp, Homo Sapiens
gaaagcacacccgaaagcgcgccgccgccctggcagcggaaattaccggtgtgcgcaagaatgtgttgtatcaggtcgcgctcgataagcagaaggccgaatagttccaggggcaaatctgtatttcgtctgaacgtgatggcaatgccgcacttttaatacttgtcctcaagccgccgtgccgttaacctgcgcggcggagagtcgattggacagtcgctgccctctatgaaaattaggggggggaggaaagtccgggctccatagggcgaagtgccaggtaatgcctgggaggcgtgagcctacggaaagtgccacagaaaataaccgcctaagcacttcggtgccggtaagggtgaaaaggtgcggtaatgagcgcaccgcacgactggcaacagttcgtggcta

SEQ ID NO: 174504 - DNA, 405 bp, Homo Sapiens
  misc_feature (14)..(14): n is a, c, g, or t
tataactactgacnctggaactgtccctgtatataaatactgaccctggaactgagcctgtatataactactgaccctggaactgtccctgtatataactactgaccctgtaactgtccctgtatagaactactgaccctggaactgtccctgtatataactactgaccctggacctgtccctgtatataactactgaccctggaactgtccctgtatataactactgaccctggaactgaccctgtatataactactgaccctggaactgagcctgtatataactactgactgattattactgcacatataaacatactgactgattattactgactgattattactgtacatataaacatactgactgactattactgactgattattactgactgattatta

SEQ ID NO: 174505 - DNA, 371 bp, Homo Sapiens
ccagccaagtcccatcattggctatacaaatgaactatagttaggggaagaaaagcagatgcatgggttagctgaggtttcatggggccacagggcacaatggttcattcaataattaaactaattttccccacattcaattaacaaaacaatacatggttataacatattacataccaaagttgaacagtagtcaagtaaaacatgataggattttcatagatcaaaggatccaccagtgaattacagcaaaatattctaatttccctagctgatacaaactctggcttggtcaatgagtccattatctttattttttgcagagttgtaacagagtagtgtagtaaagaaggaattaagcccagcctgag

SEQ ID NO: 174506 - DNA, 426 bp, Homo Sapiens
  misc_feature (50)..(50): n is a, c, g, or t
  misc_feature (66)..(66): n is a, c, g, or t
agtagccattaaaagaagatacatagaaggctctgattattgactcattntgtgttttctacaganttcagaaggaaacaatataatcatcactcaagtgagggcaccaccaagaaaataatattttatgaaaaatattgctacatacccaaatcatggtttaatgcagccaacagtttaaactttataatagaaatataatttgaacaaataaacaagaaacaaaaatttcacctctcctctttatctgtgactactctttctctgacagagatgctaatcaatagttattttgttttccagtttaacaacaacaggtagaaaaaggagaaggtaaaacggatagaaaaatccaaaactcaatgattgaaaaaaaatgtctataaagacatgaggcaaaaagaatcaaagaaaaatgtaaagatt

SEQ ID NO: 174507 - DNA, 299 bp, Homo Sapiens
gaacacacccgtaaattccactcctcacccttctatgtgtccacgagcctaatcttcctctggtcgtgtgacaagaacatggtttttttctataacagcacaatgagtcattcttcctcccactcttccctcttcacctggtcttttaaagcagtgctttgcaaagtgtatcagttacctgtaacttgctaaacacggattccagagcactaaacccccagagattctgacccagtagttctgggatgggtcccagatgtctgcatttttaacaatttctccaagagatttggatgctg

SEQ ID NO: 174508 - DNA, 385 bp, Homo Sapiens
gctcgataccccgtgaaagcacacccctccttgccctttggtaatactaatgactacagtcacttaaactccataattaaaagtacctagtcagtatattaatcaacctttcaatgtccattcagagctaaaacttttcccttccctagctaagattatctatagatggaagacagtgtgattagcttctctttttgttgcttatctcctcacccactggcaagttgctatatctgaccccatcaggatctaaaccaggggaaggaagagagaaagcaaggcaaacagtttttgttgttgtttttcccacactcctgttgtgaaattgctttactgtttttgaacttgatatgtgtttaaggctggccctttttcttcgggtgtg

SEQ ID NO: 174509 - DNA, 641 bp, Homo Sapiens
  misc_feature (520)..(529): n is a, c, g, or t
ggggcatgagccactgcacccagccttgaatttttaattttatctctgatatacttcattaagtgtctggagacctaattatcctaaaagatcatacattttctacctatgaattttgctgcatacagaaagtgccctttcctcaggaagttgctgtgtttcatttctttggatggactcttatctagaatacatagcagctctgcaaagaaacagtttttaaaaatgggaacttctacattgaaaagtccccattattgtgccaactatgattagtgagaggaagaaaaattattctatggcatatgtatggaagggtgtaaagattcttttgaaaggtttattcacattgtaggacagcaaatgacatttttacagtatttttttgtaaagcaaactattttgtgccttgaatttggtatatgtgtattagtgaaacattgtaaaggtgaacttctacctctgtatctaaatgtataccatccacttgtaaatgactataaactattatgtgattgcnnnnnnnnnnagaatgtcttgtttaaatagtggccaatgtttaaggctgttaaaataagccaacttttactaattggggagttttattaatgactgattaaatttaaagaatttactccgaa

SEQ ID NO: 174510 - DNA, 805 bp, Homo Sapiens
  misc_feature (74)..(116): n is a, c, g, or t
aaatggcagcgctaagtagggactctagagtctggcttaggtcagtgttggtagtttagatgtcttgtcaacgnnnnnnnnnnnnnnnnnnnnnnnnnnnnnnnnnnnnnnnnnnntagcacagttctagctcaaatttgtgtattttttgtgtgcctgggctggagatgagagactgagtcataactgatttaaaagtttgtgttatcaggtatcttatttgaacatggtcatttttggccacattgctgtttcatactaggacttgggatgatgtagccagaataaaactcaagttgcaccctccggttggtggaagattgctgaccgtgccgtttctgggcaggagaagacatcatggtgtccagcaactcagcaaagccattcttaagagtcgtgaggtccttctgaatgtaaaactggagcccaggagaagctgtcccaggagggctgttaactccctatagagccaggagacaggataggggtttctagggtccaacaccagcttaccttggagtatgaatctacccatgaaggatgagagatgttgtgaaaaactagccaggacacacccacaggatcctactggctccttagcagctgattggtgttacataattaacttaattggagatgcattaggtcacttgaatgtataagcaagcacctatggtaggcgctacagacatttaaacctcttgggaattcaatgctcccatggaatttataccagttatatgaattgacttaagtatcttgaaaaagaaactttagagaaagcatcatgggtgtgctttctcgg

SEQ ID NO: 174511 - DNA, 310 bp, Homo Sapiens
gctgcgaaccccgtgaaagcacaccctcttctggggttccaggatgcttctatgaagcaacgtcttaggaaatggctctctccttgtaaatggtcaacccctttctccacacaaactgtcgtgtctcttcacactggttccctggggtgggatgacaaaggattctcttgttcatactaaagtgaagacagttttctacattttaaaattttgtccagtgggcgttataaccttcacagctgactatacgggtagttcactgtgagagagtgtagaaatggtaaataagagaaatctctttttctagaga

SEQ ID NO: 174512 - DNA, 403 bp, Homo Sapiens
cgaaaccccgtgaaagcacacccagacccagcccagaggcctcacacgaagacaaagaaaaccccagaacttcattcagcccagtgtttctgtagctccaccttaactgagacatttgattatgcatgtattctggcatgaattaagacacaaaacttttgtatatgtgaatgcacagttggtttcaacattggtgttaccataacaagccctggccactaatggtacatcattcctggctcctctctgcacacccctccccagcacatctatcccacttccgtgaggatgtagctcccagctctgcaaacaattctgccctgatgacctaatgacctctcaccacacaccacccatttccagactgaacagcaacaacaaaaacccaacagatataggggga

SEQ ID NO: 174513 - DNA, 887 bp, Homo Sapiens
ggccggagcttaggtcgggaagggatggatcgctgagccgatagcgtccgctaggctgtctgcctcggtacctgttactgctgctacttcctcgtttgacaccttcctggaatctctcttgatttttgaggaaatacctagtaacaaacatgactgagttctggcttatatctgctcctggggagaaaacctgtcagcaaacatgggagaaattgcatgcggcaacttcaaagaacaataatcttgctgtcacttccaagttcaatattcctgacttaaaggttggcacgttggatgtcttggttggcttgtcagatgaactggctaaactggatgcatttgtagaaggagtggttaagaaagtagctcaatacatggctgatgtattggaagatagcaaagacaaagttcaagagaatctgttggctaatggagtggacttggttacttatataacaaggttccagtgggacatggccaaatatccaatcaagcagtccctgaaaaatatttctgaaataattgccaagggagtaactcagattgataatgacctgaaatctcgagcatctgcatacaataacctgaaaggaaatcttcagaatttggaacgaaagcaatgcaggaagtttgctaactagaagtctagcagaaactgagaacgaaggatgactttgttcttgattcagagtatctcgttcaaattactggttagtaagttcccaaggttaaaccacaacgactgtgattaagccagtatgcacacccttgccgaaaatggttaggtccaagggtctagcaatgtacttttcgaaggaccaagacagtacctgtgtatggtacctggttaggaaggcggttgatgtattcggaccaagccagaaaac

SEQ ID NO: 174514 - DNA, 2220 bp, Homo Sapiens
  misc_feature (772)..(772): n is a, c, g, or t
acgccgtcgcgccacggcccgcagaaccggccaagcgacccgggcgcggcgcggggaggctgaagggacgctcgggtaggcaagcgtttgcctcagcatggagggcggggccgcggcagccacccccacagcactgccttactacgtggccttctcccagctgctgggcctgaccttggtggccatgaccggcgcgtggctcgggctgtaccgaggcggcattgcctgggagagcgacctgcagttcaacgcgcaccccctctgcatggtcataggcctgatcttcctgcagggaaatgccctgctggtttaccgtgtcttcaggaacgaagctaaacgcaccaccaaggtcctgcacgggctgctgcacatctttgcgctcgtcatcgccctggttggcttggtggcggtgttcgactaccacaggaagaagggctacgctgacctgtacagcctacacagctggtgcgggatccttgtctttgtcctgtactttgtgcagtggctggtgggcttcagcttcttcctgttccccggagcttcattctccctgcggagccgctaccgcccacagcacatcttctttggtgctaccatcttcctcctttccgtgggcaccgccctgctgggcctgaaggaggcactgctgttcaacctcgggggcaagtatagcgcatttgagcccgagggtgtcctggccaacgtgctgggcctgctgctggcctgcttcggtggggccgtgctctacatcttgaccccgggccgacttggnaaacggccttcccaggcggaagagcaggccctctccatggacttcaagacgctgacggagggagatagccccggctcccagtgatgcgcccggccggccctgggggttcgcggggtgtcttcttgcctgcccctgctgaggcgtcttcaggactgcaggctccggagagtggctctggcagcaggcgggcgcgtgggtgcagctgcatctgtttgagtgctgctttctggggtcaggtctccgcctcctctgcttctcctttctccgctgctatagaccagttcattgtgtgtggctcccgtgtctctgttgcccccttcagtgcagaaggctttgggtaggacttcgggtgttcggtcctggtcgcagagcacagatctttaaacgaagcgagagaggaggccccaacctcctggcagcagatgcctggggcaaggccaggggaaactgggggggcctcagggacaggcctggaaaagccacgatggctgctgaattcaaacaagggagtccctccagcctgaataacacgtggcacaaatgggcccggcctttggcagaggagcaagtgatatgatgtgtaaagtatgttggtggtgaaagcaaggttccccaggagaggggagggactggcccctgggaagctctgagatgaggctgtggcccagctgtagtcctgaccttcctcttctttaaccctttagccctaggatggctttggtgggagaggggatagaagccccatgacttcagacagactttctcttggcagatgcaggccgggcctcctcccaggctgctccagacatgggggttggggatggggggcaccttgcagccccttcctgctgggggctccctccttgtaacaccccccctttgcggctcagctctggttttcctcttcccaggctcacccaggctcctgctccaggctggggaaggcaaagggccacaaaacccttattaactctttttaaaatggaaaaaccccctgcctgctggcatgtagcctaaaacccccccgggggccccctggaacctaccgcccctcttgtttttggaaggaacaaacccttccaacttattgcgctggcccattctttcccactaaaactcaggaatggaattccacaacccatcacagtttcctccccccaggagctgtctcgccaaatcacatccgataccctcctaaaacacctggtcacggtctgcctctagaccctccctttttctgcttctccccctcggcataatagtgctacggttataaaaccacctattcatctcatacgaagcgcctccctatattctcctaaacccctccccattctctccatctcactatctggcgacaccccccctccacactccatataatcctccaaaaattctccccacccgcctcagacggtcttcatccattagcgataaagtccccccaa

SEQ ID NO: 174515 - DNA, 1076 bp, Homo Sapiens
ggtgccatgaagtatggtggtgtctagcactgaatggggaaactgggggcagcaacacttatagccagttaaagccactctgccctctctcctactttggctgactcttcaagaatgccattcaacaagtatttatggagtacctactataatacagtagctaacatgtattgagcacagattttttttggtaaaactgtgaagagctaggatatatacttggtgaaacaaaccagtatgttccctgttctcttgagcttcgactcttctgtgcgctactgctgcgcactgctttttctacaggcattacatcaactcctaaggggtcctctgggattagttatgcagatattaaatcacccgaagacactaacttacagaagacacaactccttccccagtgatcactgtcataaccagtgctctaccgtatcccatcactgaggactgatgttgactgacatcattttctttatcgtaataaacatgtggctctattagctgcaagctttaccaagtaattggcatgacatctgagcacagaaattaaggcaaaaaaccaaagcaaaacaaatacatggtgctgaaattaacttgatgccaagcccaaggcagctgatttctgtgtatttgaacttagggcaaatcagagtctacacagacgcctacagaaagtttcaggaagaggcaagatgcattcaatttgaaagatatttatgggcaacaaagtaaggtcaggattagacttcaggcattcataaggcaggcactatcagaaagtgtacgccaactaagggacccacaaagcaggcagaggtaatgcagaaatctgttttgttcccatgaaatcaccaatcaaggcctccgttcttctaaagattagtccatcatcattagcaactgagatcaaagcactcttccactttacgtgattaaaatcaaacctgtatcagcaagttaaatggttccatttctgtgatttttctattatttgaggggagttggcagaagttccatgtatatgggatctagacaggtcagatcttggtcagcaatcacagggtacgagctgaatt

SEQ ID NO: 174516 - DNA, 489 bp, Homo Sapiens
acacgggccatcaactctgtggagcccgcaccatgcagccaattcccgaagcccacagcctctatgttaccctgattctctccgattccgtgatgaatatctttaaagacagaaactttgacagctgttgcatctgtgcctgcaacatgaacatcaaaggggcggatgtcgggctttacatccccgattcttccaatgaggaccagtaccgctgtacctgtgggtttagtgcgattatgaaccgcaaacttggctacaattcaggactcttccttgaagatgagttggatatttttgggaagaattctgatattggtcaggctgcagagaggcgcttaatgatgtgtcagtccaccttccttcctcagggtggaaggaaccaaaaaaaccccaggagccacccataagccctctcctcctcctccagaatacacacacacaacctttttgcttccctgcatttcctgtactacatttcctctaacaatc

SEQ ID NO: 174517 - DNA, 1089 bp, Homo Sapiens
ccacaggtaaaacacatgactgggctttgagctcacgccaatttacacagcatacagttgtgctacaaggagaatttcttcatcatttattctttagttaattgaaacatagtcaggaaaaaatggtgccaattccccccaacaacacatggatgtttttgcttcttgacccacttagagtcccaaaaggacaaaaaatacatggaccaatattagttcacgaaacatgttttaaagaacagagaatgaggtcttcatcccacctcagtaaggcttgggctgatgaagagagggtgtattcagggtcctctcttgtcatatgtacaagctgacgcttgtttcccaagcatgatagtagtgggtagactgcctttattgttagcccctaaatagaatcagtcagcacaatgaagaaattccaaagagggcagtgaagtgacaacagcttcagctcgtcatcgatgttatacagaaacacaaaggaatcccggcctgtgatgaaggagagccgttgctgtgtgttcaggacacctcagagcaggcacataaagtgctggagggtgacacagcctgtctggatgtcctcgggagggtgtgccatccaggaggcgacacccccatccagcacacgggcccttccacccgctgtcggtcctgctaaaggtacgaggctaaaaccggcctctccagaaaagaacgctcagtgtgtgctgaccacacttccctttgaatttcccgagtattcaacaggagatacattttaacaagaaaaaatacccctaacaaacaggacagatgactctctcaacaagagagcaactacgaacatgatacaaatttaaataaaaatgtttagttcaacgtgttcgtcatggagtttcaaatcagcagatgccatgacaggaaaggagcacacagctgggcccttgcccgccgtgggtttcccgtgtccgcggcttcttcaaggaggggagagcagcttctctcttggagcgttctcagtttctcaacagatcttcacttgctaggcagccagaagcattagttcacccaagagtgagtgcttgggtacacaaggcagaatctttt

SEQ ID NO: 174518 - DNA, 968 bp, Homo Sapiens
gggcggggggcggacgctggggccgagggtagcttgagcgcggcggcggcgttgttcagtcagagcgagaacattccagaggtcgcccagctccggcgctgacgggtgtggaccgcggacgtcgctgggacagcccctccccgctgctcggcggcggcacctggcccggccgctcctcgctgcgcttcgcctccgcctcctcggactcggactcgggtttatatcgcgcctcacttcatcccagtcccgggcgagcagcgttgggtttatgtctttatttgacgaaaacgagctgttgcgcagccattggtacctgtattggggaaacatagcatacaagcaagaagcttacagcctcagtggcgaaaattttttcatgtcagagaccgagaactcttgcagtcgtttatgtcatcccttcttctccagacagaagataccaaaaagttgcaatcaaagatctcttcatcttattgataaagccactaataagccaaaatgtctgtcaatgtcaaccgcagcgtgtcagaccagttctatcgctacaagatgccccgtctgattgccaaggttgagggcaaaggcaatggaatcaagacagttatagtcaacatggttgacgttgcaaaggcgcttaatcggcctccaacgtatcccaccaaatattttggttgtgagctgggagcacagacccagttttgatgttaagaatgaccgttacattgtcaatggatctcatgaggcgaataagctgcaagacatgttggatggattcattaaaaaatttgttctctgtcctgaatgtgagaatcctgaaacagatttgcatgtcaatccaaagaagcaaacaataggtaattcttgtaaagcctgtggctatcgaggcatgcttgacacacatcataaactctgcacattcattctcaaaaacccacctgagaatagtgacagtggtacaggaaagaaag

SEQ ID NO: 174519 - DNA, 876 bp, Homo Sapiens
  misc_feature (604)..(620): n is a, c, g, or t
ggcatccgggaagccaggagaagagcagtgatcgaggtgcaaactctgatcacatatattgacttgaaggaggcccttgagaaaagaaagctgtttgcttgtgaggagcacccatcccataaagccgtctggaacgtccttggaaacttgtctgagatccagggagaagttctttcatttgatggaaatcgaaccgataagaactacatccggctggaagagctgctcaccaagcagctgctagccctggatgctgctgatccgcagggagaagagaaatgaaaggctgccaggaaacaagctgtgaggcttgcgcagaatattctcagctatctcgacctgaaatctgatgaatgggagtactgaaataccagagacctcacttttgatactgtattgcacttcatacgcgcttctatgtatagagagctttcagttcattgatttatacgagcatatcacagactcagtatttatgagtgaagcaaattctattcagtatctgctgcttttgatggtgcaagacaaatatcattacagcacgttaacttttccattcggatcattatctgtatgatgtggtgtggtttggttggtttggtcnnnnnnnnnnnnnnnnnaatcagaaaaccaaatagaagcagctttttgtagattttaaatggggttgtgccaagcatttaaaatgcagggccttttcaggaatcttaaaactaagccattaacccttaccctaaatacctagggaaaatttatggaagaaaaggggggaaaaatatttttggggtttacacaaaaaggaagttaaagggtttccaaaacccccccaaagccacggtacccctggggtcccgggggtttttccccttttaaagc

SEQ ID NO: 174520 - DNA, 486 bp, Homo Sapiens; identical to SEQ ID NO: 9260

SEQ ID NO: 174521 - DNA, 394 bp, Homo Sapiens
  misc_feature (326)..(335): n is a, c, g, or t
cgtttctagaggttcctcagcccaaagtgaaaatttctaaatctacctacagtgaactagctggttacagaatcaactcttccacccatgaataatagccagaaaagctagacgatgtataaccacatttgtgtgaaggcaccagaaagctaccaaggcagagatggcttaatgggacaagcttccaaatagatggaaatccagagaggtgagtccagtgctttgcacaactgttcaccttgaggcgtttcctgtttccaaagtaatggctgagagactgaccagctgcacagagcttccatcaatctcaaaaggctgaggagacnnnnnnnnnnggaacttcagggccagccaaggaaaagagctctagagaaccccatggattcgctttggg

SEQ ID NO: 174522 - DNA, 936 bp, Homo Sapiens
tgcgaccgcaagacccgccacgacccgctggccaaatccaagatcgagcgagtgaacatgccgcccgcggtggaccctgcggagttcttcgtgctgatggagcgttaccagcactaccgccagaccgtgcgcgccctcaggatggagttcgtgtccgaggtgcagaggaaggtgcacgaggcccgagccggggttctggcggacgcaaggccctgaaggacgccgccgagcaccgcgagctgatggcctggaaccaggcggagaaccggcggctgcacgagctgcggatagcgaggctgcggcaggaggagcgggacaaggagcagcggcaggcgttggagcaggcccgcaaggcgagagaggtgcaggcctgggcgcacgcaaaggagcgggaagtgctgcagctgcaggaagaggtgaaaaacttcatcacccgagagaacctggaggcacgggtggaagcagcattggactcccggaagaactacaactgggccatcaccagagaggggctggtggtcaggccacaacgcagggactcctaggggcccagtaaggacagtgcccgccagggaccatgtatgtatcatggcggaagagttggccctgacctggaataaagcagttggtgttgcttatgaggaaggttcagccttatccagcacagccttcacgttttgccctctgctgtcaccacttggtcagaaacttccaaacgcagtgccctgttctgccggtgtgtacagcctcagcgcaccaggagaccctagagtggtttccatctcacagagaatcagacagggccacagccccctcaggcagccaggtcatctgagtatcattaaaagtagtgatggggaagattacagcctgaggggccaaacgtgccctgcctccctgttttttgtaaaataaaggttttggttgggaaacccc

SEQ ID NO: 174523 - DNA, 1134 bp, Homo Sapiens
  misc_feature (39)..(39): n is a, c, g, or t
  misc_feature (367)..(425): n is a, c, g, or t
  misc_feature (565)..(580): n is a, c, g, or t
  misc_feature (638)..(646): n is a, c, g, or t
  misc_feature (716)..(716): n is a, c, g, or t
  misc_feature (1007)..(1015): n is a, c, g, or t
cccgccccagggaccatgttatgtatccatggcggaaanaagttggcccctgaccctggaataaagcagttggtgttgcttatgaggaaggttcaagccttatccagcacagccttcacgttttgccctctgctgtcaccacttggtcagaaacttccaaacgcagtgccctgttctgccggtgtgtacagcctcagcgcaccaggagaccctagagtggtttccatctcacagagaatcagacagggccacagccccctcaggcagccaggtcatctgagtatcattaagagtagtgatgggaagattacagtctgagggccaaacgtgcctgcttcctgtttttgtaaataaagttttgttggannnnnnnnnnnnnnnnnnnnnnnnnnnnnnnnnnnnnnnnnnnnnnnnnnnnnnnnnnnaccatatctttctattaaaatacgacccccacatgccccccataacgccgaccacgcaataaattaatacttttgtgccgggcccgcccccggccattcagaagaagattttttaaacacccccttccccttttgggcannnnnnnnnnnnnnnnttacagggcgaataggagaacccccggggcctatataaagtggtgctttcccaccccnnnnnnnnncctcgtgggacccttaagacataagagggcggtttgtgggccatattttccgccacccaccaacaaaaanacaaaccctccccccgcggcgcgcgccgacaatcgcagagactgttttctcttgtacaccaaaatttcctctatataatgggcccatttttttggggcggccctattttagttgtggccttctttttattctccccccgggagttttttcccacggcgcaccgcccccgaatataacacgaattcacacggcgccccaccacctgtttgctaccccctacttgcgtagacggactcgcgtgtcaacgaatttccatccttagaatccttctccgccgggaagtgtagtggnnnnnnnnntcctaaatacgctcgttgtgtttaaaaccctcacatatctccccccccgggcaatgtacagctccctttgtggggcgccttggcgcaccaaccaatatcccccaccccgggacgcaaaa

SEQ ID NO: 174524 - DNA, 157 bp, Homo Sapiens
ggccccgcttcatgtgacgcggttgagaaaacgcacactcagcatctgtctaacatctttagcattaaaaactaaaactaaaaggtgattttttgctacccagatctgtggagacattgaatgaaacgcgtgttagacagtcttagaggttaaagca

SEQ ID NO: 174525 - DNA, 449 bp, Homo Sapiens
actgggtatcgctggcgccggcaaacgtccatcatggtgctggtagccacctgactaatgagtagggtttgggctccagccttctccagtactggataaagggctgacatcaagagcaaacagaagtcttttcctagtgcatatgcaaactggccaattccttccaactgaatgcatatttgccagatgttactgttcatggagcaaatagtgggacttggctttgagaaggctagaaaagatgtaacttggcaggtgtgttcaccagacgtgatggcttggaggcctgggtgctccatcatcagctcctctcccatttcctcagtttcaagacagataaccaaataccaattttcttgacttgtgtattcttcaaggatatgatgtcacaatctctctcagatcttctggggttgtttaaaaatgggtttcgggagaacctcaaaccg

SEQ ID NO: 174526 - DNA, 436 bp, Homo Sapiens
ccggaagcacaagaaaaaggttgtcaggttagacagaaaaaaataaatcaaatgtattgttggttgggattgttaaactaaaatcattaaacgaaaaccagcaactagattcaaaagagagaaaaaaaaccgaaatgagcaattaggattcaaaaagaataagggtattacaatactatatctgttttcctactaatagcaagaaatgaggatttagatgccaattatgtcctgtagacccaggtgctctcaaagtatttgcactggtcttctaggtatggacatataaatgaactttactgttactcaaaggtgagaaaacttacgcattataaaggaaaggaaaacaattatacctgatagagcaaaaagatcacacattaaaatgatcaaattcatctctagcataagactagaataatctgcttccgtcgaa

SEQ ID NO: 174527 - DNA, 282 bp, Homo Sapiens
ttctataaaaacaattctgttattaatagttgactgactccagtaactttgaggagtagaatgaaacttattaggcaagatctttccacatacactacattgtattgttcaaaattcatagaaattacttgcaatatattgatttaagccttatgtagtgactgttgctatatttgaagtagcatttttagtttgctgtttttcctcactgcttaatcctacaaaaaccagccatctgcctaaaaaataaaagagcaaaaatgaatcagtgcttccgtcgaa

SEQ ID NO: 174528 - DNA, 826 bp, Homo Sapiens
cggaccgcgtgggtcgtctcaattgacttaactgcatgatttctgttttatctacctctaaagcaaatctgcagtgttccaaagacttggtatggattaagcgctgtccagtaacaaaatgaaatctcaaaacagagctcagctgcaaaaaagcatattttctgtgtttctggactgcactgttgtccttgccctcacatagacactcagacaccctcacaaacacagtagtctatagttaggattaaaataggatctgaacattcaaaagaaagctttggaaaaaaagagctggctggcctaaaaacctaaatatatgatgaagattgtaggactgtcttcccaagccccatgttcatggtggggcaatggttatttggttattttactcaattggttactctcatttgaaatgagggagggacatacagaataggaacaggtgtttgctctcctaagagccttcatgcacacccctgaaccacgaggaaacagtacagtcgctagtcaagtggtttttaaagtaaagtatattcataaggtaacagttattctgttgttataaaactatacccactgcaaaagtagtagtcaagtgtctaggtctttgatattgctcttttggttaacactaagcttaagtagactatacagttgtatgaatttgtaaaagtatatgaacacctagtgagatttcaaacttgtaattgtggttaaatagtcattgtattttcttgtgaactgtgttttatgattttacctcaaatcagaaaacaaaatgatgtgctttggtcagttaataaaaatggttttacccacaaaaaaa

SEQ ID NO: 174529 - DNA, 868 bp, Homo Sapiens
  misc_feature (513)..(515): n is a, c, g, or t
  misc_feature (622)..(662): n is a, c, g, or t
  misc_feature (741)..(741): n is a, c, g, or t
  misc_feature (817)..(817): n is a, c, g, or t
caataccttggagcctttcggggggaagcgaagtaggcaggggcgaggcggctggggaccgcggggcggacgggagcgagtatgtccgctctgactcggctggcgtctttcgctcgcgttggaggccgccttttcagaagcggctgcgcacggactgctggagatggtggagtccgtcatgccggtggtggtgtgcacattgagccccggtatagacagttcccccagctgaccagatcccaggtgttccagagcgagttcttcagcggactcatgtggttctggattctctggcgcttttggcatgactcagaagaggtgctgggtcactttccgtatcctgatccttcccagtggacagatgaagaattaggtatccctcctgatgatgaagactgaaggtgtagactcagcctcactctgtacaagagccaggtgagaatttcaaggattatcgacttcatattgcacattaaagttacaaattaaagtggcttggtcaagaatgaaaannncaacaccacaccaaccctctatcgtcaatccctctcttctcctcccccagacaaataaatacgctccaaccgcgctcgccactttacgtcgttctagcaccttcctnnnnnnnnnnnnnnnnnnnnnnnnnnnnnnnnnnnnnnnnnatctcgctgcgtggcggcggcgggcccgttgactttgcagttggcgcccccccgccactactaaacgcagggagaatcnctctcggggggcctgcgccccccccggcgcggggccacctgtggccgttctcctcttgtgagtgcgcacgccccgnaccacttcatccggttgcggccaagtgcgaccgtatgcgcgccccccggtc

SEQ ID NO: 174530 - DNA, 402 bp, Homo Sapiens
gggaatgctgaaaaatcactctggctgcagggagtggaggctgtcgcccagagagagcgccgtcggtgccggtggtggtgtgcacattgaggcccggtatagacagttcccccagctgaccagatcccaggtgttccagagcgagttcttcagcggactcatgtggttctggattctctggcgcttttggcatgactcagaagaggtgctgggtcactttccgtatcctgatccttcccagtggacagatgaagaattaggtatccctcctgatgatgaagactgaaggtgtagactcagcctcactctgtacaagagccaggtgagaatttcaaggattatcgacttcatattgcacattaaagttacaaattaaagtggcttggtcaagaatgagcaaaa

SEQ ID NO: 174531 - DNA, 234 bp, Homo Sapiens
gcagagtttatgtaatccatcgtgtgcatatttatacaataatttacaattctatgtattttaaaagtgtataattcatatattatgtgacacaatatataatggaatataaaatatatattttatgtcatgtgtaacataacatcatctattatatgtagatgtatgtgcgtaatgtacatatcattggaatgaaagtttcattaaataattacccttaatattcgcactgga

SEQ ID NO: 174532 - DNA, 768 bp, Homo Sapiens
gggcactcgccgatcctccaggcatgccccgctacgagctggctttaatcctgaaagccatgcagcggccagagactgctgctactttgaaacgtacgatagaggccctgatggacagaggagcaatagtgagggacttggaaaacctgggtgaacgagcgcttccttataggatctctgcccacagtcagcagcacaacagaggcgggtatttcttggtggatttttatgcacccaccgcagctgttgaaagcatggtggagcacttgtctcgagatatagatgtgattagagggaatattgtcaaacaccctctgacccaggaactaaaagaatgtgaagggattgtcccagtcccactcgcagaaaaattatattccacaaagaagaggaagaggtgagaagattcgccagattttagcctaatatgtaattccttcacatttgggcagcatggacgagaaggaagaatttgcaagtttggccttaatataagcatgtgttgcaggtgctgtttgatttttctaaggtatttttagcccttgatcccctttgcttgcgagaggtggggaactgctcactgacagcttctctgtaacctgcagtaccagtggatcattcttgattttgttttcattagtggcatttctttgtcattgaggacttttcccctttacacaggtaacaccattttttggagagcaaaacttataataccctcctggggaattgtgagctagtcattcagcctggggtaaccatggggga

SEQ ID NO: 174533 - DNA, 452 bp, Homo Sapiens
  misc_feature (150)..(150): n is a, c, g, or t
  misc_feature (331)..(340): n is a, c, g, or t
tccacggcgaatatctgtagattctctggcatttagtctcttcaaactgtgtataatgtttggtcctcctctgtttcatagaaaagtcatagaatatctatgatacattgaaaagttactgcaatatttgagaactgttcttcttttttncttgtgtgtgccatctttccattgttggctacgtcttttcttttgcccttgatgaacgttctatgtatttcatcggatatacagcatattccatttaggatgtgtatttaatgcatttagtaatgacgataaagtgtttttagtatgcttttagtctcttgtaactggggagaagcagtgnnnnnnnnnnaggaaaggattatgcgacacaataaaataagatattctgtctgtagtgaatacatttctcatgtactaacactatttataatatatgattaaagatatttcttgttttatta

SEQ ID NO: 174534 - DNA, 698 bp, Homo Sapiens
tttgtcaaattacggagattgagttatgacactaaccatattcgaaccctgaaaatctaatgtgtttgtttgttactttgagaaatcaaaaataccaaatagattctaagtgctctatgttaactgaagtgtatatgtaaagtaaaatacaattaagctttaaaacgtggaatatacattttgtgtaagcattatgttcttgggaatgtaatctacagaatttcttttactaaaacttcaaaaccttgatacctgcacatgaaaaatcataaaaaatatctaagtacaactgtacaaagaaactgacaccaatatgcatacttccatagagaagtgactgcttcaacagttgtgtgttattggtaaaagttctgaaagtatgcatatttttaaagtaattaggcttttaaatagtggagtcttagactatcagatttttattactttttttccttcaaaaaaacacgtcaatataatgcaaaatgaaaatcaagggtatatggcatatcattctttttaaaaggtggtttcttggtttttttccccctataggacacactaatttatttaagccataatctcttgacattaaacttttaagttcactctgtctgtaaagtatactcagattcctgctgaagtgcaatgactatgctgaaaaacttagaaacagtatgagtaaatttcacacaattact

SEQ ID NO: 174535 - DNA, 1625 bp, Homo Sapiens
  misc_feature (826)..(834): n is a, c, g, or t
gggaatcccggcggccggcggcccgggaggcagtcgcgcgctcgcatccccaagatggcggccgttaaggacagttgtggcaaaggagaaatggccacagggaatgggcggcggctccacctggggattcctgaggccgtgtttgtggaagatgtagattccttcatgaaacagcctgggaatgagactgcagatacagtattaaagaagctggatgaacagtaccagaagtataagtttatggaactcaaccttgctcaaaagaaaagaaggctaaaaggtcagattcctgaaattaaacagactttggaaattctaaaatacatgcagaagaaaaaagagtccaccaactcaatggagaccagattcttgctggcagataacctgtattgcaaagcttcagttcctcctaccgataaagtgtgtctgtggttgggggctaatgtaatgcttgaatatgatattgatgaagctcaggcattgttggaaaagaatttatcgactgccacaaagaatcttgattccctggaggaagaccttgactttcttcgagatcaatttactaccacagaagtcaatatggccagggtttataattgggatgtaaaaagaagaaacaaggatgactctaccaagaacaaagcataatgctggcaattaaaaatgtgggtttagttttccaaacatgttatcttaaatacccctttatccttacaggttgacataactttgaatgttttaacagcaagaattttaagaaaagataaacaccattttatttatttataaaaacaaaattagtttcaaatatttttgacattgtgannnnnnnnnccacatttctcagcaaagctaatggtattttaatcattatttttgcctgtcataagaaaactcttagctgaaatggccgaaaactgtgagacatgctatggaagctgaatgccggacgctagcacagtttactttttccctttctaatcggctgatgttactctcacttgatgtggttaaaccattttagaggtagagaagacagacagtttgaatatttgtaaacttgtttttctttggtatatttaggacttagtggtcctctgttgctattgtcttctataagtggagtttcatgacttactgcttaacgaataactaactactatgatattctggacattttaggaaatggtaatttgccttgctacacattaagagggctattaagactacattttttctaacctcagataagtgcagtgtctttgcaatgccaacataagggagatcttggccaacgtgaaataaaattactcattcaaaactctgcctaaggtgattttgtagttcttaacagttctccagagcatcttgaacaagaatattaagataaatgtgaatctgcaatggctgaaaaaaagttgtgagctttttttaattcatgataaaaccttataggaatagtataaaaaatccctgtggaaagctactagtacattgaccagcgctgggtgatacagattctgataaaaacataaatgtattagttcatctccatgtagtaaaaagtatacttatacaatgttttgtacttgtatttcatgaaattaaaacagtgatgctaaaac

SEQ ID NO: 174536 - DNA, 379 bp, Homo Sapiens
ggacaagatttaggttaagttggccgggggttgcgtggaaagtattgtacttcagattgaaaaatgaacagcttccacactgttcactgcaagatacacagtattcacgaatacaatgctggtaatttgaggaaatgtatacacacctcaagttctccttcaggcttttttcttgtagaaagatactgtttaccaaaaagaaacttcagcaggacaggaaaaactattatcccaataaatttacgaaaacctaagattctccaatggaatcagaattatcttcccgataccaccaccttaatataatcacatgcttattggaacactaatattcgcaccctaagagtacatttactttcaacaatgagggtgattcttt

SEQ ID NO: 174537 - DNA, 371 bp, Homo Sapiens
atacactggagaagaagccaaactagtctacttcatctaagaaagttgtcaaagagagcccttctatactatcttaaggtaaaaagaaagactctacccagctgccctgattaagcattagaaagataagtgttctgatcattaggcgaaagacaatggggaagtctgagtgctaatatggatttcaaaacaactttaaaaatggcttcaaacattttatgctttttgcaatttagtcattttaatatcaggataaatcttcctgtaactgaaagttcttgagttaaagaaaaatattcgggtagttcagctcttccttccaattttattaggttggctttttcttttgttcaagtggaaattaaacataa

SEQ ID NO: 174538 - DNA, 576 bp, Homo Sapiens
  misc_feature (16)..(16): n is a, c, g, or t
  misc_feature (35)..(35): n is a, c, g, or t
  misc_feature (219)..(239): n is a, c, g, or t
  misc_feature (485)..(485): n is a, c, g, or t
  misc_feature (497)..(497): n is a, c, g, or t
  misc_feature (507)..(507): n is a, c, g, or t
cagcaccccgctcttnaggatcccctcatcccagnaataaaccttaataaatacacgttctgttaaaaacctccagtgtctaatctctcccataaagtcttaagtaataaaaataggattacatttttcccatctcaataaaactgacagttgttttttggtaacagttctgatcaaattaaaaattacacctcgtgatgttggctgtggagtacgtgnnnnnnnnnnnnnnnnnnnnnttacacctcagggggcagaatcctgttaaagtcatgaaaggagactgttcgaagacttaaaaaccttttcgtacttaggaaacgccaggggcaaacgtttaaagggactagagtttttttatcttcgaaagaccactcacctggtaaggcacatgtataattcattcaggtgtgaggactctgggatctcatttcatcctcctgcctggaccattttcagatacgcttttctcttccataggcatntgctaacagtgntcacattttnatcagggtcaagttttaaaacagtgtggacatctttgcattttacttgaaggtttattctggggatgag

SEQ ID NO: 174539 - DNA, 279 bp, Homo Sapiens
ttgttgaatgaatagataagtccttcccccctggggaattcaggaggcgaaaggttggcttgagcacccaaaatggcaggatgagagaagagaagcactgatagcaacctgccctcccattattgacatggtaaaaggatgtgaatttcttcacatggctttgactatggaagagtagctgggcttgcattgtcatgacgggatatcacccaacagggtagcctgttgtgcaaagaaactatagcaagatattcgacgtggggggatcctctatgagat

SEQ ID NO: 174540 - DNA, 126 bp, Homo Sapiens
tccacgtggaatatgagtcagtagtaacattccctttatcatttttaattgtatttgtttgaaatcttctctattttcttctttattagtctctatagttagtggcctactttattaattttgttt

SEQ ID NO: 174541 - DNA, 1239 bp, Homo Sapiens
tgacctgcacagacatggcggtgttggcggggaacagcggggagacgtgctacagcaagtacggggccatggccctcaagagccgggcctgccacgagatggccctgagaatcgtcctgcacagcctggacctccgcgccaactgctaccagcgcttcgtggtgccgctgctcagcatcagcgctgacttctacgtgcgtgtttttgtccgtgtcttcaccggccaggccaaggtcaaggcctcagccagcaagcaggcgctggtgttccagtgtgtgggctgcggggccttccaccttcagcgtctcggcaaagcgtcaggagtccccagcggccgggccaagttctctgcagcctgtggtcgccctgtgacgcccgagtgtgaacactgggggcaacgacaccagcttggtggccccatgtgggcagagcccagccatgacctggattttgtgggccgtgtcctggaggctgtgagcgctaaccccggccgcttccacacctcggagcggatccgaggggtcctgagcgtcatcactgaggagctcccggaggtgcctctgtactacaccctggaccagctgagcagcaccatccactgcaacgcagcaagcctcctgcagttgcggtcgggcctcctccacgctgacttccgggtctgactctcccacgcctgtaagaacgctgtgaagacggatgcccctgcctctgccctctgggacatcatgcgttgctgggagaaggaatgtccggtgaaacgggagcgactatcagagactagcccagcgttccgcattctcagtgtggagcccaggctgcaggccaacttcaccatccgggaagatgccaaccccagctcccgacagcgaggactcaagcgcttccaggctaacccggaggccaactggggtccccggcctcgtgcccggccagggggcaaggcggccgacgaagctatggaggagagacgcaggctgcttcagaacaagcggaaggagccgccggaagatgtggcccagcgggctgcccggctcaagacatttccttgcaagaggtttaaggagggcacctgtcaacgcggggaccagtgctgctactcccacagccccccgaaacccagggtttctgctgatgctgcccctgactgtccagagacctccaaccagaccccccctggacctggggctgccgctgggccaggcatagactgaaccaataaagagatgtcacgtcaccttc

SEQ ID NO: 174542 - DNA, 943 bp, Homo Sapiens
tttgagcgggctccccccccagctgggggacaggccccccgtgggttttccggccacaagacggtaagccgggccctccaagccaaccttaaaccaggtggggttggtgcccttttccttcctcctcagccccagagggttctccccaggaccctgaagggccattccacagaagaaagtgggccaggatgcgggtcagccctcggtcagaaggggttgctggggcgcctggcggagataggccgatgcggtgtgaggagatgaattccccagggtgggggtgttgctggccaccaggtagaggtgcgagacgaggagcaggctggccaccaacgagaagagggacagcagcaggaaggtggcgaacaggagcccgctggaccgcaaccacagaccccagggctggaagaaccggaggcctgaccatgccaggtacaggccccacagaagcaccaccagctgcagcgccaggtagaccacaaagagtgggtggttgcgctctcccacacagttctccatccaggggcagtggtggtcgtagcggcggacgcaacggcggcactcacggcagtgccgagccctcaggggctgcagcaccaggcagtatctgcagcgccgaagagggatggctggaggaaccatggctgtctgctcctctttgagctcctcctgaggctggggctgcacattcacgtagccagggtccatgagtgacacagcgaggtagagcagcagggagcccagcaccaggagcaggaaggtgaggggcaggagcagctccccctgctcctcccattgccgcagctcggtatcgtgcaggaagagcaccagcgtgattccccaggtcagcacggtgtgcccggtccgcaccaggaccccagggctgaggagcgcccagggcgccatcgcctcggcccggggccccacccggaagaagcgcccc

SEQ ID NO: 174543 - DNA, 327 bp, Homo Sapiens
tccggagcagtcctgatgttgccagcagaacaaaggatgattgtgtttttcaaaacgcaacttttctcagcacttcactccaaacagcagacttttgaggacagggctggaatttgttttgtgcaatatatgccttcatgaatctaaggaatgttcatcccctaggcagcatgcaggagggtctgtggggctcacctcctcaccttacccaccatcactcgcgcctagctctcacctctcagttgaatgaatagtgggagatcatttgacttttaatttatgagaattattttatgttatttatgtatataattaactgttttatac

SEQ ID NO: 174544 - DNA, 337 bp, Homo Sapiens
tccccatcctaccgaggactctgaagctgactgacatgcgttgtatctgatggtctccgtgtaagccaaaggcccacagaggagcatatactgacaaagaaggcagtatcacagaatatatactatatacaaaagggcagggtatggccacttgcgcctatttactttcaaaacaatttgcatataggcagtgtttcgcatcagaataacatgagtaagatgaactggaacacaaaattttcagctcttaggtcaaacaggatatcatcagtaatcatattttgtatgtttacgatttaagcatggcttcacattaaatttcaacaactaatgctac

SEQ ID NO: 174545 - DNA, 1764 bp, Homo Sapiens
tgacactaatagacacaagttgggtttttttattttatagcagcggctaggttaacccggccttccggggaacatcccgggatatcgtcgacccacgcgtcggtcccaggcagcgtgtgtcggtcgcctaggctggagaactagtcctcgactcacgtgcaaggatgatgctgaaaggaataacaaggcttatctctaggatccataagttggaccctgggcgtttttttacacatggggacccaggctcgccaaagcattgctgctcacctagataaccaggttccagttgagagtccgagagctatttcccgcaccaatgagaatgacccggccaagcatggggatcagcacgagggtcagcactacaacatctccccccaggatttggagactgtatttccccatggccttcctcctcgctttgtgatgcaggtgaagacattcagtgaagcttgcctgatggtaaggaaaccagccctagaacttctgcattacctgaaaaacaccagttttgcttatccagctatacgatatcttctgtatggagagaagggaacaggaaaaaccctaagtctttgccatgttattcatttctgtgcaaaacaggactggctgatactacatattccagatgctcatctttgggtgaaaaattgtcgggatcttctgcagtccagctacaacaaacagcgctttgatcaacctttagaggcttcaacctggctgaagaatttcaaaactacaaatgagcgcttcctgaaccagataaaagttcaagagaagtatgtctggaataagagagaaagcactgagaaagggagtcctctgggagaagtggttgaacagggcataacacgggtgaggaacgccacagatgcagttggaattgtgctgaaagagctaaagaggcaaagttctttgggtatgtttcacctcctagtggccgtggatggaatcaatgctctttggggaagaaccactctgaaaagagaagataaaagcccgattgcccccgaggaattagcacttgttcacaacttgaggaaaatgatgaaaaatgattggcatggaggcgccattgtgtcggctttgagccagactgggtctctctttaagccccggaaagcctatctgccccaggagttgctgggaaaggaaggatttgatgccctggatccctttattcccatcctggtttccaactataacccaaaggaatttgaaagttgtattcagtattatttggaaaacaattggcttcaacatgagaaagctcctacagaagaagggaaaaaagagctgctgttcctaagtaacgcgaacccctcgctgctggagcggcactgtgcctacctctaagccaagatcacagcatgtgaggaagacagtggacatctgctttatgctggacccagtaagatgaggaagtcgggcagtacacaggaagaggagccaggcccttgtacctatgggattggacaggactgcagttggctctggacctgcattaaaatgggtttcactgtgaatgcgtgacaataagatattcccttgttcctaaaactttatatcagtttattggatgtggtttttcacatttaagataattatggctcttttcctaaaaaataaaatatctttcttcgccaagaccccctaacagcccccccattccctccctcatccacccactccacccaaccttttcctataccggccccccattcaatatattttttggtggggccgtccttggccccc

SEQ ID NO: 174546 - DNA, 772 bp, Homo Sapiens
ggggcagtagcaggaccgctgctgtggagctggtcgcaggcggtgtgtgccggtcgcctagtcaggagaactagtcctcgactcacggtgagggaatggaccgacacgggtattgtaccgctgagggaaaggagcgggactccggacctccaggagtgcaaggatgatgctgaaaggaataacaaggcttatctctaggatccataagttggaccctgggcgttttttacacatggggacccaggctcgccaaagcattgctgctcacctagataaccaggttccagttgagagtccgagagctatttcccgcaccaatgagaatgacccggccaagcatggggatcagcacgagggtcagcactacaacatctccccccaggatttggagactgtatttccccatggccttcctcctcgctttgtgatgcaggtgaagacattcagtgaagcttgcctgatggtaaggaaaccagccctagaacttctgcattacctgaaaaacaccagttttgcttatccagctatacgatatcttctgtatggagagaagggaacaggaaaaaccctaagtctttgccatgttattcatttctgtgcaaaacaggactggctgatactacatattccagatgctcatctttgggtgaaaaaatgtcgggatcttctgcagtccagctacaacaaacagcgcttttgatcaaacttttagaggcttcaccctgggctggaggaatttcaaaactaccaaatgagcggcttcctgaaccat

SEQ ID NO: 174547 - DNA, 759 bp, Homo Sapiens
  misc_feature (691)..(691): n is a, c, g, or t
  misc_feature (699)..(699): n is a, c, g, or t
ggggacctgagctggggcctgtgcttccagcgggtggtggggggcctggtgtgctggcatcaagtaagccgactacctcggcaaaggcttagggacaagagaccagcagcctgaactggctggggcatccggaaggcttagatcttgtggccaagagttcagaccgtggcgaagtggagagtgacatgcagttggatggcggtgactgcgtggtcctgcaaccctggttccagtctggcaagcattgtagacctggctgctgaagactgacggggcccagggtccgctgcccccaccgccatcaccacctcggaacccagggtaacgctgtcagtctttgagcctacgaggaaaccattcggaagctccagaacccaggccctaatcacaacgcccctatccagcaggaagcagccagatgatcaacgacgccctttttcctttttatactaaagtaagaaataagaatgttagcccaaactgcactattttgcagacccctaccattttacaaactggtcagagtggaaaattccaccagggcctgagctgtgagaaacatcctgtcaggcaggtcccaggcctaaccctggctgcactaaattccttcattatcagcagccaaacacaccgcccccaccccattttcacaacaatcccagacctctccctgccggggactgtaactggntcagcctngtagcgggaaagggggctctggcactagctggtaccccctctccgcaggtctttctccca

SEQ ID NO: 174548 - DNA, 639 bp, Homo Sapiens
gatcatcccttctaagatggataccctgggttgcccccttcctaggacccctgatcttcctcttcctgttactaatgattgggccatgcatatttaaccttgtatcccgcttcatttcccaaaggctgaattgttttatccaggcaagcatgcaaaaacacattgataatatatttcacctttgccacgtctaataccagagcctacgaggaaaccattcggaagctccagaacccaggccctaatcacaacgcccctatccagcaggaagcagccagatgatcaacgacgccctttttcctttttatactaaagtaagaaataagaatgttagcccaaactgcactattttgcagacccctaccatttttacaaactggtcagagtggaaaattccaccaggggcctgagctgtgagaaacatcctgtcaggcaggtccccaggcctaacccctggctgcactaaattccttcattatcagcagccaaacacaccgcccccaccccattttcacaacaatcccagacctctcctgcccgggactgtaactggtccagcctgtaagcgggaagggggctctggcactagctggtaccccctctccgcaggtctttctcccaataaatctgtgttgccat

SEQ ID NO: 174549 - DNA, 902 bp, Homo Sapiens
taatcagctcggtacttacatccccacgatcacttacaaccccacgagcacttggaatcaggcagccatgcagcactgccctaggcggggatcccccaaagtctgacaatttggcaatcagtggggtgccaggtgccccctcagctgccttaatgagcgcgcttcttccacgtaaagctgcatctttaaaatgtccgacgtcatggtttttagtggtatcagccgggggtcatgcatgtggacatcctgctcatccgccaggatccaggggaaatccttgatgacctggatcttctccatgttgcgagtggcggcttctctcgtgtgcaccaggactgtgaaggtacagcctggggggttgtggtccaggacggcatcgcacacgctgatcttcaggatgaaggcccggagcagctgctccacatgagacaacagcgagtctgagctgatggacagcagtggaggctgggtgatctcaaagacgaatttctccactgggcggtgctctttatccaaaatcaccaccaccactttctccacatcattcttctccaggagtggcttgacgcagtgcagcgtgtcctggatatactgattcagctccgggtggcaggacatctggaccggcacgttgtacttcttgcgtttctggaagatgcccacggggtagacctcgcgcacgtagaggatgagatgcacagccacctccaggaactcgcagagcacatcggccaccacttggccaaagttgaggtcttgtcgtgtgagcgtggtcatccttcccgctaccggctctgcgctcggttcccgcccgagatcgggcccggccccgccgcggggagccaccgaccggaccgatcgcgcctcccgctcaacccggggcctccggacgcgtgggtcga

SEQ ID NO: 174550 - DNA, 298 bp, Homo Sapiens
cctcatttcaatggtgggcgcctgccacagacgccgcaggaggtggtcgacagcaccatcatctacaacactgagtcctggttgtcctaggtgcgaggctgcaggtgtcgagatgggcagcgagcgcaagggtttatgcagcaatgactccaacctggtgctggaagccgttcgcctgggcaaggcatcacgctggagcggcgcagcctggtgcatgacgctgtcgagcggggcgaactgatccagctgtgtgacgtcagtgcaccgtacgcgtaccgctccgataagcgggggatcc

SEQ ID NO: 174551 - DNA, 294 bp, Homo Sapiens
gaataatggatagttgtggtatatgagcagatattcccctcaaccagtgtcttgccaggctacccaaatgagcccaggctagcgctagattcccaagtgatgtatcttgagaacgaggaacatccctagaaaacaagtgtgtaacgtccctccaagatggggtgttccggaacaatccctcagacaacgaaggcaattgttgatgggcaacattgggaagaccccagagatggaatgtcctaggcctttccatgttctctttctcattctccctccattgacttgataggtgga

SEQ ID NO: 174552 - DNA, 148 bp, Homo Sapiens
gactctagcacggatcccccatgacgtatcccacagccctgctggcttcttagatgatgtgcaatcgcgaagagaattctcatcgcgattgcacccatcaaagaagccacgcagggctgtgggatacgtcatgtgctccggatcagcg

SEQ ID NO: 174553 - DNA, 336 bp, Homo Sapiens
tggggtgactcggactataccaggagctgttggagaaatgaggatgtctgtccctgtctgcctgggcaggccagattcctccccagacagccgggtctctccagaccctgattcggtgcctttctgtttaccagctacttcaatcccaaagtttgaatctgcagataccttactcccagccactttgccttcttactgtgttgcgtgtttttcctggtgcttcaagagcgtgtgcagggcaagtgccgtcactgggaactgcaccagatgctcagacttggttgtcttatgtttaccaataaataaaagtagactttttctatttttatttgctgc

SEQ ID NO: 174554 - DNA, 612 bp, Homo Sapiens
ttggcccagacgggtgagaaaagaagaacattgtcccataatgtcctggcctcttcacattgcaaagttacaggggcaaagcccctgaaaaaggttggggtgatgcccctacagctaattcaggagcaggcagcatccccaaatgccgagatccacatcctgaagaataaaggccggaagagaaagttggagtccctggatgccctagagcctgaggagaaggctgaggactgctgggagctacagatcagcccggagctactggctcatgggcgccaaaaaatactggatctgctgaacgaaggctcagcccgagatctccgcagtcttcagcgcattggcccgaagaaggcccagctaatcgtgggctggcgggagctccacggccccttcagccaggtggaggacctggaacgcgtggagggcataacggggaaacagatggagtccttcctgaaggcaaacatcctgggtctcgccgccggccagcgctgtggcgcctcctgaccgtcgtctcctcactccgccttttcaaatttttgtataaccccgtgttgtgtaaatacagtttttgctccggatcgctccggatgagcgtgctccggatcaggg

SEQ ID NO: 174555 - DNA, 1344 bp, Homo Sapiens
  misc_feature (861)..(861): n is a, c, g, or t
  misc_feature (1027)..(1027): n is a, c, g, or t
  misc_feature (1069)..(1069): n is a, c, g, or t
  misc_feature (1132)..(1132): n is a, c, g, or t
  misc_feature (1180)..(1180): n is a, c, g, or t
  misc_feature (1203)..(1203): n is a, c, g, or t
agagcgagcctgggtggcgaattctcgacgaggtgccgcccggaccgctgcccgaggccgtgctcgccctgtacaacagcacccgcgaccgggtggccggggagagtgcagaaccggagcccgagcctgaggccgactactacgccaaggaggtcacccgcgtgctaatggtggaaacccacaacgaaatctatgacaagttcaagcagagtacacacagcatatatatgttcttcaacacatcagagctccgagaagcggtacctgaacccgtgttgctctcccggacaaagctgcgtctgctgaggctcaagttaaaagtggagcagcacgtggagctgtaccacaaatacagcaacaattcctgacaatacctcaaaaaccggctgctggcacccggcgactcaccagagggggtatcttttgatgataccggaattgagcagaaatgattgaacaccgacaggaaaattgagggatttcacattaacgtccactgctcctgaaacaagaggcatataccaatgaaagagcacataaaccttgttctctaccggctcgaccgaggataccctgaaccaccaatacctgggtctgaaacccaagacgttttcactacatgatgaatggaaccacccagcgactcgaaccagagtataccagaccaatatcggtaatgaacgtaagcctggtgttgcctacgcttaaagtacactgtatagaggagacagcccgatattatggcattaacaccgtcgttacggctcatcggagagatgaacataaaaccctaggattcctgacgcatctacgcatgctaggtaggttagcacgagattcgaaactcgtattgtgtacgtnacgtgaccctatatgcagtaagcggcccccccacatatgcaatctgtagagtgataaacaaaaatgtggacacatactgccctatgacatgtgccgcaccaactgtctgaggcgagatatcgcccatatttagtgcgctgaggcattgtgtcagtggcagcacatncgaagtacgcgcgcacgctctcagacgaggataggagcgggnttcgtgacagcaagcagacgtctatgacgacgtcgagtaaccctcaggacgaacggcgtgcgntcgaggatcagctagaacggcacagcacagatagtatcatgaagaccnaacacagaatctcatcatcaatntcaagtcgcgctatctctatctagatatactcacgctaaaggcaacctcacacgacctcggcgattgatataattgttgctctgaagacatagtaactcacgagaacgcccagtttgatcagccagtcgagacgtacgccc

SEQ ID NO: 174556 - DNA, 881 bp, Homo Sapiens
  misc_feature (98)..(148): n is a, c, g, or t
cccccagcccctgcatgggcggggcctccccaccacaccagccctgttcgcgctctcggcagtgccggggggcgccgcctcccccatgccgccctccnnnnnnnnnnnnnnnnnnnnnnnnnnnnnnnnnnnnnnnnnnnnnnnnnnnacgcctggccggccggccgcgggactatccacctgcaagactatcgacatggagctggtgaagcggaagcgcatcgaggccatccgcggccagatcctgtccaagctgcggctcgccagccccccgagccagggggaggtgccgcccggcccgctgcccgaggccgtgctcgccctgtacaacagcacccgcgaccgggtggccggggagagtgcagaaccggagcccgagcctggggccgactactacgccaaggaggtcacccgcgtgctaatggtggaaacccacaacgaaatctatgacaagttcaagcagagcacacacaggccatatatatgttccttcaaccacatcccaagcttcccagaaagccgctacctggaccccgaggtttggtcctccccgggggcaaaaccctgccctccgcgcggaaaggcttccaacgttaaaaaagttgggagcccaacaccggggggtagctcgcgtccccagaaaaattacccccccaaacaaatttccccgggggtgaaaccccccacagccaaacccgggatcttgtatggcgcaaccccctggcgaataattccccccgaaaaggggggccttaattccctctcggaagggcggaacacctacagcaatttgtcggccccgtcctcctaccgcgttcatacaataccccccgcgaaggaagggcgccaaacaatttcgcgcggggggccactttttcgac

SEQ ID NO: 174557 - DNA, 845 bp, Homo Sapiens
gccgcccggcccgctgcccgaggccgtgctcgccctgtacaacagcacccgcgaccgggtggccggggagagtgcagaaccggagcccgagcctgaggccgactactacgccaaggaggtcacccgcgtgctaatggtggaaacccacaacgaaatctatgacaagttcaagcagagtacacacagcatatatatgttcttcaacacatcagagctccgagaagcggtacctgaacccgtgttgctctcccgggcagagctgcgtctgctgaggctcaagttaaaagtggagcagcacgtggagctgtaccagaaatacagcaacaattcctggcgatacctcagcaaccggctgctggcacccagcgactcgccagagtggttatcttttgatgtcaccggagttgtgcggcagtggttgagccgtggaggggaaattgagggctttcgcccttaacgcccactgctcctgtgacaggcaggaataacacactgcaaggggacatcaacgggttcactaccggccgcccaggtgacctggccaccattcatggcatgaaccggcctttcctgcttctcatggccaccccgctggagagggcccagcatctgcaaagctcccggcaccgccagaccctggacaccaactattgcttcagctccacggagaagaactgctgcgtgcggcactgcgacattgacttccgcaagacctcggctggaagtggatccacgagcccaagggtaaccatgccaacttctgcctcgggccctggccctgacatttggagcctggacacgcagtacagcaaggtcctggccctgtacaaccagcataacccggg

SEQ ID NO: 174558 - DNA, 695 bp, Homo Sapiens
  misc_feature (627)..(637): n is a, c, g, or t
gggattgactggaagagagttgaaaaagatgtaaataaagcaaaaagacagattaagaaacgagcgaacaaagcagcacctgaaatcaacaatttaattgaagaagcaacagaatttatcaagcagaacattgtgatatccagtggatttgtgggaggctttttgctcggacttgcatcttaaggacatgaatattctcccataacggattcaactatgagaagagaagtggcagcaataaggcagtctctcaaaagtcatactgccagagtctctagggcaaggagaaacaactagctggacaatactcaattcacaacttagcattttgccatctgaagcttggcaaactagtatctgctgtaaaacaacctatatggtatgtgaaccgtagtattcctgagcaaaacgtggctttcatcgctttgtaaaaatttgcatctgtttagaaactagcctataaaatatcaccattggaagtagatatggagagaacaagaaatatgttcgggtttattgcttagcgaaatattctctttttatttaaataaaatgttcttcattgtgttttatggtatgtgtccataatttaaaattcatgttatagtttcagtattaaggctgacnnnnnnnnnnnaagatatgtttgcaattaggttaaaaaactggaattctgaaataaaaaatgcaagaaa

SEQ ID NO: 174559 - DNA, 340 bp, Homo Sapiens
aggatcccgcaaatggacgaacacatgaactagtagacacttctctcatttgaaaagaataaaggtgacaaagaaagaattcccaagtcaatgcagacaactttcctaaaactcagggtgagaaaaattgagggctattttctcctcagttttctactggttcaaacagatgaagctacactaaaaatttctatcttttaaggctgttaatagatgaactttcatactgtagatagaaaagagagatgtcttgtctgaaggtgaagctaacagcattaggaaaggattattctactttatacacggttcctattatacaaaatcctgagagttttttagt

SEQ ID NO: 174560 - DNA, 442 bp, Homo Sapiens
ctagacaccctggccctggagctcaatgggggccggtggtggtactgacctctccagattgttggatcggtgccctccagtcttaccgcgcgcattgggggccgctgggggtggcctttattggcaacagattattccagttctggaaggatcagctgcttcttgattcaaaaatcaacatcaggtcggctactgacctggtgcgtccagatcgaatgctggtgggctatacgactgacactggtaaccctgtccatattccagatgaagatctgatgcgacatgggttcatccttggccagtccggggtcggcaagaccgtcttgggcaaattatttgatgttccaacagatccagcgcggtggaggattaacgttcatcgacggcaaaatgaacgctgatgatcttcagactatctatcagtactgctgctgggccggcc

SEQ ID NO: 174561 - DNA, 264 bp, Homo Sapiens
ctggcagagctgaatgctggagaaaaactgagtactagcaacagtttttgaaccctgaatactgtcataactgaagctagaattatccctggacttgtttgccactaaaatttccttgttttgcttaccctggtttcagctggcaccctgatcacttgaaaggaacataactgatatactgtcctttgtttttctttccttcctcttctccgcctattgatgattttaaattagaaatctacctgcacagagctctgccagggg

SEQ ID NO: 174562 - DNA, 191 bp, Homo Sapiens
ctgtgagagctggggtggagtgcagataggactgatctctgtgatttcatggtccacaccaaatcagtcttctagactcagagctattgttattgttgctgtctaatacatagtgagcttttattgtttgccaagtaatccacagagcactcctgtatgtttttctagctcttaaagagctctgccagagg

SEQ ID NO: 174563 - DNA, 568 bp, Homo Sapiens
cctcattctggccccagccctggggttagagtcgcaccagtgtggtccaagtggcataattatctccctaaatgcttgggcagcatcagctttcagtagctgtgccccatgggaggcacattaagctagtggcaagttgagactgcagacctcagcttaatatcagttgttgcccaagacagatctcaccccacatcttcatgacaggcctaacaacaaggcactttgcccttaatcctctactactgcctgctcttcattttgggccaactgtacagctcattttgagatagtagctgatcatttttctgatcagttaactttgtcttattaagcaaaatggagaatataatgttgggaaataagtgtgttgattaaaagaaagtatccccttctaccatcttccatttgtgtctgggttgtgctgggtaaagttctagacttactaacgcagacttcattttggtccggtttccacagcatgcctcgggcatcagtgtccaggagtagctgtatttgaggtttccttcactctggtaggttcctgattcctgatgaaaataacttg

SEQ ID NO: 174564 - DNA, 668 bp, Homo Sapiens
  misc_feature (47)..(47): n is a, c, g, or t
  misc_feature (59)..(59): n is a, c, g, or t
  misc_feature (72)..(72): n is a, c, g, or t
  misc_feature (157)..(157): n is a, c, g, or t
ccttgggtgggatgacctgggcagagggcacttctctctctaacctntcttgcactttncaggtctcctgtnctcttctcgcccctgccgcctgccccagcttccccgactccatctgcagctctgccattgtgacatttcctgttacccagcccanagttttcatcgtctgctcaataccgtgggttcttcttcgtcctctgtcctctgcccagtgtgaggccatcaccatgtgagaagacatcttggcctgatttgctgccaccagcgtcccctccctcagtgggcccgaactcgccagccccagctttcagtggagaaagcggtcctctgaaatggtttcctcccaacccccgcatttaaagggactcaaggtgcctgccacttcctcagcgaagaagtctgtgttcctccccgtccttgccagtggcgatcatcccttcacaatcccagagtggcaggcgggaccggccccatggtctggctcctgtcacctgggtccgtgccagcacaatctgccaaagttctagagaccctgttcccttccccatcacctcacatgcttcttctgtgtgtatttctttttgtttttatggtttttggagcaatttaaactcccagttgtttattttcacaaaagaaaataaaattgcagttgcaagacctga

SEQ ID NO: 174565 - DNA, 473 bp, Homo Sapiens
aatctttataagaaagagaactgaaaagtagcgtgctattcgtcctgtaggtgctgtggtggatggacctgggcagagggcacttctctctcttacctctcttgcactttctgtctcctgtctcttctcgcccctgccgcctgccccagcttccccgactccatctgcagctctgccattgtgacatttcctgttacccagcccaagttttcatcgtctgctcaataccgtgggttcttcttcgtcctctgtcctctgcccagtgtgaggccatcaccatgtgaggaaggacatcttgggcctgattttgctgccaccagcgtcccctccctcagtgggggcccgaactcgccagccccagctttcagtgggagaaaggcggtcctctggaaatggggtttccttccaaacccccggatttaaaggggattcaagggtggtctggccaatttctcagtgaaggaagtttgtgt

SEQ ID NO: 174566 - DNA, 709 bp, Homo Sapiens
ccccattggcagagctcattgatgagtatgtctgtccacagtgccagtcaacagaggatgccatgacagtgctcacgccactaacagagaaggattatgaggggttgaagagggtgctccgttccttacaggcccataagatggcctggcctttccttgaaccagtagaccctaatgatgcaccagattattatggtgttattaaggaacctatgtaccttgccaccatggaagaaagagtacaaagacgatattatgaaaagctgacggaatttgtggcagatatgaccaaaatttttgataactgtcgttactacaatccaagtgactccccattttaccagtgtgcagaagttctcgaatcattctttgtacagaaattgaaaggcttcaaagctagcaggtcttcataacaacaaacttgcagtctacagcttctttaaagtttcagcgtgtttaacctaacattaaaacacagcaagaatctggttgtctgaactattttaaattaaggagccagatgtttttagtcaggctatcctgacaagacttgacctaaacttcgtttttattggtcataacagtccaattatattcttggccaattttgtccaacggacaagaaaaaagcaaagtcaacgacaccattatcttgtcaagatcagatggttttactattgtggcagaagcgagaaaactttgtttattg

SEQ ID NO: 174567 - DNA, 793 bp, Homo Sapiens
ccggccggaagccgctgtcggggagccggcggtggggctggacgcaggtgcaactgacatgggtgaaccccagggatccatgcggattctagtgacagggggctctgggctggtaggcaaagccatccagaaggtggtagcagatggagctggacttcctggagaggactgggtgtttgtctcctctaaagacgccgatctcacggatacagcacagacccgcgccctgtttgagaaggtccaacccacacacgtcatccatcttgctgcaatggtggggggcctgttccggaatatcaaatacaatttggacttctggaggaaaaacgtgcacatgaacgacaacgtcctgcactcggccttcgaggtgggcgcccgcaaggtggtgtcctgcctgtccacctgtatcttccctgacaagacgacctacccgatagatgagaccatgatccacaatgggcctccccacaacagcaattttgggtactcgtatgccaagaggatgatcgacgtgcagaacagggcctacttccagcagtacggctgcaccttcaccgctgtcatccccaccaacgtcttcgggccccacgacaacttcaacatcgaggatggccacgtgctgcctggcctcatccacaaggtgcacctggccaagagcagcggctcggccctgacggtgtggggtacagggaatccagcggaggcagttcatatactcgctgggacctggcccagctctttatctgggtcctgcggggaggtcaatgaacgtgggagcccatcattcctctcc

SEQ ID NO: 174568 - DNA, 242 bp, Homo Sapiens
tatattggtggccgtatattggtggccagtggtccttcacttgccagctactcacctgctgtgtgacgctgggatgggcgcttgccctctctgatgcatcttggtgatgggaacacgcttggagaatgacagcccattgtcagggtctcatcctccaaagcaaaaagtgtgtaacacttactttttgcggactcggaaaaagccggcttgttctctaccgctccttgctagaaacggggatg

SEQ ID NO: 174569 - DNA, 529 bp, Homo Sapiens
  misc_feature (172)..(280): n is a, c, g, or t
  misc_feature (291)..(334): n is a, c, g, or t
  misc_feature (512)..(512): n is a, c, g, or t
gaaggaatccgccgaggcagggatgggtgtgcccatgtgtgccttgacgggacttcatcttatagactgttaaactgtcacacacaaacaggctttccacccctgctctgagagcaccacgcacagatttccagttcttagtgtggctgtttaaagtagaaaatctgggggnnnnnnnnnnnnnnnnnnnnnnnnnnnnnnnnnnnnnnnnnnnnnnnnnnnnnnnnnnnnnnnnnnnnnnnnnnnnnnnnnnnnnnnnnnnnnnnnnnnnnnnnnnnnnccatgtctacnnnnnnnnnnnnnnnnnnnnnnnnnnnnnnnnnnnnnnnnnnnnttccatctggggattaacttctgtctttctggtgaacaatatagcaattcacgcattcttcaagcagcaaaagttcccggaacaattagggaagacgtatggtctgaatttatccaggcagtgggtctgctttggtttttgctggaaatttatatcagtgtctgggctcaccaatatncggggatcctctggaat

SEQ ID NO: 174570 - DNA, 686 bp, Homo Sapiens
ccccgatattggggagccaaccaagggtacacgcaggcatgcacgggtttcctgcccagcgacggcttaagccagcccccgactggcctggccacactgctctccagtagcacagatgtctgctcctcctcttgaacttgggtgggaaaccccacccaaaagccccctttgttacttaggcaattccccttccctgactcccgagggctagggctagagcagacccgggtaagtaaaggcagacccagggctcctctagcctcatacccgtgccctcacagagccatgccccggcacctctgccctgtgtctttcatacctctacatgtctgcttgagatatttcctcagcctgaaagtttccccaaccatctgccagagaactcctatgcatcccttagaaccctgctcagacaccattacttttgtgaacgcttctgccacatcttgtcttccccaaaattgatcactccgccttctcctgggctcccgtagcacactataacatctgctggagtgttgctgttgcaccatactttcttgtacatttgtgtctcccttcccaactagactgtaagtgccttgcggtcagggactgaatcttgcccgtttatgtatgctccatgtctagcccatcatcctgcttggagcaagtaggcaggagctcaataaatgtttgttgcatga

SEQ ID NO: 174571 - DNA, 463 bp, Homo Sapiens
actgtgcccagcctgctgtcattcttgaaccataatttcactggttatagaattctgagttgtcagttttttctttcaggactttaaaatatagggttccagtgtctttggcctccgttgtttctgtcaaggaatcagcattcatctagctattcccctgtagaccacatgttgtttttccctggatgcttttaagactttttatccaagtttgattgctcagtacctatctctgggcaaaaaagcctccagaaaccagaaacttatctagttttattcccctctgtcaggtgtagactccactccagcttctacctacttgagatattctatactgactccaggctgttgttattttgttctttcaaatattttgtccagagctataatgttttctgcagaattgaccagatagcagctactctctgtgaccaggagccttgatcttccagacttgctgatg

SEQ ID NO: 174572 - DNA, 315 bp, Homo Sapiens
gtatattggtgacatgactctctgaaggcagaacaattgaaccgttttatctttggcatagcaaggaaaggggaaatggccactgtaaaagtagataaaaggaaagcagccaaccttttaacgggttcttaaagtgtgggctagtgtgccagcctggaatccatgggagccccaaacacaagaggacaagagaaacctgcactcattattgaacacttttccacagccttcctccccccggatgcgcacagggaagattgaaggcggggcaaaaaaacccacgagcagcttccccctccgaggtggggcatgagg

SEQ ID NO: 174573 - DNA, 580 bp, Homo Sapiens
  misc_feature (522)..(522): n is a, c, g, or t
cgtctctagagtatccccgcctattaatcagaatgggcatctttccagaaagtctggcacgattctacatagcagaacttacttgtgcagttgaaagtgttcataaaatgggttttattcatagagatattaaacctgataatattttgattgatcgtgatggtcatattaaattgactgactttggcctctgcactggcttcagatggacacacgattctaagtactatcagagtggtgaccatccacggcaagatagcatggatttcagtaatgaatggggggatccctcaagctgtcgatgtggagacagactgaagccattagagcggagagctgcacgccagcaccagcgatgtctagcacattctttggttgggactcccaattatattgcacctgaagtgttgctacgaacaggatacacacagttgtgtgattggtggagtgttggtgttattctttttgaaatgttggtgggacaacctccttttcttggcacaaacaccattagaaacacanatgaaggttatcaacttgcaaacatctcttcacattccaccacaagctaaactcagtc

SEQ ID NO: 174574 - DNA, 747 bp, Homo Sapiens
  misc_feature (736)..(736): n is a, c, g, or t
ttggccctacggcccccagtaattcggcacgagggtgaccagggcctggtccccatcccactgttggccaacctgtccgtggaggcgcagcccccctggctgcccggactagaggcccgctacatggctttcgcccatgacctcatggccgacgcccagcgccaggatcgccccttcttcctgtactatgcctctcaccacacccactaccctcagttcagtgggcagagctttgcagagcgttcaggccgcgggccatttggggactccctgatggagctggatgcagctgtggggaccctgatgacagccataggggacctggggctgcttgaagagacgctggtcatcttcactgcagacaatggacctgagaccatgcgtatgtcccgaggcggctgctccggtctcttgcggtgtggaaagggaacgacctacgagggcggtgtccgagagcctgccttggccttctggccaggtcatatcgctcccggcgtgacccacgagctggccagctccctggacctgctgcctaccctggcagccctggctggggccccactgcccaatgtcaccttggatggctttgacctcagccccctgctgctgggcacaggcaagagccctcggcagtctctcttcttctacccgtcctacccagacgaggtccgtggggtttttgctgtgcggagtggaaagctctgcccacagtgataccactgcagaccctgcctgncacgcctccag

SEQ ID NO: 174575 - DNA, 547 bp, Homo Sapiens
gaagctcttgctttgtgacaatatttgcccacagttgtgtttttgcaaaagcaatgcacaggacaccccaaattctgccacagagcagtcaggaactgttatccgatcagagagtgagacagagtcgaggcctcagaaattactattcctcccagcaccccggcagttccacaggctcccgtccagggggaggactacggcaaaggtgtcatcttctacctcagggacaaagtggtcgtggggattgtgctatggaacatctttaaccgaatgccaatagcaaggaagatcattaaggacggtgagcagcatgaagatctcaatgaagtagccaaactattcaacattcatgaagactgaagccccacagtggaattggcaaacccactgcagcccctgagaggaggtcgaatgggtaaaggagcatttttttattcagcagactttctctgtgtatgagtgtgaatgatcaagtcctttgtgaatattttcaactatgtaggtaaattcttaatgttcacatagtgaaataaattctgattcttct

SEQ ID NO: 174576 - DNA, 910 bp, Homo Sapiens
  misc_feature (41)..(41): n is a, c, g, or t
  misc_feature (49)..(49): n is a, c, g, or t
  misc_feature (51)..(51): n is a, c, g, or t
  misc_feature (79)..(79): n is a, c, g, or t
  misc_feature (83)..(83): n is a, c, g, or t
  misc_feature (130)..(130): n is a, c, g, or t
  misc_feature (198)..(198): n is a, c, g, or t
  misc_feature (413)..(434): n is a, c, g, or t
  misc_feature (581)..(581): n is a, c, g, or t
  misc_feature (837)..(837): n is a, c, g, or t
  misc_feature (861)..(861): n is a, c, g, or t
  misc_feature (870)..(870): n is a, c, g, or t
gccaaacactatcaaagcagacacgccactcgatagtccgngtcatcangncggccgcgcgcagccgtccatgtcctanaagnaagaacgtccaggattgctgcagactgtgtcggcccatacgacgggncacacaaggtgtcagactgctgacagatcctttggcacaggtgtcagtgccctgccgccgtacgaccntggccgcagtatgccagcaggtgaaccagcctctgcagacggtcctcaaccagctttccccggtacggcaatgccggtgatctcccaacacttctcgacaggcgttttgctgaaaacgtgtcggagggctcgttcgtcggcactgattttgttcttagtgggcttaacttaaacaggtagtgtttcctccgttccctaaaaaggtttgtcttccnnnnnnnnnnnnnnnnnnnnnncaaatctatacattttcaggaatttgtgtattctggctaaaagttggacttctcagtattgtgtttagttctttgaaaacataaaagcctgcaatttctcgacaaaacaacacaagattttttaaagatggaatcagaaactacgtngtgtggaggctgttgatgtttctggtgtcaagttctcagaagttgctgccaccaactctttaagaaggcgacaggatcagtccttctctcgggttctggcccccaaggtcagagcaagcatcttcctgacagcattttgtcatctaaagtccagtgacatggttccccgtgggtggcccgtggcaggcccgtggcatggcgtggcttcagcttgtctgttgaaagttgtttgcaagggaaaagagggaaacatctnggggcctagtttcaaaccttttgncttcaaagnccttcccccacccagactgctttagcgtttttaggttttt

SEQ ID NO: 174577 - DNA, 829 bp, Homo Sapiens
gccagctcggggcagaggccgccatccaggaaaaggtgtgagatccccgggggagaagtcacgctatgagacctcactgaatctgaccaccaagcgcttcctggagctgctgagccactcggctgacggtgtcgtcgacctgaactgggctgccgaggtgctgaaggtgcagaagcggcgcatctatgacatcaccaacgtccttgagggcatccagctcattgccaagaagtccaagaaccacatccagtggctgggcagccacaccacagtgggcgtcggcggacggcttgaggggttgacccaggacctccgacagctgcaggagagcgagcagcagctggaccacctgatgaatatctgtactacgcagctgcgcctgctctccgaggacactgacagccagcgcctggcctacgtgacgtgtcaggaccttcgtagcattgcagaccctgcagagcagatggttatggtgatcaaagcccctcctgagacccagctccaagccgtggactcttcggagaactttcagatctcccttaagagcaaacaaggcccgatcgatgttttcctgtgccctgaggagaccgtaggtgggatcagccctgggaagaccccatcccaggaggtcacttctgaggaggagaacagggccactgactctgccaccatagtgtcaccaccaccatcatctcccccctcatccctcaccacagatcccagccagtctctactcagcctggagcatgaaccgctgttgtcccggatgggcagcctgcgggctcccgtggacgcggccgctgtcccgctggtggcggcgatcgctctg

SEQ ID NO: 174578 - DNA, 213 bp, Homo Sapiens
tctagaggagttccccggggttcggccacaaggaaagcatttcaaattgaaaatgccaaaggaaagaagtaataagagagaaaaggggaggggtagggggagaataaaaccaacaaccaaaggaaagcatttcaaattgaaaatgccaaaggaaagaagtaataagagagaaaaggagaaaaacattgcctttgccgatcccgggatccttag

SEQ ID NO: 174579 - DNA, 412 bp, Homo Sapiens
  misc_feature (33)..(33): n is a, c, g, or t
  misc_feature (44)..(44): n is a, c, g, or t
  misc_feature (50)..(50): n is a, c, g, or t
  misc_feature (56)..(56): n is a, c, g, or t
  misc_feature (63)..(63): n is a, c, g, or t
  misc_feature (70)..(70): n is a, c, g, or t
cccttaggggttccaaacccctagctcaaagcnccccggaaacntttaanttttgnaaacttntttttcntttggtaaaataaataaaacattcaatgtttttctccttttctctcttattacttctttcctttggcattttcaatttgaaatgctttcctttggttgttggttttattctccccctacccctccccatttcttattattcagaatataaacctgcaaagctctgctctgttttggttttgaaagtttaagcttttctgcttctgtgagagcacaggcttctgtcccttttgattccaactgaacttttgtgttctctaatgatactaacacggtgtaggttttacagtctcctaatttgtactggtaatgcatattccaaataaataggttcttttgttgc

SEQ ID NO: 174580 - DNA, 854 bp, Homo Sapiens
  misc_feature (83)..(83): n is a, c, g, or t
  misc_feature (253)..(253): n is a, c, g, or t
ggaacaatccacaacctttattaatgggtgagagctttcactacacctttaggaaataaaaagtaaaattacaacataggtcntaggccttggcgagcctgaaaaagaagattgggaaggagggcacagggtccttccacctccctggaaaggtgcagaatgagccaggcctaactacagggccatgagcctctagaagcttaggggggaataagaaacactgtgaacttagatatataaatagagagagacncaagcaataggccgggcctgactcccagacccctgcagatcatggctaaggccttacatcctcctctgtcatactggagtaggaggcaggggaagtcatctttggagtattttggtttttcttatttatgtacaaaaaagtccacatccacaatccaaaataaagtcctctgtccccatctcctgaaaactgccctgtcctcaagtttttcccaccctgtctgtttgggcccgaagggaatggaatagacatgaaagaagacaatggatgtgaagaagaaatagagcccatgggtttgggtaataagaagagagagcatttggggttcaagagaggtgccccttccccaagaggctctagacatagtcaaggctgagggttcagcccttctcctagctcacataccatcccatttgcctcccactgcctaggttaacatacccaaaggaatgtgccaccatctaaagaacatttccagaaacagaccccagtgtccttaaaaagaggttaaatattaaccctttgggtgctggccttgtcaggcagagatgaggccaaaagtaggcatctgtgaaggtctgtctggccctttgccgaaccc

SEQ ID NO: 174581 - DNA, 445 bp, Homo Sapiens
  misc_feature (40)..(40): n is a, c, g, or t
ggcagtttcagaaaagggacagaaaaactttaaattggantgtggatgtggacttttttgtaccataaataagaaaaacccaaaatactcccaaagatgacttcccctgccctcctactcccagtatgacagaggaggatgtaaggccttagccatgatctgcaggggtctgggagtcaggcccggcctattgcttgggtctctctctatttatatatctaagttcacagtgtttcttaatcccccctaagcttctagaggctcatggccctgtagttaggcctggctcattctgcacctttccagggaggtggaaggaccctgtgccctccttcccaatcttctttttcaggctcgccaaggcctaggacctatgttgtaattttactttttatttctaaagttgtagtgaagctctcacccataataaaggttgtgaatgttc

SEQ ID NO: 174582 - DNA, 484 bp, Homo Sapiens
taggacctctgaatcaagaggactgagtttgtgggtgaaccttgaaggtgctctttctgctacaagggccctgggagatagcatggacgtgcattgagaagccagcctcagaccttagcttgaagcagcttgaggccagacctactgtagcctcagcatcttgctaggaggcatggaagtgatctatcctgccaggaggcctcagagtgatctgtcctgtgaggcatttaggggctttcaggaatttagtaaaaggtggagtatgcctttccagtatcttccatcttcctttgtatacttgtccttcctcccatttcctccctttggcccgaggtaggaggatggagggaggctgctactctaccacttcctgtgtgcctctactgtggcctcaaccctggcaattatagctactcccatcccttacctgggcatgtgtgagcccttctcactggattttatacccttgtgtctgtgtacataa

SEQ ID NO: 174583 - DNA, 1166 bp, Homo Sapiens
  misc_feature (72)..(72): n is a, c, g, or t
  misc_feature (283)..(292): n is a, c, g, or t
gtggaagtaagttccacccggtgtataagccccttccaggaactctccctttttggcgtattgtgttttccnaaaacggtttgggattaaccgcccgcgggcgcgttcttttatcgtggggaagaattccaaagcccgtgtgttcactgagccaggattttccttagggaagacaaggtattggcccaaggttccattttcccttctggggcccggggcgccaaagcaaaatgttttggaaaagttttttggaggggcggaggggcccggccatattaataannnnnnnnnnaatgggtggggttagaaaatactggatttaatagaaaatatcacattgtaaacaaatccattgatccatgagcttaaaacagaatgacggcacaatcacatagaaaagctaaagacaaaatactggtaccaaacatagcccttaggcctgggctaggctctcaaaggtctttcccagaaatggaggcagcagtagcttcaaacaggcacaaaaacagccaggaggaggcagcatccactccatgaaggcctaagacaatgaaaggaagccagagcaacagaccaccttgggatccggggagaagggtaaatgggcaaaagggttgtatttcctgatgctctcagaacatcagaccacaccatgtgaatttaagcaggactattttaagtggggaaacaatactagaagcatttggtgtattttcctggcactcacctcctaggtaagcaggagagcgggacactcaggagttgtgactaaactcacacttaagctgcctgcccagaccgtccccttggctgaacacaacactgaaattgtggcagtgtctgttgccccagtggacctcccacttactaatgagtatgtaaaacagaggagccacagtgaggctttcacaaaaacacagggctctgggggaaaaacggcttccaccttctgccttttggtgctggagagtccctgagggagagaagtttgacgtggctgggccccttgaggctctggatttatcaatagaagcctcctctttggccccacccacccaaatccacccccaggttctcctagttcagagaaaagctgtgaaagtggaagaaggaagggatcgttttctttccattgcacttgttactgaccaaagagactgcttccc

SEQ ID NO: 174584 - DNA, 1084 bp, Homo Sapiens
tctagaggatccctttgtgtgtgtgtgttagggagtgagggtctctcaagcctccaggtctcccagcccctccttctctgtctctacctctctgcctgtctccttccacctccttcccagagtgggactgtgtcttgcttcatgattcctctctccattactctccctgcccttctctgttggggtgccttatcctgagccacctcctctccccgcttgcctctgctcccctgaacctgggagacagatgaggagactggctcagcaaggcccctggaggtcaagcttggcctttgcctcctgttcccatcccccagccctggctcctaggtcctcccaactgggagggagtcctccgtgcctcacttagagggttctgaacccgttccctacacagaaatcttggaaaccaaatgctgctgagtaaggatgaagctttgagcctcctgcccctgctttctgcccagggagggagaaggaagagggggagctggtttttctggaggttcccccagaggccctcctgtccgaaaagaaaaggaccttgattctgagcccagggtcggaacccattgcttcagaagagttgtcattccctcggcttccaggtcccaacccagggttgggttgagtgagtcccacaaagggcaagtggggcccgaggaagcctctctggggccaggggtagctgagcttaaaggccctgggtcctgccagttccaggagggccatgtctgtgcctctgtgtacccctccacccgctgcgggctgagggaggtgcagggccttctctgacccctgcctgagctgttccagggctggagcaggtgtaccctgagcaggggcagctggccactcccagttctcaccaagtcacctccctccttgtacaaggtttgcgtcccggagccgggtgccatattgaggaccctcgtcctccagactgggttggccaggagtcaggccccagcagccctcctgcccccaaaagcttttcccagtctgggtggggcaggaacttcttcgctgcccttttccagcccccggtttttgggcccagaaaaagggctttccccaagggtga

SEQ ID NO: 174585 - DNA, 302 bp, Homo Sapiens
aaatcctaatgctcaaagtaaaccagattcacacccttctgttagcaggggagagaatggttttaagtatagtgcatctcaggaggaggaattaaaatgtgaaaactatatactgccatcagaggaaggaggaagtcactgaaacttgacccatgacttgtcagtttccttccaaattaatagccgctgtcaagaagactgcataattaactctcatcctgttccgctgaagctgctagcaccacgctgccactcaaagctgcctgctctcggtgggcccctagagtgtcgtccggcttgca

SEQ ID NO: 174586 - DNA, 433 bp, Homo Sapiens
cccggctcagttcactataagaaactatatgtatctcgtggatctgccagtaccagccttccaaatgaaactctttcagagttagagacacctgggaaatactcacttacaccaccaaaccactggggccacccacatcgatacctgcagcatctttagtcaagttggaggagaaagacaacacttggtctaagacacggcagcaagacatccctgcatattgttccagataaaaatgaaagctgctcacacccacttgcctccccaatctgttaaacagcttcgtgtctagtatgagctcagtacttgccctgtgaaaatcccagaagcccccgctgtcaatgttccccatccacaccctgcttgctcctgtgtaacagctcagatgatgaataataataaaactgtacttttttggatggtgctaaaaaat

SEQ ID NO: 174587 - DNA, 697 bp, Homo Sapiens
cgggtgactctgaggatccccactctaggggcagagaacctgtatgtgccacgtggaaaaacaggacaccagagcccaccagacagtgccggccagcagagaagcagagagccagcgccacacaacatcaagaaggccgacaaccaggtggaaaccaagacggagctcagacccaccacatcgccccagaggcttttccagcacccatgatgttccggactgacctaaaaactaattgtcaagaagccaagggtgaggaggcaggaacgcacctccggttggaggcacccaagcttgccagccacagagcgccccaaagtcaccgtcatcccagcccctggccttcctgccgccctccggggccatggcactgctgttcagctcaggcacaggggcacagcagaggtttgggaagcggtctccccaccggcactgggattggcgggtccaagcccagcaaccgccttcgctccacaacacacaccacacctgggactgtttttaatacatagcaacagactgggttatttatttaagatgtgtattgtgtcatatgaagtttaagagacataaatggcattttgttatttattaagacaaactccaattgttctctggctgtttttttcagttgtgtctagcaaaatacttatctgccctttgaaataaaatgtttttgtttaaaaaatctcaaaaa

SEQ ID NO: 174588 - DNA, 975 bp, Homo Sapiens
agaggccggggcctccgggcggcgccgtgtccgcgaccgcgtaccctgacacccccgcggaattccctccgcacctccaggcgggtgcgatgcggcgccgcttttggggcgtattcaactgtctgtgcgccggcgcgttcggggccctggccgccgcctccgccaagctggccttcggcagcgagtgtaggtggtaagagacgtcggggactgaggcctcttcccttaccagggacctaaaaccttttctccggttgggctagttcgctctcggggaagaactacacctcctacatccaccctctacctctcattttaagtcccttgtgcctgagcatttctctccacgtgactcttaaggtgagcatgggtttatgcgtcttaggcattattgtgatggcgagcaccaattctctgatgtggaccttctttagccggggcctcagtttctccatgtcttcagccattgcatctgtcacagtgactttttcaaatatcctcagctcggccttcctgggctatgtgctgtatggagagtgccaggaggtcttgtggtggggaggagtgttccttattctctgcggactcaccctaatccacaggaagctccccacccacctggaaacccccttccacacaagcagcagtagcacccacttggctaaacggaccagctggaaaaatcatggatgggggcccaaccttgggatgtcatgtgggaatggatcctaagggccaaccagcttgtgcaacccttcttgaccattaagcccaagggaaaacaacgccttcctgaagggagcaagggctcctgggctcctgttaagagaagaaggtgccaacttgggcagcaagtgcttctaaccgggaaaagtgttttttgaatcatacttggaaccagagggctttttggaaattctttacctcccccacagggccctacaccccccaggtgttaacccctttccccgcaaa

SEQ ID NO: 174589 - DNA, 853 bp, Homo Sapiens
cccacgcgtccgactgggtacccaccagcaagcatgcagttactgtgtcttatttctatgacagcacaagaaatgtgtataggataatcagtttagatggctcaaaggcaataataaatagtaccatcaccccaaacatgacatttactaaaacatctcagaagtttggccagtgggctgatagccgggcaaacaccgtttatggattgggattctcctctgagcatcatctttcgaaatttgcagaaaagtttcaggaatttaaagaagctgctcgactagcaaaggaaaaatcacaagagaagatggaacttaccagtacaccttcacaggaatccgcaggcggggatcttcagtctcctttaacaccggaaagtatcaacgggacagatgatgaaagaacacctgatgtgacacagaactcagagccaagggctgaaccaactcagaatgcattgccattttcacatagttcagcaatcagcaaacattgggaggctgaactggctaccctcaaaggaaataatgccaaactcactgcagccctgctggagtccactgccaatgtgaaacaatggaaacagcaacttgctgcctatcaagaggaagcagaacgtctgcacaagcgggtgactgaacttgaatgtgttagtagccaagcaaatgcagtacatactcataagacagaacttaaatcagacaatacaagaactggaagagacactgaaactgaaggaagaggaaatacgaccggttaaaaccagaaattgataatgccagagaactaccagaaccagagggattctttgacctcagaaactacaggaagtagaaaattcggaacaaaggacct

SEQ ID NO: 174590 - DNA, 1118 bp, Homo Sapiens
gggaagatggattaggggatgataaagaccccaacaagaagatgaaacgaaacttaaggaaaattctggatagtaaagcaatagaccttatgaatgcactaatgaggctaaatcagatcaggcctgggcttcagtataagctcctatctcagtctggccccgttcatgccccagtcttcacaatgtctgtagatgtggatggcacaacatatgaagcctcaggaccatccaagaaaacagcaaaacttcacgtagcggtgaaggtattgcaggcaatgggatatccaacaggctttgatgcagatattgaatgtatgagttccgatgaaaaatcagataatgaaagtaaaaatgaaacagtgtcttcaaactcaagcaataatactggaaattctacaactgaaacctccagtaccttagaggtaagaactcagggccctatcctcacagcaagtggcaaaaaccctgtaatggagctcaaggaaaaaagaagaggtctcaagtatgaactcatctcagagactggtggaagccatgacaagcgctttgtaatggaggtagaagtagatggacagaaattcagaggcgcaggtccaaataagaaagtggcaaaggcgagtgcagctttagctgccttggagaaactgttttctggacccaatgcggcaaataataagaaaaagaagattatccctcaggcaaagggcgttgtgaatacagctgtgtctgcagcagtccaagctgttcggggcagaggaagaggaactctaacaaggggagcttttgttggggcgacagctgctcctggctacatagctccaggctatggaacaccatatggttacagcacagctgcccctgcctatggtttacccaagagaatggttctgttacccgttatgaaatttccaacatatcctgttccccactactcattcttttagcaaatgacagaagctaattcctattgaacaacaatacagtacaacacagaatgttagagaaaaagcctttttatcctgctttctttgaacacatacttgatcaaaattatttgtaaagaacatctttcctactttttgattttaacaaatgcaaatttagttctctaaaacttg

SEQ ID NO: 174591 - DNA, 852 bp, Homo Sapiens
gaagtgcctcaggagtcctgacgcagtgtcttgggcgctaacggcggcggcggccttgtgtttagactccagaactccccacttgccgcgttctcgccgccgcaggctcccgggacgatggtgccccgcctgctgctgcgcgcctggccccggggccccgcggttggtccgggagcccccagtcggcccctcagcgccggctccgggcccggccagtacctgcagcgcagcatcgtgcccaccatgcactaccaggacagcctgcccaggctgcctattcccaaacttgaagacaccattaggagatacctcagtgcacagaagcctctcttgaatgatggccagttcaggaaaacagaacaattttgcaagagttttgaaaatgggattggaaaagaactgcgatgagcagctggttgctctggacaaacagaataaacatacaagctacatttcgggaccctggtatgatatgtacctatctgctcgagactccgttgttctgaactttaatccatttatggctttcaatcctgacccaaaatctgagtataatgaccagctcacccgggcaaccaacatgactgtttctgccatccggtttctgaagacactccgggctggccttctggagccagaagtgttccacttgaaccctgcaaaaagtgacactatcaccttcaagagactcatacgctttgtgccttcctctctgtcctggtatgggcctacctggtcaatgcgtatcccctggatatgtcccagtattttcggcttttcaacttaactcggttacccaaacccagtcgggatgaactttttacttgatgacaagggcagaaaccttcttgg

SEQ ID NO: 174592 - DNA, 303 bp, Homo Sapiens
tgcagctctagtcttacttcctttgcttcctttggtgtttttttcaggtcgtgttgatagatgactgtgggtccaggcgtcagatcatccctttcctccttaaatgttggtgaactgagagaaaagtggcacttggcgctctgtacccctctcttcctgggtggccttgtcccattccaggcttcagccatcacctctgtgggtggtgcctaaaggtctgttccacattcctgtcccttctgagttccatgacacattttcagccactgttaaaaaatctacctggttgtcccataaacaatt

SEQ ID NO: 174593 - DNA, 533 bp, Homo Sapiens
  misc_feature (424)..(424): n is a, c, g, or t
  misc_feature (439)..(439): n is a, c, g, or t
  misc_feature (449)..(449): n is a, c, g, or t
  misc_feature (513)..(513): n is a, c, g, or t
ctctagcagactccccgtatacgtgtggaacgaataggatggggaaaaggcagagggctactgagtgtccctttaaaaactaacccactgaatattccgtgtgatctagaacagtgtggcagctttcacagcacaggaccgttcatcgggggcctaaacgtttccctcagctctgtcaccaactcacttctctcggcttcgttgtctgtaaattggatgaaaagatgctctaatgcctttcaggctcttagaagccatagatttggacaatgcccagcaagatgggtgtccttccaggcctcttcccctttcctccatctctggcaacagtccttggggttcggcaattgtctggattttttttctttctgcagttatgtgtatgtgtggtcgtgtgaaagaaaaacaaactcttgtccaaggngaaaatgttgagganggggaaaganaaattaacaatttccagggtcaggaaactttggcaacaagttttccttagaggggactcaaaanacacccacaggaaccaactt

SEQ ID NO: 174594 - DNA, 113 bp, Homo Sapiens
cctccagaaaagagaatttgcttgtcttctccctttgtgttccatctgggtccccaaccaagtggatgtgcctgcccacgctgagggcagatcttcactgagtccactgaaaa

SEQ ID NO: 174595 - DNA, 500 bp, Homo Sapiens
tatacgtgtggaagaatccttccagttttagctcctacttcaacagcatttccttatctatacaataacccaagtgggatgtctccttatgcttctcagggttttccatttcttcctccatatcctccacaagaagcaaacaggagtatcacttctttatctgttgctgacactgtttcttcttcaacaacaagtcataccacagccaagcctgccgctccttcatttggtgtcctttcaaatctgccattacccattcccacagtggatgcttcaataccgacaagccaaaatggttttgggtacaagatgccagatgtccctgatgcatttccagaactctcagaacttaagtgtgtcacaacttcacagatatgaatgaacaagaggaggtattactaggaacagtttcttgacttttgccttcaacttaaaacaaattatttacccgacaaaggtggactttaggtaaaaagtatttgagggaactaggccaagga

SEQ ID NO: 174596 - DNA, 172 bp, Homo Sapiens
tgttaaagagcaccatgaagatcatggtatacatgagtcacgtcggccttgtctgtcactagcctccaaatatttagccaaaggaacaaatatctatgttccttcttcatatcacttgccaaaggagatgaagtcaataaagaaaaaacatcgatcgccctttcatcgatcg

SEQ ID NO: 174597 - DNA, 278 bp, Homo Sapiens
ggatcccccgatcgatgaaaggtattcgtattcaaccctgacaatacaactataaggtagtttaatcaaggttaagaaaatatgtccaaattcaagttaaataggaggtgatcgagcagggatgtgagtctgtgtcctctaatttcaaagtccatgctttttcttgactttgtgacatacatgagggacaacaaagaaaatctgatgaaggaacctatcaaaccagagggaacgaccagcattcctgctcactattaaaaatcaggctggcacagtgg

SEQ ID NO: 174598 - DNA, 445 bp, Homo Sapiens
  misc_feature (85)..(85): n is a, c, g, or t
  misc_feature (103)..(103): n is a, c, g, or t
  misc_feature (388)..(388): n is a, c, g, or t
taagtagtagatgatactggggttatttgcggtaaaagaatatcagatttttatgaatgtcttaaatattacctataaccacagncagccacatgccccaggnttctcagtaaccaatctcagttaccaaatattgtcatgttctttgtccacatactaggtttttggttttaaaaataaggtcgctgcagtttacatgcccactgctactgggagggcatacactggggccacttggatagggctgtcattttctgcaaatcaagagacccatatcacctcctcaggagctctggcctatttttgtcctattcttgtctaccctaatagatatccttgggctacatttatgataaatgtttcctgaccatcctttccttctttaganaccgatcagataaggacaagcaattgtcaattatccagcacttgacctgggcttaat

SEQ ID NO: 174599 - DNA, 788 bp, Homo Sapiens
ggtattcaggtgtatgtggatcaagttgatgaagacatagtggcagtaacaagacactcacctagcatccatcagtctgttgtggctgtatctagaactgctttcaggaatcccaagacttcattttacagcaaggaagtgcctcaaatgtgcatccctggcaaaattgaagaagtagttcttgaagctagaactattgagagaaacacgaaaccttataggaaggatgagaattcaatcaatggaacaccagatatcacagtagaaattagagaacatattcagcttaatgaaagtaaaattgttaaacaagctggagttgccacaaaagggcccaatgaatatattcaagaaatagaatttgaaaacttgtctccaggaagtgttattatattcagagttagtcttgatccacatgcacaagtcgctgttggaattcttcgaaatcatctgacacaattcagtcctcactttaaatctggcagcctagctgttgacaatgcagatcctatattaaaaattccttttgcttctcttgcctccagattaactttggctgagctaaatcagatcctttaccgatgtgaatcagaagaaaaggaagatggtggagggtgctatgacataccaaactggtcagccccttaatatgcaggtctttcaggtttaatgtctgtattggcagaaataagaccaaagaatgacttggggcatcctttttgtaataatttgagatctggagaatggatgattgactatgtcagtaaccggcttatttcacgatcagg

SEQ ID NO: 174600 - DNA, 150 bp, Homo Sapiens
atgatcttaaacattaaccctgtggcattttctcatcaatagtaagttgatcaaatgagtgacccagtctcagcaatttaacatatcatccctttcagctttaaatgtatatttaatcaccttagcccatttttcaatccacaaaagtaa

SEQ ID NO: 174601 - DNA, 370 bp, Homo Sapiens
gatagacgctcgggccccctattatagaagttcaatagcaggaatgagaaaagcagtctactaaaatgtgcctataggaagactagtctcatgctgttaccttctgaaactgtacctttagtaaatcaattgttttgcaaagaagttatggcctacttagaatctaaaatttgttattcaaattaaatggctgtgaacaatgttaaatagcttcagtttgtccaatagttttaaaggccataatcatcttttctggttaatatcttgagtaattttaaaatgttgacaccttaatcggtcccaggtatgtgctattgaaacttctaaaactaggcctaatcctagaaatttcactagcagtgatgagaac

SEQ ID NO: 174602 - DNA, 900 bp, Homo Sapiens
ctgaaaaggaagaatgctaagatgatttcagatatcgaaagagaaaaggcagcgtatgattgaagtccaggatgaactgcttcggttagagccacagctgaaacaactacaaacaaaatatgatgaacttaaagagagaaagtcttcccttaggaatgcagcatatttcttatctaatttaaaacagctttatcaagattattcagatgttcaagctcaagaaccaaacgtaaaggaaacgtatgattcatccagccttccagctctgttatttaaagcaagaacacttctgggagccgaaagccatctgcgaaatatcaaccatcagttagagaagctccttgaccagggatgagaagagcagtctactaaaatgtgcctataggaagactagtctcatgctgttaccttctgaaactgtacctttataaatcaattgtttcgcaaagaagttatggcctacttagaatctaaaatccgtcattcagaattcaaatggctgtgaacaatgttaaatagcatcagttgtccaatagttttaaaggccataatcatcttttctggttcaatatcttgagtaactttcaaacatgttgacaccttaatcggtcccaggtatgagctataataaacttgtaaaattacaacaaccctcaaagacaccacacgagctcgcgcaacaggcgagaagcacacaagcgacgagcagcaaaacggagaagaaacacggggcgcaacgaacacccagagaaccgacggaaaaacagggacaaaaaagggaacgaacgcagcaaggaacacccggaaaacaggagggcccacgcacaagcgccaagcgcaccaaagggcgaaacagcgcgcccgagcgcggaaaagacagacgctggggcgcaagaacgg

SEQ ID NO: 174603 - DNA, 426 bp, Homo Sapiens
acattgattcttggctgtgtcgctgtcgtctgccctcgtctcgtgtgggaaggtcctgctgtgtcgaagacatatggcttcccttgttgtcacagccacatgtcggtttgctttgccttcatctattacatccatgacttcctcagggctcgacacaaaccgctcagtgcacccctttacatacgggactctgtatttatcttcatgaacagccaagttggtcttggatacatcaagtaagtcccttattttgtccaagtagatctcaaaataggaaacctttatgtgaaactccaggttcccatccatggagtagatatggtcaaagatatcatgggcaattcgtgggatgatccccatgagctgggggtcatgcaagcttacccctccatggtgtgggtttttcctgatgaagttctgccatac

SEQ ID NO: 174604 - DNA, 359 bp, Homo Sapiens
aaagagggcgggggaggaggctacaatcaaactttcctggcccattctcttcgaagattccttcctattctggctaagaatcaagccccgctcctgcagaaggggcaaggaaagcggccgattcctgggtcgacgagaatctcccaagaactgtctcgactaggagaagctaggggctacccatgacctacaacccgcgaggtcctggaggtagcaataaggccgccttcgacatttctctcccagcttggatgggagtgagcgggttgagaaaatgcaggatgagaaatccaaatataactaacttctggccaactctctgcctgtatgactctaggtaccttggagccagtgccagg

SEQ ID NO: 174605 - DNA, 255 bp, Homo Sapiens
ccccacccaatcacaaggggaccaggaaagtgctcttgcaccactggaagtatttggcaaacagctctaatgaccaccacagtataatgtgtacagggtaaagaatcaccccactttgaagccttttaaaggggttggcgggatgaggaaatctgccttctggaacacaggaaagaataatgccacaggcctcctatttcagactctggaattgaactcccgccccgcaaccagtgacatgcaaagaatcatgcc

SEQ ID NO: 174606 - DNA, 284 bp, Homo Sapiens
catgaatggcttggtacatcctctcggtaaccaaaaagtttacactgtatcaattcaaataagagctggttcattaaaagaacgtggcttcttcacctcatacttgctctgtctcttaccatataatatgtccagttactctttaccttccaccttcattttaagctttctgaaatcctcaccagaagcagatgctggcacacacttcttatacactctgccaagctgtgagccaaataaacaatttttctttataaatagcactctcaagtatttctcatatg

SEQ ID NO: 174607 - DNA, 810 bp, Homo Sapiens; identical to SEQ ID NO: 807
  misc_feature (797)..(797): n is a, c, g, or t

SEQ ID NO: 174608 - DNA, 816 bp, Homo Sapiens
ggtgggcaaagaaaataccattgaacatcttctacctcttttcttagctcagttaaaggatgagtgtcctgacgttcgtttgaatatcatctccaatttggattgtgtaaatgaagtgattggaatccgtcagctctctcagtctctccttcctgccatagtggagctggcagaagatgccaaatggagggtcacgcctggccatcattgagtatatgccgctgctggcaggccagctgggtgtggaattctgtgatgaaaagctgaattcttgatgtatggcttggctcgtggaccatgtatacgccatccgagaagctgccaccaacaacctcatgaaactagttcagaagtttggtacagagtgggcccaaaatactattgttcccaaagtgttagtaatggcaaatgatcctaattacttgcatagaatgaccactttattctgcattaatgcactgtctgaggcctgtggtcaggaaataactactaagcaaatgctgcccatcgtattaaaaatggcaggagaccaagtagcaaatgttcgcttcaatgtggccaaatctctacaaaagattggaccaattctagataccaatgctttacagggagaagtgaagccagtactacagaagttaggtcaagatgaagacatggatgtcaaatactttgcacaggaaagctataagtgttcttgcattggcataaggaagagcaggaaggaaaaggcctttactagattcttgtcacaaatttctagtcaatggttcctaactggtgggagaaagatggaaaacctttcagatctcatcccag

SEQ ID NO: 174609 - DNA, 799 bp, Homo Sapiens
gggttaagtagcagtatgtattctagccaggggtcttctggatctagccagtccaaaaattcatcccagtctggggggaagccaggctcctctcccataaccaagcatggactgagcagtggctctagcagcaccaagatgaaacctcaaggaaagccatcatcacttatgaatccttctttaagtaaaccaaacatatccccttctcattcaaggccacctggaggctctgacaagcttgcctctccaatgaagcctgttcctggaactcctccatcctctaaagccaagtcccctatcagttcaggttctggtggttctcatatgtctggaactagttcaagctctggcatgaagtcatcttcagggttaggatcctcaggctcgttgtcccagaaaactcccccatcatctaattcctgtacggcatcttcctcctccttttcctcaagtggctcttccatgtcatccctctcagaaccagcatgggagttctaaaggaaaaatctcccagcagaaacaagaagccgtcccttgacagctgtcatagataaactgaagcatggggttgtcaccagtggccctgggggggaaaacccactggaccggccagatggggggtgagcacaaattcttccagccaatcctatgtcctccaaacataacatggccaggaggagaatttcagggcaagcgtgagaaaagtgataaagacaaatcaaaggtttccacctccgggagttcagtggattcttctaagaagacctcagagtcaagaaatgtggggagcacaggtgtg

SEQ ID NO: 174610 - DNA, 284 bp, Homo Sapiens
attgcctcacgggtccccaggacgctcaccatttcttgccgtgatggcggatctgttccgagtcatggtgcaggtcgaagtgggggaagtaggtcttggtggaaggggtagacaggtgaacatcctctccaggacctcggccccaaagtcctcctggtgccccagcaccttctcccacacatgttggatcagctgcttttcgtcctcggtcagcatggcggcggccaagggtctgcgctgggctggctggctgccccgcgtactctgcgttgttaccactgctt

SEQ ID NO: 174611 - DNA, 797 bp, Homo Sapiens
  misc_feature (740)..(740): n is a, c, g, or t
gggggttgtctgtggccggaggctgatcagtgttctagaacagatcagacattttgtaatgatgcctgaaataaacactaaccacctcgacaagcaacaggttcaactcctggcagagatgtgtatccttattgatgaaaatgacaataaaattggagctgagaccaagaagaattgtcacctgaacgagaacattgagaaaggattattgcatcgagcttttagtgtcttcttattcaacaccgaaaataagcttctgctacagcaaagatcagatgctaagattacctttccaggttgttttacgaatacgtgttgtagtcatccattaagcaatccagccgagcttgaggaaagtgacgcccttggagtgaggcgagcagcacagagacggctgaaagctgagctaggaattcccttggaagaggttcctccagaagaaattaattatttaacacgaattcactacaaagctcagtctgatggtatctggggtgaacatgaaattgattacattttgttggtgaggaagaatgtaactttgaatccagatcccaatgagattaaaagctattgttatgtgtcaaaggaagaactaaaagaacttctgaaaaaagcagccagtgggtgaaattaaagataacgccatgggtttaaaattattggcagcgaacttttctcttttaaatggggggataacttaaatcatttggaatcagtttggttggaccattgagaanaattatacgaaatgtggaattaatgtagggtaaattgaattacaggaaaaaaattta

SEQ ID NO: 174612 - DNA, 947 bp, Homo Sapiens
  misc_feature (798)..(806): n is a, c, g, or t
gggggctcaaagcgggcgccatccgggaccggcggttgtctgtggccggaggctgatcaggattattgcatcgagcttttagtgtcttcttattcaacaccgaaaataagcttctgctacagcaaagatcagatgctaagattacctttccaggttgttttacgaatacgtgttgtagtcatccattaagcaatccagccgagcttgaggaaagtgacgcccttggagtgaggcgagcagcacagagacggctgaaagctgagctaggaattcccttggaagaggttcctccagaagaaattaattatttaacacgaattcactacaaagctcagtctgatggtatctggggtgaacatgaaattgattacattttgttggtgaggaagaatgtaactttgaatccagatcccaatgagaataaaagctattgttatgtgtcaaaggaagaactaaaagaacttctgaaaaaagcagccagtggtgaaattaagataacgccatggtttaaaattattgcagcgacttttctctttaaatggtgggataacttaaatcatttgaatcagtttggtgaccatgagaaaatatacagaatgtgaatatgtaggtaaatgattacagaaaaatttatctgcttaacaaacttagaatgacttttttccttttaaatttagttctatcattaaattatcactaaaattagttctatcatttggtactatcattaaatgtattatatacacctgatacttttaaaacttgggttggaaaaaactaacctaataattttgtatnnnnnnnnntggatatggggttctgtttcctaacggaattttgggaaagaattttgttaaaatgaaagcggaccaaaaaaacccttaatttaaccctttgccagatacctacttatagggggaaatttggaacaaatgagatgaaaactc

SEQ ID NO: 174613 - DNA, 143 bp, Homo Sapiens
tagcacagctaggagcctctgacattgtctggtgttttacgtggtctgttcatcaaaattccccttttcagtttttaagaatgttcgtctaacagaagaaaatgctgtaaatatttggtaacaacattttttttaacaaggcc

SEQ ID NO: 174614 - DNA, 1363 bp, Homo Sapiens
acccgccatggagcggcgtcgctgcgcgccctgctcctcggcgccgtgggctgctgctcctgctcctgcccctctcctcttcctcctcttcggacacctgcggccctgcgagccggcctcctgcccgccctgcccccgctgggctgcctgctgggcgagacccgcgacgcgtgcggctgctgccctatgtgcgcccgcggcgagggcgagccgtgcgggggtggcggcgccggcagggggtactgcgcgccgggcatggagtgcgtgaagagccgcaagaggcggaagggtaaagccggggcagcagccggcggtccgggtgtaagcggcgtgtgcgtgtgcaagagccgctacccggtgtgcggcagcgacggcaccacctacccgagcggctgccagctgcgcgccgccagccagagggccgagagccgcggggagaaggccatcacccaggtcagcaagggcacctgcgagcaaggtccttccatagtgacgccccccaaggacatctggaatgtcactggtgcccaggtgtacttgagctgtgaggtcatcggaatcccgacacctgtcctcatctggaacaaggtaaaaaggggtcactatggagttcaaaggacagaactcctgcctggtgaccgggacaacctggccattcagacccggggtggcccagaaaagcatgaagtaactggctgggtgctggtatctcctctaagtaaggaagatgctggagaatatgagtgccatgcatccaattcccaaggacaggcttcagcatcagcaaaaattacagtggttgatgccttacatgaaataccagtgaaaaaaggtgaaggtgccgagctataaacctccagaatattattagtctgcatggttaaaagtagtcatggataactacattacctgttcttgcctaataagtttcttttaatccaatccactaacactttagttatattcactggttttacacagagaaatacaaaataaagatcacacatcaagactatctacaaaaatttattatatatttacagaagaaaagcatgcatatcattaaacaaataaaatactttttatcacaacacagtacatatttgtcatttttaaaaagccacacaatagaaacaagacaccaagatatttaattatcttgttgactcctgtaaaatagctaaacactcatcattcgcggtgcaatactcatagacataagttcctgaaacaatagtttgcatgcgtaaggcattcgcaccaaagaaatctgggttttattgcggcagcccctgcattcatatgtatgggtcctggtgttggcaatcgccattattccacaaagattgcaaacatgaacccc

SEQ ID NO: 174615 - DNA, 560 bp, Homo Sapiens; identical to SEQ ID NO: 55252
  misc_feature (509)..(509): n is a, c, g, or t

SEQ ID NO: 174616 - DNA, 525 bp, Homo Sapiens
cccaggcatatggtatctctttgcatgtcattagctatttctattcagctattaattcgctgaatttaagtagaatagcagttactgatacgtttgcaaaagagaaaacaagccatattgctaagaaaaggatagtaagctgcttagaaagaaccagcctgtgttggaaataattctcttctagataatttaccttattttcttggcttgtactaattgaatggaagtggttaatttgttcagagtttattgccgtttgatgccaccccagtctataattctgtgtgactttccatattgaaagagtagggttagtagccaggttgtcagtcttttacaaatgtctacataaatgtctacataaatctgaaagtggtttatattcaaggttagtttttcagtagcgtctcctccttattcattcacttttactgtgaagactgaaatccaaaagccaggttccccaaaaaagtatttttaaaaaattttagggggacccaaataaatagagggaagaccaattat

SEQ ID NO: 174617 - DNA, 721 bp, Homo Sapiens
acaagatcaatacacaaaaaccaactgtattttttatattctaataacagaacatacactcactataagtcctggcaattccactctttgatggaataccccaaaataggggttacacagaatgaggaaagcaaagtaatacaatcagggtgtagcacatagggaacatctacgatactaacaatgttgcatttttttctttaatagccaactcaggcagttagaaatatggagttagtgacaatggtttctcctctcttctattatcttctatttgctcatcttccagtgtttcaacttcagtcctgagactctcctatccaaagctcatcccttacctgaatcaatactgaggacatcatcatcttcatcaggaatctcaattatttctgtaggccgggaagattcgtcctcagagctactgtcccggtattgtagtcccagcttggagtagaagtccttcaccaaagactcacaattagtcactgccctggatgcatcatcaaagagttggtcaacgtgagccacctcagattctttctgtattacccatgtctctaactctgctagctgcttcttgcgttgctgtacacaatccatcttctccagtaactcattcgatgaaacgccgaagttcctccatagagatacccagttcctcaaccactcctgtcacactctgcaatctcttcagactccactgttactgttgctcatccat

SEQ ID NO: 174618 - DNA, 215 bp, Homo Sapiens
gctggtgaattcacataatgcttagttccctgatcctttgacctccttgtcttctccggttattttctgtttggacccctggccacaggagtggagtggggttggggcttaggagagagcaatgtggctttttggtatgatttgttttattgctagcccgctcagcacgctcctgttactcctaacaaagtttgagatttaggccggggatcctc

SEQ ID NO: 174619 - DNA, 502 bp, Homo Sapiens
catttggttatctccattacttaatagaaaaactcagatgaaaaacactttaagactcttctattcacattgaaataaagaattatctagatgataattcagataattcagtttgttcatagaattactttcttatcactttttctactactttttctcaaatacctctctaatccaagaggcacttccaagaaattccacacattccttatatcccttttttgcttgtctagcaaagcttgtttgtatatatgcaccccattgtaaagcaggtatgcaggtatgtgggtgaaggtgactatgaaaagacttaatgaattctgggatttgtaatggtattgatgggtatctctgtatgtatatcaagagtgggcagaaatgtttggctggtgatggcaaatgactggctttctcttgtggatggactataggaagcactttctgaattatgcaatgatttggaccaaatgccatgagataccataatccagggaccgtcgag

SEQ ID NO: 174620 - DNA, 203 bp, Homo Sapiens
gaagatattgcaggttcagttccagaccacctcaataaagcagatattacaataaagtgagtcacacaatttttttggtttcccaatacataccgaagttatctttacactatactgcagtctattaagtgtgcaaaaccattatgtctaaaacactacaaggtacatacctaaatttaaaaatactaaattgctaaaaaatg

SEQ ID NO: 174621 - DNA, 460 bp, Homo Sapiens
agaccggctactgccagaaaaatataacgtgagcaggagaaactgctggaagagtgacaaagggccaaacaggatgcagagagagagaattccaagtacttggatgaggaactgatggtcctaagctcaaacagcatgtctatgaccacacgggagccctctcttgccacctgggaagctacctggagtgaagggtccaagccttcagacagagaaggaacccgagcaggagaagaggagaggagacagccacaagaggaagttgttcatgaggaccaaggaaagaagccgcaggatcagcttgttattgagagagagaggaaatgggagcaacagcttcaggaagagcaagagcaaaagcggcttcaggctgaggctgaggagcagaagcgtcctgcggaggagcagaagcgccaggcagaccacaggacggggtcgacgcggccgcgaatttagtagt

SEQ ID NO: 174622 - DNA, 353 bp, Homo Sapiens
cattggcctttttattctgatattaggttaatcactttgaagctatagttatgctgtaacattttagcatggcttcacaccaagttagtgtagccaatgaggaaaaagttaccataatgacagcagttgtccgagaagtgacagctgtattactcagagcttttacttcttacacctaggaatattaaaatataaaacaaggggagaaatgtgacagtctattttcagttgcacatatgttccttatatataatgtttgacagttcaatctctgggtggaataaaaacaccttacgtatcagtaatgggaatttttaaagataccaatatgccatgggatcctgctagagtca

SEQ ID NO: 174623 - DNA, 258 bp, Homo Sapiens
gtagcatcacagcctctccattgcaactgttagtatgcatgccattttctatttaacggtgtcattttttaaaattatctattacttagcactaactaaagtcagagttcatgctggttttttcccattagcctcaagcatctacatgcctgccaaaaaatagacacatatactctacctattgactgaatgacaataaatgaatgtctgtccaaatacacacataaacaaggcagcaaccagaggatgaacagagga

SEQ ID NO: 174624 - DNA, 885 bp, Homo Sapiens
  misc_feature (652)..(659): n is a, c, g, or t
  misc_feature (661)..(695): n is a, c, g, or t
  misc_feature (697)..(710): n is a, c, g, or t
  misc_feature (713)..(714): n is a, c, g, or t
  misc_feature (716)..(725): n is a, c, g, or t
  misc_feature (727)..(737): n is a, c, g, or t
gctggcttgaccattcagattgggcatgaaagaattggcttacaaagcttgccttacttttggattaccttgtctaaaaacttgatgatactgtctatctgagggacatagccttgtcactcccacagctgccgcgggagctgccatcgtcacatacaaatgcaaaggtggcagaggtgctgagcagccttctgggaggtgaaggacacttctcaaaggatgtgcacttgccacacaattatcatattgattttgaaatcagaatggacactaacaggaatcaagtgctaccactttctgatgtggatacaacttctgctacagatattcaaagagtagctgtgctatgtgtttccagatctgcttattgtttgggttcaagccaccccagaggattccttgctatgaaaatgcggcatttgaatgcaatgggttttcatgtgatcttggtcaataactgggagatggacaaactagagatggaagatgcagtcacatttttgaagactaaaatctattcagtagaagctcttcctgttgctgctgtaaatgtgcaaagcacacaataaagtgaaaatcaaccttttcatattaggagacatgcatttgtaaaaattaataaagatgacaagtcagttgtcaatggaattgnnnnnnnncnnnnnnnnnnnnnnnnnnnnnnnnnnnnnnnnnnncnnnnnnnnnnnnnnttnncnnnnnnnnnncnnnnnnnnnnnaaaaacatgttcggccgcctccgcccctcaaaaagttttcaaaaacccattctttgggggcggcgggcccaaaaaggaaagggaacagggccaatagttgttccccaggaaaaccctgggccaggaccaagggttggggattcccccc

SEQ ID NO: 174625 - DNA, 188 bp, Homo Sapiens
gtggctagctagaggacccatggcatttggtatctctaaaggaccatcaggtgaaagttacatgaagccatatacttaatatggagagtacttttctaaccttttaataaagtggggtaaatgaaatggggttctcctattaaatagtggactcctaatccctgcaagtagtaaagcaaaggggtccc

SEQ ID NO: 174626 - DNA, 493 bp, Homo Sapiens
  misc_feature (412)..(412): n is a, c, g, or t
  misc_feature (421)..(421): n is a, c, g, or t
  misc_feature (467)..(467): n is a, c, g, or t
gaaaatgagagaggcagatattgggtccttgtaacttcaactgactcttccaaattgtatgaatttatcaatgtattacacaaacccaggttcagaataataaagaaaaaatattagaccaaataatgcggctaattaacagtcgtatgatttctagcccatgggtttaaaactgtatcctaaagagtcattttaaaataatataaatattaaaaaatgtaactgctatcttaatgttctgaaataagttaaaacattttaaaatataaatactgtagtttaaaagaaagaaatggtgggaaggaaaagtagagaaagaaatgccaattacaggccaaagcgttatttgccaagttttcttaggattgaattttaccatgtatgagttcttgttaacagattgtgtaacggnatactgaangacttttgcttaaagtggccttattgaccgctgatgtggtgccacngtaatgcattattttttaattgttgc

SEQ ID NO: 174627 - DNA, 537 bp, Homo Sapiens
tgggcagaatccaaatactgggttctccctgtgttcgtcttcggttactaagaaagggtgtaggacacattagccttctggaaacaagcagaagccatcacctggcccatgtccctacaaacccatgattgtcagggaggtgccagttacagcaggtgattcagctacttgaggtcggtaacagaccttccattcctcactgaaggtggggtttgtgtttttgttttgccctgttactccactggtagtcatctggtgtttgtactataacaacagcaagaaaatctcatttatctttatatactctttgcacctcctttttttagtcgagatataaatatttgaggggagagaaatatctacaggtatatatggaaacaaataatgtggtctgctttataagatggccagatctacattaggaaaagtataagccccctccctaatggccgctggggggtgagggcggtgtgttgtatgtctttgggtgtttgtttttttataaagcatataataaaataatcgtgctactaaaaa

SEQ ID NO: 174628 - DNA, 1072 bp, Homo Sapiens
catcccggacctctgagtccagaaccccaacccatgggtgtcagggttatctgtggacattgcaagaatacttttctgtggacagagttcacagaccgcactttggcacgtggtcctcactgcaggaaagtgtcatctattgggcgcagatacccacgtaagagatgtatctgctgcttcttgcttggcttgcttttggcagttcactgccactggccttgcctttggcacatggaagcatgcacggcgatatggaggcatctatgcagcctgggcatttgtcatcctgttggctgtgctgtgtttgggccgggctctttattgggcctgtatgaaggtcagccaccctgtccagaacttctcctgagcctgatgacccacagactgtgcctggcccctccctggtggggacagtgacactacgaagggagctggggtagttaaaggctcccggggcttctagaaggaagccaagcagctgccttccttttccctggggagaggtaggaaggaaccaggccctcacttaggtttggaggggcagataagagcactgctgaccatctgctttcctccaagggttgctgtgtctagggtgaagtaggcaaaacgttgcccttaaaactgggccctgaagacggttccagccttgtccttcctgtgtgctccctgagagccattcctgtcccttacacattccagggcagggtgggggtgggtagccctgggggttcccctccctcttgtgcaccattaggactttgctgctgctattgcacttcaccagaggttggctctggcctcagtaccctcagtctcctctccccacattgtgtcctgtgggggtggggtcagccgctgctctgtacagaaccacaggaactgatgtgtatataactatttaatgtggggatatgttcccctattcctgtatttcccttaattcctcctcccgaccttttttacccccccagttgcagtatttaactgggctgggtagggttgctcagtctttgggggaggttagggacttatcctgtgcttgtaaataaataaggtcatgactctaaaa

SEQ ID NO: 174629 - DNA, 497 bp, Homo Sapiens
  misc_feature (156)..(156): n is a, c, g, or t
  misc_feature (386)..(421): n is a, c, g, or t
ttggctgcccggggttgctgggtggccctttccccatgggcctccacaagcactcaggccattggcacgttgggccaggcagaaggtccacatggcagggctgcctggaacaccgctgccactgtggctccaggaggcccttgggagcatgagganagctggactcgctcatctgttcttgcaccaccatccagaatgccccctttgcaaggcctgctgcagtccccagtctgaccagcaagtcccggggtcacccttgctgaaccttgtgctccaggggtcctcctcctctaggaccagcttgccacggtttctcagagcccaggtgccctctgacctgccatgcggaggtgggatttgatactgtacattgtcttgatgcctgnnnnnnnnnnnnnnnnnnnnnnnnnnnnnnnnnnnngttgggttgacactaacttttcttaagatgctgtgagaatcatttcatccaaatgccaaataaacttgtgttccgg

SEQ ID NO: 174630 - DNA, 392 bp, Homo Sapiens
ggaagagaaaacggccgggcggcggtggcttgtgtttgtgcggctgcagcggctcttccctgggcggacgatggacagccagggcaggaaggtggtggtgtgcgacaacggcaccgggtttgtgaagtgtggatatgcaggctctaactttccagaacacatcttcccagctttggttggaagacctattatcagatcaaccaccaaagtgggaaacattgaaatcaaggatcttatggttggtgatgaggcaagtgaattacgatcaatgttagaagttaacctaccctatggaaaatggcatagtacgaaattgggatgacatgaaacacctgtgggactacacatttggaccagagaaacttaatatagataaccaccgaccaaaaacg

SEQ ID NO: 174631 - DNA, 832 bp, Homo Sapiens
tccactagtgtaggcatacaacaagtaagcagctgtatttcctctgtcatctagcattttgtcaaaggagaagatgtagtcatacaaccggttatgggaaaggtcagcatatttgaggcagccatatgcaacggatgtctgagcagcattcaattcctctgcagttaagaccttgtctctttctttttccttcaacttgtccatggatcgttttagtccttctcccagaagatccatgaggcgcactgtttcacccgaacgtgttttaaaactttttcttgtcttcccctagcaccacaccaaatccagcatggaagactcgagttactttagggtcataccaaccaatcatttgagcagcagcaaatattgtctggaagtgcacagattgtccattgtccacaacatagataatcatatctgctttttcctcaaatagtctttgtttaatagcagccaggtcagatgtatcataggtataacctccatctgattttactatggttaatggtatggaacaccctgggacaaatacaatctttctgccatcatccacctgcacaaatcctctatcttcaaattcctttacaatatcattcatcctatcttgatagaaggattcccctctctctattaaagagacgtccaatgcatcatagattttatttaactcttggcgggagacatcacagataagcttccaagcttttgtaatatctgggtttttacctggagcagaactacacactgatatgctcgcttcttaaattcctcctcagtatcaaacctcttcttagattccttataaaagacctgaacggacgcgtgggtc

SEQ ID NO: 174632 - DNA, 772 bp, Homo Sapiens
ggggagggagccgcggaggtgcaggtcgaagaggccgggctacgtcgtgccctgcgcgtgagcagctgcagcggcagaggcagcatccagcggcggcgccagcagttccagtccgttgctttactttttgcttcaccgacatagtcattatgccgaagagaaagtctccagagaatacagagggcaagatggatccaaagtaactaaacaggagcccacaagacggtctgccagattgtcagcgaaacctgctccaccaaaacctgaacccaaaccaagaaaaacatctgctaagaaagaacctggagcaaagattagcagaggtgctaaagggaagaaggaggaaaagcaggaagctggaaaggaaggtactgcaccatctgaaaatggtgaaactaaagctgaagaggcacagaaaactgaatctgtagataacgagggagaatgaattgtcatgaaaaattggggttgattttatgtatctcttgggacaacttttaaaagctatttttaccaagtattttgtaaatgctaattttttaggactctactagttggcatacgaaaatatataaggatggacattttatcgtctcatagtcatgctttttggaaatttacatcatcctcaagtaaaataaatatcagttaaatattggaagctgtgtgtaaaattgattcagcattccatgcacttggtttaaaatttagtccggggcatactgggggggtttttactggggaaatttgaattttttcagggcggtttttg

SEQ ID NO: 174633 - DNA, 822 bp, Homo Sapiens; identical to SEQ ID NO: 14816

SEQ ID NO: 174634 - DNA, 327 bp, Homo Sapiens
gtgacttagaggatcccccaagtactcggactccacttacatctgtgtacacgtgatctgcttaccaagcatattaggaaatacctcttaggaagcattagcggtctcaggccaattactgtggagcagctttcattcctacccacttgcaaaccttggcgctgttgtctgagattgctgcagccattcgttgttaccatggtacttctcaaactttgtgaaaacctgcacttttccgttgcatgacaggttcctgtcttgtctgtcatgggagccattctgccaatttaaatgcgactgtggtataaacagtacaatgatttaaaa

SEQ ID NO: 174635 - DNA, 975 bp, Homo Sapiens
tccaacaagagcacgtagttaacagatagtgccttatcaggtgaacgaagatactcaatgcaccattgtttcatacacattatgtaccagatatagtcagatgtgttccaccttttcgagaaattgcatttttagaacctagagaaatcacactggctgaggccaaagataaggtagaagaatacatgttcacttccagtgaacaagagcatgttaccaaactcaaatttgggtcgcccacccttcaatccaaatcatcaacaaacataataacttctttaccctgtcacctactgttcattcacaccagcagctaatagatgcacaattcaactttcagaatgcaagacttgtcttagagctgagtcataaacagcagcagacatatggaaaagtcagaccaagacaggacctcagcattccccattataacgagcaaggaagagatcaagcgatgaaaaaaaccttcctcttgacggtaaacggcaacgtttccattcaccccaccaagagccaactgtagttaaccagatagtgcctttatcaggtgaacgaagatactcaatgccaccattgtttcatacacattatgtaccagatatagtcagatgtgttccacctttccgagaaattgcatttttagaacctagagaaatcacactgcctgaggccaaagataaggtaataataatgtagattttagttttgccttttggggaatttagtataaataatggattaatcaaaaatatttaatatcctgggattaagtaaaacgggccctttttttggtgcaatggttaaaggactaattcagcctaattttctgcccaaacagtactttgatttttgttagctattcttttatagaaatgcagccatcaggaaatcagattttccctgatatatgaaaattttattagaacccagacactttctgagtttagagaactgtcttgttacttgtttttactg

SEQ ID NO: 174636 - DNA, 354 bp, Homo Sapiens
tgccttagaggacccttagctccaacaagaatatactagtggtggttgctatatgaaaaccataattaccaatatagtatccctgccatagagcttacaaatctaaaaacgaaatacaaggctatgagcctatctaaaaacttccttaacttagaaatggctactttgggcaaatgagtgaggcaaaatgaccctattattcaggtgccagtgctaaataaggctttgaatatcatccaaagaatgttttacttgtacccattgttcctgattatgttacacttgctaagaaaaacagtacttagaattttggcatgaacaatgaattatttcaaattgtcttgttgggagctt

SEQ ID NO: 174637 - DNA, 349 bp, Homo Sapiens
ctccaggatcttactccaacaagaaggatggcctaaatccaaaccagtattagtggtatctcacataagaaattttaacttaatatggcacataaaatactagtatgctttaggacttccagagaatggctataatgtcaaatcgccaaagagaaatgaatatacaatgtagaggaaaacacatgggctgtgtctatgcctcacaagctaccctgtgtatttaatttggtgactcttaggttgaaatctgcctgaaactataaattctagttttggaaccaataaatacggtggttaaaattttaaaaagacatttcaatacttaccactattctcttgttgggagctt

SEQ ID NO: 174638 - DNA, 322 bp, Homo Sapiens
acaacaagggaaaaccagcttatgacccagtgatttacgaaatttccgagcctccgggtaccccaagcctccccaacatagataagctccaaatttgcaggacctggtgactaaacttgcaagcaaatgttgcttgaaaccgtgcaataaattaaggatagacagagattagtcaggctactttgtttcctcaacaccacataactcctttcataatcttggatttatgtcagcccttctgtggcacaccctcccttttctcttcctacctgtgccattgatctttttttcttgttgggagcttggggtcctctaggtcagc

SEQ ID NO: 174639 - DNA, 252 bp, Homo Sapiens
aagctccaacaagagagaatcagcggtaaggtaagcaggacccagaggagctgatattcacagttcttacatggacaactctttcaggaataatccataaagtactttattttacaacctgcttttcttgtaaaaactaaaggtgccacttttttacataaagttttatacagtgttaaaaccagaactgtgtgtaaatactgcatgtatatgtttctaaatagtcttgttggagcttgggatcctcagagt

SEQ ID NO: 174640 - DNA, 284 bp, Homo Sapiens
aagctcccaacaagaatcacagttatgccaaatacaaaaacaatataatcaagtttattcctttaaaacaatgaagtgatttacataaagtagcttgatcgaagagtttcagtggaatcgtagcaaaacaattatagagctggcacagagaccaaaccccttctttgcaaaactaaaatacgcatcgtgttatctctgggtcgtataccaaaggccttagtaagatataacagaccacactagcactacctaaggaccgggattatgtctcttgtagggagctt

SEQ ID NO: 174641 - DNA, 944 bp, Homo Sapiens
  misc_feature (21)..(21): n is a, c, g, or t
ggggtggaagaaaaacttaantagggttaaagttcggtaagcttacggcagcaaaaaataaaggattctttaaggaagcccaggaatttctgtgaaaaaaggtgcccccacactggcatattatagtagctggaggtaaatgtaaaaccatgtgcgttattaactcttcctataataaaatattgaaccccccaagttttcaccccttgccctccttatgtccacatcactttttctgaagacagcctcatgctttaagccaaatatatatttgctatttgaaaaagtttctcatcctcattactaaaaatgtttctgtaaaggccttagacatttttttcagtaccctagtaacaagtcatatcacgatcaataaatgatcacagcctttcgaaaaaaactactgagattggagaatgggtttctgtctccaacccctgaaagacgttgctgcttcaagacctacagctccaagaagacaactcagaatttcttacttataaaaaaatattgtcatgaataactgaataattagatttctaggaaaatgaggcttttaaatgaagattaagcaaaatcaactataatgtatttacttctactcattgatgaatgacagaaatcagttaaagttttacatacaaaagatataaatactgcataatacgtagtgaatattggaacaaaccctttcgtacttaaagcacaaaatgcaatcagtaaatctgatgctcttaagtgtgtctcttaagatgacatcaaaaacctctagatagcatggaaatatcccggtttaaggctttccaataggtttgtagcaagcatcaggttgccagaggcgaatatcaacaagaacttgattgagtttacgcatccagagatcccgatcttcttaagtatctgcagacagacagttcctaaaggaacaaacaaccaaagaggtc

SEQ ID NO: 174642 - DNA, 733 bp, Homo Sapiens
  misc_feature (602)..(602): n is a, c, g, or t
ggggctgctgtgttggaactgccagctagactgctcaccaaaatgggaggcagcctctgctgctgtggtgaaggtgaagacacactcagcgattcagctctacagtatgcactctgggatctcccatttgctaaggaaggatcttagctttgagaaaggtgtcaagcctgtggcagcagagcttcctggggagtcctcagagcaagtcattgccattgtcgaagtgtcttctaggctttattttggggccattacctcgagcactgtttcttgtctggtttcctaatgtcagcaactgaagaaaagacctgtatacacaggacacagcatggtctgacgctcacagtgttttcctttctctctgcagagggattcagcactttgggcaagtggttgcacagaggatcccgtggaagaattcatatatgaatcagatgagaatgccccaggaccatcgtaggtcaggccacctgcttttgtcaaagaaaaaagataacccctatttgaattaaaatatgagaatctgaccatatgtatcataggtgacttacacagtgtccttggtaaggagaatttagagtgagagtctgttccccactgangtttgatttaagatggcagaagaaaatgacatcatcagccactcagcagcttgattctctccttggggcaaaatcacctaaatgccaagcaacatggacttacaggaaacatccctcaataaaaacttaag

SEQ ID NO: 174643 - DNA, 192 bp, Homo Sapiens
gactctacaggatcttaagctcccaacaagaaatgtggtcgtgaaaattggactgttgcttttgctccagatggttcatactttgcttggtcacaatggacatctgcacagtaaagcttgttcctgtggtcccatgtgcccttcagacacttttctctttgcattggcacccaaggaattgttacccaattc

SEQ ID NO: 174644 - DNA, 427 bp, Homo Sapiens
agaggaagaggatgaaaaatgtgccagtgagcttgagtccttggagaaacacaagcacctgctagaaagtactgttaaccaggggctcagtgaagctatgaatgaattagatgctgttcagcgggaataccaactagttgtgcaaaccacgactgaagaaagacgaaaagtgggaaataacttgcaacgtctgttagagatggttgctacacatgttgggtctgtagagaaacatcttgaggagcagattgctaaagttgatagagaatatgaagaatgcatgtcagaagatctctcggaaaatattaaagagattagagataagtatgagaagaaagctactctaattaagtcttctgaagaatgaagataaaatgttgatcatgtatatatatccatagtgaataaaattgtctcagtaaagtgt

SEQ ID NO: 174645 - DNA, 192 bp, Homo Sapiens
gacttagaggatccgtgatgttatcgcccaacactcgccaaacacagtatgtgctgagggttctagttcaacaaaagccaaggctaaaaaaggtacaaggtacaaagccaaccaaatgagatgactatgcatctttacacagtacaataacatgtttttgtaactacctgtgttggggataacatcacgggt

SEQ ID NO: 174646 - DNA, 284 bp, Homo Sapiens
ctccccacaagaaggttccaaggtggctatcaactgtgaaccataccaaaggattcagaacttgaatctgggaaccaaaaaaatcttgaccagaagttctcaaatagtttgatattttatgttcatattcctttactatggtagccatttttattacaaccaattttggttcagtcgttgtttaacacacattccccaatagctttgacttataaataatgaaagaagagaaatcttttttaaaactaaacttttgtaaccatttatcttgttgggagcttgag

SEQ ID NO: 174647 - DNA, 409 bp, Homo Sapiens
caagcccccaaataaaactaccatctaggaccaggatcatcaacaggtgttaaaagcattgcattccagtccacagaaagaacataatgcacacaaagaccagactgccatctattgtattgaagcaacaaaatatgactggggtccctgaagtgacacaagaagcatagaacatcatatatattctagcccaaaatgtttaacttgaatcaactgggcccttcagtagaacttctcatttaaaagaagctcaggggacaggggactaagctgaaacaacactataagaaagtaccagacacatctggaaggaggggcatctctgcaggacaagaggctggtctggccaacagtcagggaaagcactgcaaacccaaccactagatgtaacagggtccacaacaaatcc

SEQ ID NO: 174648 - DNA, 453 bp, Homo Sapiens
taccttactacccacgatcacctggcccaacatgctttggcagggatgcagaagcttctgtcggaagagaggtttgtatccatggaaacagattctgatgagaagcagctgctcaatcagatactgaatgccgtgaaagtgacgccttcgctcaacgaggacctgcaggtggaagtgatgaaggttttactatggcatcacctacactccaacatttgatctgaatgggagtgccgtgctgaagatcgcggaggtgtgcattgagacgtacataagcagctgtcaccagcgtagcataaacactgctgtgcgggcaactctcagtcaaatgctgagtgacttgactttacagttacgacagaggcaggagaatacgataattgaaaacccagatgtcccacaggatttcgggaatcaagggtcaacagtagagtccctctgtgatgatgttgt

SEQ ID NO: 174649 - DNA, 712 bp, Homo Sapiens
cgagctcggtacccaagctccctactagataggtgttattgtgccccgtttacaggcaggaacaagttcagggagatcacattaatggcctgagttcccaagtgggttaagagactaagctagatctcaacccttcaggctgaatccaaagctactttccttgaatggttgataagatttttccatttcttttttaaaaaaatggtaggtccaaatatcttgctcatcaataaatatttatcttcatcattcttcctaatgacattcccttgtatgaatgtgccaatgtggaataaccagttccgtcttgttgggctttcagatgttttctttttgtaaatgataaacaatgcagttataactatctttatatataaactttgcaacagtatgagtattttcctagaataaatactggaaagtgaaattgcgtggtcaaaggccagacacatttttaaaagctgcctctttcccaatcacacatttcccacatccatttatttgctgaggatcttcacaaaatttggactgagattaaacacagaatcagagaagccctatgctggaagtttccctaaattaaattggcttatgttgacaatatttgccattttgtgggtatttctgttcatatagagttgtttaaaattctggtagtgatgtgctatctaatgactattacttttccttaaactgacttctaaatcagagt

SEQ ID NO: 174650 - DNA, 673 bp, Homo Sapiens
ccagagttcactgtgtgtggtcacaccgaaaagtaaataagaagtcaagctggtgatctacggcgggatgagtggctgcaggctgggggacctgtggaccctagatattgacaccctgacgtggaataagcccagtctcagcggggtggcgcctcttcctcgcagtctccactcggcaaccaccatcggaaataaaatgtacgtgtttggtggctgggtgcctctcgtcatggatgacgtcaaagtggccacacacgagaaggagtggaagtgtaccaacacgctggcttgtctcaacctggataccatggcctgggagaccatcctgatggatacactggaggacaacatcccccgtgctcgggctggccactgcgcaatcgccatcaacacccgcctgtacatttggagtgggcgtgacggctaccccaaggcctggaacaaccaggtctgctgcaaggacctctggtacctagagacagaaaagccaccacccccagcccgagtacaactggtacgcgccaacaccaactccctggaggtgagctggggggcagtgccaacagccgacagctaccttctccagctccagaaatatgacattcctgccacggctgctactcccacctcccctacaccaatccgtccatctggcctccaatcctcagaccct

SEQ ID NO: 174651 - DNA, 454 bp, Homo Sapiens
aaggattagtgtcgtggtcaggggaagatggagccttctgtgagtgaacttcagagggaggtgcgtttgttgccctcaggaccaggctcgtcacgtttctgtagcagagaaatgttctcccgcaaataaaaccttacacaggggcccaaatgaggtggtggtgaagcagtgtgttcccaggcccctgcacgctgcagagcagacaatgtgtgtgctgacagacactcagcctggagtcagggactgcatgtgaagcaacagccccacagagtccctagcctgtcatcgccatgccttgttttctattgaacaatatttgggaaattcgattcccaaaactaagtcgttataaacagttgcacctttttaaatgacttgccttgaaatttcagggcactcttcaggtaactgatgcaggaatctaagagggaagcagcctcaccacgacacagga

SEQ ID NO: 174652 - DNA, 399 bp, Homo Sapiens
tctcgaggatctcgcactgtgtcgtggtcaagattaactgtaatgcaggttaaaaccagctactcgagagccatgtattctttttctaaccagtggaggacccagaagaaatggatggcaagctttctcaaaggtccatctggtgagattctggggagcccactcaagtgggaaagaccaaggaagaacaaggcttctattagcaggattatcaggataacactcaggacaataatcagctctgttaatacggtctaagaatacctggtaacattcattttcaacaagttcagtttggtacaaccagtggcctagttctaaactagggaaccactgttgtccacaatcagggcaatgtgaattatctgaaaacatctggacctagaaagacgacacagt

SEQ ID NO: 174653 - DNA, 204 bp, Homo Sapiens
gacggtctgaccaagggtgtccagtgcattcatcttggcgccatgcttatgcagaacttccatgacatcattatgggctctttcggctgcaacatgcaggggagtcatgaaatctttatttgtttcattaacatttgctccttttctaagtaacaattctgtcacttgtttacgtttgggatgcagagagaccacgacacagtg

SEQ ID NO: 174654 - DNA, 470 bp, Homo Sapiens
tcggctcattagttcatatcattgcagtcgagctactcagtataatcatgactatgaaccagaaaacgagcgtgaatataataaactgaaggacacgctctacatcaaccttgtcatgaacaagaaagataagaaaactagctatggacattttgaattatgtcgggagagctgatggaaaaagaggctcctggaggactggtaaaactgaagccaggtaaagtccagtttaaattgataaatgtaatcagacttccttctatcctgcattttcatactgacagtttctttctcaggaatgaagatgaaatgtataaaatgctcttgaatgattatgaatatcgtcagaaacaaatcctaatggaaaatgcagaacttaagaaggttcttcaacaaagtgaaaaaggaaatgatttctcttctttctccccaaaagaagaaacctagagaaagagtagatgatagtacag

SEQ ID NO: 174655 - DNA, 509 bp, Homo Sapiens
atcgggtgggcttttggcctaggattagaaaggctagccatgatctctcacgacatcttgaaaacccgtctcttctggtgtgaggacgagcgtttcctgaagcagttctgtgtatccaacattaatcagaaggtgaagtttcagcctcttagcaaatatccggctgtgatcaatgatatttcattctggttgccctctgagaattacgcagaaaatgatttctatgacttagtccgaacaattggaggagacctggtggaaaaggttgatctcatagacaagtttgtacatccaaagacgcacaagaccagccactgctaccgcatcacgtaccgccacatggaacggactctgtcccagagagaggtcaggcacatccaccaggccttgcaggaggctgcagtccagctgttgggtgtggagggcaggttctgatgtcaccacttcactcaggctgcagccctcttggggctccaggatttgctgaaagagaaaaagatatggtttgt

SEQ ID NO: 174656 - DNA, 321 bp, Homo Sapiens
  misc_feature (24)..(24): n is a, c, g, or t
  misc_feature (57)..(57): n is a, c, g, or t
  misc_feature (60)..(60): n is a, c, g, or t
accaaaggtagacaacgacaagtngagcggaggccggagaaaccatcaagcatgagncgnggtcagaattataggggaaaaaaagccacaaaattgttcacccccaagcaaccaccgaaataatgagatcggatgcagtggagatggcgttgggggtgggagagaaaaatggatttatctttaaaatttttgcttaaaatctaaaatacaccccgctttcttaccctcagctgccagcggatgcgcaggcgccgcaagaacaggtacagaggcgttggccgcagccgagagggtgggagaaaatgttgaaatcaagaactt

SEQ ID NO: 174657 - DNA, 178 bp, Homo Sapiens
tatgccgtatgtcaaggaaaagtctctctgtcagatgcaacacagtacacagggacatcctactgaagacatgaccaggaatttctcagaagtgaaaacctgctttttctcatccacaatcaactgccagaaactgctcagtttggcctcagcctgtgagtcagccactgacaacggc

SEQ ID NO: 174658 - DNA, 451 bp, Homo Sapiens
tgcgttgtagtgtgcagcagagtatggtgcgggttccgaaagagctggtcccagggcaccgtgtgcacgaagcagaggtgggtgttatggtggatgagggccagtccactgcccagtttccctcagtgagcgcagccccagccagctgatgcccagcccttgcagggtcagcgagtaggcgccattgcgaagaattcgtccccggataacttgcaggttctggaagacgctgaggtcaggcaggctgtccggccatgctgagatgtataggtaacctgtgatctcttccagagtctcaaacacttggagctgctctggctggagcggggcagtgttggaggctgggtccccatcaaagctctccggcagaaatgccaggctcccaaagatcttcttgcagccagcaaactcctggatattggcactggtaactgccctcacctctcgcaag

SEQ ID NO: 174659 - DNA, 662 bp, Homo Sapiens
tactcctccatcagtggataaagtagacggattttctcggaagtccgtcagaaaagccagacagaagaggtcgcaaagttcctcacagtttaggtctcaaggcaagcctattgagttaacacctctgccgctgctaaaagacgttccatcctcagagcagcctgaactgttcctaaagaaacttcagcagtgctgtgtcatttttgacttcatggacacgctatctgatcttaaaatgaaagaatacaagcgctccactcttaatgaactggtggactacattacaataagcagaggctgtttgacagagcagacttaccctgaagtagttagaatggtatcttgcaatatattcagaactctccctcctagtgacagcaatgaatttgatccagaagaagatgaacctacccttgaggcatcgtggccacacttacagcttgtatatgaatttttcatacgatttttggaaagccaagaattccaacccagcattgccaaaaaatatatagatcagaaatttgtattacagcttctggagctatttgacagcgaagaccctcgggaacgggactacttaaaaacagtcttacacagaatttatggcaagtttcttggtcttagagcatttatccgaaaacagattaacaatatttttctaa

SEQ ID NO: 174660 - DNA, 949 bp, Homo Sapiens
gggggccaagagtgcgtgggcggcggcgcgcgggtgcgatcgcggagctgtgaggcgcaggcagggctctggggcacctagagaccggggccggagacgtggcagccgccctgcccgccagaaagtttcctagaagtttgctgggcgcgggcgcacgactgactggctggaccatgaacgtgttccgaatcctcggcgacctgagccacctcctggccatgatcttgctgctggggaagatctggaggtccaagtgctgcaagggcatctctgggaagagccagatcctgtttgctctcgtcttcaccaccaggtacctggacctgttcaccaacttcatctccatctacaacacagtaatgaaggtggtttttctcctctgtgcctatggtacagtgtacatgatatatgggaaattccgtaaaacttttgacagtgagaatgacacattccgccgggagtttcttctggtcccagtcatgggcctttccttccttggaaaactacagtttcactctgctggagatcctctggactttctctatctatctggaatcagtggctatcctgccccagctcttcatgatcagcaagactggagaggctgagaccataactactcactacctgttctttctgggtctgtaccgggcactctacctggctaactggatcaggcggtaccagactgagaatttctatgaccaaatggcagtcgtgtctggagtagtacaaaccatcttctactgtgacttcttctacttgtatgtgaccaaaggtaggtcctgggatgacagcaatgctgacactggcctaaggagttactcatccatttaataagtattccagcagatacagatgtgaacagtcaagtctctgccatccacaatgcttgtgttctaatgcaagaagacaaatattttcaataaagaaacaaatgccataaaaa

SEQ ID NO: 174661 - DNA, 468 bp, Homo Sapiens
tagagaagctggcagcctccccaagggcacgcatggcaccaagggcatgcatcccatcttcaaccaggcgccggcaggcggccatggcatggaaggcttcacgttgggtgccaagcagcagcaggcagacaggcatagcatccaggcgggccacgtaggcgtagaaaaaaccatcagggttgaagcggggcaggcacacaggtgcccaagcctcacccgccgcaaaggctggtgcacccacccagtcgagcagcaactgcaggtcagctgggtccagccggcactcggccagcacattccgctcctgggctgctgttataagtcgaccgcctactgccagcactgacagcgccaggccaggcgctgtgcaacgtcggaggagcgcacctagtgcgtctcgcagcgggcgggcaaggggcacaccagcgcacggcacccaggagcagggctcctggggggtacggagct

SEQ ID NO: 174662 - DNA, 915 bp, Homo Sapiens
cccgccgtaccagttgcgcgggccgagtatccacagaagtagacgcaaggctctcctttgataaagatgcgatggtggccagagccaggcggctcatcgagctctacaaggaagctgggatcagcaaggaccgaattcttataaagctgtcatcaacctgggaaggaattcaggctggaaaggagctcgaggagcagcacggcatccactgcaacatgacgttactcttctccttcgcccaggctgtggcctgtgccgaggcgggtgtgaccctcatctccccatttgttgggcgcatccttgattggcatgtggcaaacaccgacaagaaatcctatgagcccctggaagaccctggggtaaagagtgtcactaaaatctacaactactacaagaagtttagctacaaaaccattgtcatgggcgcctccttccgcaacacgggcgagatcaaagcactggccggctgtgacttcctcaccatctcacccaagctcctgggagagctgctgcaggacaacgccaagctggtgcctgtgctctcagccaaggcggcccaagccagtgacctggaaaaaatccacctggatgagaagtctttccgttggttgcacaacgaggaccagatggctgtggagaagctctctgacgggatccgcaagtttgccgctgatgcagtgaagctggagcggatgctgacagaacgaatgttcaatgcagagaatggaaagtagcgcatcccctgaggctggactccagatctgcaccgccggccagctgggaatctgactgcacgtggcttctgatgaatcttgcgttttttacaaattggagcagggacagatcatagatttctgattttatgtaaaattttgcctaatacattaaagcagtcactttttcctgtgctgtttc

SEQ ID NO: 174663 - DNA, 395 bp, Homo Sapiens
aattcttataaagctgtcatcaacctgggaaggaattcaggctggaaaggagctcgaggagcagcacggcatccactgcaacatgacgttactcttctccttcgcccaggctgtggcctgtgccccaggcgggtgtgaccctcatctccccatttgttggggcgcatcccttgattggcatgtggcaaacacccgacaagaaatcctatggaccccctgggaagaccctgggggaaaagagtggtcccctaaaaatctaccaactaactacaagaaagtttagcctaccaaaaacctttggtcatggggcgccttccttccccaaacacgggggggagatcaaagccactgggccggcgttgggaatttcctcaccctattctcacccaagggct

SEQ ID NO: 174664 - DNA, 814 bp, Homo Sapiens; identical to SEQ ID NO: 13834
  misc_feature (507)..(507): n is a, c, g, or t
  misc_feature (512)..(512): n is a, c, g, or t
  misc_feature (514)..(514): n is a, c, g, or t
  misc_feature (516)..(516): n is a, c, g, or t
  misc_feature (518)..(518): n is a, c, g, or t
  misc_feature (521)..(521): n is a, c, g, or t
  misc_feature (523)..(526): n is a, c, g, or t
  misc_feature (528)..(529): n is a, c, g, or t
  misc_feature (532)..(535): n is a, c, g, or t
  misc_feature (689)..(697): n is a, c, g, or t

SEQ ID NO: 174665 - DNA, 851 bp, Homo Sapiens
gggcgggcactctgctggtcgcggcgggagtggcgtggcgcagggatggcacaaaagaaatatcttcaagcaaaattgacccagtttttaagggaagacaggattcaactttggaaacctccatatacagatgaaaataaaaaagttggtttggcattaaaggaccttgctaagcagtactctgacagactagaatgctgtgaaaatgaagtagaaaaggtaatagaagaaatacgttgcaaggcaattgagcgtggaacaggaaatgacaattatagaacaacgggaattgctacaatcgaggtgtttttaccaccaagactaaaaaaagataggaaaaacttgttggagacccgattgcacatcactggcagagaactgaggtccaaaatagctgaaacctttggacttcaagaaaattatatcaacaattgtcataaataagaagcaactacaactagggaaaacccttgaagaacaaggcgtggctcacaatgtgaaagcgatggtgcttgaactaaaacaatctgaagaggacgcgaggaaaaacttccagttagaggaagagggagcaaaatgaggccaaactcaaagaaaaacaaattcagaggaccaagagaggactagaaatactgggcaaagagagcagcagagacaggggtgggatccagaaatgacaccgtacttagaaatagctaaccagacaggcagatcaatcagaattcccccatcagaaagaaaagcccctatgttagctatgggatatcctgagaagggcagagcttttcctgaaaagaaaagattatggatagccctgccatgtctggttgaacgctgaacaatatttctgg

SEQ ID NO: 174666 - DNA, 401 bp, Homo Sapiens
ttaggcgtgtagtgaggcgtgtagtaaggcgtgtcagtgaggccgttgtcagcgaaaatggcctcgttctccaggtctgtccagaacaccttgttcctcaaacacagctatcccaaaagggtggctcaggaagtcagtggaggagatcagcgtctttctgttgcctccactgaagtcaatgctggacagttggtgtagcttggagtctacccagtacaagcgctggctcagcagatccagggtgattccgttgggccattcaatattgtctgacaccagtgtttgccggtccacaccgttgagcccagatttctcaatcttggcctggtccccccagtcagaccaatacatgaaccctcgcagggggtcaacagcgatggcccggggttcactgacaacgg

SEQ ID NO: 174667 - DNA, 448 bp, Homo Sapiens
aaaactctcaacccactctgctgttagaccagtccaacccttctgtggcaaaggacgctggctttgcatttctctatcagctaccacttacgttgccactctcattcccacaaaaaactgggtagttactagcttaacctaccaccctcgtaatgaaggaaaaagccccttctaactcctacatatgcagtcattggccaacttctccatcaatgaaatgaccgaaaataccctgacaggtcgtgcagttcaacttttacgctcctacatgtccagcctcacccattacacaagtaatgaaaagcccatacacggccctgtgactacaaacgctgtcttaactttccaagaccctttatgcatccaacacaacctgtcatcaggcctacctctagatcacctacggttccatcactgacaacggcggagatcctctagatcacccagc

SEQ ID NO: 174668 - DNA, 927 bp, Homo Sapiens
  misc_feature (817)..(858): n is a, c, g, or t
  misc_feature (896)..(897): n is a, c, g, or t
ggccgttgtcagtgagattgccagcgccctgggagacagcaccgtggacagcaagccgtgaggagggagcccgctcaggatggcctgggcaggggaggacatctctagagggaagctcacagcatgatgggcaagttccctgtcctcctgggccctgaggcccctgccctagtgcaacaggcattgctgaggtctgagcagggcctggcctttcctcctcttcctcaccctcatcctttgggaggctgacttggacccaaactgggcgactagggctttgagctgggcagttttccctgccacctcttcccctatcagggacagtgtgggtgccacaggtaaccccaatttcgggccttcaacttctccccttgaacgggtccaactctgccactcatctgccaactttgcctgggaagggctaggcttgggatgaactgggtttgtggggagttccttaatattctcaagttctgggcacacagggttaatgagtctcttggcccactggtcccacttgggggtctagaccaggattatagaggacacagcaagtgagtcctccccactctgggcttgtgcacactgacccagacccacgtcttccccacccttctctcctttcctcatcctaagtgcctggcagatgaaggagttttcaggagcttttgacactatataaaccgccctttttgtatgcaccacgggcggcttttatatgtaattgcagcgtggggtgggtgggcatgggaggtaggggtgggccctggagatgaggagggtgggccatccttaccccacacttttattgttgtcnnnnnnnnnnnnnnnnnnnnnnnnnnnnnnnnnnnnnnnnnnacactcgctgctctcaataaataagccttttttgaccnntcgccgatccgctatcccccaataccctgt

SEQ ID NO: 174669 - DNA, 796 bp, Homo Sapiens
agggcatgtttctctccttttctctgaaacatctggcattatttccttcatatctccttgggtctaggttcaacacacctgacgagggatggagagaggaaaagtatgagcgtgagaggacattcagtgagataaataaagcggaagagcaatacagcctatgtcaagaactttgcagtgagcttgctcaggatctacagaaagaaagacttaagggtagaactgttaccattaagttgaagaatgtgaattttgaagtaaaaactcgtgcatctacagtttcatctgttgtttctactgcagaagaaatatttgccattgctaaggaattgctaaaaacagaaattgatgctgattttccacatcccttgagattaaggcttatgggtgttcggatatctagttttcccaatgaagaggacaggaaacaccaacaaaggagcattattggctttttacaggctggaaaccaagccctgtcagccactgagtgtacattagagaaaactgacaaagataagttgtaaaacctctagaaaatgtctcataagaagagtttctttgataaaaaagatcagaaaggaaatggagtcaccaagatacattttaaatgtgaagccgtgaataaacaaagttccagacatcacaaccattccaagttttaaagaagaagatgaatgagaatttggaaatattagagaattcagatgactgtcagataccttacctgtcctgtttgttttagggctcaagggtgcatcagtctggaaagctgaataaacttgtgattgaatgt

SEQ ID NO: 174670 - DNA, 784 bp, Homo Sapiens
catgagcatgtgctttcagcatgggtttgacatccatacacctgacaaccttggccgtacctgtcttcatgctgctgcttccggagggaatgttgaatgtcttaatttgctgttgagcagtggagctgacttgaggaggagggacaaatttggcaggaccccactgcactatgcaggctgctaacggtagctaccagtgtgcagtaacattggtgactgctggggcaggtgtcaacgaggccgacggtaaaggcgtgctctcccctccactacgctgccgcttctgacacgtacaggagagcggaaccccatacaccttccagccagtgatgccgaagaggacgagccactgaaggagtcccgcaggaaggaggccttcttctgtctggagtatcttactggataacggtgcagacccctccctgcgggacaggcagggctacacagctgtgacaactattgcagacagactatggcaacagacagaacctcagaactgctcttagaaatgtcctataacatgcctggaggatgtggcagagacacccataccacagtcagcccttatgcactttagctgccatacaaaccggtcacttgtgacaccctgcagcacgctgcgcggagacgctggtgaactctgcaacgtaagagaacaccaccggcccgaaaactgtacgcacttcctggccacgacaccgcggctcctactgaaacggagctgacagatgcctaacaacacaaagggccacatgccatcatcaagccaaacgaacgcaccaag

SEQ ID NO: 174671 - DNA, 186 bp, Homo Sapiens
gcagaactgagttcccggcagctacaggactgaggctccactttcttgctggctgtcatgctgagggccatgctcctctccaagaggctcctgtagatccccttccacatgtgcctctcacatgcagaagtgtcccagcatccaggctgctaagatggggtcttaaataacgtaagacaattgaga

SEQ ID NO: 174672 - DNA, 1365 bp, Homo Sapiens
  misc_feature (780)..(789): n is a, c, g, or t
  misc_feature (838)..(846): n is a, c, g, or t
  misc_feature (886)..(886): n is a, c, g, or t
  misc_feature (947)..(947): n is a, c, g, or t
  misc_feature (956)..(956): n is a, c, g, or t
  misc_feature (978)..(978): n is a, c, g, or t
  misc_feature (1136)..(1136): n is a, c, g, or t
  misc_feature (1169)..(1169): n is a, c, g, or t
  misc_feature (1216)..(1216): n is a, c, g, or t
  misc_feature (1224)..(1224): n is a, c, g, or t
  misc_feature (1276)..(1276): n is a, c, g, or t
  misc_feature (1326)..(1326): n is a, c, g, or t
ggatccttgggtttttttgttggtgttgtcgagcggggtttttggttttgtaataaagttgttgtttatttccacctgccagctccttcatggggcgaggggtcggaggctggagacccgggaggaaagcaagtcaagacaaatgcttgacccacggggactccaggcctggcctgcagccactctggtggacttggctttgggtctggggtcttagtgtcttaggcttgagggagaggggcagtgaagaggtgccctcagcctccccattaccccgcctctcctccacagaacccacatcctaggctggcctagccacaagcaagggggctcaggaggggcccacgcggatgtgagggttcatgagtgggtccaggttgggatcgctgtcagctgcggcccggcctaggcgagacatgagggcaaggagggccaggaagcccagcagtcccaagagtagcagcagccccgcccgctggagcagggtcagcggccgcttccgagacccagcccggctccttagcagccgggccagccaacccaaggccgggccgacgtcggggacttggtcatcggtcacaggtctccgcggggaacgccgcaggctcgcggtcgaacccctggggctccctctggccctggcccccccctcaggggccccgcggccctccgttgcgggggattgaacccgcttggggacgggtggggggcccggggagaagggaattggaaatcttggcccgcccaaaaactgggtggggcccgggccccgggccccgnnnnnnnnnngggttttttttcggaccgcgagcgaaaaaaagaatttaggcccggggannnnnnnnntgtttaagggtgggtatacacccgtgttcccgaatatgancggcggcgcaaaaggggaaaaggggaaaacttttgtcaacggccgctttcccttactaganaccaggggnatggccccacccccggcaaaancttcacggggcggtgggacaagagatccgcgacaaggacccctactaaccgtcggaggacgggcctcagcccaacaaatggttcttgtatggcacggggggggccaaacagggggatatctcggcatgcgggtaaagaacatcagatgaaatatcatnactctcataaacgacgcagaacagcggtacacngatgccccacgccggggaacgaagaggaaatactgggaggacgaatngtgcaaanacatggcggcgtggtggaaaatgcggtgccgacacatcggtgttgagaacgnggtacaatactaggcggcccgcgggccgccaccccagtgtgcccggggcngaaacacaacaaaagcggggggggagataaggagaaaca

SEQ ID NO: 174673 - DNA, 747 bp, Homo Sapiens
tcggatgagtgaatggcctcatagactcgtgtccatctgctttgactgggcattagatactgaataatcatccagcacaggctgcaagtttgtccagtaggtggacaggtgtgggtacaggactcgttctactgccttccagccaagagcatgcagccccaccacggctccatagtggcagcagagcggccgcacaggatctgccaggatcttctgcagggatagcaggatatgctgatagaggccacttacaaggtccccatgagtccagaagatgtggctgagcaggagggcagccccatcccgcagagtccagtggtcattcagggggttgatggaggcagccagtggctccaggacacagtagaggacactgcccaccagacagcggacatagggccccaagcacaggtgcggattacgaaataggctccgtgccacctgcagcagccggtgcagttgctccaggtcatggcttacagatttcaccccactgaccacataaacaaagtaaggcaggagtgccccaatcttggagttcgtctgcaagtcctggagtgcaaccttcagcagttgcggatcatcccctaggcacagcacgagtcacctggtgatagtacttgagaaggtcctctggtcagtgaagacacagcgctgggcacgcgtccttgatgtggcaggttccctttggcctccaagtgaggggcattagcgtctgggaggtgtgtcagagagcctttggggatg

SEQ ID NO: 174674 - DNA, 957 bp, Homo Sapiens
ttgtggagcttcatacagtcctccatctggccagatacgggcctggatcttgtgcggggcctcacacatcttgcagggcttctcggggtcggggaaaacgagctggttgacaattataatgtgtgttgccatcctgcacctggcccggctcctgatcaacctctcggtctcatacagggacaggaactcagcaatgcatacgcagatgaaagttgtctgctcagggtccctgaactgttcgctgactgagcggatgacgggcagcgtctcctccagcttggaggcccagctggtctgcgttcatgtcccccaggcccagcatgttgcacatctgtgagatgaaagggctgatctggttctggatctgcataagccggcccaggccccgctccacgatggtggggaagttgagcagcctcagggtgtggcccgtgggtgccgtgtcaaataccaccaccgagaagttcatgcccttcaccagcctcatgacctcggcatagctcatggcctcatcgatgcccgggaaatgcggttcatggcttcctgcatcatttttttgcccatgctcagcatgtttccttcttcgaagaactcgtcaggcagttcccgccacggcccaggctggggtcaatctccatagcaaagaggttgtcatagcctttgaccttggtaggcacctttgagaacttctggtcaaaagcatctgagatgttgtgtgctgggtctgtggagatgatcagaacactctcacgccccttggagagctggactgccaggctgcagctgcaggtggtcttgcccacaccacccttgcccccgacgaagatccacttcaggctgcgctgctcgatgatgttgctaagtgtaggctccagcggctccacatcaggagcatcttcgaactcctctgcctcaaccccccacccggccacccctgccgccattttggaactgccc

SEQ ID NO: 174675 - DNA, 975 bp, Homo Sapiens
  misc_feature (817)..(825): n is a, c, g, or t
  misc_feature (896)..(906): n is a, c, g, or t
gggtggccgggtggggggttgaggcagaggagttcgaagatgctcctgatgtggagccgctggagcctacacttagcaacatcatcgagcagcgcagcctgaagtggatcttcgtcgggggcaagggtggtgtgggcaagaccacctgcagctgcagcctggcagtccagctctccaaggggcgtgagagtgttctgatcatctccacagacccagcacacaacatctcagatgcttttgaccagaagttctcaaaggtgcctaccaaggtcaaaggctatgacaacctctttgctatggagattgaccccagcctgggcgtggcggagctgcctgacgagttcttcgaggaggacaacatgctgagcatgggcaagaagatgatgcaggaggccatgagcgcatttcccggcatcgatgaggccatgagctatgccgaggccatgaggctggtgaagggcatgaacttctcggtggtggtatttgacacggcacccacgggccacaccctgaggctgctcaacttccccaccatcgtggagcggggcctgggccggcttatgcagatcaagaaccagatccgccctttcatctcacagatgtgcaacatgctgggcctggggggaatgaacgcagaccacctggcctcccaagtggaagagacgctgccccgtatccgcctcagccagcgaacagttcaagggaccctggagcacaacactttcatctgggctatccatttgctgagttcccggtccctgggacgaaaacagaaaagcctggatcccggaagctgtggccaatggacaccattggnnnnnnnnnatattatttgcgccgacccgcttcgttcttccccgaaccctcaagaaacccccgccaacaatgtgtgacgnnnnnnnnnnnaagaacccaggcccacaattttctcgcacactaggggcggggactttgtccgaagaacctcccccctcc

SEQ ID NO: 174676 - DNA, 852 bp, Homo Sapiens
  misc_feature (207)..(207): n is a, c, g, or t
agctgtgccgcgagatgtccaagggggcctggggaaaggggccaggacttttttcggtgggtgggtattgtgaccacggcgacccgcggggccaaccccctggggggtgttcaactttcccccaccatcggggagcgggggcctgggccgggttatgcagatcaagaaaccagatcagccttttcatctcacagatgtgcaacatgntggccttgggggacatgaacgcagaccagctggcctccaagctggaggagacgctgcccgtcatccgctcagtcagcgaacagttcaaggaccctgagcagacaactttcatctgcgtatgcattgctgagttcctgtccctgtatgagacagagaggctgatccaggagctggccaagtgcaagattgacacacacaatataattgtcaaccagctcgtcttccccgaccccgagaagccctgcaagatgtgtgaggcccgtcacaagatccaggccaagtatctggaccagatggaggacctgtatgaagacttccacatcgtgaagctgccgctgttaccccatgaggtgcggggggcagacaaggtcaacaccttctcggccctcctcctggagccctacaagccccccagtgcccagtagcacagctgccagccccaaccgctgccatttcacactcaccctccaccctccccaccccctcggggcagagtttgcacaaagtcccccccataatacagggggagccacttgggcaggaggcagggaggggtccattccccctggtggggctggtggggagctgtagttgccccctacctctcccacctcttgctcttcaataaaatgatcttaaactgcc

SEQ ID NO: 174677 - DNA, 896 bp, Homo Sapiens
  misc_feature (320)..(320): n is a, c, g, or t
  misc_feature (372)..(372): n is a, c, g, or t
tggccgggtggggggttgaggcagaggagttcgaagatgctcctgatgtggagccgctggagcctacacttagcaacatcatcgagcagcgcagcctgaagtggatcttcgtcgggggcaagggtggtgtgggcaagaccacctgcagctgcagcctggcagtccagctctccaaggggcgtgagagtgttctgatcatctccacagacccagcacacaacatctcagatgcttttgaccagaagttctcaaaggtgcctaccaaggtcaaaggctatgacaacctctttgctatggagattgaccccagcctgggcgtnggcggagctgcctgacgagttcttcgaggaggacaacatgctgagcatgggncaagaagatgatgcaggaggccatgagcgcatttcccggcatcgatgaggccatgagctatgccgaggtcatgaggctggtgaagggcatgaacttctcggtggtggtatttgacacggcacccacgggccacaccctgaggctgcttcaactttccccaccatcgtgggagcggggcctgggccggctttatgcagattcaagaaccagattcagccctttcatcttcacagatgtgcaacatgctgggcctgggggacatgaacgcagaccagctggcctccaagctggaggagacgctgcccgtcatccgctcagtcagcgaacagttccagggaccctgagcaaacaactttcatctgcgtatgcattgctggagttcctgtcccctgtattgaaacaaaaaaaggctgatcccaggagcctggcccaagtgccaagatttggacaccccccaataataaatttgtcaaaccaagcttcgttctttccccgaacccccgaagaaaacccctttgcaaaaa

SEQ ID NO: 174678 - DNA, 757 bp, Homo Sapiens
ggtcgactactactaaattcgcggccgcctcaacgaatggaggagtcggaacccgaacggaagcgggctcgcaccgacgaggtgcctgccggaggaagccgctccgaggcggaagatgaggacgacgaggactacgtgccctatgtgccgttacggcagcgccggcagctactgctccagaagctgctgcagcgaagacgcaagggagctgcggaggaagagcagcaggacagcggtagtgaaccccggggagatgaggacgacatcccgctaggccctcagtccaacgtcagcctcctggatcagcaccagcaccttaaagagaaggctgaagcgcgcaaagagtctgccaaggagaagcagctgaaggaagaagagaagatcctggagagtgttgccgagggccgagcattgatgtcagtgaaggagatggctaagggcattacgtatgatgaccccatcaaaaccagctggactccaccccgttatgttctgagcatgtctgaagagcgacatgagcgcgtgcggaagaaataccacatcctggtggagggagacggtatcccaccacccatcaagagcttcaaggaaatgaagtttcctgcagccatcctgagaggcctgaagaagaaaggcattcaccacccaacacccattcagatccagggcatacccaccattctatcctgcccgtgacatgataggccatcgctttcacagggttcagggcaagaccactggttgttcacagttgccc

SEQ ID NO: 174679 - DNA, 422 bp, Homo Sapiens
gaaacgaaagctccttctggtcagcatcccctcgtggatcaattcttgccagggtgcatttggacaataattttgcagggtcaggcaaagcagaagacaaacaagagtcaggctacctgggcaagctcaggtgtcgctgatgagtaatgcctgcagaaccctctggccagtctgctgcctcctcaagaagggctgttagctcaaccagatacactattatcagcttttaaacagcgcttgggggcaacagctttactccccgaaaagatgcagaaaatcagacactttcaggtgattctcaaaaacaggggacccaccccagcccacgacaccattcaaagttgagaaagcaaagtgaattaaaggggtttgcaaccgctttcagactcatccagctgccgtccacaatgacaaacatatat

SEQ ID NO: 174680 - DNA, 1437 bp, Homo Sapiens
  misc_feature (397)..(397): n is a, c, g, or t
  misc_feature (505)..(505): n is a, c, g, or t
  misc_feature (1086)..(1125): n is a, c, g, or t
tttttttgaaagctataattatttatttccaaagagtttaaagattaaacttccctcaaaacaaacaaaaggcaaggtaacatcccaagctgtgaggggctgagtctctcctaggtgcagggcagcacaggaactggctgcacaaggccagagaggttacgtggcggctctcttcaaattagaccacacagagcgcttcattccctgtgcagtcttcacatcttcccagtccagtttgacgtctggaacctcatcttctggctctggatccttcctcaagggcccccggggggacgcaaccacaatgggcagagggccacattcctcccggatttccacaacatggaggcccttcttatcagccagctgttgaatgggtttcccgtctgggagagcnccacggaagaggccctgggtgaggctgagcatattaatggacccagagaccttggcatacatgtctttgatgccaatgagccggcagatggtgatgatggccctgtgncagcgagggccgtaacctttgggttgtttcttcatcttgatatgcgtccttccaaatccttaatgaaatatcatggaatattgtatggatcttcatatcgttctatataatgcaaatggtgaactgctctgttctttgctttcctgaaagcatccatccgatcagtagctttcccaatagaaaaacctgcagctccttttccgttccccacagccaccaagacacggatcgatttctttcttccctctttcgcagtcatagtgaaaacgtttcttacctcaagtatcctggtatcaaaatcctcatatgtttctccacagggaccagggtcaggggggccaagactgatgcctccccatgagtttccactccatcctcgctcccgtttaaccttcatcttcttctttcggtcccactcttctctctgctggatcatgtctgcctccaccttctcctgctcttccttgcttctttgggcaatggtctgcactgctccatttttcataagagggacattcagtccgggccatagaaaaccataacgcccttcaccaatgatctgacccctgttcagatccttnnnnnnnnnnnnnnnnnnnnnnnnnnnnnnnnnnnnnnnngctccagcaccagtctctgctaaagcgcctttccacagctcatctgcagtcaatttagtgaagaaactatatggtctatactgctggctcatcaggtgactgggagaagaaatacagcattgtgtctgcagtgcacggctcaagctggcgtagggatgggtgtctctggttcccagtgatgacaaatggccattgccgagaacactcttccatgccataatggaagctgctggtaaggtgtttagggaacactgcctcccctataaatgacctccgtcccgctacacagcacggggaggcagcccacagcgc

SEQ ID NO: 174681 - DNA, 983 bp, Homo Sapiens
ggaggtgggggttagggtggggacggcggcaacatcgtgtaaaaaaagtgtcccagttcccatagcaaagagagctgtgaccgggtgttcgagcctctccagtacaagggggaaagccgcccggcgggggcggcgggcagggacatcatttggtttcctggtgctgtcagtccgcggggcgggcccctagctcccgtagtgcatggtgttggtcgggatggacatgggcgacgccatggagatggcggggccgcccatggtgaactggctgttgactgcatagtgggcactcgtgctgccaccaccactgccctgggcgccggaggaccctaaaggaatcaggttgttgtggcccacgctggagccactggcaataacactgctcaagtcataggcggtcggcatccctgccacggccatcccgctgctgaggttgtaggtgctgcccgtgttccacatgttttccgagggagatgtgtagtgggagccgggtggggctgagggcgttgtgcccgtgtatctaaagaaggggtttttcagatccaggaggttactggacttggagccggtctggtccacctgggccacaatactgatgtcgtagctctgtcttttgttggcaataagcagacatgtccctgagagcgtgtcccctgccttggcgaacagtggtgactggaacaggcaccgcacctggtaccagtgggtcaggggctctgtcggggctgtggacagccacacggtcattatggagccgatgaaagcaacgtcaaaccagaaagccaggccgtggaccagccctgaatgcagcatgtggaatttgaatgggatttctatcctgtgcaaatctccttctttggcttctaagaagttcaccgtgtacttgacagacttggccatcaggatccggatgtcaaatgtgtccaccacaggctgccggaaatactcatccaccgcggcacctcggagggccgacaggtcca

SEQ ID NO: 174682 - DNA, 923 bp, Homo Sapiens
  misc_feature (610)..(630): n is a, c, g, or t
  misc_feature (892)..(892): n is a, c, g, or t
gtagcgaggcctgggtggcgaattcggcacgaggccggcgcccagggcagtggtggtggcagcacgagtgcccactatgcagtcaacagccagttcaccatgggcggccccgccatctccatggcgtcgcccatgtccatcccgaccaacaccatgcactacgggagctaggggcccgccccgcggactgacagcaccaggaaaccaaatgatgtccctgcccgccgcccccgccgggcggctttcccccttgtactggagaagctcgaacacccggtcacagctctctttgctatgggaactgggacacttttttacacgatgttgccgccgtccccaccctaacccccacctcccggccctgagcgtgtgtcgctgccatattttacacaaaatcatgttgtgggagccctcgtcccccctcctgcccgctctaccctgacctgggcttgtcatctgctggaacaggcgccatggggcctgccagccctgcctgccaggtcccttagcacctgtccccctgcctgtctccagtgggaaggtagcctggccaggcggggcctccccttcgacgaccaggcctcggtcacaacggacgtgacatgctgcnnnnnnnnnnnnnnnnnnnnnatgaaaagaaccagtgtcaatccgcagaccctctgtgaagccaggccggccgggccgagccagcagcccctctccctagactcagaggcgccgcggggaggggtggcccgccgacgaggcttcaggggccccctccccaccaaagggttcacctcacacttgaatgtacaacccaccccactgtcgggaaggcctccgtcctcggcccctgcctcttgctgctgtcctgtccccgagcccctgcaggtcccctccctctgcnccactcaagagttagagcaggtggctgcagg

SEQ ID NO: 174683 - DNA, 476 bp, Homo Sapiens
  misc_feature (23)..(23): n is a, c, g, or t
  misc_feature (43)..(43): n is a, c, g, or t
  misc_feature (60)..(60): n is a, c, g, or t
  misc_feature (86)..(86): n is a, c, g, or t
  misc_feature (193)..(193): n is a, c, g, or t
  misc_feature (214)..(214): n is a, c, g, or t
gcagggctgtctggcacaagtcnacctgggcccaggagttccnaacgccgagacccccanccctgctgcagcacaacccaggcccnacacttctctgccatctcgagagcctcacgccctgaacgtggggccagtgcagcgccggctgaggcaggaggaggcgagcagggcccagcaggtgatggcgtcgggnacgtgcggggcactgccggcnatgccacaagcccagcatcggagcagatgcctggtcctcatggcaaagctcaaccacagaggaatcttgcgggacgctccctgcctgtcaaagcgctgaaggagggggaagaagaagtgccggccacggagttgaatctgctggggctgcctgccgggccctgcctcgggccaccctgccagacacaacttggagagccgctgggtcttgcttctgatccgctcctccaccaccatccgccagtcagacgccacggcgctgc

SEQ ID NO: 174684 - DNA, 438 bp, Homo Sapiens
  misc_feature (127)..(127): n is a, c, g, or t
  misc_feature (131)..(131): n is a, c, g, or t
ggatccccgtcagcattctgaatgtattcattcatgtttgtatctgtggatggaaaattttttccatgctacaaagtttggttaaaaacaagttgttacaaatcaataaataatttgctataactanttancctattgtaacaataataaatagaaaataaacagatgcaactactttgctatacacaagactttatcccgttataaaactaatataagtgctgccacttttctttctttgagtattttcccttgagatacgatttttttattgcacgttgctttgtgcttgtcttaccagtttcaggtttgtagcacatcaaagaattacaaacatttccatttagaactatgatcctaccaatcaggggttattttctgccatgtgttcatttacagattacaaacataaaagaagcaaggtacaaaaattaatgc

SEQ ID NO: 174685 - DNA, 964 bp, Homo Sapiens
  misc_feature (26)..(26): n is a, c, g, or t
  misc_feature (40)..(40): n is a, c, g, or t
  misc_feature (44)..(44): n is a, c, g, or t
  misc_feature (73)..(73): n is a, c, g, or t
  misc_feature (116)..(116): n is a, c, g, or t
  misc_feature (154)..(154): n is a, c, g, or t
  misc_feature (172)..(172): n is a, c, g, or t
acccatcttcttcttgtgcctccagnacttcatcacaggnctgnctttttatcaaaaaggggaaaactcatgncctttcctttttaaaaaatgcttttttgtatttgtccatacgntcactatacatctgagcctttataagccccccgggagnaacaatgagcttggtggnacacatttcattgcagtgttgctccattcctagcttgggaagcttccgcttagaggtcctgggcgcctcggcacagctgccacgggctctcctggggcttatggccggtcacagcctcagtgtgactccgcagtggcccctgtagccgggcaagcaggagcaggtctctctgcatctgttctctgaggaactcaagtttggttgccagaaaaatgtgcttcattcccccctggttaatttttacacaccctaggaaacatttccaagatcctgtgatggcgagacaaatgatccttaaagaaggtgtggggtctttcccaacctgaggatttctgaaaggttcacaggttcaatatttaatgcttcagaagcatgtgaggttcccaacactgtcagcaaaaaccttaggagaaaacttaaaaatatatgaatacatgcgcaatacacagctacagacacacattctgttgacaagggaaaaccttcaaagcatgtttctttccctcaccacaacagaacatgcagtactaaagcaatatatttgtgattccccatgtaattcttcaatgttaaacagtgcagtcctctttcgaaagctaagatgaccatgcgccctttcctctgtacatatacccttaagaacgccccctccacacactgtccccccagtatatgccgcattgtaactggctgtgttatatgctatgtacatgtcagaaaccattagcattgcatgcaggtttcatattctttctaagatggaaagtaataaattatatttgaaatgtaaaa

SEQ ID NO: 174686 - DNA, 941 bp, Homo Sapiens
  misc_feature (32)..(32): n is a, c, g, or t
tcgactctagaggatcccgtcagcatttcagnagcggaacggcctcctgaaccggcccaaccccttgctggcgttgccccccgcccgcccccacggcccagaggacaaggaccaggcagtggagagcgcccaagcggaggattactcgcagctgcccggagaagatcacatcctggagcacctgcccgcccggctcaatgaggccctgctggaggcctgcgtggagcccacggacctgctgaccaccctctccaacatgctgcctgtgcgtctggccacggccatgatggtgccctacacgctgccgctggagagcgctctgtccttcaccatccgcttgctggagtggctgcccgacgttcccgaggacatccggtggatgaaggagcagacgggcagcatctgccagtacctggtgatgcgcgccaagaggaagctgggcaggcacctgccttccaggctgccggagcaggtggagctgcgccgtgtccagtcgctgccgtccgtgccgctgtcctgcgccgcctacagagaggcactgccctggctggatgcgcaacaacctctcgctgggggacgcgctggccaagtgggaggagtgccagcgccagctgctgctcggcctcttctgcaccaacgtggccttcccgcccgaagctctgcgcatgcgcgcacccgccgacccggctcccgcccccgcggacccagcatccccgcagcaccagctggccgggctgcccccttgctgagcacccctgctcccgaggcccggcccgtgatcggggcctggggctgtgagaccccgagcctctcgaggaaccctggcctgagacgcctccaataccactgcgcagtgagatgaggggactcacagctgccaagaggggtcttgccgagggccccctcgccagccactcaccagctgcatgcactgagacgga

SEQ ID NO: 174687 - DNA, 797 bp, Homo Sapiens
agaccatccggtgggatgaaagaccaaacgggcaacattccagttacctggtgtatgcgccctccagagggacctgggcaaacacacgcccctccagactgccggatcaggtggaactgcccccgcgtccagtcgctgccgtccgtgccacatttcctgcgccgcctttccagagaggccctgtcccggctggatgcgccaccacctctccctgggggacgccctggcccaatgggaggagatgcccgcgcccgcatgctgctcggccttttttgcacccacgtggccttcccgcccgaagctttgcgcatgcgcgcacccgccgagcccggcttccgcccccgcggacccagcatccccgcagcaccaagctggccgggcctgcccccctgctgagcacccctggtcccgagggcccggcccctgatcggggccctggggctgtgagaccccgaccctctcgagggaccctgcctgagaagcctccattacccactgcgcagtgagatgaggggactcacagttgcccagaggggtctttccgtgggccccctcgccagccactcaccagctgcactgagaggggaggtttccacacccctcccctggccgctgaggccccgcgcacctgtgccttaatcttccctcccctgtgctgcccgagcacctcccccgcccctttactcctgggaactttgcagctgcccttccctccccgtttttcatggcctgctgaaatatgtgtgtgaagaattatttattttcgccaaagcacatgtaataaatgctgaaaaaaa

SEQ ID NO: 174688 - DNA, 782 bp, Homo Sapiens
gatgatcagcgtcaagaacttcatcctggcagccgacgtcatgaagagcatttcgctgctgcgctaccaggaggaaagcaagacgctgagcctggtgtcgcgggatgccaagcccctggaggtgtacagcgtggacttcatggtggacaatgcccagctgggttttctggtgtctgaccgcgaccgcaacctcatggtgtacatgtacctgcccgaagccaaggagagtttcgggggcatgcgcctgctgcgtcgggcagacttccacgtgggtgcccacgtgaacacgttctggaggaccccgtgccggggggccactgaagggctcagcaaaaagtcggtcgtgtgggagaataagcacatcacgtggtttgccaccctggacggcggcatcgggctgctgctgcccatgcaggagaagacctaccggcggctgctgatgctgcagaacgcgctgaccaccatgctgccacaccacgccggcctcaacccccgcgccttccggatgctgcacgtggaccgccgcaccctccagaatgccgtgcgcaacgtgctggatggggagctgctcaaccgctacctgtacctgagcaccatggagcgcagcgagctagccaagaagatcggcaccacaccagacataatcctggacgacttgctggagacggaccgcgtcaccgcccacttctagccccgtggatgccgtcaccaccagcacacggaactacctcccaccccctttttgtacaaaacacaaggaaaaacattttttttgccttggg

SEQ ID NO: 174689 - DNA, 563 bp, Homo Sapiens
tggtggtagcaacaacaactaacatttgtgtagcacctttacaattcacaaaggtgctttcaacatacattagctcattgaatcctcacaacaaccctgtgaggtaggtatttctgccaatttacaagtgaggtaactgaggctcaaaggttccaggacctttaaagcagatccacagcaaatgattggtaaagatggaccataaaaccagatcttttgactccaagtcccatttaatgccaagtgtttatttttcaatgtagaattatatcatacaatactaaagatgaaaggtcttacaactgatccaacttttcaaaaatggaagcttttataaggaaaaagttctttgatttatatgaaaattcatgacttgttcagttttaaaattaatttggccaatactaccatgactttagtctctatctttaggaagtaccaataaattatatagctttcccttcattgtaggatcacagaaaatcctctactgaagagcacatacgtaggatctgtgactctgaacactaattcaaagtccatccctccttgttgctaccaca

SEQ ID NO: 174690 - DNA, 343 bp, Homo Sapiens
catagcaacacatctacaagagaccctggttggttttacgttttgttttctattgttttttcccccttctcctgaatcagcagggatggaaggagggtagggaagttatgaattactccttccagtagtagctctgaagtgtcacatttaatatcagttttttttaaacatgattctagttaaatgtagaagagagaagaaagaggaagtgttcacttttttacatacactgcatttcagaaatttgatgtcttatatcagtagttctgaggtattgatagcttgctttatttctgcctttacgttgacagtgttgaagcagggtgaataactagggcatata

SEQ ID NO: 174691 - DNA, 402 bp, Homo Sapiens
gactctagaggactcccgtgttgtagcaacaagaaaatggacacaatgaaaaccagattccaccccaaatcctagagcaggagaagaaatatatttcagtacggaagaactgtgcttataacttatccggtaataaatatgtatttatatttactgaggatttttattataactttaaaatatgtgcatagatggcattcaaaatattgccatttttgacacttgctgcttgcattatgtctagcatacatagtatgtgcagagtaaatatttgtgaaatttatatctctacgtataaatcagaataatagacacatatttggatctttcaaatatgatttttagttaaactacaattcagagaacatgatttcaatttaagtgaaacgattataatattag

SEQ ID NO: 174692 - DNA, 353 bp, Homo Sapiens
catgaggctccaggtttcgtagtgtgaaagctccagaactgggatgggatttgaagcaagtgaaaaaggctaggcttggctcagtagggaaggtgacaggattcactaggagaacaggatggaaaaacaaccagagatcgtacacggagggctgcgtcactcaaatgaatttatcctgcaaatcaatccaggtgtacagtattctcccagcaatagtcaggaagccccagaatcagaggcacaaagggtgtcctgaagagagaagaagtgttatgagaaggcaaggcagaggagacaaggggtagggcagagcctactgtgtaggggatccgtgctagagtcgaccatcaagc

SEQ ID NO: 174693 - DNA, 286 bp, Homo Sapiens
actctcactggtcaaatctaggacaaagtgagcacaaacataaaaacagtaactgaggaaaaaccacggaaaaccagacaattagtgagtcaagatggataatagaatacatgggcagaaagagaaggctatgttgctaacagcagaacatgaaatgtggagggggatgatgcagtcagaatagaatcatattagagacaagggtgcagtgactaatgctggctacctgtgcccatcatgtattaagagcatttccattactttctgaaataagactgctacaggc

SEQ ID NO: 174694 - DNA, 871 bp, Homo Sapiens
  misc_feature (218)..(218): n is a, c, g, or t
ccgcaggcgggtagaggccagccgcttctggtagtagtactgaggaaactgccggaaggttctggtacatggaaaaggagaggaattggttcccggaatttctggtacatgagaccgtcggggcccacgtcagcatgactcccgacaggaagggtggacacgtagtgatggaacacccacccacctttgatcctggagcagagagccaccatcacccnccagcgcctgttcctgcttcccggagggtcctggcaccccattccatgctcccctccctcagggcccgccctgcccaccgggagccgttgttgatgaggatgctctcccggatggtcagggtgcagtagtaccagaccagcaggaagttgaaggcagcatctgtcaccctggagttgagcaggaagcggcaagtgaaggagatgaggatgaggatgatggtgaggtagagcttgaacttctcatactcgtccttgtaggcaaacttagcctgcttgtctcaggagcgtgacgttgacgttccccagaaccaggctcaggtacaatccattcttcttaggcaaataggcctccatgtcaaagaagaggccttggcgctctttcatctggttctccagctcctgtgcggccccctcggcctctgctgggagggagggtttgcatttcttcagggcgagggccagctcctggagccgcttcttctgccgcgtgatggagctggtgcaattgttctgaagtttggtcagctcctccagcttcaggcggtagagccgatgggtctcctggatgttctggaagtcctgctgtagatcctcccagtcccgcaggcagtcgcccagcgggcccgggggcgggggctgcatggctgcagcgc

SEQ ID NO: 174695 - DNA, 382 bp, Homo Sapiens
cgttagaaggcaaccccctctggtaataattactggaaaaaactgcacgaaagctctggtaacatggaaaaaggagaggaattggttccggaatttctggtacatgagaccgtcgggccacgtcagcatgactcccgacaggaaggtggacacgtagtgatggaacacccaccagcctttgatccgggagccgttgttgatgaggatgctctcccggatggtcagggtgcagtagtaccagaccagcaggaagttgaaggcagcatctgtcaccctggagttgagcaggaagcggcaagtgaaggagatgaggatgaggatgatggtgaggtagagcttgaacttctcatactcgtccttgtaggcaaacttagcctgcttc

SEQ ID NO: 174696 - DNA, 432 bp, Homo Sapiens
cacttagcctcgacagttatgcctccctcggcttggcaggcccttcccgtcccttatccattatgcaattaaatattctatgcttcaaggcagcactttgaagacaacttcccccggggtgccgaggagctagctcattattatgaagatgaaaaataaagaatcaacacattgatccagcctttccatccgagccaaatagttaacaatgggaaatatcttcacgactagagaaccttcggctaacaagtgcagaaagaatgatacaaaagcactacttggcagtcccctaatgagaagtggatctcagcacaaatcattagtggacagaattttataatgggtgcactatctggtggatgaagtttaacaccagtaaaagtgggacagctggacactttgtgtctccttcgaggctatagttgggtaccg

SEQ ID NO: 174697 - DNA, 1824 bp, Homo Sapiens
  misc_feature (92)..(92): n is a, c, g, or t
ttttactggtggtcagggattaccagtcaggcaaacccccaatttaattttacagggtcaggtgtacagggctgagctggagggttagggtncagggcccctcaggaaacttctggtctggcacagcagcagcagggatgccactctccctttgtggaatccttcttaatacaagagtgagaagcagaagagcaacccccaaaggaatcccagctcaagaccccaaagtacctgggagagctgcaaacagccatggagatagagagaggcggggagggaacacagtgactgagtctgagagacagcaaagcacctctccagcgaaagccactccgagatgcagcctaacttcctagtttgcatcagcaagatgagcaggcaccaccatggaaagagcacctggggtgtagctggttaccacagctcagccacattccccagaaacggaggtcagccctccatggcccaggaaaacatgggggatgaagggttggcacctgcagtgaccagatggagatacaatgcaggcagctgctaccatgcttggtgaccagggtacaagcccctgatgagcttgccatggcagccaaggacactggtgccggaggaacgacaggggcctgcaaagggacatccgaggagggggaagcaagctgggagcaagaccagcccagctaggtttcagggcaacagcaaagccccagagacatggaggcagatgagtcaaccttgctgggtgagaagtgagcttgcactgcatagggcaagaaagaaggtggaccccactcctccaggaggctgacagtctcagccaggtacaatggagggtccaggtcacaaggaagggggctatggtgagcatggatggagaaaggtaggcttgctgtgtggaaggaaggaggaggggaggggaagggtgagcaaagtggggctgcaggcatcaggctgtggctgatctgtggtcagcctggagctcagaggcagttctggattgacaggacacatggtgtggccacacaggtggggggacagtgatcccatagtccccagggagtgactgggaggcagaagattggaacaggacagagaagggcaaagaagcacatggctcatgctttaaaggtgtttttatgccaagacaagggggcgaggacctcatcttgaggtgagaagaagtcgttgccctgccagtccagtggtttgaacatgaatccagcccagtggacagggaaggcccagggagaggtgggtagggagggcatcctgcagaggctggggacaaggaggatggcacagaatgccatcacagccaggggagtctggcagggcttggcggaggcgccaaagttaccagcaagctagaaggcaacaactgatagccctcacaggaaccttcttgtgtagacccacagaagctcctggccctgcctgctttgcctgactctgaaatgccagacaggcccatttctaggtctgttctcctgaaaatacatctttggtgctgggtagatcctgaatcctgagaatacaagtttctgctcctggatacacagtcacatgacccagaagatcccagcccagtggctaggccaaggctgcagtccactccttcatccacagcccgttctccccaagggtctcacttcatcgaaggtgcagataacacagtagggtggcctccactggtctgcccatgctcagcaaccatggccaggagtaactgccatctccagggtgagaagcctcggtcggaggagatgacacccacttagggttcacagccccttcctgtgtcagttccaggaaccttggatcacagacatg

SEQ ID NO: 174698 - DNA, 410 bp, Homo Sapiens
ccatcaaggaccgtttgtgaaagggtcatttttaatctctgtggtgaggattccgagaatcattgtcatgtacatgcaaaacgcactgaaagaacagcagcatggtgcattgtccaggtacctgttccgatgctgctactgctgtttctggtgtcttgacaaatacctgctccatctcaaccagaatgcatatactacaactgctattaatgggacagatttctgtacatcagcaaaagatgcattcaaaatcttgtccaagaactcaagtcactttacatctattaacagctttggagacttcataatttttctaggaaaggtgttagtggtgtgtttcactgtttttggaggactcatggcttttaactacaatcgggcattccaggtgtgggcagtccctctgttat

SEQ ID NO: 174699 - DNA, 452 bp, Homo Sapiens
  misc_feature (169)..(194): n is a, c, g, or t
aaccatgcctaccagttatggaatggtggcaaccctctcaaactccgtgtttcctaacaccagctaaaggccagtcttataagcagtcctttctaagatttgcagtctcaggcctgttatattaactttttgtgcacatagtactagaaaactgttggctcagtcttcnnnnnnnnnnnnnnnnnnnnnnnnnnaactgtcaccgataccagaatagctcatctccaaggtaactgtaacagaacactcagcagattaaacagaaaatacttgcttattataattattaaaagtttggtagggtctatgtctgctctctggtgtgtcctggatcatcaacttggttacaacatggtgttaacatgtgggactgattgtgtttcttgttaatatttctgtttctcccaaccacgctgaatattaaatacctagttctatatctagtaccctga

SEQ ID NO: 174700 - DNA, 1199 bp, Homo Sapiens
ctgatatgtaaaattttacctctatttcagatagaagccaaagtaaaacatgaggaataaaaacatttatctatgtattcagaatcacacacaagttacctttacagttcaatttactatatagaaatcattgggttttatatttgcagttaacttttgaactgagattacaatattataacaaaaaactttacattaattcagaactttttagcataccaaattgaaatacataggctcaaatttcagatttatggcaaacagtcttcaaatacaatacagacatttcttaaaagttaccgtatcattcacatgtgatatttgcaactctgagctatttcatatagaccagctctcctgcagatatggcaaagttgatatgccatgaagttcaaggcctgtatagtcaagccaaggactcaaagttgcaccatctttaaaaaggtttggcatttctggaccacaacaatgcacaacatgtaaagaaggtaggaaacagttccccctccttgttaaatggttaaaaaaagttacatggtagcttggaattttgcataaaaccccataatataccttggaaaagtccaagggcaatttgatggcaatggattggggccctatatatatatatttttaatagaacccatgagatttaaatgggcattaatcaaatcaaaaaatattaagcacctactggtttaagagatttaaatttattagagattcatgatcaatttctttccacctcgaaatcaaggtgtaaaaaccagctattaagtgcattccaaacttctcctatgtagcacaggtagaactttctgtccattggcaccaaagtgaagtcacatttcctcttgggagacagaaattccacacctgaacacagagtaagttaggaaaaaatgacccctgttgtttattactattgtgattctgagatctaggatttctaatatactagcagtaaacaaagcaaattcctggcaacaactgtcaggttagtgatgctaactcccttcccccaaccaccataaaattttagtaagaaaagaattaaaagtaatgactaagcagaacaaattggaaataacaagaaactaaggggacagttcaaaccaacaacaaaagatcctaaatttgaaatcactgcaactgaagataataagtgtgcttcaccccaacccccatcccaactctcc

SEQ ID NO: 174701 - DNA, 401 bp, Homo Sapiens
aatctacagccattcactgctacctgccctacgttcaggacatgtcaaagcctttgcccatattactgggggaggattactagagaacatccccagagtcctccctgagaaacttggggtagatttagatgcccagacctggaggatccccagggtcttctcatggttgcagcaggaaggacacctctctgaggaagagatggccagaacatttaactgtggggttggcgctgtccttgtggtatcaaaggagcagacagagcagattctgagggatatccagcagcacaaggaagaagcctgggtgattggcagtgtggttgcacgagctgaaggttccccacgtgtgaaagtcaagaatctgattgaaagcatgcaaataaatggggcagtgttgaaga

SEQ ID NO: 174702 - DNA, 562 bp, Homo Sapiens
ctccgtacgcccaattcatggtccactgctcttctgtagccatgctactggttgttggccagtgtggtgatctcgcgactcttcggtgtttccatccggcagctgcagagaggcacttcctggaggccgtctgtctccagcacatctggaccgttggccaacccttctgtcttgtgaagacagaattcctttgactcggagatccagggagtccagagaaacttccatgtaccctgtgctgtctcctggtgccgtctgctcagcgcttcctgcagatgacttatacgactcagaaccgagggcatcgctgggcttctttctacttctccgcctccttttcctggctggcttgatccagggactgtcggtctttcctttcctcttgagaaatttcttcttaatgctggattccgaactcaggtcagactcgtcaccgccttcctcctcctccccggtgtccacggactcctgctcctcctcgactccccgtccatcttctgggcgcgatcagcctccgacatgctctccttggaagtcctgctgtcctctgtggggaacgcgg

SEQ ID NO: 174703 - DNA, 223 bp, Homo Sapiens
gttaagtaactgagcctggtccatctgctgtggcacctcccattcttgggggtccttagggaagggaaagggaagcagacctcccctgaaaatcatggatgcggtgccctgagtgcctggggtggcttggctggctggtgcctccccttttatattctcatcagctcccacaattaagacaggtccctgagtccccagtggcaactaggaagctcccagtttt

SEQ ID NO: 174704 - DNA, 774 bp, Homo Sapiens
gggaagccaaggccctggtcccaaataagggtatttaataggcacttaggggactattaggatgtccccatttctctcctctttccattcctctaatctcttctcaccccagtgtaacgaatcgctacaggttgttaccaaaatgcggcagcagtagttggaaatgagttattttgcattactaaagtgttcaatcacattatcacgggtcacatttgtatataaccaggagatggccaaataacatctactgcagtgattttgcaaattcagcatagtcaatgtatccatcattgttcttgtcatcatctctcaaaacaccatctattatgttaatcagttcatcttcactcattagtggtgcctgttcactcccttcctccttatggacatgagtgatggctgtggagagttctaagccatcaagcaaattattgccatcataatcatgcattttgaagtaatggagctgcaattcttgtggcgacatctccgcctctggtttgttgatgacaccttctagatgctccatgatatgctcttggtcgtgcactgtgttcttatccaggcccatgctgccgggttgggagaagctggctgcaggctcctcagccctggcgcctggggcacaaaaggcccagagcaggcaacacaggaagggggttctgagcagggatctcatggtcatcaatatccttacggtctccgaagcagacgcgaagccctccaacgtgagcctcaccagcccccgtccccaaaacgctcttcctcccc

SEQ ID NO: 174705 - DNA, 774 bp, Homo Sapiens
  misc_feature (487)..(487): n is a, c, g, or t
  misc_feature (556)..(556): n is a, c, g, or t
  misc_feature (606)..(606): n is a, c, g, or t
  misc_feature (676)..(676): n is a, c, g, or t
gacagtagcatatgttcatgtcaagcacctctcatcacagtcgagttccaaggaaaaattccagcgttttctgcattgggtgctgtgtcatctgaaatcggcacattccatggaggaaggagtcctgctttgttgcatgtatcctagggtttaatgttggtaaatgagtcactctagcatttgtagaaggctccctgagactcctgcagcagtcgaccaagcccaaggacataattgaatctggagagtcctggggccttgttttgaaaaagacttgaaatacacataggaagaaaggcataaaaataaatgttcacttgtctctgctgtgagtatgtgttccaacttttcagtgatggctttgagaattctcaaacttgactggctctaagtgtatctggtggcttttgtatcgtaacctgaaactggcttagtactttttcctaaaagctcaggatttgagaatgaggaccccttcgccaggaanacatgtatacactcaaaattttgcttgcagttctagggtgtttagacccttctcagatacctgtgcatnctatgggttttgtttttctctttgagacagtcttcaccctgttgcccagncttgaaaaccgcaatggcccgtgatctcaggttcactggcactttccaaccttcccaggggttccaaatntaatttttccccttccacccccccctttaatacaacttttaaaaatttccattcctattttaacccaccccaccacccccaaccctaaatttcctttt

SEQ ID NO: 174706 - DNA, 796 bp, Homo Sapiens
  misc_feature (67)..(286): n is a, c, g, or t
gtacactagtctgggcgcattgctcagcctgtattctctgcactttgggatgttccagtcttttttnnnnnnnnnnnnnnnnnnnnnnnnnnnnnnnnnnnnnnnnnnnnnnnnnnnnnnnnnnnnnnnnnnnnnnnnnnnnnnnnnnnnnnnnnnnnnnnnnnnnnnnnnnnnnnnnnnnnnnnnnnnnnnnnnnnnnnnnnnnnnnnnnnnnnnnnnnnnnnnnnnnnnnnnnnnnnnnnnnnnnnnnnnnnnnnnnnnnnnnnnnnnnnnnnnnnnnnnnnnntgtctcaaagagaaaaactaaacccataagatgcacaggtatctgagaagggtctaaacaccctagaactgcaagcaaaattttgagtgtatacatgttttcctggcgaaggggtcctcattctcaaatcctgagcttttaggaaaaagtactaagccagtttcaggttacgatacaaaagccaccagatacacttagagccagtcaagtttgagaattctcaaagccatcactgaaaagttggaacacatactcacagcagagacaagtgaacatttatttttatgcctttcttcctatgtgtatttcaagtctttttcaaaacaaggccccaggactctccagattcaattatgtccttgggcttggtcgactgctgcaggagtctcagggagccttctacaatgctagagtgaccgcacgcgtggctcgacgatatcccgggaattccggaccgtaccagccgacaaaaaaaatataccccccccaacctttgtttcttattactta

SEQ ID NO: 174707 - DNA, 1040 bp, Homo Sapiens
ttttagaagaaatacggactttaatgaagagttttccctttggtataagtgagacccgtggaaacatccaaacagcaaaaggaggccaggatgaaaacggtcaactctcccttatccacaaggccaaaagagggggggccggcttgctgtggtgtggccaccccgggcctaggctgggccgggcctgtagaaggtactcaggaactgcaggttttgcgtttcccctccatgaaactgacaggcattcgggctgacttctgcctctcagtctcgcggtaagagacccaagtttttctagtcctagatggaaataaatttcatctgcctcaggtctctggtataaaaggtgcgatcccagttacctcacatggcctaggcgaggaaaatgccaagagctgtaaaagggcttggaaaagtcaaaaaggtgatgtataaatgtaataattgattatcattttgtgctcaagaataagcaatggaaaagaaaataggaaagtaagtctacagccctaaaatatatgcatataaaactttaaaagaatgcagttccaactctacagatggtatgtggggattgtctactgctttatagtctcaatgcccctttggctcacctccacaaaatccacctgggagagttaactgtacaagaggcccaaattcagtcacccccaccccgccctcccagaaagggaggcagggcagaggcttcaggaggaagggctgcactttggcgtagagtacataggcatgcaacatgggagggcaggccttatgaaatgtatatacagaccccttggggtgaggggccccggccaggaggcactgagcaagggaggggtccatctcccgcctggccgggagtggggctctggggcaatctctaagggttgcatatccccagggagaggggacagctgccactcctgcctctgttatcccaacccaaaccggagagggtgctcagcaagaacacaggtcccagaagccaagaaggtgttggcatccctgtcattgaattcaggggtccaagaactgtt

SEQ ID NO: 174708 - DNA, 317 bp, Homo Sapiens
aatttaaggcaggaaagacgcaatcctattcctctattggttcacaacctgctgtggagacagcaggtatcataaatggtgtggtagaggtggaagttgcattaggtagtgtgggagcagagaaaaggagcatttgtttgagagtgggtcagacatgactctgtagaacatggggcatgaggtgaagcttgaagggatagaagtaagtagttgaagatgggactggaatagaagattggaactaagtcagatattttaatgtgatttcaactaatggactttatattgtaggaactgagaattcattcatggaatag

SEQ ID NO: 174709 - DNA, 677 bp, Homo Sapiens
ctcccctaggggttgtacttcagacatttccactgatgtaataggaaggagggggctcctgggccaggtcgtggagaaagcctttgattgtcgcagatccacagatagctagttaggctggtcaggacatgaaggacctcgtaaagggtttacaatccagaatccatgtgtgggcttgggggaaatcggaacattccgaaattatagaaagagctgtattgtgaatattcattttgggaataggtttctcagagtggcctcctgccatccaaagggttaagcactgatttttcattttaatcccctaaacttacaggagagaatgcaaaggcctttgtcccacggaaaagtgcagagctgggcctgtctcctagaccccttgtccaaaatgcttcccaatcctttcctgctgccttttaaactgactatagaatttactcttttacatcttttctggatcatttcaaggtcagaaggactgtgtaaggagataagtacacaatcagatggggccaaagaggaacaaatgattcatggaacatccccagggtcatatcactgtccgattgggatagaaggagtgtgtgtcttgtaagaaatcctctctgactaccgtcccacgccagacacatttttcctaagtaacgagtctcacgagagcggtagcgagctgatga

SEQ ID NO: 174710 - DNA, 360 bp, Homo Sapiens
ccgtgggttgtgtcgcttagtgatgtgacgctgcggcgtgtcttggttaagtgggctaccaaagaaggttggcaactttcgtgggatgcgtcagtggatgttccagtaacagttagcgcgtcgttaaacagcgactttaaaagtgcggtgaaattacttttcctttccctttcgacttcagacgtaaacctgaaagtagtgctgtacacggaaaaccgcgtacttcgcgttactgaatccagccagcgcgctcaataatccaggagtagacaatgacttcgtccctacataggagcgttgtgctggccatcgccatgtcgttggccggctgcggcgctttaaacgaacgcaaaaacatcc

SEQ ID NO: 174711 - DNA, 319 bp, Homo Sapiens
cccttaggctgcagcccaaggccaaggcgtgccatgatgctgtcctcagtaggtggagtcaggtagacaggaatgggccgagcttctatttacaaccctaagcccaaagctgactgttgcttcctggaaaaactcatcctgacatccacggcttgcgaaattcaaacaagttcaggatctgcaaactgacacattttaacccaagccctgatgaaagcgaatacctttctttcaaacacaagcagaattagtcacgggaatgaaagcgtgagggagtcgtattcggtggcattgctcatcttttcacagtctcacggat

SEQ ID NO: 174712 - DNA, 272 bp, Homo Sapiens
ggctctcgtgaactctccgtgaactacgctcccagagccggccagaaacctaacctggacagcaatgcaggaaacagcaaaaacataggcaacgtaggtatcacgtaccagaaagtgtacctggcatgattggcaatcttctccatcggctgcttttcaacataaagccagataagtgtcaggagggtgatcaagcggcagtgctgcaacaaatccaccgagcttatcgcttcgctttgccgcttctgacacgataatcaccagtctctcgg

SEQ ID NO: 174713 - DNA, 273 bp, Homo Sapiens
cccagaagtgccgagtgatcttcaccggtcacaactacatccgtccggctgacaagtacatccccgtcggtatgggcagcgatgtcctcaatgtcgatctgaccccgtacatgaccaagtgtccggtcccggccgagttcggcctgatcgatccggtcacgggtctgaacctgagtcaggtctcaatcgccggcatggtgtacttcatcaagttcgttacgacatgttccacaacatgcgtgcggccagtctcacgagagcggtaccgagtga

SEQ ID NO: 174714 - DNA, 270 bp, Homo Sapiens
cccctatcgccggagcaggcagcccggagtacgcgcagaaattaattaaattaccagtctgggtatttcacggcaccgacgatgaagttaccgatgtcaattacagccgcaatatggttgatagcataattaaactcgggggcagcacgcgctatatccgttacagcgaaatagagggcggcgatcaccaatcctcttggttaaccgcccatcaaaatagtgatttatggcagtggatgtctaagcaaaataaaagcaatcacacttcac

SEQ ID NO: 174715 - DNA, 210 bp, Homo Sapiens
  misc_feature (171)..(171): n is a, c, g, or t
tctccgtgagactctatactcacagcctcctgcacctatcaaaattctacacctagagtgatagatttgttgctaaggatgaacttacatggattcgtcattatcatccaaagtgcatagcttacactggctttcactcctgctgttgtacttacttttatttgaaaaagngtgtaataacatgatccagtctcacgaggcgggtccgag

SEQ ID NO: 174716 - DNA, 174 bp, Homo Sapiens
cataaatgaaactttccacagaaaagaaaatcatggacatggagaatagacctgtggtttccactaactttctcctttggcttaatttttttctaggattgtttgtgatgaagggcactgtggtctcagatgacctagattaaaatcttgttactaacctctcaaatatcacgg

SEQ ID NO: 174717 - DNA, 361 bp, Homo Sapiens
ggcacactgagacgattaacatgggatcaagtgttggagagctcttaggcaaagaaacctcaaatatcagaatgagaaaggacaacaccctcactcaaactcctggttatccacaggtgctgcgtccagcactgcagggcaacaggagatcctgaaagagggacagcacagcataacaaaacacacaagactcttttacatctagaaagtgggggaccaggaggcactctgttctgcagaacagaggcccctagactttagtccacatgacttttattagggaaggtgacgtagattaatgagcaaaatcaggtgcagtaatgataaagctctctttggagttcacgagagcggtgcggct

SEQ ID NO: 174718 - DNA, 351 bp, Homo Sapiens
aatcgagctcggcccgctctcgtgagactgtccatgacaagcttactgccgcaccatcgtgatcaacctcgaacaagattgagctccaaaccccatcgagcaagagcgggtccgccgtttcggcaagggtcgttaatgtgctcgtcagcgcagagaccgtaatccaggattcccccccatgctcacgtgccaatgtcgatgctaaaagccgaacaccgcgtaccgggtcaacagccataagtgcactgaaccaggcgttcggcgcattgcgtgtctctctgccgtcggtatggttcctcactgctcgcacgagcggctgtaacttgatcaagccatcaagcgctgcggtgg

SEQ ID NO: 174719 - DNA, 274 bp, Homo Sapiens
  misc_feature (238)..(238): n is a, c, g, or t
cctccaaagaattcaagaacctgatgtttaccggcggccgcctggataaagccaaagaccgcgattccactgactacgaagagatcgccctcaacaacaagaacagccgttttgtcagcggcgctaccggcaagcacttcaacttcggcggcgtggactacaagttcgctgacaagatcaccggcagctaccacttcgcccaactcgatgacgtgtaccgccagcacttcctcggccntggtcgcctcgcgcccagtctcacggaagcggtgcc

SEQ ID NO: 174720 - DNA, 283 bp, Homo Sapiens
ggtgagactcagtgagtcaggagatcaactaatttttcttttagcgaatcaaacagacttccagaggcacaattctctgatttaacggaggtttaacgctatccctcccacagacttatagagcatgaaatgataaaattttgtgaagcgtaaacaaaacattccacctaaagccacaaaatcccacactctacctgataaaaattgccacgcaacttaattagcacggaaaaccgtttttcgccaacacgaacaaaatcgcagcaatacatttgctataacc

SEQ ID NO: 174721 - DNA, 877 bp, Homo Sapiens
gacccacgcgtccgccgagaaggaggtccagcagtggtacaaaggcttcatcaaggactgccccagtgggcagctggatgcggcaggcttccagaagatctacaagcaattcttcccgttcggagaccccaccaagtttgccacatttgttttcaacgtctttgatgaaaacaaggacgggcgaattgagttctccgagttcatccaggcgctgtcggtgacctcacggggaaccctggatgagaagctacggtgggccttcaagctctacgacttggacaatgatggctacatcaccaggaatgagatgctggacattgtggatgccatttaccagatggtggggaataccgtggagctcccagaggaggagaacactcctgagaagagggtggaccggatctttgccatgatgaataagaatgccgacgggaagctgaccctgcaggagttccaggagggttccaaggcagacccgtccattgtgcaggcgctgtccctctacgacgggctggtatagtcccaggctggagctggatgcctgggaaccactcacctccttctgtgccatgaggccacctcagccctgacaccaaccccgtgcgtccacccagccttcttccgcatccacacacagccggctgcccttgacccgggaggccccggctctcctctcccctgtcctgcacccatcccccgcctgaagccaccggctccaattgccagcaacctctgcttgtccggaaaacgacaacacgaaatggaaaaggctacagccctctgcataaaccaaggactcggctgcctcgcaggcagcctccgttcctcccgctctcttgcgcgtgtgcttttgttttttattttgaacagacgtttt

SEQ ID NO: 174722 - DNA, 266 bp, Homo Sapiens
ggctgatcagctgagcagccagctcggcatcgccctccagggcaacctgcatggcatggttgactatgtgtgaaacttcgctgccacgctcctgcagcaagtcctcgatcctggcagtacagagaacatctcgaagcccctgcggagcagcttcaagtactcgtagccccttcgtcgtcagctgataggcgtcgtcgacgaagccgcgctcggcgaagcgagcagcatgagacggaccatgtggctaccgacagacaggggatcct

SEQ ID NO: 174723 - DNA, 387 bp, Homo Sapiens
  misc_feature (198)..(206): n is a, c, g, or t
ttgcgaacatagaggatccctacatgtattcgggctacaagccaagtgcagtgtttgtggccctttatttaaggttgttttcttatattattctgcatataaacaatgacgtttaacatggaaaaaacaacaacaacgaaaacctccattgagtggagccacactttaaatgaaaatttccctttgactatactcagnnnnnnnnntagaattttgaatatatttagcaggtgttgtctatttttacctaactccatatgctgccagtatcgacttcatgacatttgcccaaataaaattttatttttgcctttataagattttcttggaaaaaatgaattgaatattctgcaagaaaaagttaatttaaaaaggcaatggctcggc

SEQ ID NO: 174724 - DNA, 271 bp, Homo Sapiens
taactatgtatgtcgtatatcacggtttcatcacacaaccccagacagtaaaacacacagtggtgaaaaatacaccgatcctttcaaactcggttggagagacttgaaaggtctgtatgaggactattagaaaggaactgcttatatcgaactatcagaacttaaggaaatgtctgagtactactttgatgggaaagggaaagcctttcgaccaattattgtggcgctaatggcccgagcatgcaatattcatcataacaactcccgacaa

SEQ ID NO: 174725 - DNA, 428 bp, Homo Sapiens
  misc_feature (415)..(415): n is a, c, g, or t
tatcatgtattcgccatgtatgtcgtaagggtccttcgttgtcatcagtgtacttgtaattgtcttcaggatatctcgttgttgtcatctgcactctcattgttgtcagtggtttcgtggtcatcagcactctcgttgttatcagtggtctcgttgttggggacctcattgtggtcaggattctcgctgtcgcagatgttctcattgatgtcagttatctcattgtcagtggtctcgaagtagtcggtggtctccatgaagtcagagatcttgatggcatgaattgtctcatcaatgtctgagatctcgcggaaaatgtcttccactgcataatagtcaggggcgtcttccatgatcaccacctcacatctgcacctggttgtacgtttcttcatttcttgcttctttctcttgntcctgagcccctt

SEQ ID NO: 174726 - DNA, 300 bp, Homo Sapiens
tgtcgaccatgtgcatatatctttatggtcactagaaagtctctttatgatactttttattgtactgtttttcatttcacttgcaaaattttgcagaaatcctcctttctacccataaattacatatatttttcttctttagtcatggagaactccccccctcatctcttccctattatctttccctgtgtactggtattattaaaaagacattacatacgcaagtctttctcgacaatcaagaatgttattaatgtgtaatactgagcactttacttcttaataaaaacttgatatagt

SEQ ID NO: 174727 - DNA, 1389 bp, Homo Sapiens
  misc_feature (1021)..(1021): n is a, c, g, or t
  misc_feature (1170)..(1170): n is a, c, g, or t
  misc_feature (1188)..(1188): n is a, c, g, or t
  misc_feature (1356)..(1356): n is a, c, g, or t
tcaagttcccacaggccacctccttctggccactcactgcgtgggacccaggcacctcccttctccatcctctctggattgtcagtaatgtcctggaacagaagcctgtaggatggccttgggcacggagaagccctggggtcagtgtcgtgcacggatggcggcagtgttgaacccaggaggctgaacccggcccaccacggaagatgagtgcatggcaaccgcctgccttcacgtcgctccacttggtaaccccaaggtctgggctgttctaggtattgcttcacgtgccccagcaagcccttaacaagagggcctggttccctgaagaaccaatcccaggaaggggccttgatccctccgccttgctgagagtgaaccctcgtctctcctcaccctccatttcatttctgggaattggggcttagtttcgaacctttggcaaggctgttcttactaatgcccaagcccctttacccctctccctataggttacacaggggagaccagggcctcggcagaagactgctgccacacttccgaatcattctgcttgccaaataggtcatcttcaccagttgactgacccaagtttaggaccattggtatcgtgtgtttaaaaaacacatataaaaaaactcttgtgaatattcttgttatgctagagaggaaggtacttctccctctacggctctgcgctggggcctatggtagtaaagttgtttactgtcctttttctgcttcccctggaaatgacaggcattactctcccattggcctcccttccctttatagaaagaccaagcgggccccactggccaagaggtacggtatttggcagtctgagttctcagtaatttggaaagttaaggagttggttcctgtgtcacctttcagttagtgtgggaaaggaagacttctgtcttcctgagatcagtgcagtctcaggcctttggagggctcatggatcagagctgagactggagggagaggcatttcgggtagcctaggagggcgactngcggcacagtaaccgaggaaggcaaggttgtttcccccacgctgtgtcctgtgttcaggtgcgacacacaatcctcatgggaacaggatcacccatgcgctgcccttgatgatcaaggttggggcttaagtggataagggaggcaagtnctgggttccttgcctttncagagcatgaggtcaggctctgtatccctccttttcctagctgatattctaactagaagcatttgtcaattcctttgcctcccaactgacaacacacgttcatttttccaaccttcctaacatcttaaacctttcttctggggagaactaggaaggacagaatttggntttgattctcttagggcgctgttgcacaaggca

SEQ ID NO: 174728 - DNA, 709 bp, Homo Sapiens
  misc_feature (57)..(108): n is a, c, g, or t
  misc_feature (112)..(147): n is a, c, g, or t
  misc_feature (185)..(350): n is a, c, g, or t
cccctcctccccgcttcccaccacccgcccacacacaccaatcacttagggcgctannnnnnnnnnnnnnnnnnnnnnnnnnnnnnnnnnnnnnnnnnnnnnnnnnnnccgnnnnnnnnnnnnnnnnnnnnnnnnnnnnnnnnnnnnagtcgacggtaccggacatatgcccgggaattcggccnnnnnnnnnnnnnnnnnnnnnnnnnnnnnnnnnnnnnnnnnnnnnnnnnnnnnnnnnnnnnnnnnnnnnnnnnnnnnnnnnnnnnnnnnnnnnnnnnnnnnnnnnnnnnnnnnnnnnnnnnnnnnnnnnnnnnnnnnnnnnnnnnnnnnnnnnnnnnnnnnnnnnnccaaagggaaacactaaaaattccctatagatatattccaggaaatattttaattgggctgattttaattaggctgtatcattgatgattactggaatcgattttatgtcttttgtattttaatcacttgagttaatcaaccactggcaaatcccatttgacaaagattagcattgtaaaaaacagatactgtggtagatttctagaaattcattcacatttaagacttctaaaaatggaataatagccttttgtttttcatgagcatattcgcacccctatatgaattacagcatttaaaggttcaaaaatcagtaacttttaatctaggaaattggaaaaatatttaagtggcaaag

SEQ ID NO: 174729 - DNA, 636 bp, Homo Sapiens
atcagaggctagaacaggaagttaagtgggaactggactttgggggccacctataacgaggcctggagaaacgtcaccatatttcctcccctcctgcctaatgggaatatcagttacactgaaaaatttaacttccctgtgcctcaaaacatttagcaacctgaaccagtgactttttgtcatctctgtgctgagtttggtccaagttggtcaatctcattctgtataggcatttaacatcctacctgtgactgtctgcatcctttgctggctcttttttgcccaaagtgcaaatgcacttcttcagatttacttctcaagtgagaaggtaagagctggtctctgccactgttccaggcgagcaggctagagtctaatatacttatgctagcagttaccatttgccacattggaagcaagagacaaatcaccaggtgaatggagggtcttctgagaaattcagtccctaaaacatcttctctgccttgatagaagaacagtgtcaagtggcaaccttttcatttagagaagtttttcttgttccaggcccttcaggatcaggatctgactgcaagactccccaaaatgggtacccatctccttaagttcccttctgtagcctctgatacggggatc

SEQ ID NO: 174730 - DNA, 339 bp, Homo Sapiens
taatcagaggctatggagtggggggcgttgcagggcagaagttgctttttgagatctttcttgccttaagcctgaatgcttcatgttcccaaagaatccaattatgggaacaaaaattccctcatattcagtttcactttaaaatacaataaacaggttacattctcaattgttattaagttgcttatacaaacttaaagtcaagagcataacttcaggatctgcactttttatgtcaagcgctttaactaagcagtttagggcctcctggatttttccacactcttttagttcttttccacgcttaatagagtctatagtcattgtgctctcgtaatc

SEQ ID NO: 174731 - DNA, 277 bp, Homo Sapiens
gacacccatctccctataggtagaaagggtatgcaatattgacatccccagagctgtgctgtttgatgccattgccctcctggggaactgaagacagagagagcaatggtggggctagagagagaaaaaacagaaaaatgtcaccagagtttccagagctgttaattgtgttcctctccccccacattcatcagtggccttagtgactgttttctacagaaagggtaatatcatgggctgtatggtcaggccctgggctattggatgctatccggta

SEQ ID NO: 174732 - DNA, 455 bp, Homo Sapiens
ccggaaacgaggctaggaaagtgatcttagcctggggactcctaaatgtatctatagctggaatgatatatactgaaatgactggaaaattgattagttcatactacaatgtgacatactggcccctctggtatattgagcttgcccttgcatctctcttcagccttaatgccttatttgatttttggagatatttcaaatatactgtggcaccaacaagtctggttgttagtcctggacagcaaacacttttagggttgaaaacagctgttgtacagactacgcctccacatgatctggcagcaacccaaatccctcccgctccaccttccccttcaattcagggtcagagtgtgttgagtaatagcccttctcgttcgcccagtaccagtcccaagttcaccacacgctgtatgactggttacagccctcagctgcaaggtctgtccatcaga

SEQ ID NO: 174733 - DNA, 366 bp, Homo Sapiens
aagtatgcttgcacttcccactccacacatctggtcccacatccccactttcagtgcatcccccatttcagtgcaggatctttaggggtggcgagtaccttgctaaactatgtcctttgcagggtttaacacagtggtagggaatgctcataggaaaggtacaataaatatttactaactgggataaaatactcaacttttaaaataataggggaaaaagtaacttcatttattgatatgctaaaaggtttatataaaatccactaaaaaaatacagcaggggtttcacaagtcagaacatcatcattctatatactgctgaaagtcggatagacaagtaataaagataaagatgagttattgaat

SEQ ID NO: 174734 - DNA, 197 bp, Homo Sapiens
aagttggagtactgactcatagagataaaattctttgaaagaaatgtactgttttaagatactgtaaaatgtggaggcagggcaaacgtttataagggctgttatgtatgaaatgtgcctcggaccctaaatccacggactttgcgaaaatcactcaaggagactgtgcattaagttcagagtacaatacaaactgg

SEQ ID NO: 174735 - DNA, 936 bp, Homo Sapiens
  misc_feature (654)..(662): n is a, c, g, or t
ggatagaccagtggcactgttgtttcacaagatgatgtttgaaactattccaatgttcagtggcggaacttgcaatcctcagtttgtggtctgccagctaaaggtgaagatatattcctccaattcaggacccacacgacgggaagacaagttcatgtactttgagttccctcagccgttacctgtgtgtggtgatatcaaagtagagttcttccacaaacagaacaagatgctaaaaaaggacaaaatgtttcacttttgggtaaatacattcttcataccaggaccagaggaaacctcagaaaaagtagaaaatggaagtctatgtgatcaagaaatcgatagcatttgcagtatagagcgtgcagataatgacaaggaatatctagtacttactttaacaaaaaatgatcttgacaaagcaaataaagacaaagccaaccgatacttttctccaaattttaaggtgaagctgtacttcacaaaaacagtagaggagccgtcaaatccagaggctagcagttcaacttctgtaacaccagatgttagtgacaatgaacctgatcattatagatattctgacaccactgactctgatccagagaatgaaccttttgatgaagatcagcatacacaaattacaaaagtctgaannnnnnnnnatcaagagggataagacaccatgaaaataaacttgaataaactgaaaatggaccttttttttaatggcaataggacattgtgtcagattaccagttataggaacaattctcttttcctgaccaatcttgttttaccctatacatccacagggttttgacacttgttgtccagttgaaaaaaggttgtgtagctgtgtcatgtatatacctttttgtgtcaaaaggacatttaaaattcaattaggattaataaagatggcactttcccgttttt

SEQ ID NO: 174736 - DNA, 1065 bp, Homo Sapiens
  misc_feature (737)..(737): n is a, c, g, or t
gatgatttcctagctgggaagacaccgtgacatcaggccagaggtttccaatcagccttgcctgctttcatctctcccagcttagcctctggctgtaagcttcggtcattgcctccatgcccttgcttggctcaagcaccaccaatcgctttaatgcttcagccaccgcatgaggccctgtccaccacctttcctggccttgctatgggatgcttaccaaaggatggccctcatccaccctcccaagctgtgcgagcatgcaaggccccatggcctcacactgcagacacccctttccagccacaatccaccatcatcctgacgatcccacaactgggacagaggctacatctgccctagggaggtccttcagaatctgtggagcaagaaaggatttggggaagcttggggactgactccagagccccctcctaagaaccatcaccaccactcagccaatctgttctgggccctgattttgccacacctccatcctgtagcccattctctgaccccaaggagtggcagaagatcccttcactcagagaagcaaggctgatattagcttgttgaatgtaagagacacaaatgaagaagaacaaagagcctgagaaagcagcaagaggacatgatgaaaaatacgtggagttgatgagaaaggggagccaaggctttatacgtctaaagaaaatattcagtagctgaatccgccccagtgattagcctgtgggcacccngagcaagggctgccatgggatacagcacccatctacaaagacctctattacataaacactgcttcttacaggaaacaaacctcttctgggatctccttttgtgaaaaccagtttgatgtgctaaaagtaaaaagtctattttccagtgtggtcttgttcagaagcagccagatttccaatgttgtttttcccctccactcagaaacccctgccctttcccttcagaaaacgatggcaggcattcctctgagtttacaagcagagactcactccaacccaaactagctgggagttcagaaccatggtggaataaagaaatgtgcatctg

SEQ ID NO: 174737 - DNA, 576 bp, Homo Sapiens
cgcgacggcgtctatgtcatcaaccagcatggtgaggacaccttacaagcgggccaagctgcttaacgtgggcttcctagaggcgctgaaggaggatgccgcctatgactgcttcatcttcagcgatgtggacctggtccccatggatgaccggaacctataccgctgcggcgaccaaccccgccactttgccattgccatggacaagtttggcttccggcttccctatgctggctactttggaggtgtgtcaggcctgagtaaggctcagtttctgagaatcaatggcttccccaatgagtactggggctggggtggcgaggatgatgacatcttcaaccggatctccctgactgggatgaagatctcacgcccagacatccgaatcggccgctaccgcatgatcaagcacgaccgcgacaagcataacgaacctaaccctcagaggtgaccccagcaccctcaccccttactccccagaggcaacttcccaatatccccaactcttgaccccaagtggcccaatccctgatcccccagtgggggacctccagcatcctgatcgccagcgggtcc

SEQ ID NO: 174738 - DNA, 474 bp, Homo Sapiens
gcgcccgcgggcgacatcgttaaatgtccaataaaaccagcagctattgatacacatggtttatgtgttctgggttttgatgtatattgtgaatgtcatatagtcgtaagtaatttgtgctgtagctctgatcgttattacttcactatgaggcccaaggagattgctgtgtgtcaaatgtattctgtggtattaaaataaatcataagactaaataataacaaaagtttaaaatctgagacaggtaagtacatagagacagcactaaggttctttgaattactttgactaattctgagtctgaacagctccttctccacagaggtgtaagtgcacactactataatctttgtgaagttggtaagataggttggggttaccaaaataccagaaacgagatgtctcaaatttttaaaaggcacagatttttaaaaagctgtatcagcaaattagatgtgatcgcccagcgggcgg

SEQ ID NO: 174739 - DNA, 585 bp, Homo Sapiens
tgcgcgggcgacacagcagctaattgcacaaaggacagcacatctggtagtggtgaaggtggaaaaggctataccaaagaccaagtagatggagttctcagcataaacaaatgtaaaaattactatgaagtacttggagttacgaaagatgctggtgatgaagatttgaaaaaagcttatagaaagcttgctttgaagtttcatccagacaaaaaccatgcacctggagcaacagatgcttttaaaaagattggaaatgcttatgctgttttaagtaatccagaaaagcgaaaacagtatgacctcacgggcaatgaagaacaagcatgtaaccaccaaaacaatggcagatttaatttccatagaggttgtgaagctgatataactccagaagacttgtttaatatattttttgggggtggatttccttcaggtagtgtacattctttttcaaatggaagagctggttatagccaacaacatcagcatcgacatagtggacatgaaagagaagaggaaagaggagatggaggtttttctgtgtttatccagctgatgcccataattgtattgatcgcccagggg

SEQ ID NO: 174740 - DNA, 566 bp, Homo Sapiens
  misc_feature (545)..(545): n is a, c, g, or t
accttagcgcccgcgggcgacagctcattgatccaaactccagaaggaagggaggagaacagaacacacataagtcccagataagcccaaacctcaccatggctgtgtgttccggctccttttctctttcctctccttccaaccacaaacagccaaaggcaggaaatagaagggcgggaaaggaaggaggcacagtcagccagtctagagaacagaagcaacgacaggattctcatagctatctgggacttggaaaacctcaatgacttgttctacatcaccctgtgctggattctgaacgtggagttaggaagtcacacaaacggaaatcaaaatcaatgcaaggagaggatatcctttcagcttctcggtacctgctcagcccgttacttctaagccttccaagcatttcaagcctcaggttacgaccatttttacaaggccactccctccctgaaggtttcatgaagaacacctgagggctctgtgggctaaaataggcccaatcacttctgacgggtctacaagagcgggccagctctacntgtcgcccgcggcgtaaggtt

SEQ ID NO: 174741 - DNA, 354 bp, Homo Sapiens
gggtgggatcaccatcttctccaccagcatagccaggcatctaggaattctcctgtgccatcaggcaagtctgagtgttccaatccctcagaaacaggaactttacctcccatggacagagcccagttgaaagtttcaaaaagagcattgtggcctccggagcagagaaatttttgcagcatgaggtggtagggatacttcctctcatcaaacagcattggggatgtgaaaccaactgaacagatgaagaatgtcagcctgaatcggggaagtagctgtatatggtgggggctcccaagataacccgcttagtcaagagcttagtgagagctgaggctgttgatcggccagcgg

SEQ ID NO: 174742 - DNA, 681 bp, Homo Sapiens
ggccagctctggacagaagcctgggattagtgagctgtgattacatcactccttttctgctcctccgcctttaagagcaagcttctttatgctatccctggatggttttgttccaacccctatgctatgaggtctctcttgcccttggagatttaaagttttgtatcagaaatagatttgaagatcatcatgaccaaatgtagttagtgctatgtgagaaggatatctatcacacaaaatgctttatggtcacagagagattagttctgtctgaagggaaaggggagaagatgacaaacatgccatcggggcaattaacatataacccttccacgggtgagaatactggaccaaatgacctttttggggtgcctttctgttgtgaattttctagtttattaataacccaagaactgtgccttatagtccatagtattcacacctctcaaaaccaaggtacttaggattggggaggaaaaagactctactaatttttaaagtagacctaaacaatttgcactgcctgtgtctttgacctgattttttactctcacctttctctatctgtccagttacctttgtatactaccaagctttaaccttctgtcctctcaacttttttaaattttactttatttaactaccatttatcaaacagtcattacctggcgcccgcggcgc

SEQ ID NO: 174743 - DNA, 926 bp, Homo Sapiens
  misc_feature (759)..(760): n is a, c, g, or t
  misc_feature (765)..(765): n is a, c, g, or t
  misc_feature (768)..(769): n is a, c, g, or t
  misc_feature (777)..(777): n is a, c, g, or t
ggattgtgctcatggacgatgccatggactgcttgatgtctttttcagatttcctctttgccttccagatccagttttactactcagaattcctggacagtgtggctgccatctatgaggacctgctgtcaggcaagaaccccaacacagtgattgtgccgacgtcgtccagtgggcagcaccgccaacgacctgccttgggcggggccggcacgctggagggcgtggaggcgtcgctgttctaccagtgtctggaaaacctgtgtgatcggcacaagtacagctgcccacccccagcacttgtcaaagaggccctcagcaatgttcagagactgaccttctatggattcctcatggctctctcaaagcaccgtggaatcaaccaagccctcggagctttgcctgacaagggggatctgatgcacgacccagcaatggatgaagagctggaacggctgctggcccaggtcccaggcctggtcaactcggtcacagccagtccagaggccagttgcctgccttcccggacccctccccgggttggctctccctggagacctctccatcattcccgaaaagtggatggagagagtgatggctccactgaagagacagacgagtcggagacttgaggagtccaaagggtcctgcccacagcgccctgtacctgctcccacccagcccttggtgtgcccacccagcctcctctccagcaccttgctgtgctgccctctgctgctgacaaggtgaataacagcnncccanagnnacccaagnccagaagggctctgatgatcagcccagccagtggcccccgaaaggtgaatggcctgcctctcccctggccctatcaacctgtggaacttcacttaagcccccaacttgaaaggactgtggctggaggccccccttgttcacccccgtaa

SEQ ID NO: 174744 - DNA, 1230 bp, Homo Sapiens
  misc_feature (659)..(788): n is a, c, g, or t
  misc_feature (805)..(817): n is a, c, g, or t
  misc_feature (819)..(872): n is a, c, g, or t
  misc_feature (929)..(975): n is a, c, g, or t
  misc_feature (1042)..(1051): n is a, c, g, or t
ggcctccaggatcaactgtgggcaaagtgcctgcctctgacctcatcatggttctagttctcatacagaactccagaatttttaaagaactctataattggattgcaaactaggatgctacataggattctggtattccacatccaatatggatttctagaatgctgtgattaaaggagccagccaggtgtaatacagtcaaggcagcccccagcctagagacaatctgtaaaatccaaagttgctggtgttgggaaagcagggggacatgtgtccctcagctcagcagaggctgtggtacaacatggtccttggtgaagacctgcacccctggaacctcccaccatcatcacaactgtagtctcatttgcagtggagaaaagaacccgacgtcccacagccagatatacacccagctccatgccagcccttcatgtttaccttttgctttgttaattacatgtcagactcctagagggcctccagactaataggaagcatttctgtaaccaacctgccacccactgattcagaaatggaaatcacattccacaatctatggcttctaccagctagcccaggaaatacttgaaatcagcattccaattagtgttgagtctcttgattgtgtcatttaccaattaaataactgagacctnnnnnnnnnnnnnnnnnnnnnnnnnnnnnnnnnnnnnnnnnnnnnnnnnnnnnnnnnnnnnnnnnnnnnnnnnnnnnnnnnnnnnnnnnnnnnnnnnnnnnnnnnnnnnnnnnnnnnnnnnnnnnnnnnnttttttttttggggggnnnnnnnnnnnnntnnnnnnnnnnnnnnnnnnnnnnnnnnnnnnnnnnnnnnnnnnnnnnnnnnnnnnggggcacatttttttcccaaaaaacctggggcataaaaaaggggggtaacccccccnnnnnnnnnnnnnnnnnnnnnnnnnnnnnnnnnnnnnnnnnnnnnnngggttcctgagggcttttctgggattttccccaggaacccccaggggacttcaaaaataaaattaannnnnnnnnngggaaaaattttagaaagaaagcggggaaaatcccataaaacccccgcccgcccagggggaacccctccccaaagcggggttggaaaccccctaaaatcccccgggggggcatccccacccttgggcgcccgtttggaaataaattattttcccccccgggggaaaaaacgggggggac

SEQ ID NO: 174745 - DNA, 410 bp, Homo Sapiens
gacacgaccgttatctctgccaccacatagtaaagataaagaaacaaaagataacctcaacaggctgcccaggaagaaagccaaaagttgtgacatatcggatcagctttaaaggctgaaattgcccaagatggaatcacaccaactgttgctgggaattcaaccaataacctgaccacacagaacaggttaatgttggcgttgtacactgagaagtcaataaaagttgccctggttcctcggtccagccagacatttttcttgaggctagcaacttgtgcagctgtttcctctcttgttcttgacaaatccagataatagccagctccactataagttgcaatgattccccagtggctactaccattcaagtctttttcacttgtgtagatccaagcggttccatttcg

SEQ ID NO: 174746 - DNA, 867 bp, Homo Sapiens
  misc_feature (119)..(119): n is a, c, g, or t
  misc_feature (851)..(851): n is a, c, g, or t
gtagccaggtgagaataatattggtggctgtaggattctgactgctgcacattgtctcagagccagtaaaactcatcgttaccaaatatggacaacagtagtagactggatacaccccngaccttaaacgtatagtaattgaatacgtggatagaattattttccatgaaaactacaatgcaggcacttaccaaaatgacatcgctttgattgaaatgaaaaaagacggaaacaaaaaagattgtgagctgcctcgttccatccctgcctgtgtcccctggtctccttacctattccaacctaatgatacatgcatcgtttctggctggggacgagaaaaagataacgaaagagtcttttcacttcagtggggtgaagttaaactaataagcaactgctctaagttttacggaaatcgtttctatgaaaaagaaatggaatgtgcaggtacatatgatggttccatcgatgcctgtaaaggggactctggaggccccttagtctgtatggatgccaacaatgtgaccttatgtcctggggtgttgtgagttggggggaaaactgtggaaaaccagagttccccaggtgtttacacccaaagtggccaattattttgactggattagctaccatgtaggaaggccttttatttctcagtacaatgtataaaattgtgatctctctcttcattctattctttttctctcaagagttccatttaatggaaataaaaacggtataattaataattctctaggggggaaaaatgaagcaaatctcattggatatttttaaaggtctccacagagtttatgccatattggaattttgttgtataattctcaaataanagatatggtgaagcat

SEQ ID NO: 174747 - DNA, 269 bp, Homo Sapiens
tccaggtggattaagaaaccaaccgtagagaagttacatgttggagattcctttcccagttttatagcacagtgcccagaatgctatccatgcctgagtgtggcttggcttctcctacccactcaatgtggatgttttctcagttgcccagtgggtgtctctcgactggtccctgattttctctcaaagggaattgatctgtaaatagatgttgatttcatgtatctgtgagtggaggagagtctggaaattcctatttcacctgagct

SEQ ID NO: 174748 - DNA, 821 bp, Homo Sapiens
  misc_feature (147)..(147): n is a, c, g, or t
  misc_feature (179)..(179): n is a, c, g, or t
tatcttatacgaaactagcccagatcaggtatttcccattctgagtataaaaggcaactgatcttaagctacaggcagagatgttaatgcagaagatatatttgtacaatcaaactcttgtgtgctggtgaaagactttacccccanagtcaagtcaagtcaagacaaaaccaaagcanaatggagaatgagtcgatgtaacaatgcgataaaaagaacagcattcaagcttcttgctgcaaatactgaactggaatctttttctttacaagtttgactagaagacagcagtgacacttccctaataagggaataccttcaggccacacctgtgttctgaagcaattcaaagttcaaggaatattggggggtggaggtgggggctgatatacattttgtacagtgagaatggcagccaaactaccccaaagtctcaagggactgagagacctcagaaaggaactaccaccagggctggatctaggccttcctttcagaagccaaagtcagaagaatccaaggaggccacaacttcatggcaaagatgccatagcattattaccatcacaaaagtcaaccaatgatattttcattgaaatatccgcactggatgattcaacatatgaggcaaagagggatgtctttggagaaggcacttaatgtagaacattagcaaatcttactggttggctacaacaaaaatgagctcattcaacctggctggaggcctgttagggctgttccttctcactgtggcctgactaaaacccagtggcattaagaaagagtcaccggacgcgtgggatcgacccacgcgtccg

SEQ ID NO: 174749 - DNA, 357 bp, Homo Sapiens
caggtggtatgcagaactggtacacctactttagaatatagttaggcagtttcttacaaaaccaagcatacccttatcgtgtgatctagcaacctggctccttgagtcacatgagttgaaaataacatctacccaaaaacttgcacacaaatgtttatagtagttttgttcataattgccaaaacttggaggcaacccagatgtctttcagtaggggagtgggtaaacaaagtttggtacatccatagagtaacgaaaagtaatagtagtaaaaacaaatatagctatcatagacctgaaagacatgcaggaaccttcaatgcatattgctatagtaaaatgaagccagtctctata

SEQ ID NO: 174750 - DNA, 142 bp, Homo Sapiens
cgccaaatctacacagataactatagaggattctccatatatctatcctaaataatttaatactaatgtgcattctatgatagaatccaacagatttacaggttcccaaggctaagtcttttcagagtcatatctcacatca

SEQ ID NO: 174751 - DNA, 232 bp, Homo Sapiens
  misc_feature (211)..(211): n is a, c, g, or t
ctgccaggcacagcacaaaacccctcaaagggcatcacctccttgaaccctgtgcactttggggggttttgtgctgtgcctggcagtaggaagggcctgttgttgttagctgttgttgcttccacaaggtgggcactgctccaggagccccagtggggctggagcagactccccagagcaaggggttctcttgaggcctgcaaaggggtancgagctcgattcgtatggttt

SEQ ID NO: 174752 - DNA, 907 bp, Homo Sapiens
gccgggggacgtttccgggagcgccgcgtggttagcgtcggcggcttttggcatggcgactttttctggcccggctgggccaatcctgtcgcttaatccgcaggaagatgtcgagtttcaaaaggaggtggcgcaggttcgcaagcgcataacccagcgaaaaaaacaagaacaacttactcctggagtagtctatgtgcgccacctacctaacctacttgacgaaacccagatcttttcatatttctcccagtttggcactgtgacacggttcaggctgtccagaagtaaaaggactggaaatagcaaaggctatgcatttgtggagtttgagtctgaggatgttgccaaaatagttgctgaaacaatgaacaactacctgtttggtgaaagactcttggagtgtcattttatgccacctgaaaaagtacataaagaactctttaaagactggaatattccatttaagcagccatcatatccatcagtgaaacggtataatcggaatcggacactaacacaaaagctacggatggaggagcgatttaaaaagaaagaaagattactcaggaagaaattagctaaaaaaggaattgactatgattttccttctttgattttacagaaaacggaaagtatttcaaaaactaatcgtcagacgtctacaaaaggccaggttttacgtaagaagaagaaaaaagtttcaggtactcttgacactccctgagaagactgtgggatagcccagggccccacaccaggtttgtacaccaacatttttggagaggcgaaaatctcaagtggctgaactgaatgatgatgataaagatgatgaaatagttttcaaacagcccatatcctgtgtaaaagaagaaatacaagagactcaaacacctacactagtgga

SEQ ID NO: 174753 - DNA, 620 bp, Homo Sapiens
tccactagtgtaggctggtgttgtgcattcatttgttgctgcattacattcatttgcggttgcatcatatttataggtagctgagaaccatcaacttgctggtttgtttggtcttttaggctagaatcctgtccagatgtttcctcctcttgtttcatccatccagactgtggacctgaagaatttctgcctcgtcgtgagtagtagttttgtacatctgctggcaaagtctttctcacggcccagctggatgcagatgtccatccagatctatctgctggtgtatcaaatgagaactcctgttcactttttcgcttataggattgctgttccacaaacttgaaagattcactccctgaactgtttgaattccctgagaggggttttcgattttgccaccgattttcattctgatctttataggcaaaactacttctgtaagtgcctctgccacggttgcctctgcctctaccacggttagatacccaaccagaaccaaagtttttattccaagaatttcctgaattttcatttctattttcttcccaatgagactctttcaacttttctggatttctggttcttggatcaggcccagagtgcctgcactagtggaggga

SEQ ID NO: 174754 - DNA, 443 bp, Homo Sapiens
tccactagtgtaggccatggtgaaagtttgactccacaaagatgtgacactcttcttgagataacagtcaaggagagagagactttcctacctacaagctttcaggatgaaggagaagtgggtgctggtagttaccgcccatgacttcacaaggctagagaattaagtctccgcctttcacaggagtgattatttcacactctattgataacggacttaatatccccgcatacatgagactagtaggactgtgttttcaacacaaaaagggagcagactttagttctggtagtttctggtgctggagcacaatggaccaaattctcatattaacccaagacaccatctctgcttttaccattcaacacacttggagtctatgttgtcatttgtcataaaatcaacaatagattttaaagcatttcttctaattgacgagctag

SEQ ID NO: 174755 - DNA, 598 bp, Homo Sapiens
tccactagtgtaggcacggcagagtgcagagaaggagcagccgttcagcatccacgcacacctacccccgtgtcttggtgtggtgaaggggtcacctggaaggtggcccacatcaagccatcttgccatcaccccactcctcccaagtggaggtgagtcacttgctcacctccctaggtgaaaggaagcagagctggcctatatctcttcagagagtcccacaagggtcactactgaagagctggcctttggacactggcctcagaggacactggcagccagttagttttagagaagcagtggcaaccaagaggaaaaagcaacccaaaaaggggagaaagggtaactgtgttccctcctcagggagaggggtcaggtgggtgatgggaggggataagggtgaaactgcataataaatggaagcttaaaccaaactttgttacattccaagtgacaggaaaattatggcctaatgccaaagatgccattaaaagatgggaagggaagatctgacaactttttaaaggcagtaactaaagaaacataaaacttctgttttgtttttacccagcgagtatagcctacactagtgagggta

SEQ ID NO: 174756 - DNA, 485 bp, Homo Sapiens
tcctccactagtgtaggctggatctggcccataagccatggcttgctaacctctaaggtaaggcattccagcatcataaaacaaacattttccaataactgatgacaaaaatcaggaagaaactaagtttttaatttttaaggcacaacttttattactattgtttattactatttacttataggcaagagctcagtcagtataccactgactgcttcatgtaaatctttctaaatttgaagtatattttcccaaatcttaaatctaacacattatgtgtgtactcacgcatacccccatgaactctcccaaatgttctttattttcaaaatcgtgggtcaaaaatgtgtactttaaaacccacatcagatgctctgaacttggattacagtttccaagtacaaaaataatactgtttcattaaataaggcaacaaaactttagttagtaagaagggaaaaaggcactgggcctacactagtgga

SEQ ID NO: 174757 - DNA, 417 bp, Homo Sapiens
  misc_feature (359)..(369): n is a, c, g, or t
ttcttaagtttgagtcctggtgtgctgggttggaattatctttgagatctctgcagagcaattccttcattctgcaaaagaaacaatggactctggagatacacaccaaccaactcaagggcacaattcaggaagaaacaatgttcgcgtctgcgatcctagccacgagctctctcaacaaaacagatggcacaaacttatttgaaggaatctgattcccaaatcataaaatttcaagataaactacatgacgtgtgcgatggtgatccctgccagcaaagtagcataaaacctgtctctgacattctaactcaggactaaggaggcaattctagaagctgagaaagcagcatccgtgnnnnnnnnnnngttcccagtgactgaggctgctctgagagctgagcctacactagtgga

SEQ ID NO: 174758 - DNA, 1069 bp, Homo Sapiens
  misc_feature (16)..(16): n is a, c, g, or t
tgaaaaccttggttanaaagcaggctgtacccggtccggaaattccgggatatcgtcgacccacgcgttccgagaggagaaactatggaggagtatatgttggcctaccatctgaagctgtcaatatggtgtccagtcaaacaaagacggttcggaaaaattagaagaaaataacatcatgactcaagaatcaagagcttgctcatcagtttggaaggaatttggctccgtgggacgttgtaatgtgcacagacatttccaaggaaattctaaacagtcacccttcccttttgcattcccccaaatcttaagtgtatacataaaaccctgggtacatattgttgtggtaatagaagggaattggttaaacagtacacttgtttatggaactttctgtggccacctacgaaagacaagttaacaaactgtcatggaggctgttgttgcccagccagggccgctgcattttgacaacatttccaccctggccactcagcacatttcatggaggtcatgtcttttcactgatacttttttgatagtttttatataacaaaatccttattctatttataacttaagatgataaggcactataaattaatgacctaaaataatatatttgtctgttatcttttgctatttctacttcactttaatttttagctgtaaaattggtaaatggattcttacaactatctctttccatttcttactatttggttttcaaatttcatttaaatgtcagaatttccttttttaggaacaatgtgtatttcattgcactatttaaaaataactcgattgcttgccttatgcccctttggttacgtgttatttcttcgggaaggctgtgcattccaatactcatagcgttgggttgccctcttacttagcgacatccctcgttttttctatcattcacgcgccgcacgggctggggattcgggacacattgccaacacggtctccagatgaagttccaccactgtctcatgatattccccaaagaggggcttatcggccaccaacttgaacatatacgccgagcagctacatgaatgtcggt

SEQ ID NO: 174759 - DNA, 800 bp, Homo Sapiens
  misc_feature (524)..(524): n is a, c, g, or t
  misc_feature (532)..(674): n is a, c, g, or t
  misc_feature (676)..(676): n is a, c, g, or t
  misc_feature (684)..(685): n is a, c, g, or t
  misc_feature (689)..(689): n is a, c, g, or t
  misc_feature (695)..(698): n is a, c, g, or t
  misc_feature (701)..(702): n is a, c, g, or t
  misc_feature (705)..(715): n is a, c, g, or t
  misc_feature (734)..(745): n is a, c, g, or t
gcaatataacttaaaattcctgtacatactgcaaatatttctttaaattgcacaggaaaatgagcgaactttttatttcttaatatctttggcaaaaaactttaaccagtaagcaattttataaccctgagggatcatcaaagatactatcctgattcctggtaaggaaaaatatattatttccttataacaaggcaaggagaaatgctattttattcctgataatttatataactagaataatttttttcctttcttttatggacctaaatctgccaattgggaattttgtgcatgaaatatgaagttactttttatagataatcagtgcttttaagtccctaaaaggctcctgctgaagtaatgatgatgttaataataaaagcctttgaaaggctgaaaacctacatagtggtaccatagtatttggagcttctataggagtggagaggggcagctcattgttgagagttgcatgctgcaacctaatggtcagcaatgaaataaatacttgtagaatgttncaaaaaannnnnnnnnnnnnnnnnnnnnnnnnnnnnnnnnnnnnnnnnnnnnnnnnnnnnnnnnnnnnnnnnnnnnnnnnnnnnnnnnnnnnnnnnnnnnnnnnnnnnnnnnnnnnnnnnnnnnnnnnnnnnnnnnnnnnnnnnnnnnnncncccccccnncccnccaacnnnnccnnccnnnnnnnnnnncccttgtgggcgccgcctnnnnnnnnnnnnagaaaagatttttctacaaaaaccctcttcttgtgggcgcccgcgcgcgcccccc

SEQ ID NO: 174760 - DNA, 808 bp, Homo Sapiens
  misc_feature (16)..(16): n is a, c, g, or t
  misc_feature (749)..(750): n is a, c, g, or t
ctaggagcgagcctgngtggcgaattccgcacgagggcaaaccgcgccatgatagggccgggattggctggctctggaggcgcaggtggtccttcttctactgtcacatggtgcgcgctgttttctaatcacgtggctgccacccaggcctctctgctcctgtcttttgtttggatgccggcgctgctgcctgtggcctcccgccttttgttgctaccccgagtcttgctgaccatggcctctggaagccctccgacccagccctcgccggcctcggattccggctctggctacgttccgggctcggtctctgcagcctttgttactcgccccaacgagaaggtcgccaaggagatcgccagggccgtggtggagaagcgcctagcagcctgcgtcaacctcatccctcagattacatccatctatgagtggaaagggaagatcgaggaagacagtgaggtgctgatgatgattaaaacccacagttccttggaaccagctttgacacattttgttcgttctgtgcacccttacgaagtggccgaggtaattgcattgcctgtggaacaagcgaactttccgtacctgcagtggctgcaccaagtcacagacccagtttctgactctatcacagtccctgccatgatgagccctgttcctgctcatcatgaaaatccccgcgatacttcaacgccttctgaattccaggtgatgactgggcccccaataaatcccggtctttgggtccnnacccccttctcaccccacctcccctaaaaaacttcgaggctcttttgtcggggcgcgg

SEQ ID NO: 174761 - DNA, 763 bp, Homo Sapiens
tgcgcgctgttttctaatcacgtggctgcacccaggtaagaagaggccgctcttcctggggttgtttctccgtgtgacgtgtggcctttgagatcaactctcctgtaccagcgtaggccgcatgagtggggggcgggctcccgcggtcctgctcggcggagtggcctctctgctcctgtcttttgtttggatgccggcgctgctgcctgtggcctcccgccttttgttgctaccccgagtcttgctgaccatggcctctggaagccctccgacccagccctcgccggcctcggattccggctctggctacgttccgggctcggtctctgcagcctttgttacttgccccaacgagaaggtcgccaaggagatcgccagggccgtggtggagaagcgcctagcagcctgcgtcaacctcatccctcagattacatccatctatgagtggaaagggaagatcgaggaagacagtgaggtgctgatgatgattaaaacccaaagttccttggtcccagctttgacagattttgttcgttctgtgcacccttacgaagtggccgaggtaattgcattgcctgtggaacaggggaactttccgtacctgcagtgggtgcgccaggtcacagagtcagtttctgactctatcacagtcctgccatgatgagccctgttcctgctcatcatgaagatccacgagatacttcaacgcccttctgacttccaggtgatgactgggcacccaataaatcccgtctttgggtcc

SEQ ID NO: 174762 - DNA, 743 bp, Homo Sapiens
ggggaagcctcgaccgctacccgcaccctaaatcccagaggttggccccctgaggtgtgagtgaaatgagcttttgctttattttccaagtttctctctcaccttcaggggcattcttcgggggtgcatcagagggagggcagagcctgaggatctaagcgaaggcttccccgggtgtaatttcctgggctgtttgtgaggagagatcgaattcgcctcctgctctcaggcctctctgctcctgtcttttgtttggatgccggcgctgctgcctgtggcctcccgccttttgttgctaccccgagtcttgctgaccatggcctctggaagccctccgacccagccctcgccggcctcggattccggctctggctacgttccgggctcggtctctgcagcctttgttacttgccccaacgagaaggtcgccaaggagatcgccagggccgtggtggagaagcgcctagcagcctgcgtcaacctcatccctcagattacatccatctatgagtggaaagggaagatcgaggaagacagtgaggtgctgatgatgattaaaacccaaagttccttggtcccagctttgacagattaagtacgttctgtgcaccccttacgaagtggccgaggtaattgcattgccttgtggaacaggggaactttccgtacctgcagtgggtgcgccaggtcacagagtcagtttctgactctatcacagtcctgccatgatgagccctgttcct

SEQ ID NO: 174763 - DNA, 850 bp, Homo Sapiens
ggggaatcacgtggctgccacccaggtaagaagaggccgctcttcctggggttgtttctccgtgtgacgtgtggcctttgagatcaactctcctgtaccagcgtaggccgcatgagtggggggcgggctcccgcggtcctgctcggcggagtggcctctctgctcctgtcttttgtttggatgccggcgctgctgcctgtggcctcccgccttttgttgctaccccgagtcttgctgaccatggcctctggaagccctccgacccagccctcgccggcctcggattccggctctggctacgttccgggctcggtctctgcagactttgttacttgccccaacgagaaggtcgccaaggagatcgccagggccgtggtggagaagcgcctagcagcctggcgtcaacctcatccctcagattacatccatctatgagtggaaagggaagatcgaggaaaacagggaggtggctgatgatgaattaaaacccaaagttccttggccccagctttgacagattttgttcggtctgtgcacccttacgaagtggccgaggtaattgcattgcctgctggaacagggggaactttcccgtacctgcagtggggggggccaggtcaacagagtcaggtttccgacccctatcccagcccctgccacggatgaacccctgcccccccgtactcatggaaaactccgcgggcgtccttcgcccgggcccgccttgccgtccgggggcggagggaactggcgcccctcctcatgaataagcccccgcgccgtgtggggtccggccctgtgcgacgcgcggcgttacggccgccccggagttcgtccggtgtgtccgctg

SEQ ID NO: 174764 - DNA, 796 bp, Homo Sapiens
  misc_feature (28)..(28): n is a, c, g, or t
ccgtgtgacgtgtggcctttgagatcanctctcctgtaccagcgtaggccgcatgagtggggggcgggctcccgcggtcctgctcggcggagtggtgagtgaccggccccgccccgccccttccggtcctcgaagcctcgaccgctacccgcaccctaaatcccagaggttggccccctgaggtgcctctctgctcctgtcttttgtttggatgccggcgctgctgcctgtggcctcccgccttttgttgctaccccgagtcttgctgaccatggcctctggaagccctccgacccagccctcgccggcctcggattccggctctggctacgttccgggctcggtctctgcagcctttgttacttgccccaacgagaaggtcgccaaggagatcgccagggccgtggtggagaagcgcctagcagcctgcgtcaacctcatccctcagattacatccatctatgagtggaaagggaagatcgaggaagacagtgaggtgctgatgatgattaaaacccaaagttccttggtcccagctttgacagattttgttcgttctgtgcacccttacgaagtggccgaggtaattgcattgcctgtggaacaggggaactttccgtacctgcagtgggtgcgccaggtcacagagtcagtttctgactctatcacagtcctgccatgatgagccctgttcctgctcatcatgaagatccccgcgatacttcaacgccttctgacttccaggtgatgactgggcccccaataaatcccgtctttgggtcaaaacaaaaacaca

SEQ ID NO: 174765 - DNA, 439 bp, Homo Sapiens
  misc_feature (177)..(177): n is a, c, g, or t
  misc_feature (207)..(207): n is a, c, g, or t
  misc_feature (246)..(246): n is a, c, g, or t
tcccaaagacgggatttattgggggcccagtcatcacctggaagtcagaaggcgttgaagtatcgcggggatcttcatgatgagcaggaacagggctcatcatggcaggactgtgatagagtcagaaactgactctgtgacctggcgcacccactgcaggtacggaaagttcccctnttccacaggcaatgcaattacctcggccanttcgtaagggtgcacagaacgaacaaaatctgtcaaagntgggaccaaggaactttgggttttaatcatcatcagcacctcactgtcttcctcgatcttccctttccactcatagatgggatgtaatctgaggggatgaggttgacgcaggctgctaggggttttttccaccacggccctggggggattctccttgggcgacctttttcgtttgggggcaagtaacaaaggg

SEQ ID NO: 174766 - DNA, 762 bp, Homo Sapiens
tccactagtgtaggccttccactcctagaagggatggagaccagccaagggattcaaagcctggggctaaatgctggcagtgagcattctgggcgatacagagcatctgtggagtccattctcatcttcaactctatgaatcagctcaactctttgttgcagaaggaaaaccttcaagatgttttccgtaaggtggaaatgccctctcagtactgcttggccttgctagaactaaatggaattggctttagtactgcagaatgtgaaagtcagaaacatataatgcaagccaagctggatgcaattgagacccaggcctatcaactagctggccacagtttttctttcaccagttcagatgacatcgctgaggttttatttttggaattgaagttgcccccaaatagagagatgaaaaaccaaggcagcaagaaaactctggggtctaccagaagagggattgacaatggacgcaagctaaggctgggaagacagttcagcactagtaaggacgttttaaataaattaaaggcattacatcctttaccaggcttgatattagaatggagaagaatcactaatgctattaccaaagtggtctttccccttcagcgggaaaagtgtcttaatccttttcttggaatggaaagaatctatcctgtatcacagtcgcacactgctacaggacgaataacctttacagaaacaaatattcagaatgtgccaagagattttgaaatcaaaatgcctgcactagtggac

SEQ ID NO: 174767 - DNA, 498 bp, Homo Sapiens
tccacatagtgtacgccacctttgcctcagtttccccatctggaataaaccagtgtccccatcaaggccaccaggatgattgcaggtggtgctcttggccttaggtgctcacctgctgcggctttcagtccctcctctttagccttgggctgacctgccagaagtgcagaaagcgggtggcggagtgggggaaagggtagagggggagcaaacctgattgcccttctcccactcccccaccatcaggtgcaggcgctcattaatacccagttaggggctctctggggtcacaacaggtccatgtttggggcagccttcctgccaacagcgccccccaccctttgagatggacaaactcgggagtcagttgagccctttgcccaactaaccagacaaaattctcaggaactcatttatagacaatgttagaatagaagaccaccctacccccattttctggctctttctgacagcctctgcctgcactagtggaggaaa

SEQ ID NO: 174768 - DNA, 439 bp, Homo Sapiens
  misc_feature (66)..(66): n is a, c, g, or t
  misc_feature (118)..(198): n is a, c, g, or t
ctagtgtaggcgactggaacagaatggtatttgtgtatctaaacatatctaaagccaggtgtgggngctcatgcctgtaatcctagcactttgtgaggctgaggtgggtgaaacactnnnnnnnnnnnnnnnnnnnnnnnnnnnnnnnnnnnnnnnnnnnnnnnnnnnnnnnnnnnnnnnnnnnnnnnnnnnnnnnnnatacacttcaaaagggtgaatattatagtatgtgaatcatatttcaatagcataataaaccataaaagacatagctcagtgtctcattgagaagcaccacggaagcatgctgtctggtttcacctattcccatgtgcatatcaagggtgggctgtgagctcatcattagtgctagctcagctctctggtcacatgagggaactggattggctggcggcttgggaaggcctacactagtgga

SEQ ID NO: 174769 - DNA, 112 bp, Homo Sapiens
  misc_feature (1)..(1): n is a, c, g, or t
nttttttaaaagacttttcctcctttctcacttgcttagagtcatgaagctcctgagagcagagccagtctattcttactaagcagcacactagcctacactagtggagggt

SEQ ID NO: 174770 - DNA, 385 bp, Homo Sapiens
  misc_feature (114)..(307): n is a, c, g, or t
tgtaagccaatggtcacagcaacattattcaaatggccaaaaggtggaaacaacccaagtgtccatcaatggatgaatggataaacaaaatgtggtataaacaaagaatggggnnnnnnnnnnnnnnnnnnnnnnnnnnnnnnnnnnnnnnnnnnnnnnnnnnnnnnnnnnnnnnnnnnnnnnnnnnnnnnnnnnnnnnnnnnnnnnnnnnnnnnnnnnnnnnnnnnnnnnnnnnnnnnnnnnnnnnnnnnnnnnnnnnnnnnnnnnnnnnnnnnnnnnnnnnnnnnnnnnnnnnnnnnnnnnnnnnctgcttgaacccaggaggcagaggctgcggtaagccaagattgtgccattgcaaacaagcctggcctacactagtgga

SEQ ID NO: 174771 - DNA, 389 bp, Homo Sapiens
tccactagtgtaggcagcagtgactaagcactggcagttccagaacatttacccaggtatatgttactaaaacaggctccacctcagtttatcaacattataagttactgttctaagaaaagtaaatacagttccagatgggttattgcagattaacagaaagacactcaactggactcatgtccctgcaattaaacttacttcaaccttttggaaagttatcaaaatctaaatttggaatgaatgcatttcctattttttgtctacttttgggtgataaaaagtactagcccttatttatagatatgagaaacataatgttctaaccaacaacattatgggatttgtgtgacttttattagaaaaaatgtgagcagtaatttgggtta

SEQ ID NO: 174772 - DNA, 244 bp, Homo Sapiens
gagctcggtacccctccactagtgtaggtgcagtagggacttggtggtgcggtcgtgcagagtcatgctgatgatgagtttcagggacttggagtccagtaggttctttggaatgatctgcttttgtttgatacctttacttttcctgtcaaaatattaaaaatggttttgtgaacaaaaggaacacagtgtcgggatttgggttagttcagcaagccacgactggcgggcctacactagtgga

SEQ ID NO: 174773 - DNA, 414 bp, Homo Sapiens
taggcgatgaacaactgcctcagccagatggaacaatttccagtcaaagtacatgatttccctagcggaaatgggacaggaggcagcttttctctcaacagaggatcacaggctttaaaatttttcaacacacatcaattaaaatgccagttacaaaggcatccagactgtgcaaatgtgaagcagtggaagggtggacctgtcaagattgaccctctggctttggtacaagccatcgagagataccttgtagttagagggtatggaagagtaagagaagatgatgaagacagcgatgacgatggatcagatgaggaaatagatgagtctctggctgctcagttcctaaattcaggaaatgtaagacacaggctgcagttttatattggagaacatttgctgccgtataacatg

SEQ ID NO: 174774 - DNA, 491 bp, Homo Sapiens
tacagtctaccagcatcaagcttgctctgtcaccatcgcaccggaatcctgcagagcccattgctgtccagaataaccagcagctggcgctaaaggtagagggagtggttcagcacggatctaaaccaggactcttccgcaaaattcagtctgtctgtctgaatgtttcttccacactgcagagtaaatctggacaagactacaagatacccattgacaacatgaccaatgagatggagcaaagggttgaacctcataatgattacttcagtactcaatttctgttgaactttgctatccttggaacacacaacattacagtggaatcttctgtgaaagatgccaatggtatagtatggaagactggtcccagaactaccatatttgtaaaatccctggaagacccttattcccagcaaattcgcttacaacagcaacaagcccagcagccattacagcagcagcagcaacgcaatgcctgcactagtggc

SEQ ID NO: 174775 - DNA, 459 bp, Homo Sapiens
gtattaggtggtttgctcagcttctgacacagcttgcacacagcttgatgcaaatgtgtcagaataaggactagaatccaggtttctgactttttgttggggttctttctaatacagtgtgccagtcagcttttctttagcataattagacatgatcattcagtttcgagcttcggtgtacatttaagcaggggccctctgtccaccaggactggtgtcttgacgatcctatagggtcaagaggatggaatgaagcattttaggactgctgaggccgtcccttttctagtccccagtctgaccctgtagaccattgctcaaattaaactgatgcttcacacttctcactaagagcttgtgtcatttgggggtgggggttctggggaagatcccaaaaggaccagttctcagaaaaattgcctgctctcattagaggaaaaccacgcctacactagtgga

SEQ ID NO: 174776 - DNA, 919 bp, Homo Sapiens
  misc_feature (801)..(840): n is a, c, g, or t
tcctccactagtgcaggcataaaatatacagttatatcatcaaacttcttttgtaagtttcaaatattatgctgagaatatggcaagaaaaaagaaaacaacctccaccactcataatggcattccctttacccaccatcaactaagtcaggaacctgcgtcactttcaagttttctgaaatgtggactgaaaatacttgtggagggccctcacagatgcatttagaaatggtatgttctggaaaatggaactgaaatgttttagcgagagtcatgggcccaaaccttgaaatagaggttggaggagttttctatagtatgtaattacaacacaataagactcaaaagcatttcaataaagtgtggatggaagacaagatactgctcaaagggcttcattagctttctgcagactggagctctccaaggcatggggaggaaccctgtttacctttggttcagaatcagttttaaccatcattgagggctaggtcagagtgcagcattaagtccttgggaatacactgggtggggaaagaaaagagagcaatgtttttctaaaagcccagaaatgggcttactgtgtttaccagttgtttccaggataatgtattgcagtgccaattgctgatgagatggtaggattatacttcagtccctgctttacatttatttcttaaagaagcttctggtaaattagagcaatagcatcggcttagtttagtgttgttctgttggactaaggatatcagttctatccgtatggtcgggcctaaagcctgggaaatatttaatgaaggnnnnnnnnnnnnnnnnnnnnnnnnnnnnnnnnnnnnnnnnataacaaataacaaaacaaaaaccaagccatttccctttatagtaagaatgacgaggaaaacatgtttggccacactag

SEQ ID NO: 174777 - DNA, 377 bp, Homo Sapiens
gggcgacaaagcgagactctgtctcaaacaacaacaacaaaaaaatatcttagccctgccttgctgtacaaaggatttgagatggcataaactacagcatctacattaaagagaaaaataatagtagaaattaagagttggaaaaaggaagcatttagagcataaggccagtgtagttgctgttggtgcgacagctaaggcaagaaaagagacagtcacccctcaggtagttgttattgccaagatggaagagcaaaactgcagagaaccagattgcctggatgtgacttctggctttgagcaagatctttaacctttctgtgtctcagtttcctcatctgtaaaatggggacaatcttaatgcctacactagtgga

SEQ ID NO: 174778 - DNA, 436 bp, Homo Sapiens
tccctcacacttgatattcacaggtctctgagcagtctatcctctctccttccttgcctggggctctgaggagagtgacctgcttgtaggagggtttccctatgtttttccagggcagtcagtcaattaacacctggccacttcttttggaagttactcctcctgaacctgaatgaaacttcaggaacagtcactcagcttaagcacaaccatgtacaacaagcgcttctggagtcagtggcagtactgtcctgtctatcagaaacctgtctgatcagtaagtcttcttgcctcccttttgagtctagaggctgtcatcctgggtatacctttgaatctcctggatgtttttttaaagcattgaaagaagtcctgtcaccacccctagagattgcaaggtatttgatatagcatctagatttgacctacactagtg

SEQ ID NO: 174779 - DNA, 478 bp, Homo Sapiens
tccactagtgtaggctaagccaagctgatgttcagtaggttaggcatattaaatgcattgtcaacttacagtatttccaacttacagtggatttattaaaacaaaacacacatcataagttgagaaatatttatagttatcactggtatttagcatcaaaatactaaagtgttcatctgaagccaaccctggtaatctggctagacagtttggagctatggccggaggagtcaagtaagggccagaaaagtaagtatcttcaaaccctagaataatgacttcagaacagcctcgtgcagcagaaaatctgatgcccctcctttcttagactgagtcccattagagatcattgaaataaggagctccagagctctcttatttgacactatgagtactgcttcagttgaagggtgaaaaaaattagttaaagtaagaaatcacaagaaagaatacatattacagtgcctacactagtgga

SEQ ID NO: 174780 - DNA, 414 bp, Homo Sapiens
tccactagtgtaggctccactgtgtaggcagtgtggtgatgactgcacaatagtgtgaatgtacataacaccactgaactatacacctaaaaatggtgaagatggcaacttgtgttatgtgcatttgaccacagttaaacatgattttaaaatgtggaactagtattcattttttattcaaatattttataaattatcatattggaggccctatagtgtggtagtttacagcatgaactctgtattccaagtgctcacgttcaacttacagtctataatctcaggcaaggagcttaaccactttgtgccttagtttttttaatccatagagtgaggataagaataatacccatctcacagatttctgtgagtattaaatgaatcagtacatgatgaagcacctacactagtgga

SEQ ID NO: 174781 - DNA, 400 bp, Homo Sapiens
  misc_feature (273)..(291): n is a, c, g, or t
tccactagtgtaggctggggtgcaagctaaaagtttttgttagcacaagaatgctaactcactgcaccagattttctaagtacatggtgagatgtatatataatgtaaatcttttcatattaacaagtatttaggctgtatgagcagatagctggtgatatctgaattcctcattctggtctcaataatatttgctgtttcataccttgcatattccaaacccagactaagtcatacatttttttcctccaaccaagcatcttctcctctccnnnnnnnnnnnnnnnnnnnatatacacaggtcttctcagttgcttaactttcagccaatcctaacattatttcttaacttcttggccaatttaacatcatacttactgcctacactagtggagggtac

SEQ ID NO: 174782 - DNA, 900 bp, Homo Sapiens
  misc_feature (722)..(723): n is a, c, g, or t
ggggctctggctgcgcgcggagcgggctccggagggaagtcccgagacaaagggaagcgccgccgccgccgccccgctcggtcctccacctgtccgctacgctcgccggggctgcggccgcccgagggactttgaacatgtcggggatcgccctcagcagactcgcccaggagaggaaagcatggaggaaagaccacccatttggtttcgtggctgtcccaacaaaaaatcccgatggcacgatgaacctcatgaactgggagtgcgccattccaggaaagaaagggactccgtgggaaggaggcttgtttaaactacggatgcttttcaaagatgattatccatcttcgccaccaaaatgtaaattcgaaccaccattatttcacccgaatgtgtacccttcggggacagtgtgcctgtccatcttagaggaggacaaggactggaggccagccatcacaatcaaacagatcctattaggaatacaggaacttctaaatgaaccaaatatccaagacccagctcaagcagaggcctacacgatttactgccaaaacagagtggagtacgagaaaagggtccgagcacaagccaagaagtttgcgccctcataagcagcgaccttgtggcatcgtcagaagggaagggattggtttggcaagaacttgtttacaacatttttgcaaatctaaagttgctccatacaatgactagtcacctgnngggggttgggcgggcgccatcttccattgccgccgcgggtgtgcggtctcgattcgctgaattgcccgtttccatacagggtctcttccttcgggcttttgtatttttgattgttatgtaaaactcgcttttatttttaatattgaatgtcggtatttccaactggctgttaaaata

SEQ ID NO: 174783 - DNA, 335 bp, Homo Sapiens
ttaataaaccataaaatttaaatattcaaatgaaaagaaacaaaaatagattatttaagccagcatgaatttctggttttactcttcctctagggcattgtaggcttgacttacctgggattagagtaataaagctatgatgctggtacaataatgaatgaggaagtaaaaatgggcaatgtcttcataaaatttactttcaaatctaggatcagaagttcactcaagcctactgcaaaggcctgacactgggttttgtctgtataaaactactctgggctttttaccacactttcttcatcacagcttaggtgttccctggcattctggatccc

SEQ ID NO: 174784 - DNA, 406 bp, Homo Sapiens
tcctccactagtgcaggcggtggggaggataggccataaagaaacacacagcaaatgttcagtatagaaggcagaaagaaacacacagcaggccccggcgaggaagaatgggtgcccgtgagggtttcctgcgttagacaaggctttctgaaaggtgacctttgtgcagagtcctgagtgatggggaaatgagggaaacagcatcccagccaaggcaacagcatgtgcaaaggccctgagggaggcaatgtgtgtcatgccacaagaaaagcaaggagatcagaggggctggtgtggaatgaggccagaggggctggtgtggaatgagcaccagctcatgcagggacagatgagaatggagaggaggtgagagccagatcccacagggcagtaggtgagagcgagg

SEQ ID NO: 174785 - DNA, 566 bp, Homo Sapiens
ccagctcggtatcctccactagtgtaggcctggtggtactgaaaatttgaatacagaaacaactgatgtttgtgtagcagatgcactgggagcagcctttgccacaaggtcaaaagcacaaaggggaaattccgtggaggagcttgaagagatggatagtcaagatgctgagatgactaacacaactgagccaatggatcactcttgatttaattagaggctaataaaggcagaatgtttattgtgaatatgtaatatttgttggctgggccacgtaacttgattagtcattaaaaatcttgtacgtatataattcaaagattatatcttgttattcagtgcatgatagcaagtgtgtgattggccatagcttttaatatactgctgcccaggctggctctgaatttctataaattagctgttagatctgctgagatgactttcttccatatatgtggttcattggaagttctttgtattttaattccatgaaagtcttaatgtttccaacatgaaaattctctttcttaaatacgtttgatatctgaaaagcctacactagtgga

SEQ ID NO: 174786 - DNA, 443 bp, Homo Sapiens
cactagtgtaggcttaatcagtttaagcttcaccgtaaagaagggggaagttttagcattacaaaggtacagagtgtttaggcaaatacacgtatgttctttgatatagtaaaatgcatctctttaaaattcctttaaacaggatttgtttaggacagcagcgtgttttaaaatctttttctatagtttcaaaaacatttctttctttattgaatctttgtagttcttaaaagcataaaggtacatcccttaggaagccatgagagagattctgtggccttaggaccaagtcaaatccaaccctctaactagtaatattctaccattatgtaacattaataaataaccttccatgacggccatgaatggagctttgcttcgtggcagaaacactccaatacttcagatgctaccgctgctggaaatgctgacggggatcctct

SEQ ID NO: 174787 - DNA, 570 bp, Homo Sapiens
  misc_feature (175)..(175): n is a, c, g, or t
ttttaaagtctttagtatatttatttgtataaagagtaaacaaagtgcatatagagtggccacaggtttgacacagagaccttggtgatgtaggctatgaacaaatttaaatggcaacttcattgctgccactgaaccaatcctgaatttgggctcaacaggtgaaaagtaacanatatcaaacgaatactaaacagcataacaaaaagattttcagactcttggtcataaagaccgtaatcgttcacattgaatcaatgactaaacatttttgattacccagctacctccaagcaaactgaaaactgtctagtggatcctgaagtccatagtgcctctagccgggtctttcaagtgttgcaccacagggtgatgattgatggtaaaaacagggatcaacccttgtagatcggtggtaagtatggaaaccctctaagaacagtgcagcgtatgtggtattcagactggttgcatacagcattcaaaaccagtgctggaatagcttgccccaaagtggtagagttataaaaggatatacattgacgtttattaaaagcatgtgcctacact

SEQ ID NO: 174788 - DNA, 1100 bp, Homo Sapiens
gccttcaaaaaatccaggcttgggcggtaaaagtaactggagccacccccctgttttccaagaaaggtgggaggtaacattctgtagggaggtttctttaactgggtgggcccaaatatataaacaacctctgttaaacttgtgacacatgcgaggtataagcctagccagaaaaataaagtgatccccagtcaggttcatctttactggagattccacacacgtaactgtaggaacgacagtcaccctgcacacctacagttttaattggcagcaaagaaggcattcagtgaatgcagactggtaatttgcatcagcttctcctgatcctcttctgttgtgcaggctttgactctctgtaatagggtatgtggctttttaacacttgcagaaaaatcagctactattttcaaaatattgttggtttcaggaaagtccttacaaatataaggttcttcagcacatattactctgattgccaggccaggacctggaaatggatgcctggaaactaactcttctggaagtccaagttctctgcccaaaattctcacttcatctttatgaaaatctttcagaggttctattacttttccctcctctctcaactttctgatgagctctgtgtcattgtgatgggttttgatgagttcagctttgccacttgcaacaagggatgcactttcaattagatcaggccgtaaagtaccttgggcaaggaaaacctcctctggtttcaagttcatttctccaattacttcattggcaatcttaacaaaagtatccccaatgatttttcttttctcttcaggacttgtggtcatatttaacgttttgctaattcttttccgtggggttctatcttcatctgatattggtagggttgttgttccattgtagaaagaatgagcagcatttatcactttgacctgaattccaagctttttgagggcctcttcaacagactggctttctcgttttctcataaagccattatcaatgtgcacagcaatgacgtgttcttggttcaaagcacgatttagccacgctgtacaaactgttgagtctactccaatcacggagtggcctacactagtgga

SEQ ID NO: 174789 - DNA, 552 bp, Homo Sapiens
ccagtgaggaagaggcacgcgtgggcgcagggaagaggaagcggaggcactcgaaagttgaaacagattctaagaagaaaaagatgaagctcccagagcatcctgagggcggagaaccagaagacgatgaggctcctgcaaaaggtaaattcaactggaagggaactattaaagcaattctgaaacaggccccagacaatgaaataaccatcaaaaagctaaggaaaaaggttttagctcagtactacacagtgacagatgagcatcacagatccgaagaggaactcctggtcatctttaacaagaaaatcagcaagaaccctacctttaagttattaaaggacaaagtcaagcttgtgaaatgaacatttgtgtatttaaaaattgaatccattctgctgacttcttcctttcactgctgtttataaaatgtgtaatgaattctaacaactcaaattttgctttttgaagctgtatttttaagttaagaaaaaatatatttttggtataacttttatgagaaaaataaaatatattctggtccaaacttct

SEQ ID NO: 174790 - DNA, 1054 bp, Homo Sapiens
  misc_feature (529)..(655): n is a, c, g, or t
  misc_feature (663)..(678): n is a, c, g, or t
  misc_feature (718)..(772): n is a, c, g, or t
  misc_feature (788)..(883): n is a, c, g, or t
  misc_feature (898)..(908): n is a, c, g, or t
cgtcctaacacagctctatacctagaagcagccagcctaggcatgcagtttcatttaatcacatcccccttctagagtgcttcaaaatgatgtagtccctcaacttggctaaagaatctcaatctcttgaaatttatttttttaatgtcatattcatctggtaaatatctactgtttgccaggcatttaagaatatggcaaagaacataaaagatggtgtcaccagattttggtcaccaatgagtacccgacccgttgccatgattaagagagaatgctttctattggagtttcaggaaatataatttgagaatactttaaagggaagtggaagtataagtgaatgatatttttcttttacatgtaaacaatgaagttatttcaaagttaagttttaaacaaaatacatgaagtagtgtctgccatacatgttaatattctacattcttgcttccttaaattaatatgtttgtgtgtatatatgtgcctcacacctgaattgaaaattaaagactggtttaaaagtggnnnnnnnnnnnnnnnnnnnnnnnnnnnnnnnnnnnnnnnnnnnnnnnnnnnnnnnnnnnnnnnnnnnnnnnnnnnnnnnnnnnnnnnnnnnnnnnnnnnnnnnnnnnnnnnnnnnnnnnnnnnnnnncctttggnnnnnnnnnnnnnnnnaaaaaattttttaaaacctttttttgggccccgggccccnnnnnnnnnnnnnnnnnnnnnnnnnnnnnnnnnnnnnnnnnnnnnnnnnnnnnnngggtttgatttccccnnnnnnnnnnnnnnnnnnnnnnnnnnnnnnnnnnnnnnnnnnnnnnnnnnnnnnnnnnnnnnnnnnnnnnnnnnnnnnnnnnnnnnnnnnnnnnnnctcaaaataaatttnnnnnnnnnnntgccctttttggaaaaaggtgtgaaattttaaaaactttcgcccgagagggaaccccctccaaggggttttaaaaactttattcccccggggaaaaccacctttgggccctttggaaaaaaatttcccccggggaaaaacgggggg

SEQ ID NO: 174791 - DNA, 439 bp, Homo Sapiens
tctccaggaccagtcttaacaagtggaaaaagagaaattaaaaaggaacaaaccaaggcacaatattgccctcttaatattccattttatcattcattcatacaaaccgccctcaggaatttacaatctagaagataaatgacaacagagtcaaagcacctatctcagaagcagtaaggccactctatgatctctaagcagagaagcagtttgtgtgtgagatacgacagggatagcagttgagagcccattgggggatggctgggctttctgtagcagaagtttgagtggggacttcttgcaagatgagcaaagctgcagcagtagagacacatgacaaatgtgcatgtgggaatggtggccggagcagatggtctgttaagtgaggggacagaaggaaggtctggtaagacagaagcacttaagactggtcctggga

SEQ ID NO: 174792 - DNA, 224 bp, Homo Sapiens
agctcggtttccaggaccagtcttaatacatatagcagagtacgaagatagttcggtatatattttgattagtaatcaatgaaaaataacttataaatttgtgatattttattgaaatagtaaagagtaacattagaagtgtaaattaaagggcaatagtattcctgcaatagcatttctccagttgtgagataataataattattattattttctgagacaga

SEQ ID NO: 174793 - DNA, 481 bp, Homo Sapiens
ttccgaggaccagtcttaatcaaacatcatgtgcttattgaggccaagtgcagctcggtttcagtgtactttaaatgcctcacaagcccttgaaggagaatctcactcaatgcctggaggcattcaacccgccactctaggatcccatcactctcctccctcacaaagaccctggagctccttcaataggacactgctgccatctcagacagctggagacgctgcccagaaacacagccatgaggccacgggatcatcacactcaccctgctatgaggaaacggcccagggttcacaggactgaaagcttgtccaagaagcctggccacagccagcattcctgctcccctaaggctgctatctccacacagctggcgatgggctccccaggaaaacgggttaccaggcccagatatacaaattcagatttgcaaaagggaagaactgagagatatcacataaggacccttgcccccctttt

SEQ ID NO: 174794 - DNA, 416 bp, Homo Sapiens
  misc_feature (143)..(151): n is a, c, g, or t
cagtcctaaccgtgagaatgagtataaaaccacagttgtgtaaaatgggttacacagagtcgtggcacaaatgtcagcaatgccgatcttcctgaactctgactagtttaaatatctaaagagaatttccctgtgactaaagnnnnnnnnntgggtgtagacagctgcttggtataatgaatccagctgagggtagtgtactcatgggcagattggcatgaatgtggccacctgcaaggaattaaacaagcaggattcttgtggctcaaaaagaccccagtgttcgctcttacacgaactatcaaatatatctgtgcagcactgctattccgaggggagaaaggaaatatgactgtcagtattttccaaataactaaagttaaaaagtttaaaatttttcaaccaggcatgagtca

SEQ ID NO: 174795 - DNA, 411 bp, Homo Sapiens
gctcggtttccaggaccagtctcaacatgtggatcttgttgcttacacattaagacaaaatgccaattttgggggctgggggaataaggcatcaagtgtgccccatgtgtagattcactcgtgtctgaccaagtgcaccctcggagtgttgcctacacagaggctggcttttctctaacgtccttcttttccgcagatcttcagaaaggctttctctgatagggcagtatgttaattcctgtgattgctgtaacaaaatacctcaaactggggggcttaaagcaacagaaagttgtgctctcacagttccggagtccacaggtctgaaatccaggtgtgggcagggccgtgctccctccgaaggctctaggggaggatccttgctcaacttatttttaagactggtcctga

SEQ ID NO: 174796 - DNA, 806 bp, Homo Sapiens
gggacttataaatccacaactacaaggaacagctagtaatcaaacagtgatgaccacaataagtaatggcagggaccctcggagagcctttaaaagatgacctatgctaaatactcatgtgtagtttttatactacatgccctacttgaacacttattgcacttttatttattgttaactgtgaaaagtacgtcctttattgggtttccttttatattcttggtttgttaagaagaatggtttgtttttatagcaaaactgttaagctgctcgagtctcctgttgaagaatgggaacactgaaaagtaggggcatttatttatagagtacaaagattattggatagcctttaaaaacctgcacccatttcatgggtgagttacttaagacatcagctttatagcctctatgagtctatcttctgtataagttttgtaatatttaacataacgcttaatgggagatgttcttctggtcttgtattcagatattgcccaactaaagcaataaccatcaaaaaacacaagaacttgtcaatgctagcagtaatttttgagtgtttgtggctctcggaatgattgacttcgttcagtgactactattaagattttccaaggactgactcatcccaaatttttgttgtattaccaaaaaaacagattccttatcagaatttggaatagaatgtgatctctattgcaacaagtaattttaaaagaaagctacatttattttagagtagtgctcctaacatgtattatcaacttgtggattacattggaggaaaatttaagactggtcctgga

SEQ ID NO: 174797 - DNA, 744 bp, Homo Sapiens
acgttcattattcaaaatcttccagcaaggattggaaatcaacaggacaatctgaatgaaactcaggtctgttgttcctcaaagtcgtggtcctgggttcaaggtgctcacatcggaattacataattgctgcaaaacttggactgcccctgtgtccctagagacctcgagcttgtttttgtctcggaccaagatggcctcatttccatacctgtgagtaccacatgcttcaggctccatgctcaggtacgtccacaggtggcaccgactccaacgttcatgctgttgctgctgccagatgagcaaggaggtgtcccatgtaccggaggcagggcgtagccttcagacaaggccttctctgccagggggacacaggccactcatcccactcaccccgttccacagcatggacatccctgggaactccatgctgttctgagacggcccacgcgcactaaattaacggacagctttcccagcatttggggcttaaggatccctcgctttaactgaatggtagaaattaggaattccgcccatgtgcaggcaacgtcctcaggagggttgtgtggtgaggaaatgaggctggcctcaccattgctgaagacacctgagacccattcaggggaccgcacacaggtcagagcggcgcccggccacagctcttccgggtgcagctgtgatggaattgacagggatcgaggcgtcacatcctggtggggtgattctgccaaccatgggact

SEQ ID NO: 174798 - DNA, 818 bp, Homo Sapiens
  misc_feature (152)..(165): n is a, c, g, or t
  misc_feature (547)..(660): n is a, c, g, or t
  misc_feature (706)..(714): n is a, c, g, or t
ccagttacaacagctccagttttaacagctcagctacaacagctgccttttgtatgttattcaatttaaacttttaaaccaaaaattttatggtccagtgtctttggcaaaaagatgctggagggaatgtaacatacaattaatatgtggtnnnnnnnnnnnnnnaaaagacacagattgccatgttatggttctgccttgaaacagcacaatgaagtgtatcagtatattctgtgattatgaaacttatatgttgtgttgttttgtgtcttctgttgcctgtcctttgggccagatgtggcccagttaaatgcagttatcatctcattaaatacagatgcagataaaatatctttagtgctgcaacattttacctaactttttgtatgttttcatgactgtgtgttattttccaaagctgttcctacctcaccatgaggctttatggattgttatgtattataaatgttctatatgagacagactactgtgtttcttctcatttattaaaagttaagtagaaaaataaactaattttaatatctannnnnnnnnnnnnnnnnnnnnnnnnnnnnnnnnnnnnnnnnnnnnnnnnnnnnnnnnnnnnnnnnnnnnnnnnnnnnnnnnnnnnnnnnnnnnnnnnnnnnnnnnnnnnnnnnnttgggggggcccccctcgccccccaaaaaaattttttataaacccnnnnnnnnngggcggggggccgcccctgggggaaagggaaactggggccaaaggctgtttcccccagagaaaaccccggggacataaaaaagggggctgggattcccccccac

SEQ ID NO: 174799 - DNA, 438 bp, Homo Sapiens
aaggccctgtgtaagaactttgagatgctatcacatgtggatcgtaatggcaagaccagcttgttctgttccctgtgctgtaccacttcttacaaagtgaagcaggcagggctcactggccctccccgaccctgcagcttctgccgccgcagcctctctgaaccctgttactacaacaaggttgaccgcacagtctaccagttctgcagccccagctgctggaccaagttccagcgcacaagccctgaggggggcattcacctgagctgtcactaatgtcacaacctcttcagtggcaagcctgaggtcttggactggcaggaccaagtgttccagttctgctgccgtgattgctgtgaggacttcaagcggcttcggtgtgtggtgtcccagtgtgagcactgtcggcaggagaaactcttgcatgagaaactccga

SEQ ID NO: 174800 - DNA, 837 bp, Homo Sapiens
tgctgactcggagctcgacgtctttgatgcgtacttggagtagggtctcgactgctgttcccctcttcactacacgatccgcaacccatgccctggaccagccgcccagatcatgccgccgcagctggttgggggcaccatctggacggggatggttccccaggaggagaccctcccctgcctccgaggcctacctgctcccctcaaaagcttcgtgccaacagagaggttcctgtttgaacccaggagagtggaagagagattgggactgagtgctgaggttgggaaggcacctgctcccacagaagggggaacgcaagaggcatcccaagacctcatctgcctgcagtgtcaaatcgatggcctggccttggcttctgattatttgcagctgcgatggatgtttacagaaacccagccagagtttgcctccctgcacttcatcccggagcgcacctgcttcccccacttcaccttcggagaggacacttcaaactgcggacacacgcaaaagcgactcccagctccgtttgatgtgagttgagccttcaggccagctgggtttagcccgaggctggtcttagatgcagcgactgtttcaggggtgactcagaagaaaaagaagctgaggaagctgttggggggctgagggtgggattctcgctccttcatttcaggttactcgttcttcagcaagttggcaaaacagacatcatgctggtgagtgccacgttactcccctggctggaaatgcttttctgaaagtatgagtgttgtgcctacttaattctgataaacctgtctaagcaatacttaggaggcttacttcttggcatt

SEQ ID NO: 174801 - DNA, 409 bp, Homo Sapiens
  misc_feature (363)..(363): n is a, c, g, or t
cagttacaacagctgttgagctgcagaggaactatttgtggtgggcaaattgtgcttcagagactattaaagatgcttcatgagagttgggggcatgggatgggaggtcccctagcttactgtcaggtgtcttactcctcaaggctcaggcctcaggtcagcttgtctgtcttcaggaacaagagcctgaaaacttcccaaatggcctagaggagtggagttgtaagcggcacagccttggccccaccctgccccaggcagagtgtctggcaggcattgtggctggcgagtccactccaacagaggagcagctggaatgacccttccttcaaagatctgcctctcccaccctgactatcgcanatgctgtgctctctagagctctgctcacaagactgtagggtcgaga

SEQ ID NO: 174802 - DNA, 514 bp, Homo Sapiens
ccgagctcggttccccagttacaacagctcacgcttgtggttgtggttttatattacagatgtagaacaatggttatgtttcccgacatgaacattgccctggaatgaagtgtgatcagccacttgtggaattctttgaagagctcagaggcttccaagtgatctgctcctgaacaagtttgaagacctattgtttcatagacccaagaccaaacgcatctaaaggatccccagcccccaagacctagcctttgtctgcgattttggcttcatctcccacaaaacccctttatgagttcacgctctttcctggactgacatacctattcctttccatttgttggactcctattcatgcttcaaagtccagctttcttaagcccttctttaggaagccttaccacacagccaaccctgctgctctctgcctcctttaaattcttgatacaagctgctgcttgttctgatgttttatggcattgattctgttttcctgtgtatatgccagttttct

SEQ ID NO: 174803 - DNA, 1117 bp, Homo Sapiens
  misc_feature (110)..(216): n is a, c, g, or t
  misc_feature (268)..(362): n is a, c, g, or t
  misc_feature (449)..(457): n is a, c, g, or t
tgggacccgaggcgggtggtccctgggtccggagttcagaccgccttgcccacatggccgaaacgccgtctcttcctgaaccctcgaatatcccggagtatcggtccacnnnnnnnnnnnnnnnnnnnnnnnnnnnnnnnnnnnnnnnnnnnnnnnnnnnnnnnnnnnnnnnnnnnnnnnnnnnnnnnnnnnnnnnnnnnnnnnnnnnnnnnnnnngggtgacagtgcaagactccatctcaattgtaaaaaaaatcatccaatccannnnnnnnnnnnnnnnnnnnnnnnnnnnnnnnnnnnnnnnnnnnnnnnnnnnnnnnnnnnnnnnnnnnnnnnnnnnnnnnnnnnnnnnnnnnnnntccacagcaatgtcatcattcaagtgagtttggaaagcaatttgcaaaagctgctgtggggatggcaaagcaatcaatccacaagannnnnnnnnccttagcaggtccaggtcatgcacaaaaagtacaaggtgtagtctctgtccttaaggagtttacagtctagctagaaaaactggcatatacacaggaaaacagaatcaataccataaaacatcagaacaagcagcagctgtatcaagaatttaaaggaggcagagagcagcagggttggctgtgtgggaaggcttcctaaagaagggcttaagaaagctggactttgaagcatgaataggagtccaacaaatggaaaggaataggtatgtcagtccaggaaagagcgtgaactcataaaggggttttgtgggagatgaagccaaaatcgcagacaaaggctaggtcttgggggctggggatcctttagatgcgtttggtcttgggtctatgaaacaataggtcttcaaacttgttcaggagcagatcacttggaagcctctgagctcttcaaagaattccacaagtggctgatcacacttcattccaagacatgttcatgtcgggaaacataaccattgttctacatctggggctccccattggccatcttgggctcctgaagccttcctgactgctcagtcttgaaggaagatgagtaccttcatccctaggtcacctcgccaggaacgggcagcaccctgtgcctaggatgtaggctt

SEQ ID NO: 174804 - DNA, 537 bp, Homo Sapiens
  misc_feature (477)..(477): n is a, c, g, or t
ccagttacaacagctgttcagcccaggctctccccctgcctagatgatgtccttggccagcacctgcccgcagagccatctaggagccaggcagcagacatagatcacagagctcaaatccacacctagtctgcaccaaagcccaggcagggcaaggtgtaggactacaaggcaaaaggggctcttgagggcctgtgcccaccccacccctggcattacccaccagccaaagaagtgcaaccaaagcctcctcaatctccaaataaattatggaaataaattatagtcttcacagtccagtggatttagccacccatgggtctagggctcaaggtggcagaagccacctgatttcagccctgtctcaccgtctttgggctaaggaacatcacgcaaagaccgaaaagtggtctgccaaagtccagaggagccacattttctcctcttccaggctcacgttgtggagatagaagagcnagctgtgggtgtggggggccgggcagctgaaaggggaagccccctccccctagtcctctc

SEQ ID NO: 174805 - DNA, 851 bp, Homo Sapiens
gggggaccaagatggcggcgccctgtgagggacaagcgtttgccgtaggggttgaaaagaattggggtgcagtagttcgctccccagaagggaccccccagaaaatccggcagctgatagatgaggggattgccccggaagagggaggcgtggacgcgaaggacacgtctgccacatcccagtcagttaatggatcaccccaagcggaacaaccttcattggaatctacaagcaaagaagccttctttagcagagtggaaacattttcttctttgaaatgggcaggtaagccctttgagctgtctccactcgtctgtgcaaaatatggctgggtcacagtggaatgtgatatgctcaagtgctctagctgtcaagcttttctctgtgccagtttacaaccagcttttgactttgacagatataagcaacgatgtgctgagctgaagaaagccttgtgtactgcccatgagaagttctgtttctggccagacagcccatccccagaccgatttgggatgttgcccctggatgagcctgctattcttgttagtgaattcctagatcgttttcaaagcctttgtcacttggacctccagcttccttccctaaggccggaggacttgaaaactatgtgcttgacagaagacaagatcagtcttctcctacacttgcttgaagatgaacttgatcaccgaactgatgagagaaaaactacaatcaaattaggctcagacatccaagtccacgtcactgcctgtattctctctgtgtgtggctgggcgtgtagttcctctttggaatccatgcaggtctccctgagtacttgacacaaatgtatgaggacagttgga

SEQ ID NO: 174806 - DNA, 1257 bp, Homo Sapiens
cagttacaacagctggggggaggaactgacagagacccagcacatgatccagcgacgcatcatggagtctgtgaacgggctgaagtctctctcagcaggaagggtggtggctgtgaagaatcaggagcatcacaacgcattgggagtgatcctacaggtctcctcgaactccaccagcagagtattcacaaccctggtcttgtgtgataagcccttgtcccaggacccacaggacagggggccagccactgcagaggtgccctatccagatgacctcgtgggattcaagctgttcctgcctgaagggccttgtgaccacaccgtggtcaagctccagccaggagatatggctgccatcaccaccaaggtgctccgggtgaatggggagaagatcttggaggacttcagcaagaggcagcagccaaaattcaagaaggatcctccccttgcagccgtgaccactgctgtccaggaactgctgcgtctggctcaggcccacccagccggacctcccaccctcgaccctgtcaatgacctgcagctcaaagatatgtcagttgtagagggtgggctccgggcccggaagctggaggagctgatccagggggctcagtgtgtacacagcccccgttttcctgcccagtacctgaagctgcgggagcgaatgcagatacagaaggagatggagcggctgcgcttcctactgtcggatcagtcattgctgctgcttcctgagtaccatcagcgagtagaggtgctccgaaccctgggttacgtggacgaggcgggcactgtgaagctggcagggcgggtggcttgtgccatgagcagccatgagttgctcctcactgagctcatgtttgacaatgcactgagcaccctgcggcctgaggagattgctgccttgctctctggcctggtcttgccagagccctgggggacgctggggatcagctcccaaacaccctcaagcagggaatagaacgtgtccgggctgtggccaagcggattggtgaggtccaggtggcttgtggcctgaaccagacggtggaggaatttgtgggggagctgaattttgggctggttgaggttgtatatgagtgggcccggggcatgccccttctccgagttggcaagggctctcagggaacccctgaggggcctgggtggtccgcctgcaattcagcgccctggattgaaaatgggtcccctcacctgcggggggggcagcccccccctgtgtaaagagaaagccca

SEQ ID NO: 174807 - DNA, 804 bp, Homo Sapiens
  misc_feature (603)..(603): n is a, c, g, or t
ccagttacaacagtgatgtggtgtcagagtgttcatactgtggagcccgctggtaccagtataaactctgctctactccccagtgccgccagctcgttttgacctgccctgcctgtcaaggacaaggattcacagcctgttgtgtcacatgtcaagacaaggggagcaggaaagtttcaggccctatgcaagacagctttaaagaggaatgcgagtgcacagcccgacggccacgcatacctagggaactcttgcagcatgtgcgacagcctgtgagcccagagccagggcctgatgctgatgaggatgggccagtgcttatgtgagcagcacctttggcattttcccaggccctcggtaaaagtaggtttggggtgactatacagagaaagcatggcaagactgcagaaacagagaaatcgggaacttcagttctggccgctgccaccgtggcagccgtctacacttcacagccggaggggaggagtcacgttgtctaccacttacctgagacattctgatttggatgatgctagagcacagaaaataggtgagctgcatgggatcccaaagctgctgagggatagagcctgagcctggtgnccacagcatatgccctttctgttccatgcagctggggctgttagtagtcattgccccttgtcagcagaccttctaccctggtggcaaacacatgaaagctgtggcctgggagtggcctcctaaaacaagccacttaggtcatctgccatctacccttaacctctgtctctcgcctgaggggctgaggtatgtgagggctgg

SEQ ID NO: 174808 - DNA, 480 bp, Homo Sapiens
caacacgctatgagggccgttaccattacgatccatctccgattcctccattgcatatgacttccgccttatctagtagccctacgtatccggacctgcccttcattaggatctccccacaccggaaccccgctgctgcttccgagtctcccttcagccctccacatccctacattaatccctacatggactatatccgctccttgcacagcagcccatcgctctccatgatctcagcaacccgtgggctgagccctacagatgcgccccatgcaggagtcagcccagcagaatactatcatcagatggccctgctaactggccagcgcagcccctatgcagacattattccctcagctgccaccgccggcacgggggccatccacatggaatatcttcatgctatggatagcaccagattctccagccccaggctgtcagccaggccgagccgaaacgtacactgtccatatcaccact

SEQ ID NO: 174809 - DNA, 667 bp, Homo Sapiens
tcccctaatttcttgtgagagtgtggcatacagagtaaattctttgagcagccattcctagtattgctttccctaagcgctctctgctttgcttggaataagaggtaggagggtttggagaacactcccctgggtgttattctagtgcttcactgctttccctcttaaagggcggcctagcctagctcctggcacatgtttgccagtgatgtagaaattctgtttctaaggattaaagaggtagggatgaaaataattaggcaacttgcagcctctgccacactcatatttcaagatccgtctttgattttttcattttaggcactaaatgatccatccttcgtgttttattcttccttgatctccagggactgtaaaacaatccagaaacttagtaatattatgaacaagcatttatcagctggccacaatgtgcttattaatgttcaaatactatgaggaatgtcagctttgctccccaaaccttgttagactcaaaccctcatgagacttgataccatgactactaatgtccttttattccccaaatcgatttccctttcctttcttactgggttttagatgcagatgacacagtccaaggaagatcggagggcctgtctgagtatggagaagtacgagctgttgtaactgggggaaccgagct

SEQ ID NO: 174810 - DNA, 376 bp, Homo Sapiens
  misc_feature (350)..(350): n is a, c, g, or t
ttcaaacgctgcaacaccctttctgctaagccttgtccattccaatctggacagtctctgtgcccctcctttccactcaagtgttatccagcactcaagttctggctcaaggcccaacatctccgtggggacctcagccatcccagggcattgtgaccccttcctctaagtccccggcacactcgctgattggtaccctctcattcgacaaagcatatgccattgtggcttacttgtcatttctttaggtcttgccttcccaagtagatcatgagccactataagaactagctcccatagtcccagcccctgggcctggtacatggcaatgcttagtgattggtgttgcnggcgtttaaaaaaaaccgagtcgatt

SEQ ID NO: 174811 - DNA, 361 bp, Homo Sapiens
tctgagagcctctccttatctcacagatcacaagcacccctagatagtgtgattctgtcagatagcatttatgcaaaaatctatgaagttaaaagatcgtagaagccaaatgaaatgtacatatctactgactgatgacaagggaatttcattaggaagaaggtaaagaaacatcgttgagtagcctaccttgatttctgtcaagttcataaccagcttcatattttaaaggcttcaggtttgaaattaagtcaactgcatgcagctttgctgataaatgaataattctctttgatgccatttatgagaaaagacttcaatatctgttgcctgtcatatttaagaaaaattactgtttcta

SEQ ID NO: 174812 - DNA, 761 bp, Homo Sapiens
ttccagagtagcataccagttcttcaaatgtcctatactttggaaagcagacccgactctggagcactcgccttaattagattctgaatttccttgaattttggatggtccttatcagctaccagctgaagcagaacagcctcactcgtggtcactatgatcccggttcgagcgagacgctcgagggcaaacatcctgtccatcatgcttcttgatgaggtggcatcagcaacaatgtgaacctcgactcctcggccaactagctccagggcagtgtgttggatgcacacatgagtttctactccaaataatacaacactcctgactccgggaatctctgctaatgccgcttctacttctggtaataccattgaaaacttggtctttggaagtaccagttttacacctgttaaatcaatttcttgaaccgtgctcccaagacctttagggtattgttctgttacaataacaggaattcctaaaatccgggccccttgcaacaatctctgtcccacgctaataatatccccaaaatacttgatggctggtctgaacctttcctgcatatcacagcagaaaaacacagtgcttgaaggtgtaagatttcccagggtagtgagctggatctgcaacggcacgaggcgcaccttgcagcgctcgctcaccgcgaagcccttgggcaagtccacgtactggccccactcctcggcgaacagctgcaccacgaaggtaagaagggctagggtaagagggctaggagg

SEQ ID NO: 174813 - DNA, 294 bp, Homo Sapiens
cagattcaaaatgtgtgttctacactgttacaggcttctcttctgtttgattaaagattttagtcctacttttgtatggacacattagaatattcagagaccaaaatagaagaacctgctgttagatattattcagaagtcagcagatatgtggcaaatcatttatttgcctttttaaaaattcatttaagcagttcagagagtagactactcagaaaattatttcacgtaattgtctaagaggtcaatattttttaatgcatattgaatcaaataaagtgctctaaagaaatt

SEQ ID NO: 174814 - DNA, 895 bp, Homo Sapiens
  misc_feature (582)..(642): n is a, c, g, or t
atgtgaaggggtactgtactttattcctgatacattttggtttccatgtaggtgttgagctcctggttttctgtgtttggatgatgaagatttggacccttccattcataatccctttctaagtgaagggagaggctggcttggctgttccttgttattccgaaagccctggtttggggcccatgttcacactggctctcagtctagtcaggtgcaatgttcttgagaggtggggacctaattattaccagagtagcagcaagagaggaaacgttgtgaattaagtattcaattaaaaggaaacatgatttctacctgaaatagaacggaaccagaacggacaaaccaaccccaccacaagaaacgcctcccttaaaatgctgaaccccggcagcaaccctcacacgaaagaattttctcttgtgggggccgccttgggcccctaaaaaaattttttataaaaccttttcttttgggccccccggggcccctttaagggaaaggggaaactggggccataaacctggtttcccctaaggaaataccccgggctcaaaccaaataggggctttgggaattctnnnnnnnnnnnnnnnnnnnnnnnnnnnnnnnnnnnnnnnnnnnnnnnnnnnnnnnnnnnnnaattccccccaaggggagattcctacgaaagggtttttctcggggggacctttcttccaaaggcggacttctccagagcgaacgctccaaaaaatcaaaatataagcgcccccccgcccgctggcacattttatttaagcaaatacggtgttgtggaatattttttttcatagctctttctcctgcatatactgtgtgaaaaaaccctttcatccaagccggtctttttatatccaactctccaatctctcca

SEQ ID NO: 174815 - DNA, 997 bp, Homo Sapiens
  misc_feature (20)..(20): n is a, c, g, or t
aggtctaagtacgagcctgngtggcgaattccgcacgaggcggaggtcctcccgctgctgtcatggttggttcgctaaactgcatcgtcgctgtgtcccagaacatgggcatcggcaagaacggggacctgccctggccaccgctcaggaatgaattcagatatttccagagaatgaccacaacctcttcagtagaaggtaaacagaatctggtgattatgggtaagaagacctggttctccattcctgagaagaatcgacctttaaagggtagaattaatttagttctcagcagagaactcaaggaacctccacaaggagctcattttctttccagaagtctagatgatgccttaaaacttactgaacaaccagaattagcaaataaagtagacatggtctggatagttggtggcagttctgtttataaggaagccatgaatcacccaggccatcttaaactatttgtgacaaggatcatgcaagactttgaaagtgacacgttttttccagaaattgatttggagaaatataaacttctgccagaatacccaggtgttctctctgatgtccaggaggagaaaggcattaagtacaaatttgaagtatatgagaagaatgattaatatgaaggtgttttctagtttaagttgttccccctccctctgaaaaaagtatgtatttttacattagaaaaggttttttgttgactttagatctataattatttctaagcaactagttttttattccccactactcttgtctctatcagataccatttatgaagacattcttgctataactaagtgctttctccaagaccccaaactggattccccaagcaccttgcctaacagtggacctgcccatttcccacccccccattcacaatggtgggcacttcctttgccagttctttttggaacatttggttccgggggccttttttcccacattggttggggggaaaataaattttaatttttaaaaagaa

SEQ ID NO: 174816 - DNA, 555 bp, Homo Sapiens
  misc_feature (376)..(376): n is a, c, g, or t
  misc_feature (484)..(484): n is a, c, g, or t
  misc_feature (499)..(499): n is a, c, g, or t
  misc_feature (506)..(506): n is a, c, g, or t
  misc_feature (511)..(511): n is a, c, g, or t
tgggccaaggtgtttccatttctcaatcagtgcagtgatacatgtactccagagggacagggtggaccccctgagtcaactggagcaagaaggaaggaggcagactgatggcgattccctctcacccgggactctccccctttcaaggaaagtgaacctttaaagtaaaggcctcatctcctttattgcagttcaaatcctcaccatccacagcaagatgaattttatcagccatgtttggttgtaaatgctcgtgtgatttcctacagaaatactgctctgaatattttgtaataaaggcctttgcacatgtgaccacatacgtgttaggaggctgcatgctctggaagcctgggactctaagctggagctcttnggaagagctcttcggtttctgagcataatgctcccatctcctgatttctctgaacagaaaacaaaagagagaatgagggaaattgctattttattttgtattccatgnaacttgggctgtaantcagttntgccntatagggattttcagacatacccacttggttaaaataaagcctt

SEQ ID NO: 174817 - DNA, 332 bp, Homo Sapiens
ttatatcagtgtttactgaagggaacatcaaaatattaatgagatattataaaataaagactttcttaaaggaaaattgcacctattttacctttttaagagtaagccatgaaatcttgtaacatgtctcttaactatttataatgaaaagtggcatttgggtatagtcaccacagcaatgttctacatccctaagattatctaggtaggacatgtcaaagatgactgttgtcattctggaggtcctattagagaatattataaaagggtgaccttgtaggaaggatctgagtcctccccctgaggatctctatttcttggtgctttattag

SEQ ID NO: 174818 - DNA, 466 bp, Homo Sapiens
ttcagagagctgatgtagagggatttgtctagacaggcagatagatatgatccagtgccaacactgtaatgctggctgaaatccagatggttgttggattgttaataaaatctatcttgtgggtgggtgggtgtcaggccttcatcattatatggtgcctgtcagatttatctacagacagaaccctgaaaacagcttgtgcctgccccgcatttttgaccccttgccaagatactgtactgaaatctatcaaaatcaggcaacctgggacaaatgcttcgagattccaaggcttaatagcaacagtgctgacttctaagatggagaagattctcaggaagggcatccttgtccggtggggaaaaattctagattaacaggtgaaccagatgctagctctggctctgccgctaatctgagtccctctgggctgtaaaataaggagattgggttagaatggttcatt

SEQ ID NO: 174819 - DNA, 287 bp, Homo Sapiens
catgagagtacgtattgtaactaaaaacagtccatgtataagacaagtaagtatgattccatccctttccgtgtagtcataagaatgaccataagcgaaagttaaaattacattcttgatttgtttaaaaatgcaaagcagatattgagaagccatcaactgtgcctgacgtattttctaaattattgcctgttaatcaattacatcaacatgatctcacagagacctaaagatgccacatagagtagtatggcatatagactcctcagctgaaagtttctatcacg

SEQ ID NO: 174820 - DNA, 413 bp, Homo Sapiens
catagagcaatgagcagaatacctcaaagtacgtgtcatcctcccttataaaagcaaacagaagaggacaattaatgtctcttttccttatgtagccagggagctatctagttcaaacacagggcttttgctgatacagcacggtctgttctagtagtctaagtttatttcctatgatgagcccttatttagtaaaacagcatcttactctactctaccaaagtcctaataaatagaaacatgtcttcatcaactgtgatttactattgagatacctcattaacacttctgacttatagctaatctacatatgtctaaatccaaagtgttaatgtgtgaatatcctactagaaatgtgcaagtatgatagtctgtaaaaagaacacatcctcaaacatctgaaaatcacacta

SEQ ID NO: 174821 - DNA, 1167 bp, Homo Sapiens
  misc_feature (831)..(844): n is a, c, g, or t
cgtctctcaatacctcagaaagtcagcatgtgtcctgaagacgttcatagatttataggaaataaagccaaatgtagctcatacctctttataaaactaaactgttgttagataaaatgagaagagaccattccatcattgaagtgttggaatataaaaagacattccagagcatagccttttggtaactttctaggtaatcttgcaatctctccatactggctccatgttgaaattgctttttccctcaggaccctgggtaagatggctacatttaaggtgactctgaatggtggggttctagcttggtcactttcatttcttgccatcataaaaactagtaggctgtggagtgcgcttcctgtttgtgtcatctggtcgtaagaaccttttccaaacagaagcatctgcctttgggtgttctgtgacctttgaagccagtctcagtggtttaggcagctttgcagttctaactctagctagaggccaggctgtgtgcagagctaaagcacaaatgagcagtacatcagcatgggcagagaaaatacaggactccagatgggaaggttttaagagtcacactggcatggaaggcttatctgccattctatttatagcctgaaatgattctggcctaccctgtcctgtctgtatgatctaaaaaccagccttttccccagaaggctctgagcacatccagaagtgataacctgaccctccacaccaaagacaccctggtgctgctgctggtgagactggtgtccaaggcagggcccagcagaaactgcagcctgctgtctaccaaaggaggtacccgagttgggtactttnnnnnnnnnnnnnncctgcccttacccctctccctaatgggattttttttacctgttcctgggcccattacagagcctctgaagtttgcagtatgctttcaaatgaaataatatacttccattgattcaggaagcagattttttgagtgcctatatgtgagacagtgtgctggttgaaggcctgatgctgttattccaggagactgcaggcccttgatgccaggactctctctactaaggccagttcaggtctgggaaagggagctggcctattgcccaccacctgttgtcagtaagttaagagcagttgactcaggatgaggaagtatggtccttt

SEQ ID NO: 174822 - DNA, 425 bp, Homo Sapiens
gagaggctgaaataatcgtggctaggctcacatcactggttgatacatggcagacccaactgcctctgcccccaaattcagaagtctactgatactatgtgggaaacaaagtgatttaagcactcttcctgctccaaagtattgagatgttaaaattaaacctcaggtctcagaaattaagaccctccctaccacgaatttcaagagcagaagtcaacatgacacacagtagaaatatatattccactttattagttagaaaaaatcacttaagccacatggtggccacaatgtccataacttgagcaggctttggcatcccaccacccccttcagaccaatacacactatgttggaggaacgactttaaaatgtaaaatgagaaatgggcactgaacactccatcctcactcccaacagcccac

SEQ ID NO: 174823 - DNA, 963 bp, Homo Sapiens
cgatgcacctgctcaccatctcttctgccttctgcctcctgtgccccccacccagaatgcccttccagaagtgcttgctgttatccaggtgtgccttgaaggggagatttctcgccagtccatcttgaacagtctgtctcgaggcaagaaggcttcaggggagcctgattccatggacagtgtcagaacagttccaagatccagactttggtggtctgtctggtggaagggtcgttcgcattgctgttcacccagattatcaagggatgggctatggcagccgtgctctgcagctgctgcagatgtactatgaaggcaggtttccattgtctggaggaaaaggtccttgagacaccacaggaaattcacaccgtaagcagcgaggctgtcagcttgttggaagaggtcatcactccccggaaggacctgcctcctttactcctcaaattgaatgagaggcctgccgaacgcctggattacctgggtgtttcctatggcttgacccccaggctcctcaagttctggaaacgagctggatttgttcctgtttatctgagacagaccccgaatgacctgaccggagagcactcgtgcatcatgctgaagacgctcactgatgaggatgaggctgaccagggaggctggcttgcagccttctggaaagatttccgacggcggttcctagccttgctctcctaccagttcagtaccttctctccttccctggctctgaacatcattcagaacaagaacatggggaagcccagcccagccttgccctgagcccgggaagaactgggaaccacctcttccctccccctaatgaccctgaaaccgggcctgggaaaattgttatttccccgggaaaaattgggtgggaaacattattccccctcctttccgtgggagacaatggaattcccccgggggccaaattcttcctcccgcaaatctaaaattttt

SEQ ID NO: 174824 - DNA, 524 bp, Homo Sapiens
aagcacgctgagcgcctcacccaagctctccaagcttccctgaatcataaaacacccccctccctggttccaagcctcttggatgagatcttggctcaagcatacacactgttggcactggagggcctgtaaccagccatcaaacgagagcctgcagaaggttctacagtcagggctgaagtttgtagcagcacggataccccacctagagccctggcgagccagcctgctcttgatttgggccctcacaaaactaggtggcctcagctgctgtactacccaactttttgcaagctcctggggctggcagccaccattaataaaaagtgtccctggctcagagccctctaagactcagggccaaaaacgttctggacgagggcgccaaaagttagcctctgctcccctgcgcctcaataatacctctcagaaaggtctggaaggtagaggactgccctgcacacctaaacccccagaccggatcaggcaagctggccctcatgtccccttcacggtgtttgagg

SEQ ID NO: 174825 - DNA, 1218 bp, Homo Sapiens
  misc_feature (395)..(395): n is a, c, g, or t
  misc_feature (411)..(411): n is a, c, g, or t
ctgtgattagaccacagaacaataaatatgtgccatcagaccaaaaaaaagtagagaaaggagctgaactccactctcgatgctacttacagaggacatctgtaaagtcttcataaaagaccttgaatgatgcctaggatggcagagccctgggtcctactccatcctccagcctttgtccttgtcctggcctcctgctctccagatctgtaaactgggctcaaggactgtacaagcagagtacaactacccccctccccggtgccagggcgcctgttgggtttggtcctgtgtagatgatccccagagtctcattcatccagctcctcttcagacagaaggtccccatgggtcagacagcttggtctgcattgctggtacttggttgcatcatncctcatcctcagagcntggcttcaacaggcagtgttggaagagcttgcatgagttctcgaaaacggtgggaaacctcagcaggggtcttatttcccagctgctgggagatgatgttgaaggtctgtggctgtgccccttgctcctggcacatggtgaggatcacacggtcagcttcccttgtccacaggacaaccttttccccagtggagctgaccttgctgttgttggcacacaccgtagcttctgcggcctttggctgctgctccccctctggacccttggcctgtgttccactgtctttagccaaaccccctctaggggctttgggagaagtctctgaggtgtcaattcctgatggagattcatggacagggcacgtcctgtctcttgtcttcacccgagctctgcttgagggcagccatctctcttgagtgtctggtttcccggacacatgtcttctccctgcatctctggtctttgaggaaacaggactcaggaaggaagcagggggttccacggtaccaggcaatttctcagtttctgatgcatcccagaccagcatcaaagcctctgactcactcactgccttttggccctccctctctttctgaagtctgggggatgccttggggcaggagcgaacctcaggcccaacctggtttctcttaacagtgtacagtacagctccagttgtggggggaaattgaggagtctctggtgaatgaggtggtgggccatccaggaggagccgttctgtaacagtcacttctacgaggggatggcaaatagctccccactccaatcctgacacaggcatcttac

SEQ ID NO: 174826 - DNA, 453 bp, Homo Sapiens
tcccttacctgcattatgatgtaagtctcggtgctcttgttctgactgcggcaggctacagggcctcctcatgctcccagtcagccgctgtctgttactggctctgttcttgaggcccgagcttgaactcagctgtgatgtggcctctcaaggactgtacaagcagagtacaactacccgcctccggggtgccagggcgcctgttgggtttggtcctgtgtaaatgattcccagagtctcattcatccagctcctcttcagacagaaggtccccatggtcagacagctggtctgcattgctggtactggttgcatcatcctcatcctcagagctggcttcacaggcagtgtggaagagctgcatgagttctcgaaaatggtgggaaacctaagaaaggaggagggctgtattcactgatccttagtaacatgttaacatttatgaagcactat

SEQ ID NO: 174827 - DNA, 441 bp, Homo Sapiens
aaaagacccttgaaatgaatcccctaggaatggcagaagccccctggggccctactcccatccctcccagcctttgtcccttgcccctggcctcctgctctcccagatctgtaaactgggctcaaggactgtacaagcagagtacaactacccgccctccccggtgccagggcgcctgttgggtttggtcctgtgtagatgattcccagagtctcattcatccagctcctcttcagacagaaggtccccatggtcagacagctggtctgcattgctggtactggttgcatcatcctcatcctcagagctggcttcacaggcagtgtggaagagctgcatgagttctcgaaaatggtgggaaacctaagaaaggaggagggctgtattcactgatccttagtaacatgttaacatttatgaagcaaaaataaattgatttgc

SEQ ID NO: 174828 - DNA, 692 bp, Homo Sapiens
  misc_feature (525)..(579): n is a, c, g, or t
tgtacaaaaagaaaatagatatatacagaatgcagaagtatcatggagttaacaccaagaatcagtcatggaccatatactacattaatagaattatagacgttgaactttctgatataaaaattggactgagttttgaacttttggtaagaaataaaagccgattaagcactggccgacccgcggctggtacccaatgcccgagtcactgtggcagcattcgcactggtgtggggagtcctttcaactcaaggaggctgggtttctgggcacccttgaagttttctggatgtctttttatctttctcgtgtgaactgcactacaaaagagaccagcccgcttcccaagccagccagacacctgggtcttgagccataaactggcgtagttaagctttgcagcttccagtgtattttatttattcttttgttgggtttttgtttgtttcttcttgtaaaattgtacagaaactttttaaaagaaattggattcgaaactggatgtgtattcgtaacctcataatnnnnnnnnnnnnnnnnnnnnnnnnnnnnnnnnnnnnnnnnnnnnnnnnnnnnnnngcatgtatatttctttgtacagagaccttacatgtttacacagtatgatgtgatgtaaatattttattttgccatcagttattttaaaaaaattaaacatatttgcctgaaca

SEQ ID NO: 174829 - DNA, 799 bp, Homo Sapiens
ggatctggaatgcattagttatgaccttgtaccattcccagaatttcaggggcatcgtgggtttggtctagtgattgaaaacactagtccagagagattccagcttgaaaaaggagtgatcctcaatatcctaactaactggtcctcaactcaagcagagtttcttcactctggcactgtgatcatgaaacttagtagaggggattgtgtgtattttatacaatgttaataccatgtcttacattgataaaattcttaaagagccaaactgcatttgagtttctgcatccacattccaatcatattagaactaagatatttatctatgaagatataaatggtgcagagagactttcatctgtggattgcgttgtttcttagggttcctagcactgatgcctgcacaagcatgtgatatgtgaaataaaatggattcttctatagctaaatgagttccctctggggagagttctggtactgcaatcacaatgccagatggtgtttatgggctatttgtgtaagtaagtggtaagatgctatgaagtaagtgtgtttgttttcatcttatggaaactcttgatgcatgtgcttttgtatggaataaattttggtgcaatatgatgtcattcaactttgcattgaattgaattttggttgtatttatatgtattatacctgtcacgcttctagttgcttcaaccattttataaccatttttgtacatattttacttgaaaatattttaaatggaaatttaaataaacatttgatcggacgcgtgggtcgacccacgcgtccg

SEQ ID NO: 174830 - DNA, 678 bp, Homo Sapiens
  misc_feature (468)..(468): n is a, c, g, or t
  misc_feature (559)..(559): n is a, c, g, or t
  misc_feature (590)..(590): n is a, c, g, or t
  misc_feature (639)..(639): n is a, c, g, or t
  misc_feature (653)..(653): n is a, c, g, or t
  misc_feature (658)..(658): n is a, c, g, or t
gaagggaggcaaaagtggcaggatcacttgagacacagattcacagaagagtttcatacacctataacacccaggttcccctaatgttaacagcttacatataaccttggtacatttatcaaaactaaaggtgcaatcatactaatagctagagtatatatggattttaccattaatcccaatgtcccttttctgctgcagcagccaatccaggatgccacactgcacttagagctgttgctttcttatatcctaactttatattttgaaataatttcagatgataggaagttgtaaaggtaagggccccacgcacccttcatctagtttccctccatggttacatcttatatggttgtaatgcagtattccaacaaagactctgacactggtgcgatgtgggtggacagtccaaatcatttgtcacatgtacatctgtgtaactaccactgcaatcaggataaagangtcccatccccacaaggatctccctccccaccttccctaactcctgggtaaccactaatcgttcatctcttcttattttgtcatttcaagnaatgttgtataaatggggagcatagtgtgtnaagcatttcggggattgtctttttttcactcgggcgtcattcttcgggnagatcatccagggnattgncattgtgttcaaacagtttg

SEQ ID NO: 174831 - DNA, 506 bp, Homo Sapiens
  misc_feature (198)..(215): n is a, c, g, or t
ggtctatacacaggcgaatctttatgggacattaaagccttaggtctggggtaaaatattgcagcctccagcctctccagacagttacgttcatgccacttctgtgccattggagtaattcatgaatgacactaaggactaatggcttgaggggaagtctttagattataccaaggatcaactgtaaacaaagagaannnnnnnnnnnnnnnnnnaggctccaacttgcctattttattttgtcagctttacccagtttttccacaatatgccaaaccctatctgtaattttgatggctgaactgtatgtatatatgcgcacacagcataaagtgcatattttgttagaactagattaatgccacaatattcagaaaacttctccctgtgttttcaaaaaattgacatattttgtggttagactgaaatgaggtaaatgtacatgttattgtagtactaatggattgttagatatttgctgtaatgttaacagttaattgatgccc

SEQ ID NO: 174832 - DNA, 481 bp, Homo Sapiens
aagacaaggaccaagtacacacacagcatctggctgaaggtaaaacatttccccaggtttcgctttggaataaagattctttcagacacaattgaacagatggatcctaccatcatatattcttgtgcagaagctattgtctctctcaactgggaaaacagatttgctgctaaagaaatagtgatgtgacctacacgcccacaattctggtttacgtatcagaaaaatacacttttttactcattaagatatggacatttccatggagcaagttaacaatgccttaatctgcaggccccatctgcccctcagccttcttgatgcctgtatcaacatccttcagctgtaagccagggagagaatctctaaacacatagtgaatgtgaatgactgaaaacactcacagagcactggacatgccatccacagccaggaggcataccaaaataggatgccctcacagtccagagtatattctata

SEQ ID NO: 174833 - DNA, 238 bp, Homo Sapiens
acaacgaggaaagcaaggggacctcagagggaaagctctggcagcccaggttgactcaggagtctaccctgaaactggggtccagaaagctaggaaattgtcccctcttcctcccatctcaaatcctctcttgggaacagagtggccctggctataattttatcacatacatttaattagaatttgtcttcttcatgatggtttcaagtgaagtcccaatagaaacattctaaaagaa

SEQ ID NO: 174834 - DNA, 447 bp, Homo Sapiens
gaacctctcagtccaccttttctgtcctaagtcagctgtaccaagcctgctagggaagagcattctctttggttatctttctctctccccatcaatagcacatcctcctggctaactaatgtctcttgtgtaatgatagcagcacctctgagagaaagggaatttctctggcacagttcgtctcaacaccagcataacacaggctgttgcttaggagtgggaatcattagagtcaggccattattggaggggaccggtctctaggggagctagcagaaattgccgctccttaatggatggaaactcatttgcctgaagcccctgccctcctctttattttctctgcattcctcacctcccattgcttcccagctttgaagttgaaaagagaggtaactccacccaatgcacatttctgctaaattaacttggttagaagaaatcctt

SEQ ID NO: 174835 - DNA, 722 bp, Homo Sapiens
gggcgatctacgtaaacacactttgctcaatatcatgaatgtacggggtgtatgaagagtatgatgaaatcagaggctacgtactggagtcataatgcatcagtactgagattctaggcataccccctccttagctgggtgactattaggcaactgactgtaccatcctgaaagtcatctgtaagccgtgttgaccccccaaccacaggacacttgtgcccgctgcaggtgctctgtcagcagtgacttctcactacctggcatcctctgaattcacaagcagtttgaagaatgagcaaatactgagcaaagctcataggattaaatacacacagacctgtgtaagttaacaccaagctaagggttaaatactttacaaaaattctcagtgcggttggtgggtgagaagggctgtcgtcccctctggctgccttgccaagctggtagaggggccatctcccactacctactgacaaagattctttgcttgacccaattacccaatttaatcagacacttaagtctcttcctaggcccatctgtgtacttcctgtaaaatctagtgttagcaaaaaactctactgagtcagtttggtaatggaccaccggccgtcaatatcttccatatctgatagatagggttcctcatcttctaccaccctccagatgatgtctggtcaccctgcctgcctttagcagtatcgtgataggttgattaaccg

SEQ ID NO: 174836 - DNA, 514 bp, Homo Sapiens
aataaagtgatgggaaggattacagaccacatatccattctcgagtactgcatcaaataatagaacacaaaatagtgctccaacttcagttcacgacactacaatcttcatgaaatattaaggaaactctgaataacacggtcaaaagagaagactgttgcgagagcgaaacacgcatgactggatcaccacataaaaccttcctcaagagtgtgaggcatggttgtaccaaacattctacaaccttgccatcgtgactcacacattcatttaaatactcaattattttgtcaattaagcataactttatcaccacagcatgcattttaatatcttgcataatcacagctaactgttcagcagctgactttctcaaaacgagatcaacatcatctgaggtgaagatttcatataccttttcaacagtctccaacttaataaccagctctcttctgtcatccagtctgagttcaataggtttcttcccaatgaataaaacagtaactctggagag

SEQ ID NO: 174837 - DNA, 262 bp, Homo Sapiens
tactgcgatgattagaagcactctgagattctagggccaaagaagcactagaaaagccccagctgctggggtacacccttggtgggcaggtgcagggcacaagtgtgatatgggagtaggccaggaagctgctgatgccactatgcatgtgctcagaggggctgtctagtcccaggccaccttctaagagtcactctaatgagaccgattctccaataggctacactggacacacagaacacagcagaggaaaaacacacac

SEQ ID NO: 174838 - DNA, 394 bp, Homo Sapiens
tcggcctggccaccttggaggcactcctgtgcatggaactgagggacaggggcctgtccctgagggagaagctgggacctatctgaagccacgtggggctggggtgacgctagcataggcaggaccagcgtgtgggttctggtgtgtgcagggaggacctggcagaggctcctccagcctgagagcccagcagagactcctgcagggcccccaccatctcggcacagggtctggctctaagacggcactgtgccctcaggggctgcggtgggcccgtggcaggtgagaggcaaccaactcaggagtcagatcctctggtccagatctaataagctgaacattcaggctgtaatttggggttttaaagaaatgttttaggagggttgtgtttaca

SEQ ID NO: 174839 - DNA, 916 bp, Homo Sapiens
  misc_feature (848)..(848): n is a, c, g, or t
  misc_feature (858)..(858): n is a, c, g, or t
aacaagagataggtcataatatcgtaagagcaaggcttggataatcattttggctcgtgtcatgttcagagagcagagaagttggcctgtaaaatagagtgctagagctcttacgcccctccccttcttcccaacttcctacttcctagcccttttatcaactcctagaatagttaaagagagacacatctagatgggatgaaaggtgccctaagcaggagaaactgaacaaaaggctagaggcatgggccaggtaaaaattgggcctagagtgaagactgtgctgtcgttaagagctttcgaggaaggagtacttactccccaatgatgatgaatggaaaaatacttttcagggagaattgaaggggttaaagtgttaaatatgttgcctagacaagggttctttaaagaaagacagcgcaactttgaatgctttcttacttgttttgtgacctaatttatgtggaagattgttatttcattaggatttagtaaaatttttgtttctgattctaaacttattgtgaaaattgagctgtacagatattcttttgatttcaattgggaacatttggaagaacaacagtcttacttgcctgtacaatatagagacatatgaatagtcataacagttttcaacttgttcttgtttctgttaaactatattcctagaaacatagtttgaacaacttggtctttgttaggcttgtcaaattgccttcatggaaaaataatctacaaaagtatggtttaattgattgtcttacatgataattttccctggtaacaacttagtaagtgatatatctttttcctaaattgcttaaatactgtgaaattgcctctgnacaaattggnaagtgtaccatgggcataattgtcttcctttttatgcatgatggtaaaataaaagaca

SEQ ID NO: 174840 - DNA, 484 bp, Homo Sapiens
gacaagtgaggcgaggttccacatcgccggccaagtggctttatgggcctccagtgggatgtggcaggaagtacccagcggctctgccatgcattcttgaccagaaatgttgaacccgagttaattgtgaggaaacggacaaatccagggtgtggggcacgccgcagagagctgccttagccgcttcaacaccatcaggccagagtaggcggggagcgtctcggggaaaggggacagagagacgtgccatccaaatgcatgtgtgtcctccacggggccctgcatccccgcagctaggaaggtcatctggggacagttggtgaaatggaaacagggacgggatgttcggcagtattctgtcggtattcatttcttgggtgtgctcatggctgtcctagtgagcaggctgtcctgattcgtaggagatgtggacggacatggagggagtgccgtgacgtagcccaggagacctttttagcttaaa

SEQ ID NO: 174841 - DNA, 338 bp, Homo Sapiens
tgctattctccatttctttgtactgttagtttctgaaaggttccctcagaattttcttgcaccctactaatgaaggaaggcaggtgttctaccctggcttccagactctccccagcaggtcgggttcaagttgcccctggtggtaactggcttgaagatgcgcccattcctgctgacttcctttccccgtctcactttcccgcatccctgtgggagttctcttcaccttgttgaataagctagttgtacttgaagcctcaccttgatgaggccccaaaccaagatactgtgtactaagtcactttcactgagccttttctttcccgtatacaaaattg

SEQ ID NO: 174842 - DNA, 341 bp, Homo Sapiens
ttcactgtgtgagcttctgtgtcttccacaaaagtgggcgagttgggtcagatgtaatccagcgtgactgccagctctaaaagtctttaatgccgagccaatgagccattctagtagggcttaccagtgtgactcagtaaacatttgatgagtacttcatatcagaaacagggcacaaaggttaatataacacctgtgcccacatccagggtggggccatgtcataagcagtcccattgctccaataatcggagaatagctaacttgtaccaggcagtgttctggatactttccattgatttatctattcatgaaatacattagcaaaatgaattagcagg

SEQ ID NO: 174843 - DNA, 177 bp, Homo Sapiens
ccagaccggtccccataagtactttaaataccagctgattttaacaatgagccctagagaaactgatgaaatgcatgtatacggggggtacataatttgagagggttcacaaatctccatcccattcatggaccccagcttaaaaaccagcaatatagtatttaaaatccaactgca

SEQ ID NO: 174844 - DNA, 1087 bp, Homo Sapiens
gggaaaggtgtaaacacagttttccactgtgcgtcacccccaccatccagtaacaacaaggagctcttttatagagtgaattacattggcaccaagaatgtcattgaaacttgcaaagaggctggggttcagaaactcattttaaccagcattgccagtgtcatctttgagggcgtcgatatcaagaatggaactgaagaccttccctatgccatgaaacccattgactactacacagagactaagatcttacaggagagggcagttctgggcgccaacgatcctgagaagaatttcttaaccacagccatccgccctcatggcattttcggcccaagggacccgcagttggtacccatcctcatcgaggcagccaggaacggcaagatgaagttcgtgattggaaatgggaagaacttggtggacttcacctttgtggagaacgtggtccatggacacatcctggcggcagagcagctctcccgagactcgacactgggtgggaaggcatttcacatcaccaatgatgagcccatccctttctggacattcctgtctcgcatcctgacaggcctcaattatgaggcccccaagtaccacatcccctactgggtggcctactacctggccctcctgctatccctgctggtgatggtgatcagtcctgtcatccagctgcagcccaccttcacacccatgcgggtcgcactggctggcacattccactactacagctgcgagagagccaaaaaggccatgggctaccagccactagtgaccatggatgatgctatggagaggaccgtgcagagctttcgccacctgcggagggtcaagtgagggacactggaggctgggctctctcgacacgttgctcagccagtcactccttcccctgtggattgatgaaataacatcctttgaatgagtttgctctgagcctgtgactccttctgctaggcagagagcgcaccctactctttccgtgacgatgagggcggccaaaacagacatttcttccttcatggaactggatttggatttcttgaagcaggcagcttcatattataccgatttgttctctgtc

SEQ ID NO: 174845 - DNA, 839 bp, Homo Sapiens
  misc_feature (71)..(80): n is a, c, g, or t
  misc_feature (218)..(264): n is a, c, g, or t
cttcttgacttaacaggggtctcctctcaaccttttcccaagccatgtgacggtttctattcccaaaggtnnnnnnnnnncccaaacccccaaaccttcccccattttgaatgattcctggggggaattcatttgttttttgcaatcagagtctgaaacctgggctgcaggtcaactatctcgagcagttatgaaaagaccagggttactggagaccnnnnnnnnnnnnnnnnnnnnnnnnnnnnnnnnnnnnnnnnnnnnnnnccggggattttgtgcaagatttaataaaaaacaaacaaaaataggaatggttgctttcaacattttccaggttgtgaaaggtttgccacgactctcaggggtgtggttctaagctgcatcagtggaacaaatacaaaatgctgtcctcctcctgggctggaaggcagtgcactttctcctcttaacagccagactagcgggtgaggagtcagtgctgtgacccaggccaagctggagtgtccgcatagctttttctctgaccagtggggattccatctaccttgaggcgtgctggctgggccccgtttccacaccagcacatggtgagacagggtagcttatcaacaggctgctgggccttaatactgacagtgagtgtggcgggtcacagccaggaaaggactaacacagatgccctcccagcccccactgctggcctaattttagaataccacggaaaaaagctttgatgaagacaacaggaagtcaacacagcagagagtggtgtggacaacccagaagccagtcctcacgcattccatgcccacagttaacgatgacaacaacagcaataa

SEQ ID NO: 174846 - DNA, 510 bp, Homo Sapiens
tccaccaccacttccgacatgatcgccgaggtggggtccgccttcagcaagctctttgaaacctgagcccacgcagaccagaagtaaacaggcaccttggacgggggagagcgtgtgtgtgatgggtatatccggacccacgcgtgtgtctgaaggcgtacggtgcttgccagattttcaacttgagcataaattggttgccattgagaagtttaagatatctggaatattgcagctcttggttataacttaatgcatggttggagatgttatggcaacactaaacaaagtattcctgaactgttccttagctccttggtagtaactgggaagacagaaatgaatgaaaatcacatgagaatgaagaattctgtagcagctcaacagaatttctcggcctgctcccagatcggcgaagtttctacttgttactctctctggccgacgcccttcattccccccgcttcccttccctagtctttcctccggcagggagctgggcagggtccc

SEQ ID NO: 174847 - DNA, 491 bp, Homo Sapiens
tatgccacatgatgccctgctaagctatgacatccctcacacttgtggacctgatcctaatatatgctgccagttgattttaaacgtcttcctggaggcagatattggttgtcccatggggagtccccccagaaacaatacatcctggaatgtccaaagcagggctcggatgctactagatcagtaccagaaagaagtcaaagctttttcgtgccaaagttctcctggctccactaggagatgatttccgctactgtgaatacacggaatgggatttacagtttaagaattatcagcagcttttagattatatgaattctcagtccaagtttaaagttaagatacagttaggaacttaatcaaatttttttgatgcgctggataaagcagatgaaactcagagagacaagggccaatcgatgttccctgtatgaagtggagattctgtcacttatgccgaacgagatgatcattactagagtggctatttt

SEQ ID NO: 174848 - DNA, 399 bp, Homo Sapiens
ccactctagtcagaagcaatgagacctgtgtgcctgtggccttgagcagcacagcaggggcagtcggatggacggagtgtgtcgccagcgtgtctctcaaatggagcaaccagctgccatgctcacccatgcctccggacacgaggaatcagcgccgggccgatgagggagaaagttcaggattttggcaaaattaggcagcgttaaaatggtaacagccttggatgaacgatggccctttgtaaatttcatgtccctagaaaggtgaaagataaaggtaaaaatttccatctccacgtgtttttttgtaatgacccacggtgtcaggcgggtgtgtacagtggttggatggggccacggacagccacttcctcaaactgataaaaagggcttcccagc

SEQ ID NO: 174849 - DNA, 2036 bp, Homo Sapiens
  misc_feature (1510)..(1510): n is a, c, g, or t
  misc_feature (1762)..(1762): n is a, c, g, or t
gacggagagggccaccgcccagcaatagacggtgcctcagcctgccgagccgcagtttccgtggtgtgagtgagtccgggcccgtgtcccctctcccgccgccgccatgggctgcacgttgagcgccgaagacaaggcggcagtggagcgaagcaagatgatcgaccgcaacttacgggaggacggggaaaaagcggccaaagaagtgaagctgctgctactcggtgctggagaatctggtaaaagcaccattgtgaaacagatgaaaatcattcatgaggatggctattcagaggatgaatgtaaacaatataaagtagttgtctacagcaatactatacagtccatcattgcaatcataagagccatgggacggctaaagattgactttggggaagctgccagggcagatgatgcccggcaattatttgttttagctggcagtgctgaagaaggagtcatgactccagaactagcaggagtgattaaacggttatggcgagatggtggggtacaagcttgcttcagcagatccagggaatatcagctcaatgattctgcttcatattatctaaatgatctggatagaatatcccagtctaactacattccaactcagcaagatgttcttcggacgagagtgaagaccacaggcattgtagaaacacatttcaccttcaaagacctatacttcaagatgtttgatgtaggtggccaaagatcagaacgaaaaaagtggattcactgttttgagggagtgacagcaattatcttctgtgtggccctcagtgattatgaccttgttctggctgaggacgaggagatgaaccgaatgcatgaaagcatgaaactgtttgacagcatttgtaataacaaatggtttacagaaacttcaatcattctcttccttaacaagaaagacctttttgaggaaaaaataaagaggagtccgttaactatctgttatccagaatacacaggttccaatacatatgaagaggcagctgcctatattcaatgccagtttgaagatctgaacagaagaaaagataccaggagatctatactcacttcacctgtgccacagacacgaagaatgtgcagtttgtttttgatgctgttacacgatgtcatcattaaaaacaacttaaaggaatgtggactttattgagaagcatggatgttagtgaaagctactacagtgcggagtgttgagaccagacaccttttgctgtctcatggggcagctacaagcatgaacgggaccagggaatggcagcagcatgcagaatcttagcactctttagcacaatatttttgtattagggaaacttttaattgaccatgagatgcttaaagtcagacattggcaatttgggaaaaaactattaaagcggggatttcaaatcggccaagaccatcaccttgggaattctctttaattcctctaaaatgcgtttatgggaaaaaatgctgaaaaagtcgcaacggggccttgccatttctcaancaaccttcacaataactgcgcagcccttaaacctccttattctttttttgcaccgcaccctttccctatacaaacgccacccacagtgtggggcgcgccccaacttctttattaaaaagaatattgttttttttctcttgtctcgcgggatgaagaagcagatcaacacgtcttttccgctctcaaaactcttttgcagacgtgtccgtctgtaacaccgcggccgaaaacacgaaacacgctgtttgcgtntgtgtaatgagagacaaacccgctctcttttatttgtatagacatttcgaccgcagccacgcctcatatatttacacgactgccgcgagatagtataccgcggtcttgttatctatgtatccccctgccgtcatactgcatctatatatagagcgtgtttagggtcggagggtgcggtcgcccgcgcgaaccctctcggcacaatagacttgttctgtaaacacactttctttcgttttcgaccccccccgccctttactttctactacacgag

SEQ ID NO: 174850 - DNA, 917 bp, Homo Sapiens
acacggttccatactttgaagagcagctgcctatatcaatccagttttaagatcgaacggaggaaagtttccaagagatcctatactcacttcaccttgccacagacacgaagaatgtccagtttgtttttgatgctgttacagatgtcatcattaaaaacaacttaaaggaatgtggactttattgagaagcatggatgttagtgaaagttactacagtgtggagtgttgagaccagacaccttttgctgtctcatggggcagctacaagcatgaacgggaccagggaatggcagcagcatgcagaatcttagcactctttagcacaatattttgtattagggaacttttaattgacatgagatgctaaagtcagacattggaattggaagaactataaagtgtgattcgatcgtcaagacatcacttggatttcttaatcttaaatgcttatggaagatgtgaagttgaggtgctgcattctagaacttcaatatgtagcttactctttttttccccccttcttaaaccaccagtggttcatttttaaggttttttcatcaagagaagaataactttactaaattttatttctttatttgcaaaagaatctttattaaaacaaacaatcttaactatgcacatgatgtgaccagatcatcttgaaaatattcctctttagtaggaactctttgtttttaactcttggtatggtcagaatataatacttccataattacttataattccttccggttactggggctataaatacaacttttttaaatgaaaattatgttaattatccctgctcaaagtaccatttatgggtttccatatggtaattacattggaaagttctgcaataagattctagttctctcttttctttaagcttatggttgaaggttaacctg

SEQ ID NO: 174851 - DNA, 371 bp, Homo Sapiens
tgggttcaatggatcctcccacctccgctctccagtctcgcccccacttctgtacctcaggaggtttctctgcacctcactccctcgcgcccaaccttccatgaagcccgtgtgagggagttggcagggggcagaggcgggctgtgctggggctccctggagtcctcatctgtcacgccagtccccacacggtcatgaacttccactcatttcccctcacgcagggcatcccgccctgctgcctcgcaccagggtgaaagctgtgggctccttccccaaggaagggctcgtcctgtctgcatttggattaatttaggtccctttgcattgccagctctcagatggctttacctttgattttgttgcttgtt

SEQ ID NO: 174852 - DNA, 458 bp, Homo Sapiens
aaagcagtctttactatccagtacataagactctagaacattaaaattctttatatagtgccatgtggcatctaaaataacttcggcgtaggaaataaaacatatttgcagaaagtttggggttgaaatcaaagaatggatcaaagtggcccttcatttggctccacgtcatctcacaatagtgaaatacagcagaatgtcactaaactaccataaaactaaggggagagatttggcaaaaacagggagtgacagacacgttttttgctcctgttttaaagtaaattgtactaatgacaacaatagtgatctcttataggcccaagttggatcagtgatcaatttatagcatttctgtttcaaatatccaaaagcaaaaagtaatctgccaattagaaaacaaaaaacttcaaacttaagtgatgtaatgatggagcacctgtatttgactagagtgg

SEQ ID NO: 174853 - DNA, 499 bp, Homo Sapiens
agcaatggatcaatggaatacgggggttggtgtcctcagatgagctagccaaggatgtcaccggagctgaggcattgctggagcgacaccaggaacaccggacagaaatcgatgccagggctggcactttccaggcatttgagcagtttggacagcagctgttggctcacggacactatgccagccctgagatcaagcagaaacttgatattcttgaccaggagcgtgcagacctggagaaggcctgggttcagcgcaggatgatgctggatcagtgccttgaactgcagctgttccatcgggactgtgagcaagctgagaactggatggctgcccgggaggccttcttgaataccgaagactaaggagactcactggacagcgtagaggctctgatctaaaatacatgaagactttgacaagcgattaacgtccacggaagagaagattgctgctctgcaggcctttgccgaccagctcatcgctccgccattatcac

SEQ ID NO: 174854 - DNA, 482 bp, Homo Sapiens
ccactctagtcattcataagggtgcaacacttcagttaccaaatttcattgcacatagattatcttaggtacccttggaaatgcacattcttgtatccatcttacaggggcccaagatgataaatagtaaactcaaaattgctccccactctgtttattatttaaaggtgtcaggatctgtgttgtaatgtgtctacattaatgtgtttaggagaatacaggcattggatcatttagttgatggaagtatatgccaggcaagggagataaggtatacgacaagactgatgttttcagtacttctcatgaggttgtcagagaccttcatgtcttcaaagactagtcagcaaatgaagtggtttagtgtagagacaagattggttgtgttttgataatttaagctaggtattgagtacatgtggattttgctgtccacaaatacttgtttcagagttttcatgtacctgagtgtccgcgaccgg

SEQ ID NO: 174855 - DNA, 463 bp, Homo Sapiens
tctgtatgctaatactctcaaagtatatctccagtcctgatttctctcctgagttccagactcataaatcctatagacgcttcaagtatctcatgtggacatacactaatattatgattatgggtaatagtaataatattaacagtagcagcaacaatagctaacatttactgagaacacagtatgtgtccagttgtgttttaagtgcttcagggcattaatacatttaagtttcatggaaaccatatagcatacatactattaccaacccagtctcacagatgaggaaattgaaataatttgttcaatattccacaagtaataaatgccagaaccatgcatttaaaaattaagatagccttcaaaaaccctagattcccatccctcaaacctgctcctccccattgtcttatctaccatcattcacacccttgctcaaacaaaaaaattctctcctaatctc

SEQ ID NO: 174856 - DNA, 916 bp, Homo Sapiens
  misc_feature (70)..(132): n is a, c, g, or t
  misc_feature (859)..(859): n is a, c, g, or t
cgcgcggccgtgcagcctgggcagtgggtcctgcctgtgacgcgcggcggcggtcggtcctgcctgtaannnnnnnnnnnnnnnnnnnnnnnnnnnnnnnnnnnnnnnnnnnnnnnnnnnnnnnnnnnnnnnagatgtggcccctggtagcggcgctgttgctgggctcggcgtgctgcggatcagctcagctactatttaataaaacaaaatctgtagaattcacgttttgtaatgacactgtcgtcattccatgctttgttactaatatggaggcacaaaacactactgaagtatacgtaaagtggaaatttaaaggaagagatatttacacctttgatggagctctaaacaagtccactgtccccactgactttagtagtgcaaaaattgaagtctcacaattactaaaaggagatgcctctttgaagatggataagagtgatgctgtctcacacacaggaaactacacttgtgaagtaacagaattaaccagagaaggtgaaacgatcatcgagctaaaatatcgtgttgtttcatggttttctccaaatgaaaatattcttattgttattttcccaatttttgctatactcctgttctggggacagtttggtattaaaacacttaaatatagatccggtggtatggatgagaaaacaattggctttacttgttgctggactagtgatcactgtcattgtcattgttggagccattcttttcgtcccggttggatattcattaaagaatgctactggccttgggtttaattggtgacttcctacaggggatattaatatttacttccctactatggggtttaggcacagcggattgggattaaccctcccttccntcatttgccatatttggtgtattccgggtgataagcccattttcctcccctgggggg

SEQ ID NO: 174857 - DNA, 903 bp, Homo Sapiens
  misc_feature (70)..(132): n is a, c, g, or t
cgcgcggccgtgcagcctgggcagtgggtcctgcctgtgacgcgcggcggcggtcggtcctgcctgtaannnnnnnnnnnnnnnnnnnnnnnnnnnnnnnnnnnnnnnnnnnnnnnnnnnnnnnnnnnnnnnagatgtggcccctggtagcggcgctgttgctgggctcggcgtgctgcggatcagctcagctactatttaataaaacaaaatctgtagaattcacgttttgtaatgacactgtcgtcattccatgctttgttactaatatggaggcacaaaacactactgaagtatacgtaaagtggaaatttaaaggaagagatatttacacctttgatggagctctaaacaagtccactgtccccactgactttagtagtgcaaaaattgaagtctcacaattactaaaaggagatgcctctttgaagatggataagagtgatgctgtctcacacacaggaaactacacttgtgaagtaacagaattaaccagagaaggtgaaacgatcatcgagctaaaatatcgtgttgtttcatggttttctccaaatgaaaatattcttattgttattttcccaatttttgctatactcctgttctggggacagtttggtattaaaacacttaaatatagatccgggtggtatggatgagaaaacaattgctttacttgttgctggactaatgatcactgtcattgtcattgttggagccattcttttcggcccggtgaatattcattaaagaatgctactggcctgggtttaattgggacttctacggggatttaatattacttcactactagtgggtttaggaccgcggattggaattaacctcccttcgtcattggccatattgggttattcaagtggatagccccaatatccctccctgggg

SEQ ID NO: 174858 - DNA, 570 bp, Homo Sapiens
ctgcagaagtacaaagagcaagaggtgcgttagggaatgtaagatcttatattctccttgaccctcgtatctctgagagcttaccttatgattcttctcccctcacctgcaaatatatagcttgagtagcagatgaggcaggacatcataacgccctccatattaaatgagttccgtgaatagacaggatccagaaaataaacccatctgtttgatgcagaactaagaacattagattgagaaacttgaggtctcctgctgtaagcagccatcagccagcatcagccagatcccctaggaatctgcatcagaacaaactacctattcttatcatctctccactgggcctggtcatctgtgagcagggttcccaggcaggtgattgtcacagggcggcagatcagaacagacagactagttccagaccagggtcaattcctggtgtctgctctggtcttggtggccccactctgggcctgggggaatggacctgcccggggaggaagagaggctttgcagatggccctttgctaagggctctggaagatctcctgactttgtggttcttaa

SEQ ID NO: 174859 - DNA, 454 bp, Homo Sapiens
aggtgcagagcgtgtgagtgtggatggagaagaggcagctaagatgatgacttcataagcaggccaaggcacggaggaagcagtgcgtggctcattcgtcatcattatcttggtactccctttccaagctgcctcctgagctctttataaacactggcattctggctgagaaagactcgccaacatccaagagtggcaaaggggaacaggagacacatcgttggcttgggaaccgcgcccgctcgcaggaagtctgctcacaggagatttttctctgtcagtgtcctcgtgtggtttctagtctggggagaacacatcagcacactaacggaagaaaggggagcccgcaaagaccaaagctgctgtgctgggggcgtggattcgagggctcttctccaggctgacagctgggactctcattttgtcagccctgtggagttcctgactagagtgg

SEQ ID NO: 174860 - DNA, 444 bp, Homo Sapiens
aatatcaaatatctgatggtgaagatttctataccatccctcggcttagtgatcccactctggggaggaggaccaaccttattatctgaaccatctatcctatctctactcagggaagtttctgaatgccctataacttggatcctgccaactatgataatcagtttagcttatttcctatcatgcaatgtgttacgttatatgctagccagttagctgagttatgtcctgtataaagcttgccttgactttctaactagattataagcttcttatgaagaaagatgctgtcattatacttctttatcaaagctttaatgcattctctagtcctaggcatgtggtagtgcacatacattcattaatgattatcttccaaaaacagcgtgtacccagtatgattctaatacaataaagacaccattcgatcatctaatcggatct

SEQ ID NO: 174861 - DNA, 539 bp, Homo Sapiens
atcagcggtcatacagatagaaaacaaaggcaagattttcagacatttattcaaagtcagattctccatgttccacagcctccctcccattctgagggcagctgatgttgcccatggtgggaagcctgtgtcactacacgttggttctctgtggggtctgtcgggctgagtggtgcacaaccataacagaccctgcctgcctcatccctggtgagggcagctccttggcttatttccttcagccagagccctgccctcaggtcttatagtcatgtctggtctgaggaaacggagactcagatcccttctggctaggattctgggctcagacactattctggctttgacatggcagggcctcctgcctcgttcctgtgtcccgtttccttctctgagtctcagttcttctaagaggcttctgtgttagttcctgttctgctaacgtgcctgatatccaggtcccgaattgggaccaagaccctgtcctgtccctttgttagtgataaccaggtgtggtggggagacatgggtttgaattc

SEQ ID NO: 174862 - DNA, 1167 bp, Homo Sapiens
taggattaaatgcataatctgtaggaggaatcttcaaacaatgtctgacgggacacattgatctttacatgactaggtagtgcattagactggcacaaataacggaagtgagcaagcttccacctaaagccgcgttcataagcaatttgtggaccacctttagttacagatgacttcccattgcgaggatctttgaatgtagtagtacttgtgttatgatcaacaaagtaccttacaccttcacgagtatatctaatttcccagccttctggcaggggttcttcattctgtaagccttgagttcttggatcttcccactgggttgtttttgtgttatgattcacaaagtaaaccctgtctgttgaatccactcttttttcccagcctggtggcaaaggtccataagggtcattttctgcagctaacattgaagccgaatagaggtatcgttggttaaactgttgcatagctccctgcaattggttccgctgagattgccactgttcaaaatttcggacagattccatggtaggccgctgccacgttgttgttctggtgttatgatccacataataaactcttctacgatcatcaactcttctttcccaacctggaggtaaaggttgtggtctctcccatgtggtagttcgagtattatgatccacataataggttctaccatgaggatcttttctttgttcccaccctgatggcaaggtttctgtgttggcattcccagactgctgccgtacaggatccatacacccatctggctgtcttgatttggctgcttcaaaagcagaactacttctagaattagaggtgtcaggctctaatatacttctagcttcagattccaattctgcactggtagaaggaatacattcattgttttctgaggaagtcagtatttcttgaactggaggatcttcaacagtagtactagtgcaatttggagacaaggcattttcttcagacactactggagtacccgtgacagacgcattatcagttggtgcaaatgaggatgattctccattaacagtgtcatcggcaggctcagatgcgagtggttttggagctggtgtatttttgggtctggcagcaacctgagacggagatgaaggtgtgttgtctccactaactacatacgagcagcatgagttt

SEQ ID NO: 174863 - DNA, 785 bp, Homo Sapiens
tagtcacatctgtgagctgctctgccttctgaattcatggcaggaaagggctgacccaggtatggagacattggcctgagagtctcctgagagcctgggtgttcttccccctgagctctgccacgttggaagggccggcatgcacagggcggccctcagaccaggctctgggcacacgggagacgaatggaaggccggctttactgggttctcagcaggggagccccccaactgaaacccactgaccctgtcagcctccccaggggtccctagcaagcaatgctgtctactctgatgacaccctacctgggagctgccgtccccacctggtggagtcacctccaagccctctgggagcctgctctgagacccccaccccacccaggagtccagccatttgctcccatgcatggtgctgagtgctgggctgctaggtctggaatggaagtgtccctgtccccgcctctgtcctctggtaccttgccctgcagatatggtcttgtaaagatctactgaatctacacctattccaggaacttctcataggacttgggactcctactctgtgatgctggtaatgccagagggggttggaggcctccctcccagcccccaagggaaaggcaaacaggatcctagcttggacacgtggcaggtgagggcccgggagctggcctttgcctggtgggaatcctccccaagaacagggcctacctgtttgctgaggtgcagcctctgtaatcagcctggggtgggtctgtctgctggactgagagctgggggtg

SEQ ID NO: 174864 - DNA, 484 bp, Homo Sapiens
tctgattttcttactaaaaatgattttgggattaagtactagtgagatgctaattatggccaggaaacctggaaataactcgcatcttccctcaccccacccccggtccccgaggtggatatatgttcatgggaacagagtttggggaaagctggcttggctcccagacttgggtgccgcaggctctggtgacctaggcaggaagaggcggaagtggttcctctcaccagccacaaggacctgtgctgctcctgggtgtcaaggtgggagagaatgcgctacatccttgtgcttgagtcactttgtaatgtactttgtaattccaggtgatgcccctcctcaactgtgtcccttctgttcctgcctttggcttggggttgaaagaggagggagtggtgggcacggaaatgggaggagccatgacctctttcccctccagcgcatagggcattacttcttttagtttgttgcctggactagagtg

SEQ ID NO: 174865 - DNA, 197 bp, Homo Sapiens
gcaccagtcaacagttatcactgcgtgagttcatctgtactgcccctaaccattagtgagcagcttgtgcttagacatttgtaattgctaccttggtgggtgtccgttacatttctaaataactgcctatctaagaggttttctttaatgtcattatgatgatttttgaatgaacatttccagagcatcctaagtgg

SEQ ID NO: 174866 - DNA, 542 bp, Homo Sapiens
gtgttattaaataccccatggtgtgtggttctggcactgaaatggggctgtttcctaaggctctgtccatggccacctctgtctgtttctgcattctgtcttgcattgcttctgttgcctatatcctggtcagcacagtttatggtgaatcattgcttattgaaatagagacggcaataatgaagccagctattataaattagagcaaatatacacatccaatacgttttaaacgcatgtgatctctggagtagtatcactaggtagcttccatttcagttcgcctttggtatattactgtactccaaagaatatcatttttccctctgtaaaattttcctcatgaaaatggtcaccataggtctgatttactttttggatcagtaacaggtcacagcataaatcccattcctgcatcaaggcggaacaagaccctcacactttggagggagctgagttcctgtttagaagaacatgcacagttagataaatctgttcacacggcttagatgatcagagccaacatctgatgactagagtgg

SEQ ID NO: 174867 - DNA, 424 bp, Homo Sapiens
gtatagcttttcatgacaactttgtaatactttttttgttgctgttatgaaatatctccttttgggtggggtggagaggggatgtcaggtagtatctgtggtaataggtgaagagataatagctaatgtgaggcggttggtccatctggatttcagggaactcacctccccaccttgtgaaatattagagaaaattaccattactgttctcatgatgttaattatatcttctgaagttttagaggtttacatataaaccaaaccccaattaaggtttaagaaagtggcatgacttagtgcaaacagatgaaatgttgatttctttaaaagttgtcttaatactaatggatcttacaggtgttttcaagaaagttataagttttgtaagtatatttagtagataaaattttgtaaatataatttt

SEQ ID NO: 174868 - DNA, 411 bp, Homo Sapiens
gggagctccgctcaggcagcagacaggatgtgagtgtacaagaacgagtctttctgttctcctgaatgaattagatggtgttggacttaagacaatagagagaagaggaagtaaatcaagtcaacaggagtttcaggaagtttttaaccgaagtgtcatgattatagcagcaacaaatagacctgatgtgttagatactgctttgttacgacctggaagattagataagatcatctatatcccacctccagatcacaagggcaggctttctattttaaaagtctgtacaaaaaccatgccaatagggcctgatgtctccttagaaaacctcgcagcagaaacctgttttttttctggagctgatcttagaaacctctgcacagaagctgctttgctggctctgcaagaaaa

SEQ ID NO: 174869 - DNA, 190 bp, Homo Sapiens
  misc_feature (1)..(1): n is a, c, g, or t
  misc_feature (8)..(20): n is a, c, g, or t
ncagctannnnnnnnnnnnnaagtaaagatgggggttccaccattgttgggccaggcgtgtctcaaacctctgaccctcaggttgactccacccatcttggccctcccaaagtgcgtggaattacaggttgtgagctactgcaccgtggcctgagattaaaatttaaaattactgcttgggtttctgtga

SEQ ID NO: 174870 - DNA, 543 bp, Homo Sapiens
gtctagtcacgagaaactataattaaatgtcagaaggcatctgacatgcgaagaaggctgaagtgagagttgagcatgagtcaagtataaaagtagagcctcaggcacaaagtagttatttttaaaagaggaatgcataaataatcaaagtacatgcctaatattactatttgtccaaagcttgattattgaaattctgcatttttaatggctctctaatacattttacaaagctaaagcaaaagacaagataaaagaaagatggaacataagagctacacttatattcttaaaaagtatcagtcttctcacaaaattcccaattttaacctattaaaatagactgctacttctttttatcccccatgtcagacaggtaatgtgccaacataacaaggtttgaggcaggcacatctcacacatgcatgtgaaaactcaaccatcacacttatgaactacaaaaggatggagaccactagtttaaagcagtggttaaaactaggcttctcaagataaagcaaagtaacaaacatttaaacttct

SEQ ID NO: 174871 - DNA, 899 bp, Homo Sapiens
gaatacataggacggacacatctttataaaagtaaacttctagatcctgaaatgtactacagtagagtctatagtttacacttttaatcacagattggaattcattctccttactcccctacttcccacatgtggcagttattacttcaaaattaatgacattccacttcatgttatactaccacagatccttaaatagagtacatactgcataattactaacagagccagtcttctctatttgttgtcacatatttcatataagcatttgacttaaagtacaaatagaaatactacatcccataattgtaaacattcaccaggagcttccatagtacagtaagtaacagaggtggcccaagagtcagtcaagtgttcttcactcactggatactgctgagattaggaaaactgttttgaaggcaaattatcctaagtcttacttgtatttctataaggatgcagttctggatatatactttcagttgaaaacacctgaaagtcattctatagtctacattaagcaccactttcacttacctgaaatattttgagttaaattcagcagtatgtacggttgttaatatcagaaattaagaataactgtgggtctcaagttcccttttgtggatacatacagagtactgagttcccactgatgctaataggaaccgctcatgcataccaagggtagtaactcccccagggccacatgcaacccccaagtctgaggcacaactattacttctgccagtggatgctatacaagcatatttaaggctgtatttggctataaagagttcaacctactctttaatattctttctatgtagatcacatacacaattcaaaattttataggacaggtgaaaagtctccaaacactttttaaatacccc

SEQ ID NO: 174872 - DNA, 982 bp, Homo Sapiens
  misc_feature (757)..(802): n is a, c, g, or t
ggggaaacaacaggcgagacctggagatggacctgtgatctgggattaccatgttgttttgcttcatgtttcaagtggaggacagaacttcatttatgatctccatactgtcttgccatttccctgcctctttgacacttatgtagaagatgccattaagtctgatgatgacattcacccacagtttaggaggaaatttagagtgatctgtgcagattcatatttgaagaactttgcttctgaccgatctcacatgaaagactccagtgggaattggagagagcctccgccgccatatccctgcattgagactggagattccaaaatgaacctgaacgatttcatcagtatggatcccaaggtaggatggggcgccgtctacacactatccgaatttacacatcggtttggcagtaaaaactgctgaacttggcctcaagatgtggaactgtggagaaattctaggacatgaacaagctatcctttcatcgaggacagcaaacattatggtacagttggcttggaattatgtctttctcttttaatttgattgagtggaaatctgagtgagtacaaatataaatgaacaacataaaaacttttgttttgacatgtcaaattgaaacttgataaagtgcgtacttgctaagatattcctgtggctcatgcgttacaacacgaggacttaagccagtaatcgtttttgttcaaatagaggtggtggaggtagagccagcccctcatgcctgttctggannnnnnnnnnnnnnnnnnnnnnnnnnnnnnnnnnnnnnnnnnnnnnccatggcccctttgctctgtgaatctccaatgcccataaaaagtgcccaataaaatgttttcttgaacctttgaaatgtgcctgttgcccggaaaagggttaataatgggaactgaaatccccaataagtatttagcccttttttggactttgggcaattgtttaaaaagaactcgcagc

SEQ ID NO: 174873 - DNA, 514 bp, Homo Sapiens
ccggtaccgactactacttccgatgggcagagatctcaagtgtcaaccttgaggtcccagctccatcccctagttgcagactcatcaccatggttaccatagtgactgcttcattgccatggttacatactaattgctgcagctctgtggcccagcccactgcttcagctgtgggccatctgagggtacgtgccatcatctctccagcccaggcccctgggcatctcatgctggggggaagggactgaatacctttttccttccccctgcctgtgtcttcagccctgatgcacaggctgccagccccccagtccagccctctcccttccactggtgccttgcttagagccagaagggatgaagccgggggatctatggaacagaggaggagcgatgcagttgggagaggaagctagaagggttatggttggagttctgtacagtgttgagtttccgacagggaaagaggattcctccaatgcgcctagagagaaagcctgagcaggagatgatg

SEQ ID NO: 174874 - DNA, 1004 bp, Homo Sapiens
actacatacttccgggggggcggccctgggataggggctgtggcagtacgcggggacccggctgcggtggctgcgggactgacgagaaactactaaagttcctggggaagcaaagtagaatttcataagaacaaaatggatggagaggagaaaacctatggtggctgtgaaggacctgatgccatgtatgtcaaattgatatcatctgatggccatgaatttattgtaaaaagagaacatgcattaacatcaggcacgataaaagccatgttgagtggcccaggtcagtttgctgagaacgaaaccaatgaggtcaattttagagagataccttcacatgtgctatcgaaagtatgcatgtattttacgtacaaggttcgctacactaacagctccaccgagattcctgaattcccaattgcacctgaaattgcactggaactgctgatggctgcgaacttcttagattgttaaataaaataaattataataaactgttaactcttttcagtatttaatacctgtagttcagttagtaactttttcatatatagcatgttgcctgtatgcagttgaactatataaagttcattgcaaagcagattatcttgtttttttgcatagcaatcaaagttgaaatttggttgctacatcaacaaattaaggacattttcacaaactgagaaataaacaaatatgccaattcgtaggtggttttgccttatcctttgaatgtgacttaaaatcagcaatgatgatatagtaaatactgaaatttaggtgtaaatcaatacgttctacagggaaataatgaggctaagtatttttatgtttttagtggttttttagaaacctaatcttatagccgccattagcattactagagttatgcaaataattgcattataaacatgtttataacttagccaaaacattgatttttataactctccaagtatgagttgaaatttcttatgtcttttgataaactgcagtattctcta

SEQ ID NO: 174875 - DNA, 874 bp, Homo Sapiens
  misc_feature (694)..(694): n is a, c, g, or t
  misc_feature (759)..(759): n is a, c, g, or t
  misc_feature (787)..(787): n is a, c, g, or t
  misc_feature (793)..(793): n is a, c, g, or t
gggagacggaagtgagcgacacactctgcgtcctcgcctcaccaggaaactactaaagttcctggggaagcaaagtagaatttcataagaacaaaatggatggagaggagaaaacctatggtggctgtgaaggacctgatgccatgtatgtcaaattgatatcatctgatggccatgaatttattgtaaaaagagaacatgcattaacatcaggcacgataaaagccatgttgagtggcccaggtcagtttgctgagaacgaaaccaatgaggtcaattttagagagataccttcacatgtgctatcgaaagtatgcatgtattttacgtacaagggttcgctacactaacagctccaccgagattcctgaattccccaattgcacctgaaattgcactggaactgctgatggctgcgaacttcttagattggtaaataaaataaattataataaactgttaactcttttcagaatttaataacctgtaggtcagttagtaacttttttcatatatagcatggtggcctgtatgcagttgaactatataaaggtcattggcaaagcaaattaatcctgttttttttgctagcaatcaaagttgaaatttggttggctacctccaccaaatttaaggacctttttcccagcctgggaaaataacccaattttgcccattccccggaagggagaanccacccacacacagacccacgcgggacgcgacaagaagagtcggaacaacaccagcaaacagcangccgagaactaggaaccagacaacgacncgaggnggaagtggggggggccgcctttggccctccaaaaaaatttttttaacaccacctcctttttgggggccccgcggcgcccaa

SEQ ID NO: 174876 - DNA, 506 bp, Homo Sapiens
actacatacttccggactcaaggatacattatagaagtccacacgatgtctctggaaataatctccatgtattggtatatttctatagcccaattcatctaccccatccttgctgcatcattaaaggctatttgaccactcatgttatgctcttatgaacaagagctacttgacagtggaaataaaaacgtagacgtaaattaaagccaaacaaaccctaaaataccgtcaagatttttaaatattaggaaatacccttaagaccttttttaaaacaaaggtgatggacgacactagcagtagtcaagaaagcgtctgttcactttaacactcctcagtctgaaaagaataataaggacaagatttacttcacctaagaactcctaaatataatcacattctgatgtctggcaactcaattctaggaaatttctacacactgaaatatctggattaggcatttttctcccagttctctagagagactcaagagtgtatatagcgga

SEQ ID NO: 174877 - DNA, 581 bp, Homo Sapiens
  misc_feature (508)..(520): n is a, c, g, or t
catacttcgttgacagtacaccaacactgctggtccttgactatgactttatggtcataagatacaggattctaaaatagaatacatggcatatatacaacaggtgatgtcccattatgggacacaaattttaaagacacttaaaattgtataagtatcttttcagtagcgctagtgtgttcccgtgactgtaaagataacacagataatagcaaaagtttgaaatatgatgcctttcaaatggctctcccttcctactttgataggctctaattaggtgcctcacataaatgccctttggaatctctgatacctgccctagcaggttgaagggagattctgaaatgaagcaaggctcctaatcatagtcacaggcagggagccatctcaatttctggaacacagaactgggagtggggagacagcaggcataccagcacccttacatgccagagaagtgagattaacatgacgcgaaaattagcctcttctctcccgttccatcttnnnnnnnnnnnnnttcaaaccattgacaagaattgctaaaatgggacctgctgctaccacacatccagagttca

SEQ ID NO: 174878 - DNA, 681 bp, Homo Sapiens
ggggaagataaggcgtgggcctgggccttaacctcaatcttgtgtctgcctcagtcttttctgactggccctgaagttgtcagtggctctttctgtccttcagcccctggaaggtgctccaggataacaaagaagggcaggttgaagcccctcatggaaggagctggctttgtggggctgcaaaggacttttaagtcctgcctgtactgaagttcacagcccacctgactgagcagactcttcctgttcctttctctaccacccttgccttcccaggactgcacggtttaacacagcagagtacagaagggtgaagaagtgagcagaggcttatgaagatattcagatactcttctatgccaggaagcacaaagactttgttgagatttgcctcagttcagtagatcttccttggcagccagccataggttgtttctttgtcttccgggtcctaaagagcacagagaaaatggaggtccccagtctaggtaggaagctgattggatgaggacttctttttttccgacagcaggatggggctcttgggctccacacaccagatgctttggttttctacaactgttgctatgtgtagagggtgctcagagcgtggcatgagagcaaggagaccatggctactctttgaaatggatggggaaaattagcttaaaaatttaatca

SEQ ID NO: 174879 - DNA, 752 bp, Homo Sapiens
  misc_feature (688)..(689): n is a, c, g, or t
  misc_feature (692)..(692): n is a, c, g, or t
ggacctgcgccctggccgaggggcagtcgtgcggcgtctacaccgagcgctgcgcccaggggctgcgctgcctcccccggcaggacgaggagaagccgctgcacgccctgctgcacggccgcggggtttgcctcaacgaaaagagctaccgcgagcaagtcaagatcgagagagactcccgtgagcacgaggagcccaccacctctgagatggccgaggagacctactcccccaagatcttccggaccaaacacaccagcatctccgagctgaagactgaagcagtgaagaaggaccgcagaaagaagctgacccagtccaagtttgtcgggggagccgagaacactgcccacccccggatcatctctgcacctgagatgagacaggagtctgagcagggcccctgccgcagacacatggaggcttccctgcaggagctcaaagccagcccacgcatggtgccccgtgctgtgtacctgcccaattgtgaccgcaaaggattctacaagagaaagcagtgcaaaccttcccgtggccgcaagcgtggcatctgctggtgcgtggacaagtacgggatgaagctgccaggcatggagtacgttgacggggactttcagtgccacaccttcgacagcagcaacgttgagtgatgcgtccccccccaacctttccctcaccccctcccacnnccngccccgactccagccagcgcctccctccacccccggacgccactcatttcatctcattta

SEQ ID NO: 174880 - DNA, 673 bp, Homo Sapiens
ggggagctcacacacgtgcctacgacccgccgcggcgcctgcgcggtagcatcgcggagtcggtgctttagtacgccgctggcacctttactctcgccggccgcgcgaacccgtttgagctcggtatcctagtgcacacgccttgcaagcgacggcgccatgagtctgacttccagttccagcgtacgagttgaatggatcgcagcagttaccattgctgctgggacagctgcaattggttatctagcttacaaaagattttatgttaaagatcatcgaaataaagctatgataaaccttcacatccagaaagacaaccccaagatagtacatgcttttgacatggaggatttgggagataaagctgtgtactgccgttgttggaggtccaaaaagttcccattctgtgatggggctcacacaaaacataacgaagagactggagacaatgtgggccctctgatcatcaagaaaaaagaaacttaaatggacacttttgatgctgcaaatcagcttgtcgtgaagttacctgattggttaattagaatgactaccacctctgtctgattcaccttcgctggattctaaatgtggtatattgcaaactgcagctttcacatttatggcatttgtcttgtttgaaacatcgtgggtgccccttttggtttaaacc

SEQ ID NO: 174881 - DNA, 564 bp, Homo Sapiens
  misc_feature (370)..(499): n is a, c, g, or t
acaatcgagctcggccctccagactgccttcagactcaccagaggaatattagacatccacttgttagtggttctctatgggggatagtagaggaaagccaaatttgggcattaacagaacaaatcttatgttaaatcctcgtattatttttcttgagataatatgactacagctcagatataaccatatccaatttttaactacttcaaaccaagtaattccgtattattctcactactcctatctaattgtggtatcaattggctctaaaaatattaaacacatatatattacttgagacctctagactataaaatacttcaaaagtctagtccttaaaacgtagggcaaaaaatacctcaattttgnnnnnnnnnnnnnnnnnnnnnnnnnnnnnnnnnnnnnnnnnnnnnnnnnnnnnnnnnnnnnnnnnnnnnnnnnnnnnnnnnnnnnnnnnnnnnnnnnnnnnnnnnnnnnnnnnnnnnnnnnnnnnnnnnnattagccaggcatggtggcaggtgcctgtaatcccagctattcaggagtctgaagcagtcaggag

SEQ ID NO: 174882 - DNA, 420 bp, Homo Sapiens
aaacgaaggacctcttttgcagtattgaagatctaatacaagaatacaaagcaaaagtgtttgagtgacagctaagaggaacacaacaaatccttcctgaagtgaattaggaaactccaaggagtaatttaagaaccttcaccaagatacaatgtatactgtggtacaatgacagccattgtttcatatgtttgatttttattgcacatggttttcccaacatgtggaacaataaatatccatgccaatggacaggactgtaccttagcaagttctccctctccagggagcgcatagatacagcagagctcacagtgagtcagaaagtctccactttctgaacatagctctataacaatgattgtcaaacttttctaactggagctcagagtaagaaataaagattacatcacaatccaa

SEQ ID NO: 174883 - DNA, 489 bp, Homo Sapiens
cactcgagctcggtacctccagactgccttcagactcactgtgagctctgctgtatctatgcgctccctggagagggagcaacttgctaaggtacagtcctgtccattggcatggatatttattgttccacatgttgggaaaaccatgtgcaataaaaatcaaacatatgaaacaatggctgtcattgtaccacagtatacattgtatcttggtgaaggttcttaaattactccttggagtttcctaattcacttcaggaaggatttgttgtgttccgtctttatgctgtcacttgcaaacacttttgctttgctagttcttgtattagatcttcatatacttgcaaaaagaggtcctcttcagattttgttccatccaggtacacaacttcccatgtgatgtcctgcatttcttgtctgtactttagatacatgggccacacatggccatcaaagtatcccggagagtctgaaggcagtctggagggg

SEQ ID NO: 174884 - DNA, 447 bp, Homo Sapiens
ggatcccctccagactgccttcagactccaggtcttcagctaccttgctaatgtccttcaaccgtgactcattggccttcaggtccttctggaagtcatcaaacttcttctggagcacctcaacctgctccaagtctgctccgacctcctcacttgtcagagcggcttccttctcattgatccattgctgtagttcattcgcttcacggaacaacataaacttcttgcaactcttctccaacatgcctttacgcttctcacccagttccagcagagaatgatatagttcttccacctgcttcatacgcagagatacactgccggcctccttagttatgcgtgtctgattgtcaatctgctcctgccgcagtgctatgctgccttgctcctccaggagattctcccgggaggctgacgtgggtgagaagagtctgaaggcagtctgga

SEQ ID NO: 174885 - DNA, 529 bp, Homo Sapiens
agccggccctccagactgccttcagactctcgagcccatctgtgatgcagatccatccgccctagcaaaatatgttctggctttggtaaagaaagacaaaagtgaaaaagagttaaaggcattatgtattgatcagctggatgtatttcttcagaaagagacacagatatttgtggaaaaactttttgatgctgtgaatacaaagagttacctacctcctccagagcagccatcatcaggaagcctgaaggtagaattttttccacaccaagaaaaagatataaagaaggaagagatcactaaggaggaagagcgagagaagaagttttctagaaggctaaatcacagtcctccccagtcaagctcccgatacagggaaaatagaagccgtgatgagaggaaaaaagatgatcgttctcgcaaaagagattatgatcgaaaccctcctcgaagagattcatacagagaccggtacaatagaagacgagggcggagtcgcagttatagcaggagtctgaaggcgtctgga

SEQ ID NO: 174886 - DNA, 458 bp, Homo Sapiens
tccctccttactgccttcagactcaaagccaagggagaacacctcccacaaaatcaagaagctggaagcagccaagaagtctctgcagaatgctcagaagcactacaagaagcgtaaaggtgacatggatgagctggagaaggagatgctgtcagtggagaaggctcggcaggagtttgaagaacggatggaagaagagagtcagagtcagggcagagatttgacgttggaggagaatcaggtgaagaaataccaccgtgttgaaagaagaagccagcaagagagcagctaccctggcccaggagctggagaaattcaatcgagaccagaaagctgaccaggaccgtctggatctggaagaacggaagaaagtagagacagaggccaagatcaagcaaaagctgcgggaaattgaagagagtctgaaggcagtctggatccagactggcttcagactc

SEQ ID NO: 174887 - DNA, 285 bp, Homo Sapiens
tccagactgccttcagactcccaagacagctgggctgcgaccaatggaaacaaaggacattccagtagtgcaccagctcctcaccaggtacttgaagcaatttcaccttacgcccgtcatgagccaggaggaggtggagcactggttctacccccaggagaatatcatcgacactttcgtggtggagaacgcaaacggagaggtgacagatttcctgagcttttatacgctgccctccaccatcatgaaccatccaacccacaagagtctgaagcagtatggagg

SEQ ID NO: 174888 - DNA, 308 bp, Homo Sapiens
ggatagagctcggtacctcctgactgcttcagactcggcttgtctcaagcaaaaagtaaaaaataaaaataacgggagggaaacatggaaaccgacctaccttccctagaaataagcccctggtcttggcatctggaatggcttttggacactgcctttaacaaatgagaaaagaaagcaccaaaacattgtgcttcagcagcaggttaggaaactccacaaagaaaggggtggggaggattcgaacacagatcccgagtgacccagttcagtcctcaaaacttctgagagtctgaaggcagtctgga

SEQ ID NO: 174889 - DNA, 1477 bp, Homo Sapiens
cccctccttactgcttcagactcattcagcaggttgcacaggaaatttgggtctgtgagaagcagacaatcaccaagtggcctggagacatcctggcttacaaggagcacctcaagtccaagctggtggatgaggagccccagctcaccaagaggacccacaacgtgtgagccctctacctgggttcgggtcaggagctccatctgggaactaacagctgctaacctgaccagccgctcaggacaggaccctggggctacactcctgcattgctgcaatactgctcccccagcctctcccctgcccctcaacctgccttagctgcactctcttacctacagctggacagtacctgtctgtttcctgtcctccttccagttacatctgtccatgtctggactcggctggccgttccctccagccccttgctggttatcttactctgagtgtgatgcagtcagaggcactgcgggttagcccagggcccaagccctggatttggctgcggaggagcttaggatcctcgttttctgggttttggtgatgttggaggagtaccccccagcccaccgccccgattcctttttgcttctggtttggagctccacaccacgaccttcgtcctggtcagtttttaaataattatttagcagtgtaacttttagacctgcgtgacatctacaaagcgcccaataaagaaagaggaagccacggtccctaccttccttctcgggtctctggggccttctcctccctgcagtgccaacatgcactgcccacagcaggagctggatccagcgtcagtgtgtcgatgggaactgaagactagtccataggagctggaagaactttctccctttacttctgatttgaaattgtaccttttctcaggcctgtgattcacagactttaacatgaatcagaatcacctggagggctcatgcgatcagattgccagatctcgcctcagcgtttctggttcaataggtttgggggagaccaagaacgttacccatttctaagcaagtttccaggtgatgcgtgtgttgctggtctagagactattttgagaaaccactgtccaggagcggtggttttctgatttgtgatctgagggttcctgccccaaattgcacagcaagtggggcctgcttgttaaacattgcagggccaggtgccggtgggtcacaacccttgtaatccccagccgcttttggggagggctgaggcaggtggatcactttgacgctccacgagttcaagaaccagctgtggggaaaacattgggcaaaaccccgccttatgttgccgtggaatacccacctggtccagggaggctaggggggcatgggatcggtggaacccccagaagtgacaggtgacagggagctgagatttggcccactggattccggcctgctggaacacgcaaaccctgttctcaaacaaagtgccacgtgcaggccaggggccacca

SEQ ID NO: 174890 - DNA, 781 bp, Homo Sapiens
gggaatctatcagggaacggcggtggccggccgcggcgtgttcggtggcggctctggccgctcaggcgcctgcggctgggtgagcgcacgcgaggcggcgaggcggcagcgtgtttctaggtcgtggcgtcgggcttccggagctttggcggcagctaggggaggatggcggagtcttcggataagctctatcgagtcgagtacgccaagagcgggcgcgcctcttgcaagaaatgcagcgagagcatccccaaggactcgctccggatggccatcatggtgcagtcgcccatgtttgatggaaaagtcccacactggtaccacttctcctgcttctggaaggtgggccactccatccggcaccctgacgttgaggtggatgggttctctgagcttcggtgggatgaccagcagaaagtcaagaagacagcggaagctggaggagtgacaggcaaaggccaggatggaattggtagcaaggcagagaagactctgggtgactttgcagcagagtatgccaagtccaacagaagtacgtgcaaggggtgtatggagaagatagaaaagggccaggtgcgcctgtccaagaagatggtggacccggagaagccacagctaggcatgattgaccgctggtaccatccaggctgctttgtcaagaacagggaggagctgggtttccggcccgagtacagtgcgagtcagctcaagggcttcagcctccttgctacagaggataaagaagcctgaagaagcagctcccaggagtctgaagtcataa

SEQ ID NO: 174891 - DNA, 955 bp, Homo Sapiens
ggagaagtactgggatttaatgaatttgtctgaaaaacatgataagataccagaaatctgggaaggccataatatagctgattatattgatccagccatcatgaagaaattggaagaattagaaaaagaagaagagctgagaacagctgctggagagtatgacagtgtatctgagagtgaagacgaagagatgctggaaatccgacagctggcaaagcaaattcgagagaaaaagaagttgaaaattctggagtccaaagaaaagaatacacagggacccaggatgccgcgaactgctaagaaggttcagaggacagttttggagaaggagatgcatagtcttggtgttgacatggacgataaagacgatgcccattacgcagtccaggcaagaagatcccggagcatcactaggaaaagaaagcgggaagactctgctcccccatcctctgtggcccggagtgggagttgctctcgaactccacgtgacgtttctggtcttagggatgtcaagatggtgaagaaagccaagactatgatgaagaatgctcagaagaagatgaatcggttggggaagaaaggggaggcggatagacacgtgtttgatatgaagcccaagcacttgctgtctgggaagaggaaagctggtaaaaaggacaggagatagtatccgtttggttggcgtggcttcgctagagtgttgctgtttatttcctggtttggcacagtattttcagaactgggaagatttactggtgtaactgggttgttgttgatggagaaaaaccttattttcttttgtaagagctgggagcaaacacgtttatgagtgtgtcggaatcccgtgcttaaaatacgctcttaaattattttctagtcttattttacaatgtctcattgtagtctgtcttcaactattttatccaaaataaacctccagaagaaagtagttttc

SEQ ID NO: 174892 - DNA, 195 bp, Homo Sapiens
cacctccagactgccttcagactcttgaaatttctctaacattctgttggccacacaatcccttttcttgataaatttggcaatttccatggcttcaagtatcaaccacatatagtactaaaaactcgaaattctctttggttcatcagcctcaaattttccacctgtctcctacatgtctctgtcaaaaacaaa

SEQ ID NO: 174893 - DNA, 492 bp, Homo Sapiens
cagcactgctggagttaaggagtagctcgaggtgaagctggatgggggatccagtggagcaggagtcgacggacagtccgttcacatcgctgtgtttccttgttaacatttttctttctgcagagaggaagatatgtttttgctgctttatataaaaatggtttttttaagttattttaaaaatctagcttccctttttgattaagattgccatcttgcttttaggcaaaactaaccaattaacaaacaaccacaagaaagggagagaggtgcctgtgggagattttgcagacctattgtgggtataggtattttcttcctggggaagaattcagttcccgtctcagctgtacttttgtgggcctgtcatcttgatgaccagaatgaaagcttgctctgcctcctgccagccagaatcggtggcgggacttggggatacagcgtgaaggtcggggaagttgcacagcagaaaacagaattgaaggtgggaac

SEQ ID NO: 174894 - DNA, 540 bp, Homo Sapiens
ccgtactgccttcagactcaccatctcaatacaacagaaataaactagaacatttcctctgtccttgacaaaccctttctacatttccaactatgctctaaaaaacaaatattaacattaagcatccgaagataagtcaaaataatatttctttattccatcaatctatacctaaagaatgactaggtccatgacatcaatgcctcaaaactaatcataacctcagcaggaactgctgctagggcatctcaactttttgcttgtcttccctgtctctcctcaccattgttatgcttaattttatttaaaaggctccaaccatcccaaatcctactcaagactaatgtcttaataaataaagcctaatctcatgaataaatatcaaccagtcctcaatatcataatatagtacacttacaattatatgtaacatctatttctggcctaaatggaatagcttgctaaagaccaacacttctacagtgaacaagtaaagtaggccgataaaaagaaaatgggggagtctgaaggcagtctgga

SEQ ID NO: 174895 - DNA, 334 bp, Homo Sapiens
  misc_feature (224)..(232): n is a, c, g, or t
taaaatctcagactgccttcaaatcttaagatttaaaggcagaaggaaaggaaccggtagagaaggatgattgataatgaaggcagagcagaagaaaattcataacagaataaaactctggatccagttattataaacacgtggtacctcattctcaccttcatagctctttcttcctgtttggaggtagccgaacataaatatgttcggtgtaaatttggggnnnnnnnnnacttaatcaaaaatatacctagaaacgttgataacttgcagttttgtaaagtgtttccaaatctatggccttctaacacctggagtctgaaggcagtctgga

SEQ ID NO: 174896 - DNA, 815 bp, Homo Sapiens
tccagactgccttcagactctccagactgcctctctgtcctagtcaggttctccaaacagcagttgaatctgcgtacgcatatggccgatgaaaataaaaatgaatatgctgcacaattacaaaactttaatggagaacaacataaacatttttatgtagtgattcctcagatttacaagcaactacaagaaatggacgaacgaaggactattaaactcagtgagtgttacagaggatttgctgactcagaacgcaaagttattcccatcatttcaaaatgtttggaaggaatgattcttgcagcaaaatcagttgatgaaagaagagactctcaaatggtggtagactccttcaaatctggttttgaacctccaggagactttccatttgaagattacagtcaacatatatatagaaccatttctgatgggactatcagtgcatccaaacaggagagtgggaagatggatgccaaaaccacagtaggaaaggccaagggcaaattgtggctctttggaaagaagccaaagggcccagcactagaagatttcagtcatctgccaccagaacagagacgtaaaaaactacagcagcgcattgatgaacttaacagagaactacagaaagaatcagaccaaaaagatgcactcaacaaaatgaaagatgtatatgagaagaatccacaaatgggggatccagggagtttgcagcctaaattagcagagaccatgaataacattgccgcctacgaatggaaatccataagaatgaggcttggctctctggagtcgaaggcagtctggaggtaccgagc

SEQ ID NO: 174897 - DNA, 480 bp, Homo Sapiens
cttactgccttcagactccgggactttccacagccttggtgaagaaaaggcacatgggtcagtgggcgcagctccacagggtccacgctccaggagacactgcagggcgggtggccctgggctggtgtggaggggcctggccctccttgactctccctggcctcaggtctcctgggctcctgaggacagactccaggcgccccacacccagctgacttttgtcctgtcctgcccccaggtaagcttcccaccagctccttgatagcccagctagacaaagaccccacagcctccagcatcagccttcttgactctaagaagccctaattagcacctgccaccaccctcccagggaactgacactctgatacatgggaggatggtggcaggtgctaactagggcttcttagagtctgaaggcagttggagggcagtctggagagtctgaagggagtctggagagtctgaaggcagtctgga

SEQ ID NO: 174898 - DNA, 506 bp, Homo Sapiens
gatgcttcgactcccaaagtgctgggattacagattttggagtttgacttgaggggtatacactggacttttcatcttcccttgggattattgtgaaagattttgagacaattggacaaaataaattaattggcacggcgactgtagccctgaaggacctgactggtgaccagagcagatccctgccgtacaagctgatctccctgctaaatgaaaatgggcaagatactggggccaccattgacttggtgatcggctatgatccgccttctgctccacatccaaatgacctgtagcgggcccagcgtgccaggcatgggaggagatggggaagaagatgaaggtgatgaagacaggttggacaatgcagtcaggggccctgggcccaaggggccagttgggacggtgtcggaagctcagcttgctcggaggctcaccaaagtaaagaacagccggcggatgctgtcaaataagccacaggacttccagatccgcgtccgagtctg

SEQ ID NO: 174899 - DNA, 412 bp, Homo Sapiens
tccagactgccttcagactccctcccggctggcctgcccccttgcctgcctgcatgcaggcttccagcagagccagcttcttcagagccaggtggatcctgtttcggtcctgcctaggtgtgtgaccctgggcgaatctacctctctcagcttctgcttcccactttatgaaaatgggactgatgtcacagggttgttatgagattaaaagatatgaagaaccggggacagtgctcagtaatcaatagtctgcagttctgcacccacgtgctcctgggtactctgccgtccccacagggtcctcagctcagcccctgtcactgcctctcctgccaccctttgtccactcggcagtgttctcactccttcacccaagctagagtctgaagcagtaggagggccgagcccgatt

SEQ ID NO: 174900 - DNA, 180 bp, Homo Sapiens
ttaaagaaagcctttagatttatccaatgtttactactgggattgcttaaagtgaggcccctccaacaccagggggttaattcctgtgattgtgaaaggggctacttccaaggcatcttcatgcagcagccccttgggagggcacctgagagctggtagagtctgaagcagtcagaggta

SEQ ID NO: 174901 - DNA, 872 bp, Homo Sapiens
  misc_feature (804)..(804): n is a, c, g, or t
ccacggtgtccataaataataggggagaagaaagccttaggtatcaattccaaaacagtgattgaaatttcccaaaataattatggcttctgtcatctccagagataatctggcttggtttaccccataatctaatttcagaaaagaaagctttattttaacactcatctgagtcaacattaaagccttttctctcaaagcgtttattgagaaactcaaatgaatatactttttgaattactgtcatcaagagtgtacggcttcctgtgctgcttgtgtcaaatggaacctgccctctaaagcactttctttcctttacttgcgtggtttcatgtaagctgtgctgtttagaaacaacatctcagactttacaaagaaatgacaaagaaggcaattgcactttttaagggatatcgacaagcagtttctgttttctaaaggacaaaatacagagtgtgtgtcatttttaattagattctttcccctgctgagttggaaattccagtgcagcactgattgaccacagttgccaatctaaaagcacaaagacagaagtaaagctttatgctaattttatttccaatatggatagaaaatttatccttggtatgtcccttttttagataactcccagcaggaaactgtaactgctatgtctttaggaaaatgtagaagaaagaacattattgttctttaattcctacaaggtactcgaaaaccttaagtgaaaaagatttctatctttttatcttagcgcatttatggaaaaaatattaactatcctgaatattttataattttgtnggaaaaatatgcatctattttttcttgacttcctttatatagtaataaaagttattttggaagctcaa

SEQ ID NO: 174902 - DNA, 443 bp, Homo Sapiens
tgacagtaaaatgaacacattgcataatctaaaacctacctaccctgatagagtttccccttttctcatagctttcccatcttttaaaagccttcaagtatgaatgctctcaacttccctcatcattactcataaacttatcagtaacaggaccattgcttattttctttacgcttacctcatatggaccattctctttttatgcctatttcccatagacataaaaggtaggaggtaaataaagtcagaaagaccaacagtctacagccagtttctaagctatcagaatatgacatttttctttgcaaatatagaaatataccttctgttaagtaaaagtaaagtgttaacaagccaccatagacagatactcctgcctatctgggtctcaaatcacagttttaagggctagtatcaaaagcaatgtgttcattttactgtca

SEQ ID NO: 174903 - DNA, 419 bp, Homo Sapiens
accaagcactcagtagaattcagtcatttaaaaaattcaatggggtcattcttttggacagacctcagcaacacagcaatgtgcactttgtagtaaagaaataccaacttgagtttataaaaaacctagttagtcctacattcccttttctttaaaaaaactttattgttcacattattttaatgactatgagataatgtatatgacagcactttgagaaaatatcaactgtaatataactataaggttgtagtattgtctgtttaaaagataagacagttgattcaatgtggatggaccctgtggggtacctgaaaatgtagatacgtaagaatcacctctgtcatttatcacatttagaaatatgaaactgcttaacaggtatgagcaggtatagcaatgtgtacattttactgtca

SEQ ID NO: 174904 - DNA, 885 bp, Homo Sapiens
  misc_feature (248)..(273): n is a, c, g, or t
  misc_feature (831)..(831): n is a, c, g, or t
ggggggtcacggcggagctggctctcacgtggaggcggggaaatttcgcccaccggaatgatcaccaagacacacaaagtagaccttgggctcccagagaagaaaaagaagaagaaagtggtcaaagaaccagagactcgatactcagttttaaacaatgatgattactttgctgatgtttctcctttaagagctacatccccctctaagagtgtggcccatgggcaggcacctgagatgcctctagnnnnnnnnnnnnnnnnnnnnnnnnnnggtgtcagcaccctttgcgaggagcatgtagaacctgagaccacgctgcctgctagacggacagagaagtcacccagcctcaggaagcaggtgtttggccacttggagttcctcagtggggaaaagaaaaataagaagtcacctctagccatgtcccatgcctctggggtgaaaacctcccaagaaccctaggacagggtgaggaagaaaccagaggtggcaagaagctctcagtggccgggggagacgagcaacgagccacaaaaagacgcggggcgggcgcccggggccagcagagaagctttcctaaggccctcggattggacggcggggccccaggggggctacgcgggacctgagcactaaggtgggttcaccagagacgacgacggtgaatgtgagccgtggcgtctactagtcgtgcgccggcagaggagatcgcgggcgggaacgcgccggcggcgcgcacgggcgagcacacgccgcccacgagcgaaccagtgacggaagcgaacgcaggacgaccagaccgccgagagatagacgcaatgcaatganacccgaagagtcgcgccagccagtagccgccgccggaccacgcaccgctgacat

SEQ ID NO: 174905 - DNA, 985 bp, Homo Sapiens
ctaggagcgagcctgggtggcgaattctgccgagggcgcgtcttgtggactggcagaggaagtggacgacaaagttcttcatgctgcgttcattccttttggagacatcacagatattcagattcctctggattatgaaacagaaaagcaccgaggatttgcttttgttgaatttgagttggcagaggatgctgcagcagctatcgacaacatgaatgaatctgagctttttggacgtacaattcgtgtcaatttggccaaaccaatgagaattaaggaaggctcttccaggccagtttggtcagatgatgactggttgaagaagttttctgggaagacgcttgaagagaataaagaggaagaagggtcagagcctcccaaagcagagacccaggaggtgtacatggacatcaagattgggaacaagccggctggccgcatccagatgctcctgcgttctgatgtcgtgcccatgacagcagagaatttccgctgcctgtgcactcatgaaaagggctttggctttaagggaagcagcttccaccgcatcatcccccagttcatgtgccagggcggtgatttcacaaaccacaacggcactgggggcaagtccatctatgggaagaagttcgatgatgaaaactttatcctcaagcatacgggaccaggtctactatccatggccaactctggccccaaacaccaatggctctcagttcttcctgacatgtgaccagacagactggctggatggcaagcctgtggtgtttggagagggccccgaaggccctagatgtctttgcggcaaattgaagccccatggcagcaagggacgggaagcccaaagcagaaggtggatcctcccgccgaccggtggggggagtaacgtgccgagaggggggaacttcttttcctgcttttccccccttcggcttccttgaaccccttgcattattcccagggaaagggaaaccttgccacacct

SEQ ID NO: 174906 - DNA, 883 bp, Homo Sapiens
ggggctggcttccgggggaaaagcgcgcgagcaagatggccaccaccaagcgcgtcttgtacgtgggtggactggcagaggaagtggacgacaaagttcttcatgctgcgttcattccttttggagacatcacagatattcagattcctctggattatgaaacagaaaagcaccgaggatttgcttttgttgaatttgagttggcagaggatgctgcagcagctatcgacaacatgaatgaatctgagctttttggacgtacaattcgtgtcaatttggccaaaccaatgagaattaaggaaggctcttccaggccagtttggtcagatgatgactggttgaagaagttttctgggaagacgcttgaagagaataaagaggaagaagggtcagagcctcccaaagcagagacccaggagggagagcccattgctaaaaaggcccgctcaaatcctcaggtgtacatggacatcaagattgggaacaagccggctggccgcatccagatgctcctgcgttctgatgtcgtgcccatgacagcagaaaatttccgctgcctgtgcactcatgaaaagggctttggcttgaagggaagcagctttcaccgcatcatcccccagttcatgtggccaggcgcggggatttcacaaaacacaatgggaactgcgggccaagtccatcctatggggaagaaaagttcaatgatggaaaacttttatcctctcaagcataacgggaccaagggccctacctatcccattggcccaacttcctgggccgaaaagacccaatggggttcttcagtttcctttcctggaaattggggaacaaaaaacaaactgggccttggaagggcaaaaccatggtgggtgttttgagcaat

SEQ ID NO: 174907 - DNA, 1459 bp, Homo Sapiens
ctccgaacggtcttcttccgacagcttgctgccctagaccagagttggtggctggacctcctgcgacttccgagttgcgatgctgtacttctctttgttttgggcggctcggcctctgcagagatgtgggcagctggtcaggatggccattcgggctcagcacagcaacgcagcccagactcagactggggaagcaaacaggggctggacaggccaggagagcctgtcggacagtgatcctgagatgtgggagttgctgcagagggagaaggacaggcagtgtcgtggcctggagctcattgcctcagagaacttctgcagccgagctgcgctggaggccctggggtcctgtctgaacaacaagtactcggagggttatcctggcaagagatactatgggggagcagaggtggtggatgaaattgagctgctgtgccagcgccgggccttggaagcctttgacctggatcctgcacagtggggagtcaatgtccagccctactccgggtccccagccaacctggccgtctacacagcccttctgcaacctcacgaccggatcatggggctggacctgcccgatgggggccatctcacccacggctacatgtctgacgtcaagcggatatcagccacgtccatcttcttcgagtctatgccctataagctcaaccccaaaactgggctcattgactacaaccagctggcactgactgctcgacttttccggccacggctcatcatagctggcaccagcgcctatgctcgcctcattgactacgcccgcatgagagaggtgtgtgatgaagtcaaagcacacctgctggcagacatggcccacatcagtggcctggtggctgccaaggtgattccctcgcctttcaagcacgcggacatcgtcaccaccactactcacaagactcttcgaggggccaggtcagggctcatcttctaccggaaaggggtgaaggctgtggaccccaagactggccgggagatcccttacacatttgaggaccgaatcaactttgccgtgttcccatccctgcaggggggcccccacaatcatgccattgctgcagtagctgtggccctaaagcaggcctgcacccccatgttccggggagtactccctgcaggttcctgaagaatgctcgggccatggcagaatgccctgctagagcgaagctactcactggtatccggtggtactgacaaacaactggttgctggtgggacctgccggccaaggggcccgggagggaactcgggcctgaaccgggtggctaaaacttgggaatccatcactggccaaacaagaaacacccgggtcctggaaaaaccgaagtggccatcaaaaccggggcgggcctggcgggtttgggggccccaagcccttaaatttttccaaaagtttcccgggaagaaagacattcccggagaaaattgtggggacttc

SEQ ID NO: 174908 - DNA, 467 bp, Homo Sapiens
gccatgttaaagttttattaagtttcaatacaaaacattccaaaaagtgaaaagtgatctataatacccaagttctatgttcaactaccagttaaacaaggaaaacattttctgtatcattctgttttacaaccagtataaacccagaagaatcaagatctgattccttttccacacatctgctaggtcagtaaactatcaaacaggtatctggtcattttaacatactccttatattcctatttggtacaatctctatatcctatactatcttcaagatatctaaatatcttaaatatttagggtatctcaagagccagaaggtcctcacagaagcgttaacccaagtaatcgtaagagtatagaaagattgggctaagacaactatggagtgcaaaaaccacataaatttggtcattacccttgtggtctgtgattagtagtaggttgtcaaatgagagttaaaa

SEQ ID NO: 174909 - DNA, 244 bp, Homo Sapiens
ctgaagtcatagcaaatgtctggagtaacttcttaagatccctgtctagcaaactaatatgggttcatgtgcttgtgtatatgtaaatcttcaaattatgtgaactattaatatagaccctactgtactgtgctttggacatttgaattaatgtaaatatagtgtaatctgtgacttgatattttgttttattcggctatcgaaacttctaaaagtagatgctattgaaacttctaaaactagg

SEQ ID NO: 174910 - DNA, 437 bp, Homo Sapiens
gggtactggataatgccacatcctatatggtgttatagaaatagtgcaaggaaagtacatttgtttgcctgtcttttcattttgtacattcttcccattctgtattcttgtacaaaagatctcattgaaaatttaaagtcatcataatttgttgccataaatatgtaagtgtcaataccaaaatgtctgagtaacttcttaaatccctgttctagcaaactaatattggttcatgtgcttgtgtatatgtaaatcttaaattatgtgaactattaaatagaccctactgtactgtgctttggacatttgaattaatgtaaatatatgtaatctgtgacttgatatttcgttttatttggctatttaaaaacataaatctaaaatgtcttatgttatcagattatgctattttgtataaagcaccactgatagtaaaa

SEQ ID NO: 174911 - DNA, 188 bp, Homo Sapiens
agagcctttgttatgtaaattgacaaaagtatgtccttttctagcaggagcagataaactgataatggtcttagaaatgtagaaaatgataaaaaggtagacaggatgatctgtctagatcgtagcaaatgatggtacacattcacaacaaagtggtgccactacatataataaacagccacaaacaa

SEQ ID NO: 174912 - DNA, 412 bp, Homo Sapiens
attatagaagttcaatagcacagcaccatgtatagaaatatattggcagccaagactctgaactctgcagaaacatttgtttcacccagacttcaaactctagccctgactatgatgcccctgtgtgcatttacaataaagactccaacggagggagcctgttggtgttaaattgtttacatttctttatacaaataatgtgctttcagtgccttagttacagctccctttctgtttcttgttccagggattctgtagtatgtagtgtgtttcttaggtaaagtctctttttgctactgaaagggaaatggtctctaaacactggtcactgtagcaggtaaacactactctaacgtggagaaatgagcttcatgctgaggtagtggttgccttagagctgttatttatgcta

SEQ ID NO: 174913 - DNA, 357 bp, Homo Sapiens
aaagttcatagcagctgtatgcatatatgctcgttatatatatcaaagaccaaggtatttccttctgcttcaaaagaacaaaattgggaaagaaaactcacttgagtctcgatcaaacaagtgtcttttacttaagaagaaacttggtaatcattgtggcacccacagcaagcagttgccttaccagtgaaaaaggtgcactgaggtaacatctaaaacagagatgtggttcttaatgtttaacagaacagttctaatcctgccacgtgttatcattatagattttatagttgcctttctaactacttagcacagtctgagaatacgttaattgctattgaaacttctaaaactagg

SEQ ID NO: 174914 - DNA, 913 bp, Homo Sapiens
  misc_feature (53)..(53): n is a, c, g, or t
  misc_feature (58)..(58): n is a, c, g, or t
  misc_feature (66)..(66): n is a, c, g, or t
  misc_feature (90)..(90): n is a, c, g, or t
ttctgcctcggggttttccccttggcccttgggcaacgcgctgaaccaaccgnaaccnagcagctnaaaaaagctgccctctgtctcctnaaaacctccgtgtaaacaaaactccttccggaaaggcgtgcacaaaggctttgcgggcatttggggaaatgtagtcctttttggttaactacccgtgctgagcactacgactccccaggatgcaacgagcatttgcgcctgcgtacaaggctcaatttattcgtttccccgcccctttcatgaccttcaccgggaggctgaggtcggaatcccgattttctcctgctgctgtggcccggacatggcgactcccggccctgtgattccggaggtcccctttgaaccatcgaagcctccagtcattgatggctgagccccactgtttacaggaatccagagagtttcaaggaaaagttcgttcgcaagacccgcgagaacccggtggtacccataggttgcctggccacggcggccgccctcacctacggcctctactccttccaccggggcaacagccagcgctctcagctcatgatgcgcacccggatcgccgcccagggtttcacggtcgcagccatcttgctgggtctggctgtcactgctatgaagtctcgaccctaagcccagggtctggccttgaaagctccgcagaaatgattccaaaacccagggagcaaccactggccctaccgtgggacttactccctcctctcctttgagaggcccatgtgtcgctggggaggaagtgaccctttgtgtaactgtaaccgaaagttttttcaaaaatcctagatgctgttgtttgaatgttacatacttctatttgtgccacatctcccctccactcccctgcttaataaactctaaaaatccacttgtattt

SEQ ID NO: 174915 - DNA, 478 bp, Homo Sapiens
caatcactacagaaaacagctgaagacagtggccatgcagtccgagaggagtagtggtctgcctctaattttctaatctaagttcgtttattgagttacagtggtctttagtaaagtaaaacaatttcccaatcccaggccttgtgatttgagatggtaccttagaaaaagttacacgcagttccgtggttgaatatatttgagatggtaccttagaaaaagtttcacgcagatccttggttgaatatagttgagggagcgtagtattgacaattcttcatgtaggaaacctgaaatgaacacagtcacagtttgattaaaacattgtcctgtttgttgcaacagaaaactcggatagttttaacaacaggaaacacttgtaggacttcctttaccaacatactttttaaatgttttgctattggttccatatttatttagatttataagtgtcaataaagcaaacttttgatgcctc

SEQ ID NO: 174916 - DNA, 438 bp, Homo Sapiens
gtttagaagttcaatagcatgccttgccgatttgtcatcttttccagttctttagtatcatgatttatagcatccatatgttctttttccatatttttccagcgcaccatactcttctgaagctccttaataccagcttctgttttatcaatggaatagtccaaatcttctgatcgtgctattgaaacttctaaaactaggcctagttttagaagtttcaatagcacattgctgcctggggccatctgtcttaattcccagctccttcaagtcaccgtcagtcagtgtgaggaacgcttccatgtccacctcttgttcctcaaaaatgggctgatatttctcaagtgataatttcttaaggattccagtcagttcatcctcatctgtgatggtgccactgctggagcccccactgctattgaaacttctaaaactagg

SEQ ID NO: 174917 - DNA, 224 bp, Homo Sapiens
tcatagcattataccctagagagtatacagaaagagtagtatccgtataaacattcagtcttctcttgtaggaactgtttaaatttacccaagtggactttaatggatttcaaagttgatgcacacagttcccacgtacttattatcttacttttttcttgtcattatgaaaaggatttttcttttacttcctaactgctgctattgaaccttctaaaactagg

SEQ ID NO: 174918 - DNA, 196 bp, Homo Sapiens
ctagcaactgtggaactgctatgaacgcttgtagacatgtcattttactctggatgtacacctaaagcagagtggctcacccattgtattcccactagcagtgtatggggctgctgatttcactccaacctactgatttcactacaccctcacttgccattatctgactctaatcctgctattgaaacttctaaaa

SEQ ID NO: 174919 - DNA, 219 bp, Homo Sapiens
agcctggccctagtttagaagtcaaagagaggaaactaaaagtcattttcagccataatgtttaattaactttagagataagttagagagctatcctactgagacataatgcttttgagaactacctatattttagaagtacaaatagttgtttcattgttggggattccatattaaatctctcttagtccattcctgctgctattgaaacttctaaaa

SEQ ID NO: 174920 - DNA, 345 bp, Homo Sapiens
actgagcctgccctagtttagaagttcaatagcaattcgcttgtgggttagactagcaattctgtgacttgctgccctacttctgtttcagctttattcagtgtaagcagattgtgatatcatttttcagatcacaaattgcaagtccacctgaagtttgttaataacagccacaaacttattttctgatttctaccaagtcccttcccctccaccgcattcaagcaagtcttctatcagaagtttaaattagtcattggaacaaacatttgagtcccctgaccacaaagaacttaaaataccagagagagatcaattcctgctattgaaacttctaaaactagg

SEQ ID NO: 174921 - DNA, 253 bp, Homo Sapiens
aatagcatctttattgtttcactggtgaaaaaaaaaaatcataattgtgatgcatttcctgctaaatttacaatgaaggtgatacataaagttatatagaatcacaagttttcttttatactatttaaaacccaattatattgataaatatgtccagaggacaacatgggttcttaatggatggctgagtccaaatatgcaaaatatagcttctggttttgaccatggtgctattgaaacttctaaaactagg

SEQ ID NO: 174922 - DNA, 404 bp, Homo Sapiens
  misc_feature (350)..(359): n is a, c, g, or t
gggtctcttgttttctagtccagtttgagattaatttagaagaaaggaatactgtatgtgaaattcatcttgggctttcccctaaattgcaagataaggccatgtgtaagattttccctaaaactagaatatattaatgcatgtttgagaattttaaagcaccatggtcaaaaccagaagctatattttgcatatttggactcagccatccattaagaacccatgttgtcctctggacatatttatcaatataattgggttttaaatagtataaaagaaaacttgtgatctatataatttatgtatcaccttcattgtaaatttagcaggaaatgcatcacaattatgannnnnnnnnncaccagtgaaacaataaagatgctattgaaacttctaaaactagg

SEQ ID NO: 174923 - DNA, 232 bp, Homo Sapiens
atagcatttatcactacttgacattatagcacatctatttgataatgtgttcatttcttctctcctactctagaatgcaataaaatgataataatcacaataataatatctgaacaatcattaaatgattgctaagaaccaggaagtcctctagacacttaacaggccttaattcattcaatcttcatagcaactaaataacttaggtgctattgaaacttctaaaactagg

SEQ ID NO: 174924 - DNA, 247 bp, Homo Sapiens
gtctatagccattgctgcgtgacgcctatggaagcttttcatgcctcagcagagagaaaagtcaacaagtggtctgcccatggtgaggaaaggaagttacaataacaagttcaacgacagaggagagacaggaaaaaagcaacaaaccacagattctgaattgttggtctacaaaataaaagtctaatttctccatcagtcccaggtaaataccaacttagctgctattgaaacttctaaaactagg

SEQ ID NO: 174925 - DNA, 327 bp, Homo Sapiens
ccatcgagctcggacccctagttttagaagtttcaatagcataggtaaaccacagctaaaatgaccactggaggaaccttaaaaggagaaagaggcccccaaagggtgacctttataagcctctcaatttgccctggagtgggcgagaattttgggataagtcatttgttggatctataaagctctggtcttcacagcaggagcttgatgaaactctcatcctcctgcccttgttgtctcttccagctcctggctttgccagacactgtaaagatcccaggccgtgagagctcacttgtcactgctattgaaacttctaaaactagg

SEQ ID NO: 174926 - DNA, 417 bp, Homo Sapiens
cccctattttagaagttcaatagcacacacacaaaataatattatttcactgcaccagattctgcagttcagacaaatgaactatgtaaatgtgaatctcagaaagacacaaaatgagctcaaccagggatgtgatgaaaaatgggaaacacatggataaacctaaatatacgaatgaatggcaagtacataatgcatgttgaatgtttatatactgctgggaagtatagaattactttgaaaactggtttggcattatctcctaaagttgaaattgtacatacccagccttattcttgagtaatttttcttgtcaattctatttttctgttgtgagagtgatcatggaaacagtgggtgagaacactggtctgtctagtccattcttgtcttgctattgaaacttctaaaactagg

SEQ ID NO: 174927 - DNA, 311 bp, Homo Sapiens
tcccctatttttgaagttaatagcatacctttgtatttaaaaaattaacttaagtgcttgctttggcagcatatatactaaatttggattatgatttatatgtaataaaactcactcatgagtttagccaaatatatacagtgttataaccaccatacaatcaagataagaacatttcccatagcacaaaaactttcctcatacattcttagatcaaaagcctgcccctactcacactgatcctccttctcaccctaaagattacttttgtctgggttccttttgctattgaaacttctaaaactaggggg

SEQ ID NO: 174928 - DNA, 244 bp, Homo Sapiens
ttcagtagcatccaatccaatatttggtggagacttctttaaaaccataccatacagggactctcctgtcatctgaaaaactgatgtaaggtacagaactattctttatcaaatgtgtttaggtggctgttagggggctttaaaaaatattacttgcttgtgtggaaatgcaaataatgttattttctttatctaaattaagaaatctcttataatatgtgctattgaaacttctaaaactagg

SEQ ID NO: 174929 - DNA, 379 bp, Homo Sapiens
cctagttttagaagtttcaatagcaactcctctcttacatcccgctccccctgtagcttagagaagacacatgagcagcaatggttacatcttcatttgaccttctctgtgatgatgcggcaacatctgaatatgccaggccagcctacaagggtctatttgccagatgccatgaatgttttaaggggcagcacataggtacacttaaaaagtgattactttctattctctgataatattcaaataagtcaggtggacagccttacattttagcggctatagattcaggcacacattaacaccatgaaaggaaagcaaatgatcccttttccccccatattttacaactgctattgaaacttctaaaaataggggggat

SEQ ID NO: 174930 - DNA, 284 bp, Homo Sapiens
gtcggaccaatatcgtcacttcttaaaaggagatggaaatggttgacccaaacccgctttttggagtacactgcatgtgaaatgtggaaactctacagcatacacaccacagcttccctccagacaatcataactgacttttcacacacacaagcttcatagcatctcaactttgggccttgtcaaaattattacatttttggacttttggggttgcttgtgaataaatgcatccatatcaaatctgttaaagttggggtgctattgaaacttctaaaactatg

SEQ ID NO: 174931 - DNA, 404 bp, Homo Sapiens
  misc_feature (138)..(138): n is a, c, g, or t
  misc_feature (196)..(197): n is a, c, g, or t
  misc_feature (220)..(220): n is a, c, g, or t
  misc_feature (229)..(229): n is a, c, g, or t
cctattatagaagttcatagcacagccaacagcatttaatcaaatatattattaccagccaacagcaaacagcccgagcaggaatcggcacatagtcataaataacatcaggagtaaataacggcacattgtaattanaacaatcaaagattttacacgaataggttttggatctgaaataaagatgaacaactcnntctttgttcccaacataatggtntagaacctnctttttatttatagaaaagcctcaaaatcattggtaatcttcaagtcacacaattcaactgtcttgtttcattttagtcacacaaagcgggctgctctttgaataaagttatcttgattgatttcagttaaaacgtgtctaccctgtaatatctttggggataatgctattgaaa

SEQ ID NO: 174932 - DNA, 201 bp, Homo Sapiens
ctatatagaagttcatagcattatcgtctagaataaaaagtacataccttaattttaaaatcctgctacaaaatgttgtgatcatttgcaggactcagcaagttggaacctttctgttgtgtagggccttgccttgaatgttgatgggctgctgcctggggtggtttactactaggtgctattgaaacttctaaaactagg

SEQ ID NO: 174933 - DNA, 134 bp, Homo Sapiens
ctgacaaactctcttactccttaagacaaatgctcacctgatcaatatggggaaataagctgcatggtaccataatttctattctaaaagggaaaagtatctctttggtattgctggtggaacacattcttatg

SEQ ID NO: 174934 - DNA, 250 bp, Homo Sapiens
aggaacagctgttctgacctatgagtcctctccaagagacagtaaaatatatggttctattacagtcaaaacaattagactgattaaaccatggaagattaataacttataaaagaatccattatgatacatgcatagtatgtattaaccacttaaagttataccatattgaattcaaacgtatacgtttcgaattaagaaataaattctttgctcttatttacttgctatagaaacttctaaaactagg

SEQ ID NO: 174935 - DNA, 203 bp, Homo Sapiens
gcaccctattagaagttcaatagcaacgggagtatgtgttcaaaaggaatctccttccttttttagtgtgtttttccttttgtcccaatggggaacctaaatctgttttaattgcacagacacatggacaaagaagccattttgtatctgccaagtgtggtaccttcctttgtttatttgctattgaaacttctaaaactagg

SEQ ID NO: 174936 - DNA, 444 bp, Homo Sapiens
aattgaccttttggacattcgaccagagttcaagaagcatttgggctattccctatattccgccaattaaatcggattactcttggagactttgaaatcacactcttaaaaatctgtgggtggagatgactgaaccaagaagataatctccaaaggtccacgatgggcttttccaacagctccaccttacttcttctcatactatttaagagaacaagcaaatataaacagcaacttgtgttcctaacaggaattttcattgttctataacaacaacaacaaaagcgattattattttagagcatctcatttataatgtagcagctcataaatgaaattgaaaatggtattaaagatctgcaactactatccaacttatatttctgctttcaaagttaagaatctttatagttctaatccattaaatataaagcaagataataa

SEQ ID NO: 174937 - DNA, 926 bp, Homo Sapiens
  misc_feature (155)..(224): n is a, c, g, or t
  misc_feature (877)..(877): n is a, c, g, or t
gggactttagttgggagctgcgcgccgcgctcagttactggagagctggccgcgcgccgccgcctcccgcacgcttgcacgcgggcccggcttcggggttttgggttcttactccaagcggcggggaggagggggagccccggacacactgtggnnnnnnnnnnnnnnnnnnnnnnnnnnnnnnnnnnnnnnnnnnnnnnnnnnnnnnnnnnnnnnnnnnnnnncttgccaccttcagcccccccgcgtaacgcccaaggtgcacacatcttgaccaactcagcagcaaggtggattttctttgtgtttaaagaaaaaaaatgtccctgtgtctgtagagatgatttgcagttcagcccggctgaagctgaccgaatgagactatgggctgtgcctccgccaagcatgttgccactgttcaaaaggaagaggaagcccagaaagggaaaaactaccagaacggagatgtgtttggcgatgagtataggatcaaaccagtggaagaggtcaaatacatgaacaatggggcagaagaagagcagaaaatagcagccaggaaccaagaaaacttggaaaaaagtgccagctcaaatgtaagacttaaaactaataaagaggttccgggattagttcatcaacccagagcaaacatgcacatctctgaaagccaacaagaattcttcagaatgctggatgaaaaaattgacacaaggctcgggattactgttcggaagaagaggatatcacatagcaccaattttaccactcaaaccaggagctactactgtgtaaataggttacaccccagttgaaatctttgcaaaggtcggttctattcagcgaacagcactatagcaaaagaagatcgttccatatngtacgccccattaaattacagtgtttcttaatgaacttgcaaaggaata

SEQ ID NO: 174938 - DNA, 246 bp, Homo Sapiens
gtgccttttcatgtcaaactccttagctctagtgagtccacccacctcgggcgtcccaataatgctgaaatatacaggtgtgagccactgtgcccggcctccatattgcttattttcttagatacctgtatgagttgataataagttactatttactgagcacttaccaggaattggaacccaattaatttcattctaacaataaattcatcagatggctatgctattgaaacttctaaaactagg

SEQ ID NO: 174939 - DNA, 147 bp, Homo Sapiens
ttcattagcacacttgctgcctggggagtacactaccctacccttactaagtctattcaggaataaactagagaattatgtgatgagatgtaggcaaaaatcgtaatatcataaaaaggactcatactgctattgaaacttctaaaa

SEQ ID NO: 174940 - DNA, 281 bp, Homo Sapiens
gcaactaggaaactaatacatgggccttctactttcaaatgtgctctatccttttctaaaatcaaggaatccggcgtgtgtatcttattataaaaatcaaagcctactctgttatattaattagtgctggactggtagaaaatacgattttccaataatatactctaaggtctgtcccttgggtgtttctggccctgtgctggtctatgctagcctgtttgtactcagatccacccaccagcctttccctgctctctgctattgaaacttctaaaactagg

SEQ ID NO: 174941 - DNA, 258 bp, Homo Sapiens
aaaactcaggtgatgcttcatgccctagtgactgcttctttatagcgtgtaagattttcataagcatgattcaagacatttgtgcgccaatcaatgcttgtgttaagctgcatctgaagatcttcaaactcacgtagttttgtctccacatcactcgcttcagaagagttttcttctctttgtttctcaatagcagtcacagctttaatactagcgacatttctgcccaaacttgctattgaaacttctaaaactagg

SEQ ID NO: 174942 - DNA, 256 bp, Homo Sapiens
acaacacaagcacacacacattgtcttcctacgacaccatctcattgcgtctcgttagcagcagacaggtatcagccccagacctgaggcagacacttggggatctggttcgggacagggcagacaggcatttggtgcatggatcctactgacctcccagagataactagaaacaaatgtaagaactgctgcctacaacatcttttggccttgggtgtcaggtgccacatgctattgaaacttctaaaactagggt

SEQ ID NO: 174943 - DNA, 372 bp, Homo Sapiens
tttaagaagttcaatagcatgcatgtgtatatctcacacatatatatgtacaaactaaagtcttgaaggatatgtaccaaatataacagtccttatttcatctttagtttcttcatgtattcctgcatgaactaatctttcacattaagtctgtataacttacaaaatagagtacacatataatacaaacgagtactcatatcatttcagagatattcctcaataaactattaatattttaaaaagttaagcgctatcaagtactgtatcggtatgggctttcaaagaaatataaatgattttcttaagtagacaaataagcatatcaattgtaataaataccgctctgctattgaaacttctaaaactagg

SEQ ID NO: 174944 - DNA, 546 bp, Homo Sapiens
aatccgaaacacctggtgcttgtaagatcctcgctggccatagtaaagggcctggggacaaatctgcatattttgctgaaaagctctataatcgatgaagggctgggcaccgatgataacaccctcatcagagtgatggtttcccgagcagaaattgacatgttggatatccgggcacacttcaagagactctatggaaagtctctgtactcgttcatcaagggtgacacatcgggagactacaggaaagtactgcttgttctctgtggaggagatgattaaaataaaaatcccagaaggacaggaggattctcaacactttgaatttttttaacttcatttttctacactgctattatcattatctcagaatgcttatttccaattaaaacgcctacagctgcctcctagaatatagactgtctgtattattattcacctataattagtcattatgatgctttaaagctgtacttgcatttcaaagcttataagatataaatggagattttaaagtagaaataaatatgtattccatgtttttaa

SEQ ID NO: 174945 - DNA, 329 bp, Homo Sapiens
  misc_feature (150)..(164): n is a, c, g, or t
actctcagaaaactcaaatatttgttaattcaacatatataaagatcatttaacatgtgaaacgtcggagcaccagaaaaataagctggcagcaggactattccaaattttcaaacaagttttatttccatacaattctgacatttccgnnnnnnnnnnnnnnncttaaatgtacacagggaacatgattctttttatgcaaacaataacttaggcctgtagcatcgctgccggctccgccacgggagggctgggggaggccagcccaggtcagcagtggccgaggtgacagaccgcctcctgctgctattgaaacttctaaaactagg

SEQ ID NO: 174946 - DNA, 549 bp, Homo Sapiens
atatgcctcagttggtgaaggaatgatgtatcatatctcttaccccgttttattaaccagagtcgtttacctagattgtaccttgtgatgctggcagccagccctcttccggcccctatttctgcttaccgtgttaccagagagcctgggggtctggatcctatctggccccgtcaggatggattaccacatgagcagttctcttgccccagtccctttcctgtgctataaataagccccatgtttattttcttatgttattgaaatgagcacttgtgatttgggcctcttttgaggagtccagagagcgtccatccggtgcctggtgagggccctgcatggctggctgctgtctgaagctatttggagtcctctccctgtgttttctatgtggcttaatttcaatagaaagggttatatgcaaccctgtatctgctgattttcaggtttcaactttctgccagcgtcactgcctgcttagaagtaaagttatgtttctcattaaggggataacagccacaattgaggtaattaacgaaaattgtacat

SEQ ID NO: 174947 - DNA, 226 bp, Homo Sapiens
agtgcatagcagatcccaggaggttccacagaagccagagtgcctgaggcttcctgcttgagaacctgccccctggatcttggacacttacagattgagctgtatgaattcagcgggtctcacgtccagagggtcagaacgtttgctttagttttttcatctgttttgttccttgagtcagtgctattgatgacgagttgtcttgaataaatcatgtgttctttgc

SEQ ID NO: 174948 - DNA, 367 bp, Homo Sapiens
tgtgttctgatgtgttggtgttgccatcagacctgatagagatgagagaagatgtagcttcttcaaagatgagttgatgtttctccccactgttcccccacctttggtagagtgctattgaaacttctaaaactaggagttttagaagtttcaatagcatataaagcctcctactcctagttaagtattttctgttttgtaaactactggcatacgttaaccttttcatatcactgaaaacatttattcatctatagtatgtagatcgatcttttaaaaactgaatcgtgtctaaaatacactaaagaaaattacttttcccttttctttttggtgagcatttcaaaggtggggtaaattcggcccc

SEQ ID NO: 174949 - DNA, 1028 bp, Homo Sapiens
  misc_feature (258)..(311): n is a, c, g, or t
  misc_feature (379)..(419): n is a, c, g, or t
gtgcacacccaggctgtgagaaagccttcacacaactctccaatctgcagtcccactagacggcaacacaacaaagataaacccttcaagtgccacaactgtcatcgggcgtacacggatgcagcctcactagaggtgcacctgtctacgcacacagtgaagcatgccaaggtgtacacctgcactatctgcagtcgggcatacacatcagaaacataccttatgaaacatatgcgcaaacacaacccgcctgatctnnnnnnnnnnnnnnnnnnnnnnnnnnnnnnnnnnnnnnnnnnnnnnnnnnnnnntcaagctcaagcccaggctcaggctcaggctcaagcccaggcccaggcccaggcctcccaggcatcannnnnnnnnnnnnnnnnnnnnnnnnnnnnnnnnnnnnnnnnacagccaccaccacacttccagtctcctggggcagccccccagggtgggggtggtggggacagcaatcccaatcctccaacccagtgttcctttgacctgaccccgtataagacggcggagcatcataaggacatctgcctcacttgtcaccaccaagcaccatccaggtggagcaccttggccagctcttagagatccggtgcttgccacccaactgggaaggaggacgaagtagtcctggttgtcttctttctccaactctgggtgggaaaagtccttttcttcctgaaacggccttggctccatctcctggggcctctgtccacgggctttccttcacaggaataccatcctttttctgacactcttcttcacaaggaacatcagcctcctgatgccacaggactactgagctgatggtgttactccagcagcatccccttccaagcaagtgcttctaaacctgggggtcagtgctcacgggaaggagtggctagtatctcataaaacgtggtccgtgtggccaattacctatcttaccctcttatcctaaagttgggctgagtaaaatacagggggccctccgatacgaaaaggggcccatgaac

SEQ ID NO: 174950 - DNA, 411 bp, Homo Sapiens
cctagttttagaagtttcaatagcacctagatctaatatacccccaggaaggtttcctcaacttccctctttgccccgccccttttctatctcatgagcacctgtgaaggtccgaagaaggcagccagtgagtgggtacaaactcctttcacatctgtggctcccagagatgtagagtttttccagatcacacctggcttatactaacaggttaaaaatgtttcctgaattcttctcccacttcatttgtttctgttatatttatatggtagaaaaactacatagtggtggctactgtgcatctcttcctaactccacatttgacaacagcacgttggtaacttgaaaattgccatggtgggaatatttacaccctaggcagcaatgtgctattgaaacttctaaactagg

SEQ ID NO: 174951 - DNA, 248 bp, Homo Sapiens
cctagttttagaagtttcaatagcatgtttgaattagaagttattgatgaaacacttcactaataactcaagccaagttgagtctaaaaaggattccacgtaggtgctgttaacacagccttgaaaattcgtaaccgatcaaaagcagcaacagcaggaattagaatgagtgtgaattagtcacatggtaacatgaaaacatttaaccctgtgtcagcgggactgctattgaaacttctaaaactagg

SEQ ID NO: 174952 - DNA, 291 bp, Homo Sapiens
aacactcattcagttagccaaggcctctgacagacatgtaagctgcgtttcatctgtcttgcacatgacagtaccagtcacataaggaccatgcctccttggtgcccatgcatgaaaggtgccctagggcctcactagggtcttgcaagcagtaaggccacctgggaggctgctagtcccatgccttagaaggtacttaaccggctttttaaccagaccccaggcgtttccatgcacaatacgatttgagaccccaggcagcaatgtgctattgaaacttctaaaactagg

SEQ ID NO: 174953 - DNA, 468 bp, Homo Sapiens
agtgctactccacaaacagcagcaccgggctgacccatggtactgagaatcatcctgcacctcctcaccatggaaactggcaaggcctcataaacgaacagcagtgggtgctgaaagcagcaccaaatggagatttggattccagccccccagtgacagcccagtgggaagaagcaaactccagatgggcagaaggcagggtgcacaggtggctccagtctcaggaggatgcgcctcctctcccccatcccagccctcagcattgtgccagagtgatacccttaagtgtttgggtttatgttttcagttttgtttgggaaacagcagttgcacagagagttgggggtactgctgctgccttttcacgaggcactgccaccaccagctctagcagggatgctcctgagcttggcggacatacttagatcctaacgtgccagtgagacctggctgtggagagtagcactg

SEQ ID NO: 174954 - DNA, 440 bp, Homo Sapiens
agtgctacctccacaaacaggaaacaggctattgaggaaaaagggttataaaactgcctaagaatcttcactaaagtaatcttctagtccttccatatccatttccagagaggaatttaaagaggccagagcagatgatgcatccttggttttctggacacttggtttgggttgaggagtttctggttggataggttccttctttatgtctttaccaccatttagaatacgttggctctcacaaaagaactgattaggatgattcaaagaaaagccacaatcatccacattgtgtatcatctcaaagtatttttgacaggctacctggtaatgtgtcccctttactaaatccaaaatctggcttatccctccagagagatcttgtatgactgcaacttttgcttcaccagctctggatcactgttcgtggaggtagcact

SEQ ID NO: 174955 - DNA, 389 bp, Homo Sapiens
aggtgatctaaggatgttagtgctactccacaaacagaaccatgcgtgtctgccttaccctgtccacatccctgaaaggaaacgggtctctctcagccagatgcagatagttgacactcactgcctttgctatggcaggaggctccttatgattaacccagaacaggaaaaacttagtgtcagctgaccgataggaactcagccttaatttttcaaaaagtcactctcattacagctatctccaggaaggcgctggagtatcttcagcatgagcacagagattcccactgtaccgaaatattcggaatactttcctatgatttctcagagagactcatggagtccgaaacagactggctggctagactagtatgtggaggtagcacagg

SEQ ID NO: 174956 - DNA, 1117 bp, Homo Sapiens
  misc_feature (14)..(14): n is a, c, g, or t
  misc_feature (72)..(72): n is a, c, g, or t
ggagaatggggaantgacccagatgccagggccccagcagagccaggttgaaaacccagtgcttgaccatcntctgggggcacaaccagtctagccagccagttgaaacggactccatgagtctctctgagaaatcaaggaaagtattccgaatatttcggcagtgggaatctctgtgctcatgctgaagatactccagcgccttcctggagatagctggaatgagagtgactttttgaaaaattaaggctgagttcctttcggtcagctgacactaagtttttcctgttctgggttaatcataaggagccccctgccatagcaaaggcagtgagtgtcaactatctgcatctggctgagagagacccgtttcctttcagggatgtggacagggtaagggcagcaagcatggttctgttaaaggagtgtggggttaacagactagaaggaagactaaggacctgaccacccatttcagcatcttcaatgtggagcagtgttctgaggactcttctatcctaggactatgacagtgtgtattaataaaatatttgctaagtaaaaaactaacccacaactacaattaatgggccgtgtcgggccgccctcgggcccttcgaaaaagtttttcctagaccaattccgatttgggcgcccccggccccccggtagggtaaaggggaaacctggggcccaatagcccggttttcccctaggggagaaatcccttgggcccacttgaacctaaagggcctttgggggaattccctaccaccaatttacaaaaacaaccgcccccgggagggggcaaacccccggaggcgggtttcctggaaaccaaaacatcccagggaaggtgggagctctcctggaagagggccattttaacggggggagtccttacccggcgccaggggaagtgccacaagcggagagcttccgaaataattcaacaattagggcccccgccgccaacgtgcccagttgctattcggaagggaacccgggcaccgcaagattgtcaatggaaaagaccaattctggggcgcgaaacagtggggaagaccctcttcccaaataagcgggggattgggtccacaactcctggaagcccccc

SEQ ID NO: 174957 - DNA, 791 bp, Homo Sapiens
  misc_feature (136)..(136): n is a, c, g, or t
  misc_feature (161)..(161): n is a, c, g, or t
  misc_feature (171)..(171): n is a, c, g, or t
  misc_feature (513)..(521): n is a, c, g, or t
ccccgggatccggaaggaaccaaatccaaagaaaatttaacccttctttctccttattatgccatacctccccacccaagataaattagtgagtgtcccccccatgtttctccttttggcaaaatttatttacccnccaaaaatctggtggggggggcagnaaatttcccncaattgaaaaacttgaattccacaactgacaactgaaatttcagttttctagacaatttaaaattttacccaaatcccataaaaataaacataattccatttcacgaaaaccactggataatgtttaacaaagtctttgtagccaataggtttataaatacctgaattacaaataaatcagtcattattatgggaagtaggaatattatagaagagggcaaacaaaatcacttaaaatggccaaattccagaaacaggatttcagataagagggtacaagttttttaaaaatgaccactagccggtaagatcagaaccaatcatcctgccatatcatccatnnnnnnnnnttaccatcttccgctttccctcttcacgtgagtaccaaattgaagggtttagaggccctcaaatgggtatcactcataaaggcaattttcatggtttaatatagaaattactctaatgtgagaacacaacatgggaactattcaaaatacacctttctatgcaaaattgagtttgtatctattttagcattttaaatgagcactctgcaactgagaccaaatatcaatcatctcttgaggttttctactatgtactaacatcagatctcc

SEQ ID NO: 174958 - DNA, 360 bp, Homo Sapiens
ataaagttaaacagtaaaacaaaaattcacaagctgcctccctgtccacccccgcctccctcccctgccctcggtcttcggcattggttccctttgctccaccccactcacagagacacagggcatccaactgagaaaacgaaactgctctaagcacacggagacgtgatgaagggaggaggtgaactgtttccacattcaagattaaactgagtgaatctgcattttctgggttctgggtggttgcccttcattagccaaattgaaaaaagaaattccctggaccagatgcttcaaagctgaagccgccaggaccgccaaagaatgccttgaagatattgtttggatcaaaatcaccca

SEQ ID NO: 174959 - DNA, 277 bp, Homo Sapiens
  misc_feature (196)..(196): n is a, c, g, or t
tccaggaaatgactaacagaaatgctgtccttctgaatcgacacaagaacatgttcagtcctctttcctcctaataaatatcatacaaagagtttattttcctgtctttcgtctcttccaaaatggacgacgtcgtgttttcttctgtgcctgatgggcacatgtccgtgctgccttgaatttcactctgaaagtnggaggctgggagactgcagctgggcaggggcctgggccctctgtgggttacgcagatactgctaaacgtcctcgcagactg

SEQ ID NO: 174960 - DNA, 347 bp, Homo Sapiens
ggattcattgctactccacaaacagagtgctacctccacaaacaggcatcatctggtccagaacccccatttctatcaactaggagctggggggagtagctagcccagagacttcgggtcaggcttcaacaatcaggaagacccagttcctgaggaaacgacagttcaagaagggttgggaagaaggctgtcctctaaagaagacgtcctctgcattcaatggccccacagcaacagagtagctccttgccttccacactgcccacctcgtagttgtagtcccaagtaagttctgtcccagcccgtttgcccttgaacattttctctctgtttgtggaggtagcact

SEQ ID NO: 174961 - DNA, 948 bp, Homo Sapiens
ataggaaagaaggaaatgaaggcggagagtggggagagagcagcagaattcaatttaatctgaggcccccaagtgttttgtagaattgggctgaagaggtttcctaggcagcctcgcaggctgcacagcacaccacccccgagaagaccgtgatgataatcgtagcaatcagccccaaatacaaacaggacgtggaaggcgctgagtcgcagctggacgaggatgagcatggcttacatactaagtacattcatcgaatgatgcagattgagttcataaaacaaggaagcatgaatttcagattcatccctgtgctcttcccaaatgctaagaaggagcatgtgcccacctggcttcagaacactcatgtctacagctggcccaagaataaaaaaaacatcctgctgcggctgctgagagaggaagagtatgtggctcctccacgggggcctctgcccacccttcaggtggttcccttgtgacaccgttcatccccagatcactgaggccaggcaatgtttggggccttgttctgacagcattctggctgaggctggtcggtagcactcctggctggtttttttctgttcctccccgagaggccctctggcccccaggaaacctgttgtgcagagctcttccccggagacctccacacaccctggctttgaagtggagtctgtgactgctctgcattctctgcttttaaaaaaaccattgcaggtgccagtgtcccatatgttcctcctgacagtttgatgtgtccattctgggcctctcagtgcttagcaagtagataatgtaagggatgtggcagcaaatggaaatgactacaaacactctcctatcaatcacttcaggctacttttatgagttagccagatgcttgtgtatcctcagaacaaactgattcatatacaaataataaaatatttactcttttgtaaa

SEQ ID NO: 174962 - DNA, 359 bp, Homo Sapiens
agtgatacctccacaaacaggaactatggaagtttactgttgctcaaaggaagaaaaacatgttttgccaacagagaacaaaatgtaaaagaaaatctttttggtttttctgctggaatctgctgtaccagacatgaatataaaaacaaagattgaacaatgaaaaaaatctaaaacctgaatagacaaagagtaatgagattaaggccataataaaaagtctcttagcaaagagaagcctgggactagatggtttcgctgctgaattataccagttaaagaattaatacttggctgggcatggtggttcactcctacatcccagctgtttgtggagtagcacttaatcctgtgatcac

SEQ ID NO: 174963 - DNA, 467 bp, Homo Sapiens
ggtcgctctcgaggattcagtgctactccacaaacaggagtaatggtttaagctgtttccctcttcccctcccaccaccaatcagcagcagactgctagaggacagatgcaaaacagttattagaccaggcttagttagacatggaggatgcatcttaacaagttagtacctttttgcaaagcatgaagactaattcaaagtctattttctggttttgctctaccagtacggccaaaaccatttctttttaagtgagaagtggggatatggtcaggtttgattccagttgaagttgtgagctgcacagggctggtctgagcccagtggcatctttccaggtgtcagagccatgattttaagctcctgttaaattcacagtgcttagtaaccataacttcttggtttcatgatcataggggtttttgcatagctgccacccccattttctgtttgtggaggtagcact

SEQ ID NO: 174964 - DNA, 323 bp, Homo Sapiens
tctacaggctgtagtgctactccacaaacagccaatcaacctgactttgttgcctacaggtttgtccctggctgtctttggctaattaggctttcatgatgccttattcaaaaaagaagtacattggttcactaacatctctcacatgctacaactaataggtggaaaccaatatggagatgtcaaatgagtcggtgtccaagtttgtgtacttcaaaatgctaaagaggaaaatccatacattgtgagccttatgcagtttcacaaaagacacactaaaacaaattctgaatctcaaccaccctgtttgtggaggtagcact

SEQ ID NO: 174965 - DNA, 477 bp, Homo Sapiens
cggtcgatctacaggagcttagtgctactccacaaacaggggctaaatgaagcctttaactaaacgataaatgtgatcgtctccatggactgaaccctgccagggcagactggcttcccaagtggattaattaactcttagcagccctgtgctgggaggctctacagaagggatttgagattcctgaggcccagaaagatgactttattaagaaatggaagacatttggggtgacttctgtagctggtggcagccacagttctaggatcagagcctagaagtcaagacctcaagatggaaataacagttcaaaggcagtcccatcagatagcactgggaggaagacacagattggttcagcactgagcacagacgatgtgtctaccctgtgtgtctccctgctctcaggaggtcgtgctgtttgtggaggtagcactctgtttgtggagtagcactgagctcctctagatcacctca

SEQ ID NO: 174966 - DNA, 362 bp, Homo Sapiens
agtgctacctccacaaacagtataaaagagagaaaaaggaagtggtcctctgtcagctgagctgtggcggcttaagtctactcacgtcctgcgctgttctctctttggctgagtgataaagacagccacagtcgtcccagggtctctggatcttggcgttctcctctaaggatgagcagggaagggaggacatctatttgctcctcgatcagcatggggattttggtggtgcagggaggacagaagttcagccctttctggcagaccttggatgttctgagctggatgcctgaaccccaacctacttctctgattcttgtgggcaaaacaaatgaaagagctgtttgtggagtagcctaagc

SEQ ID NO: 174967 - DNA, 165 bp, Homo Sapiens
ggatgtcagtgctacctccacaaacagagtgctacctctagtgctacctccacaaacagagtgctacctccacaaacagaaacgatccatttatgacaagggtcactgaatgaacaccagtcactgtaactgtcacaatcacaccagcgagcttaagagttagga

SEQ ID NO: 174968 - DNA, 550 bp, Homo Sapiens
cttagtgtactccaaaacagcaggatactgtgagcgaggtgtttctgatttggatctcattgacaacctggggccagccatgatgctcagtgaccgactgacattcctgggaaagtatcgcgagttccaccgtatgtacggggagaagcgttttgccgacgcagcttctctccttctgtccttgatgacgtctcggattgcccctcggtctttctggatgactctgctgacagatgccttgccccttttggaacggaaacaggtgattttctcagcagaacagacttatgagttgatgcggtgtctggaggacttgacgtcaagaagacctgtgcatggagaatctgatacgcgagcgagctcgcaggatgatgacgatagagacgcaccaaggtggaaatgctgagactttcgtctggcacgaaatcttgctcgggcaattataagagaaggctcactggaaggttcctgagaactgcttcaatgtggtatctttgtatggcaatgtatatagattttttaaaagaataaatgttgttttgcaaaaaaa

SEQ ID NO: 174969 - DNA, 535 bp, Homo Sapiens
aaacaaacctaaaggaagcttccctaggtgaaaaggggaaaatgtgagcccttcctctggagggaagtttccatgaattgcatctataatgaatatattgcctgttttgtgaatactgacacatgtccatacctaaaacactcctgagttaagtcccatccttcccacaaacagcttcctggctggtacccatgataacaattgagctgaacctggggacccctggttggggaacaggtgagttataaatgagacttccagccctagaatagctgcactccgtgccagaaatgcctctctacaccaggagctcggccctctctttgtagctgtgactgtcaccctctcaggctttgtctcatccttcagtctgaataagatggcagtgttctcctgctggggcactgatccacctctacaccagcccagtaagccccatctgtgcactgccctcaggtggtccaccagtcatcacccctttggttcccttccagtctcttcctcctttctatccctatcaccaatagaaaagcgg

SEQ ID NO: 174970 - DNA, 353 bp, Homo Sapiens
agtgctacctccacaaacagccagagccagcctttcctgctcaggcactgaggaccacagaagtcaacagatgctagcctccacaaacactgtcaaacagaatcagagggcagttcaagggaaaacggtcgaaacttttcatgtgcgttcagggacagcccttccaaaaagataaaggctatggcacatcataacttctagatttgcagggtagaaattaccaacaaaaggtgatggcatgtcagatgaggactgagctggctggcatatgtgttcactgcccaccctgcctctttatgtagggagtgttagtggaggtagcactctgtttgtggagtagcctaagatcctgt

SEQ ID NO: 174971 - DNA, 615 bp, Homo Sapiens
gcttatgctactccacaaacaggactcggatggtacagaattccatggtctcaatgacttaagtttatgggaagtcattgtggccataatggtagcagaagtagtgagcacgctcaggtgataggacgactcctgagacccagcgaccgtggagacagcctcgggaagccctggcccgtggatggatcccttggctgtctgaggactgctccagaagtgcgggaatccagggcccacccagaagaccgtgaacagttccttagcctcccacccccaaggcagctcttttcatccaactcagtttacaggcgtggtttgtttttcaaactgggcttcctggatgtacaaatggaactgtggtgagggtgcgggctggggttttctcctgggcgtcaccaagggcagccctgggctctggctggggatgaagacgaaacccgatcgggaaagtaagtggagcccccggccccgccgagccacagccccccaactgcctattcccactgcccagttgtttgtccacatcaggagttgctgattgaattcttgctactcttctggctctggggtcggccagtggattcaggagttgaaacaataaagcgcgcgtcacga

SEQ ID NO: 174972 - DNA, 262 bp, Homo Sapiens
  misc_feature (106)..(121): n is a, c, g, or t
agtgctacctccacaaacagcagaggacctgctgtgacctaaagggcattcctttagcagataagaccttgaaaactgcaaaacacctgggaccagggagcttttnnnnnnnnnnnnnnnntaccacatttgctttttccctgtgaactgtattgacagcgtgttcttaggacagtcttttggtggaaatgttactgtaaaatagttttcatctcacccctccataatcatactcgccactttcctgtttgtggagtaaccg

SEQ ID NO: 174973 - DNA, 503 bp, Homo Sapiens
agtgctacctccacgaacagattcaaatacatcacaatttttcagtcctttttgaccatataaaaacagagccaccaacgatgtataactttccattcagagcacacactcctgcattacaacggttagttctcaattctggaacaggaatccagtcatctatgtttgaatcatacatctctccacaactcaggtcatctgagtggccatttgatccacctaccacatagagctggcccatgagtacagccatttgaaatcgggctcttggtgttctcatgggagcaagaaaggaccagtgatctgtatgtggattatagcattcgactgttcgaagacattcctctctgttatagccacctgcagctatgagtttgccattcatctctgctgttcccagaccagatcgtgcgtactgcataggagacatgggcttttcgattagctcatcttgttgcatctcaaagcttaaactcttacttagttttggagtacttgttggt

SEQ ID NO: 174974 - DNA, 432 bp, Homo Sapiens
  misc_feature (56)..(145): n is a, c, g, or t
  misc_feature (160)..(228): n is a, c, g, or t
acccggtgctacctccgctggcaggttcgaggccagcctggccgacgtcggtgagnnnnnnnnnnnnnnnnnnnnnnnnnnnnnnnnnnnnnnnnnnnnnnnnnnnnnnnnnnnnnnnnnnnnnnnnnnnnnnnnnnnnnnnnnntgcttgaacctgggnnnnnnnnnnnnnnnnnnnnnnnnnnnnnnnnnnnnnnnnnnnnnnnnnnnnnnnnnnnnnnnnnnnnnagactctctattcttttgctgaaggccttttatgaatctgatgccagcctacctttctggctttatctcccagaacatcctacgatgtacctttcactctcatcaactagactaccgactgtttctcgaaaaactttttccacctcttcacctttgcttatacttatcttgctgtttgtggagtagcacctgagatcctgaagt

SEQ ID NO: 174975 - DNA, 148 bp, Homo Sapiens
gctactccacaaacagggcacacaagtagggtcattcacgtgactggactgtcacaatgtggctgtcacgtgaagtgctggtgttgatttccatttaatgccagtggaatgtaggaggtaacactctgttatgtggaggtagcactga

SEQ ID NO: 174976 - DNA, 959 bp, Homo Sapiens
  misc_feature (893)..(913): n is a, c, g, or t
ggggcgtccgggtgacgtctcccgagggcgtcggcagggtcggcggcgtcggcagcagtgtcgacggcagcggcggcggcgggtgggaaatggcggagtatctggcctccatcttcggcaccgagaaagacaaagtcaactgttcattttatttcaaaattggagcatgtcgtcatggagacaggtgctctcggttgcacaataaaccgacgtttagccagaccattgccctcttgaacatttaccgtaaccctcaaaactcttcccagtctgctgacggtttgcgctgtgccgtgagcgatgtggagatgcaggaacactatgatgagttttttgaggaggtttttacagaaatggaggagaagtatggggaagtagaggagatgaacgtctgtgacaacctgggagaccacctggtggggaacgtgtacgtcaagtttcgccgtgaggaagatgcggaaaaggctgtgattgacttgaataaccgttggtttaatggacagccgatccacgccgagctgtcacccgtgacggacttcagagaagcctgctgccgtcagtatgagatgggagaatgcacacgaggcggcttctgcaacttcatgcatttgaagcccatttccagagagctgcggcgggagctgtatggccgccgtcgcaagaagcatagatcaagatcccgatcccgggagcgtcgttctcggtctagagaccgtggtcgtggcggtggcggtggcggtggtgaaggtggcggcggacgggagcgtgacaggaggcggtcgagagatcgtgaaagatctgggcgattctgagccatgccatttttaccttatgtctgctagaaagtgttgtagttgattgaccaaaccagttcataaggggaattttttttnnnnnnnnnnnnnnnnnnnnncatacaaagatgggtttctgaataaaatttgtagtgataacagtaa

SEQ ID NO: 174977 - DNA, 852 bp, Homo Sapiens
gcggcggcggcgggtgggaaatggcggagtatctggcctccatcttcggcaccgagaaagacaaagtcaactgttcattttatttcaaaattggagcatgtcgtcatggagacaggtgctctcggttgcacaataaaccgacgtttagccagaccatcttgattcaaaacatctatcgtaatccccaaaacagtgcacagacggctgacggctcacactgtgccgtgagcgatgtggagatgcaggaacactatgatgagttttttgaggaggtttttacagaaatggaggagaagtatggggaagtagaggagatgaacgtctgtgacaacctgggagaccacctggtggggaacgtgtacgtcaagtttcgccgtgaggaagatgcggaaaaggctgtgattgacttgaataaccgttggtttaatggacagccgatccacgccgagctgtcacccgtgacggacttcagagaagcctgctgccgtcagtatgagatgggagaatgcacacgaggcggcttctgcaacttcatgcatttgaagcccatttccagagagctgcggcgggagctgtatggccgccgtcccaagaagcatagatcaagatcccgatcccgggagcgtcgttctcggtctaagagaccgtggtcctggcggtggcggtggcggtggtggaggtggcggcggacggggagcgtgacaggaggcggtcgagaagatcgtgaacagatctggggcgaattcttgagcccatgccaattttttaccattatgtcttgctagaaaagtgttgtagctggattgaaccaaaccagttcaataaggggacattttttttaacaaacaaacg

SEQ ID NO: 174978 - DNA, 393 bp, Homo Sapiens
cttaaggatccagtgctactaccacaaacaggagctcctgcagggcggcgaagtgcacagggcgtgctggataagctgtacacaagccaggccgaggccacgctgccaggccccaccgaggcccccaatgccccaagcaccgtgtccagtgggctgggcgcggaggagccactcagcagcatgacagacgacatgggcagccccctgagcaccggctaccacacgcgcagtggcagtgaggaggcagtcaccgaccccggggagctgtagaggctaggtgcctctctagtaccagggactgatgcggacggccagcgagctgctcctggacaggcgcctgcgcatacccagagctggaggaggcagagctgttatgaggaggtagcactgggc

SEQ ID NO: 174979 - DNA, 780 bp, Homo Sapiens; identical to SEQ ID NO: 4102

SEQ ID NO: 174980 - DNA, 186 bp, Homo Sapiens
gacaccgggtgctaacgtccggtgtcgagaaggaaaacctacccagctgactaataagtgcaaatgcattctctttgaaaatatctaaccacttttgtgacttaaattctatttgtagtttcttttagtttccaggcaactaaatgtcattaataagagaaaacttgacactaatttgcactccat

SEQ ID NO: 174981 - DNA, 192 bp, Homo Sapiens
gcctagcaggacctgccaagcactcttttcttcattccaatcagattataagcatcctgagggtaaaactcttgattatacttattcacattcttcacaatgcctagtactgcagtgaacatgcagcagacacctaacaaatacttgtttgttcttaaaagagataaaggagtatgacacaaggagcatttt

SEQ ID NO: 174982 - DNA, 775 bp, Homo Sapiens
aagtcattaggcgtaaggcatggtttgatcaacatcaaagaattcactttttagagaatccttttgagtgtaaggtctgtgggcaagccttcagacagcggtcagctcttacggtccataaacagtgtcacctgcaaaacaagccatacagatgtcatgactgtggaaagtgttttcggcagctcgcgtatcttgttgaacataagaggattcacaccaaagaaaaaccttataaatgtagcaaatgtgaaaaaaacgtttagtcagaattcaacccttattcgacatcaggtgatccatagtggagaaaaacgccataaatgccttgagtgtggaaaagcctttggccggcattcaacccttctatgtcatcaacagattcacagtaaaccgaacacccataaatgcagtgaatgtggacagtcctttggtaggaatgtggatctcattcagcatcaaagaatccatacaaaggaggaattctttcaatgtggagaatgtgggaaaacgtttagttttaagaggaatctttttcgacatcaggtcattcacactggaagccaaccctaccaatgtgtcatatgtggaaaatctttcaagtggcacacaagctttattaagcaccagggcactcacaaaggacagatatccacatgatgttaattggaaagcagtcattggagaactagaacttataaacctctacttcaagtgtgtatcacgtaattgtttccatgaaaagcaataaatgtaacaaaggtttattctgggatga

SEQ ID NO: 174983 - DNA, 937 bp, Homo Sapiens
  misc_feature (874)..(874): n is a, c, g, or t
ccagcgcccccagtgtgacctcggctgcctccggtgatgtaccaccactcacagctgcagggtgcccacggggacgcggtcatcctgggcatgtccagcctggagcagctggagcagaacttggcagcaacagaggaagggcccctggagccggctgtcgtggatgcctttaatcaagcctggcatttggttgctcacgaatgtcccaactacttccgctaggcccatcatggctcaggctgcccaaggcttttctgtcacctcttttgttctctcacactgaccagtcttggccttaagctgacttagaagggtttttctgaattgtctagatccatgcattatttttctagcttcctgccttgctccctattcactttacactgtgaaaggtggggggtgagtcccacttgagcgcttcctgttgaataaagcaggcacttgacctggctgtagcctaggtcttgagtgaaccccaaaaacttgctttctctgctgttaacactttgtttcccatcctacctggggactgagaaagggcagaaccatgggctggagtcttcagagggcagaggtagtaggagggtcacagaagcacactgccctcccagggtctcctcgggcccctggtctgaatacccacctgacctctcaacattgaggtgtctctcactcttctacacacgatagaaaagagagtcatacacctgcagtacattttctctaattcagagttgcctcaatacattcttaggaatgaaacaactgggacaaagaaactaccattagagtcactaccaagaagaagaacacttcccaggatctgtggaacatcttgaagctctcaatcttagcctcctcttgtcttaactanagcctcttgtcttttcacccattaggttctcagtcttggctctggggcttcctgtttcgggaa

SEQ ID NO: 174984 - DNA, 402 bp, Homo Sapiens
agacccgctattaccagtgtgggaaatatctgtctcaaatagggctcgtggagattgcttttaacttctggggactctgagacgggggaggtgtgacaagcagcgggaggcatggatgtctccctctgggtagagtaaatggtacaccgaggggaagatagaaagatggagcgtgttaaaagcgtaaataacggaaacagtctttagagccaagactccggtttgaatttgtattttggtagttgggcaacttgtctcctcctctgaacctctattttctcgtttgcgtaatggaggacagagtttaaatgcgatgatgtttccttggaggatggagaagatgcagtgagcaatcatacaagctttttgtaataatggtaaacacactgggttaagtaagca

SEQ ID NO: 174985 - DNA, 503 bp, Homo Sapiens
ttgtgtgtgtgtgttgagaaaggaggggaatataatgaatgtgggaccactagctctagggctagtggggaggaggagtcctccaaaggcacagagtccagtcttttggtagcatgggattaagaactggcaaggatggagaagacaaagacaaaacataaccagcatttcctacgttaacaattttactcaagacaaatcttacattcattttgtttttcttccattagctgatatagatttcactttaggatcaacattagatttgtatcaataccccattatgtactttgaaataacttcttattagtgtcttaaactttctcattgctatccactgagtctagacaaaagatctcatgtacattgtatcactatgtctcatattccatgggaaataaattaatgatgagtaacacagtgcacgttcaagttatgagtgtatgtatctatttagcataaagatatggctgattgtgacaaaggcggagcacctggtaagt

SEQ ID NO: 174986 - DNA, 201 bp, Homo Sapiens
ccaggatctttgcttacttaacccagtgtgctgtcaagtacttatggatattacctcatttgagagtaagaaaactgaggctcagaaaacaatgtgacttgctaaatgctgagggtcaaggtctttggaattcaaataccatgtgctttgcaccattcctttttccttccattaaaccaatatcctcaaaatgccagttaa

SEQ ID NO: 174987 - DNA, 608 bp, Homo Sapiens
  misc_feature (99)..(135): n is a, c, g, or t
gagtatacagctcactgtaagctctatctcctgagcacaggtgatcctcccaaactcagcctcccaggtagctgtggctccaggcgaactactgtatannnnnnnnnnnnnnnnnnnnnnnnnnnnnnnnnnnnnggtcttatagtcctgggctcaagcctcccagagtgctgggattacaggcatgggtcaccgcaccaagcccgcatttatattttgagttaccaaaatgatcatcatctgtgaagcatcatggtagcttccaagcatttgcggcccactggccagtgcatccaaaacacattcaggaaacccgagagttgtaagttgcacatgtgtggcctacagtgacttccatgtagtaacagggctgagcaaggcaggctctccaccagacttaaagcattcaaccactctgcccccaggccgacactgacatgtgttcactgtcgctgccacagctggccacctgtgttcagtctccatgaaggattcaccttctgctctcactgacatctccttggctacacaaatgtgcaggtgtctcttgtcaaagctaatttttcttttctaaataaacatctttaatacactcctcccttcctcaa

SEQ ID NO: 174988 - DNA, 766 bp, Homo Sapiens
  misc_feature (333)..(333): n is a, c, g, or t
  misc_feature (728)..(728): n is a, c, g, or t
ggattcttagtttgattgaggagaacattgataaaattctgccaattatgtttgccagtttgtacaaaatttccaaagaacactggaatccgaccattgtagcactggtatacaatgtgctgaaaaccctaatggaaatgaatggcaagcttttcgatgaccttactagctcatacaaagctgaaagacagagagagaaaaagaaggaattggaacgtgaagaattatggaaaaaattagaggagctaaagctaaagaaagctctagaaaaacagaatagtgcttacaacatgcacagtattctcagcaatacaagtgccgaataaaaaaaangcctcccacctctgccggataggcagagttttgtatgcttttttgaaatatgtaaaaattacaaaacaaacctcatcagtataatataattaaaaggccaattttttctggcaactgtaaatggaaaaatatatggactaaacgtagccctgtgctgtatcatggccatagtatattgtaacctttgtctaatcattggatttattgtgtcacttctgaagtttcacagaaatgaatgaattttatcatctatgataagagtgagataattatgggagtggtaagaattatgacttggaattcttctttgattgtgttgcacataaatatgggagcctgctctggatatttttcccttttataatgtgctttttccactggctgcaacccttagntacctccctagaaaaaatactttcctaaaataaactaa

SEQ ID NO: 174989 - DNA, 1041 bp, Homo Sapiens
tgatatactttcaaaggccaatggatggaagagggtctcaagaggaagccctagacaaaaaggaaagctagctaaataaggaaaggattaacaaggtaaaggccctcctcactgtcctcagtgctcccaaccagaggggaggagaaaagctccctcctgcaacttaagaaggcagtagaagggaaaccttacttaccacctttcctcttcacggaatgccacacttcatccacccccggcatacccaacagatatagcaactgaactgtttaagccacagacaaaagtggtcctggtttcccccccagaggctagaacatatgctggcaaatttatcaatggactactaaatattaatattaggtgctaaatatgttcctccagtgctattctactcaaagtgatttttaacaaaggcaggtgggtaaaaatagtgaccatgaactcaaatccatactagtgaaagagctaagcgttcttcccactccctctttgggcagatgttattgtgagcagaaggaaccagcgcctggtaaggtatgggtatcccatattccactggctccgtacacactgggagtttcatgccttcaggggctgcacatccttccttccctggaagacgaggaagtctcccagatcacaaatgcattcaacatgattgttcatgtatcaaatacattggaattacaaggagttgccagaatttagagctaactgaaggatcagcaagaccaaccctcatacacacacacatacagcacatttttctgaaattaactatgccaaagtaaaagtttgatctgaagaatcacactgaagaagtacatctgcatcagttatttttaacctctggaatgctgtaagttacatattaatttatagccttctctgctcacttcaactagaacagagcccattttcccctcacatgtcatctagaattaccttgaaagttattaaacctcacggacgcgtggtcgacgatatcccgggattccggccgtaccacctgctatatactgcactttaatatgccca

SEQ ID NO: 174990 - DNA, 1237 bp, Homo Sapiens
ggcttcgccgagaccccggaggctttgagtgcgctgcagcggtccgcggcgcgcagctgtttcggtaactgctttgcctcccggctcccgcaggaggatgctggtggtggaggtggcgaacggccgctccctggtgtggggagccgaggcggtgcaggccctccgggagcgcctgggtgtggggggccgcacggtaggcgccctgccccgcgggccccgccagaactcgcgcctgggcctcccgctgctgctgatgcccgaagaggcgcggctcttggccgagatcggcgccgtgactctggtcagcgccccgcgtccagactctcggcaccacagcctggccctgacatccttcaagcgccagcaagaggagagcttccaggagcagagcgccttggcagctgaggcccgggagacccgtcgtcaggagctcctggagaagattacggagggccaggctgctaagaagcagaaactagaacaggcttcaggggccagctcaagccaggaggccggctcgagccaggctgccaaagaggatgagaccagtgatggccaggcttcgggagagcaggaggaagctggcccctcgtcttcccaagcaggaccctcaaatggggtagcccccttgccccagatctgctctccttgtccagctggccactgccaggcctcgaccggtcaaggccaggcccctggactggcgtgtccagtctaaagactggccccacgccggcgcgccctgcccaacgagctgcggctacagtatctacagagacctgtgggagcgaggcttcttcctcagtgcggctggcaagttcggaggtgacttcctggtctatcctggtgaccccctccgcttccacgcccattatatcgctcagtgctgggcccctgaggacaccatcccactccaagacctggttgctgctgggcgccttggaaccagcgtcagaaagaccctgctcctctgttctccgcagcctgatggtaaggtggtctacacctccctgcaatgggccagcctgcagtgaactccagagacctaggggatgtggctgtgtcggcagcaagagcctttctggatgttccccagctcttctctgggagtctagaacatcctcctacctttctccgcggttagtttttgattccaggttttcgaacactacatcctttttatgttcttccttgtttcaaagcacttattggctgtgttttagtagttacctatttt

SEQ ID NO: 174991 - DNA, 906 bp, Homo Sapiens
tccgacgagggagggggtggagcaaggagcgcgtggcgcggtgcgcagtgggtggctccacctcgactgcgaattactgtttatgaggaggatgctggtggtggaggtggcgaacggccgctccctggtgtggggagccgaggcggtgcaggccctccgggagcgcctgggtgtggggggccgcacggtaggcgccctgccccgcgggccccgccagaactcgcgcctgggcctcccgctgctgctgatgcccgaagaggcgcggctcttggccgagatcggcgccgtgactctggtcagcgccccgcgtccagactctcggcaccacagcctggccctgacatccttcaagcgccagcaagaggagagcttccaggagcagagcgccttggcagctgaggcccgggagacccgtcgtcaggagctcctggagaagattacggagggccaggctgctaagaagcagaaactagaacaggcttcaggggccagctcaagccaggaggccggctcgagccaggctgccaaagaggatgagaccagtgatggccaggctttcgggagagcaggaagaagctggccccctcgtcttcccaagcaaggaccctcaaatgggggtacccccctttgccccagaatctggctcttccttggcccagcttgggccacttggccaggccttcaaccgggtcaagggccaaggcccccctggaaatgggcggtggtcccagtctttaaaagaatgggcccacgcccggccgccctgcccacgagctggcctacagtatctaccgaagacctgtgggaaccaaggcttcttcctcagtgcgggctggcaagttcccgaaggtggacttcctgggtccatcccggatgaaccccctcccgctttccacggccccatta

SEQ ID NO: 174992 - DNA, 304 bp, Homo Sapiens
ggtttgaagaaaggaagggattaaataattttttttccctaacactttcttgaaggtcaggggctttatctatgaaaaagtagtaaatagttctttgtaacctgtgtgaagcagcagccagccttaaagtagtccattcttgctaatggttagaacagtgaatactagtggaattgtttgggctgcttttagtttctcttaatcaaaattactagatgatagaattcaagaacttgttacatgtattacttggtgtatcgataatcatttaaaagtaaagactctgtcatgcatttttccccta

SEQ ID NO: 174993 - DNA, 177 bp, Homo Sapiens
gtgttacgcaatggtgtaaaacacgaatgagcagtgcccggcatgctgcgagggctcagtaacaccagccatagcagtgccctccctctctttacccgatggcaggtgggaggtgctggatttgtgaggaagaaggcctcacggccttgcctgctcccacattgggttaagtaagca

SEQ ID NO: 174994 - DNA, 266 bp, Homo Sapiens
cagtatagaatgcacaggctggaagtgaccttagagagtaatccagttctttcaatttccaggtgaggcaactgagactcaaaggtgatgtaatttgtggcaaagattatagctaattagtagcagagccctgactgggacatagtttgaaggtgaaaaacttcaccaagctacctttcttgaaaggtccaaatggttatgtattcaactactctttccactgtaccataacccttcattacatattaacgggaccgagctcgaat

SEQ ID NO: 174995 - DNA, 336 bp, Homo Sapiens
tactgggattacaggcgcgagccaccatgcccggccagtgtcctttcttatacacgtacatacatgatgatggcttgagtcagctgcagggcagtgggcttaatgagagggatctttgtaaagacagctcttcacttcagctcagtagctttggtcataggcaagtttgcttcccattatcataatttgatgattcttgtgatgaattcaatgctagttcttaaagaactcttttatttctgtatgtggagctaatgtttaccttggaaattttgcaaaatacatgtaagaaagaaataaaatatattttgaaaggaaaaccaaattaacctcttt

SEQ ID NO: 174996 - DNA, 647 bp, Homo Sapiens
  misc_feature (140)..(227): n is a, c, g, or t
agtggtgcaatcatagctcacatctagcctcaaactccgggactcaagcaatcctcctacttcagcctcctgagtacctgggacttacaggcacacaccatcatgtctgctaatttttttggttgctgtttttaagtagnnnnnnnnnnnnnnnnnnnnnnnnnnnnnnnnnnnnnnnnnnnnnnnnnnnnnnnnnnnnnnnnnnnnnnnnnnnnnnnnnnnnnnnngaatgagccactgcactcggcctacttctgcattccttagagtacatcctagctaggatatattcacttgtctttagagctaacagcagaagaaaggtacctagatgcttatctagctctttatctttctagaaattctagaagatgagaggggcagtggtggctccaagggagtgattttaggatggactgggacagagaggggctgcttacacatactcacacagaggccattaatttagggagttcaaggtccaggaggttgacggcatctaggcctgtggcagagtgcactcctgctttggggaatgtatgggcagcttcttgcctgtgtttgagggttaaaagagggtccataatttatggttggccttgagtttgaattagctggagcttttgggccgctcccccccttttttt

SEQ ID NO: 174997 - DNA, 554 bp, Homo Sapiens
ctcctttaatggcaggagaatcacttgagctcagaaggcagaggtttcagtgagccatgttcatgccactgccattaaaggagctgaacagctcctttaatggcaggtgagctggatgtgctcccaggtggggctcgcagcaggagtgacactgtggtcacatcctggctggtgccttcaggggtgggggttggctttgaaacctctgcctgctgttcctgttcctctcgctctggcacctcacactgttccagcctgtgtgccgctagccccttgctgtcctctattgagccactgttgggacgcccgctgtacaacctcccagccaaggtggcagcctcaagctcctgagcccgtacacggcggatggcagctcggatcagcttgcgctcctcatactcaccagcgcttcgcaacagcgcagtcaattcctccacatcgttcatggactccagctgccctgccagccgtgccagggcagcccgctgctcagcttcccgctgctgagagtgcaaccagtatttcttgttgacctgccgttcggtacggtaacg

SEQ ID NO: 174998 - DNA, 186 bp, Homo Sapiens
tttaatggcaggacatagtggaggtcaggaaatacatacatgaacaagacattgaccctgtccttgtagtccctcacacactctgagccaccatttcctcctctgtaaaatgggaggagggttagttttgagttttcaacatgccatcctagggctgagccatgttcatgccactgccataacagg

SEQ ID NO: 174999 - DNA, 852 bp, Homo Sapiens
ttgggggcagccaggcctggctcgagatgccgaagtcgtgcgcggcccggcagtgctgcaaccgctacagcagccgcaggaagcagctcaccttccaccggtttccgttcagccgcccggagctgctgaaggaatgggtgctgaacatcggccggggcaacttcaagcccaagcagcacacggtcatctgctccgagcacttccggccagagtgcttcagcgcctttggaaaccgcaagaacctaaagcacaatgccgtgcccacggtgttcgcctttcaggaccccacacagcaggtgagggagaacacagaccctgccagtgagagaggaaatgccagctcttctcagaaagaaaaggtcctccctgaggcgggggccggagaggacagtcctgggagaaacaaggacactgcacttgaagagcttcagttgcccccaaatgccgaaggccacgtaaaacaggtctcgccacggaggccgcaagcaacagaggctgttggccggccgactggccctgcaggcctgagaaggacccccaacaagcagccatctgatcacagctatgcccttttggacttagattccctgaagaaaaaactcttcctcactctgaaagaaaatgaaaagctccggaagcgcttgcaggcccagaggctggtgatgcgaaggatgtccagccgcctccgtgcttgccaagggcaccaggggactccaggcccagacttggggcccgtaacagccagaagctggaggcccccacagcgcttccgggaagcaagaggggggccaaatggccacccagggggccgcggcagaagccttttgggcaggcttctgggcctggggggaa

SEQ ID NO: 175000 - DNA, 856 bp, Homo Sapiens
catggaagataagcttgtcatgctcaacagatgtgcactccttagtgcacgccctctaaacgtcccccagacggcacttggggctctcgccggggagcttggctactgtctcgatccccgggccaagcaggcctcatggccaactttctcagtgtccacagcagacaaaaatgtccacagccagagctccaaagctctgccggccctggtgccactgccacctctgcgtccggagcctgtggggctcagctctgctgctctggcccaagtctggcctggagtccccggtgccctttgcaagcacggaggcggctggacatccttcgcatcaccagcctctgggcctgcaagcgcttccggagcttttcattttccttcagagtgaggaagagttttttcttcagggaatctaagtccaaaagggcatagctgtgatcagatggctgcttgttgggggtccttctcaggcctgcagggccagtcggccggccaacagcctctgttgcttgcggcctccgtggcgagacctgttttacgtggccttcggcatttgggggcaactgaagctcttcaagtgcagtgtccatgtttctcccaggactgtcctctccggcccccgcctcagggaggaccttttctttctgagaagagctggcatttcctctctcactggcagggtctgtgttctccctcacctgctgtgtggggtcctgaaaggcgaacaccgtgggcacggcattgtgctttaggttcttgcggtttccaaaggcgctgaagcactctggccggaagtgctcggagcagatgaccgtgtgctgcttgggcttgaagttgccccggccgatgttcagcaccc

SEQ ID NO: 175001 - DNA, 353 bp, Homo Sapiens
ctgctggcccttacgcgccgacatgaaaaagaagatggaggacatgtgtggggtgcctggaaactgctgaggaggtgaagaggaagctccagaaggacctggagggcctgagccagcggcacgaggagaaggtggccgcctacgacaagctggagaagaccaagacgcggctgcagccaggagctggacgacctgctggtggacctggaccaccagcgccagagcgtgtgaaacctggagaagaagcagaagaagtttgaccagctcctggcgggaggagaagacccatctcttgccaagtatgcaggagggagcgcggaccgggctgagggggaggccggagagaaggagac

SEQ ID NO: 175002 - DNA, 671 bp, Homo Sapiens
  misc_feature (425)..(425): n is a, c, g, or t
  misc_feature (621)..(621): n is a, c, g, or t
  misc_feature (626)..(626): n is a, c, g, or t
  misc_feature (650)..(650): n is a, c, g, or t
gcgcttacgcgtctgctgggccttacgcgcgcgctgtgaggctgcttgtggcggattcctcaccaagctcaacggctccatcaccagcccgggctggcccaaggagtacccccccaacaagaactgcatctggcagctggtggcccccacccagtaccgcatctccctgcagtttgacttctttgagacagagggcaatgatgtgtgcaagtacgacttcgtggaggtgcgcagtggactcacagctgactccaagctgcatggcaagtcctgtggttctgagaagcccgaggtcatcacctcccagtacaacaacatgcgcgtggagttcaagtccgacaacaccgtgtccaaaaagggcttcaaggcccacttcttctcagacaaggacgagtgctccaaggataacggcggctgcagcaggnactgcgtcaacacgttcggcagttatgagtgccaatgccgcagtggctttcgtcctccatggacaacaaggcacgactgcaaagaaggccggctgtggaccacaaggtgacatccaccagtgggtaccatcaccaggccccaactgggccttgacaagtattcccaggcaaggaagggagttgcacgtgggggccntcttnccaggcacccccggggcacggttncaaaggttgacttttcttggg

SEQ ID NO: 175003 - DNA, 457 bp, Homo Sapiens
cgagttcatcacctccaagtacaacaacatgcgcgtggagttcaagtccgacaacaccgtgtccaaaaaggcttcaaggcccacttcttctcagaaaagaggccagctctgcaagcccctcgggacgcccccaccagctcaaattccgagtgcagaaaagaaaccggaccccccaagtgagcctgccaggcttcccggaccccttgttactcaggaacctcaccttggacggaatgggatgggggcttcggtgcccaccaaccccccacctccactctgccattccggcccacctccctctggccggacagaactggtgctctcttctccccactgtgcccgtccgcggaccggggacccttccccgtgccctaccccctcccattttgatggtgtctgtgacatttcctgttgtgaagtaaaagagggacccctgcgtcctgctcctttctcttgc

SEQ ID NO: 175004 - DNA, 644 bp, Homo Sapiens
gatacgcatgactgcccctcaccacccagtcctttctccggctcatcaaaatcagcatacacattttggacgtacacactataaatggcatcaaattggatatttttcttaattatgacatgcaaagtaatgtgagtcctgccagtattctggtggataaggtctttggagtatttggttgcttgtcacaacattctccaagcagtgatatttctaaagaggagatacatgttgaaaacggttttaatttacacttccatttcctgattacattgggaaatacttggtgtaaaccatcccccttccacctccattggtctgttgaaagattttaagttggaaacagttcctgtctgaaaactcttctgagaaccacaaaccttgtgtatggattcggcatggagccctcagctggcggctctgggtgctgacggccgctggagaggtgggctcccctcgtgcactttattgcctgggcagttttgcttgatcttttgtgactttgagccttttaagtagtttgaatgataagacttaaaatgtttcataattatgttttatgtaacagactttgacattatttaaacgagcatgtgtaatgtaacttttctctttgaatcatataaaacttgattttacattga

SEQ ID NO: 175005 - DNA, 394 bp, Homo Sapiens
tcgcccggccagcctcccaaagggctgggatacaggcgtgaaccaggcgcccggcctcattggccattcggagcgtaaaatcgaaacctagcaaagtgaggcactagtcgccactgagacttgagagaaatctgcttatcctggaattactcttctgggagtgctgcgggaagcacggcagtagggaggtactgggtctaaaaagagcttcattggcataaaatacattggggatggtttggttggctaaggactcaattgagccctagtaattgggtgaggtcgagtgggtagaaaataaaaagaagcattcctttcttccccaaccttcttttcctcaccacaaccttcaccattacggtgttacttcataaaataatgaagtaacaccgta

SEQ ID NO: 175006 - DNA, 373 bp, Homo Sapiens
ctgactttccacgaggatgcaacaacagtcccccatcccacaggcatcaggcttggttggcagctgcctgaaaactgcccccagaccagcgcttctgcacgtgcatgactcctgttctgcccagaagctgtcactccccaccgtgagtgtgacaaccttccctccaagcgccttcagtctctgcaggcctcactttcaagaaaggtagagaaaatgctgtgaccgccaccgcacaggacaggctgtcctgtgcgtgcacatctgagaggcagtcctccaggccccctgggcaggctggggagtggcgggtgctaagggtacagagacaccaggagaaaaagccagcctcgcctgggaagtcagtgcgtattcg

SEQ ID NO: 175007 - DNA, 220 bp, Homo Sapiens
  misc_feature (158)..(166): n is a, c, g, or t
catacgccctgactttcctgctccctgcacggggaagggggaggatgactgctccacccaggccacagggccacactcccctgccaacagaggaagaaaggggcttttctgtagccacccccctgcacatcagaaatcacacagtattctctcaaagnnnnnnnnntacagaaattgaaacatttaaatatgaaaaaccacagggaagtcagtgcgtagt

SEQ ID NO: 175008 - DNA, 394 bp, Homo Sapiens
ttacgcagctgacttgcctaaatcttaccttgccgaagctgatcacaatacgcacggactttcccctccggcttccgtgcctgctgtcctctccggcttcctgtctgctcggggtctcacaggcacaagggtcccctacctccgtgtctccggcacccagcggacaggaccagcggcagtgaccagctggtgactccatcagaaccttgcatgtgatcagtcacctggctgggtcctcacggtgctgccgcccactttacagatgagccacctggctggcacggcgcctcttccttggccaggattctctaaacctccctgttccatgaggctgattccttccttcttctcttccctccttcgttcattcatgggaaagtcagtgcgtatgggg

SEQ ID NO: 175009 - DNA, 378 bp, Homo Sapiens
cctctcccacagttgcagtatgttgctgggccacagggtggacaggcttgggggcccctccaccagcaggttaagcctttggcttggcacgagaaaagggcccagcagagtgcttgatgattcatggctgtcagtcagttgcttctgcctgctatgagacatctctccggtttatcctgaccatctttcttgaagcacccatgggaggcaggtacccggtggaagtcagaaggttgtctgggaatgtgagctccctgtgtcgggcacatctggcttcgtttgagccaccccatgctcctgccagccaccatctggccctgggcagctgactgcaattcgagctgatttctccctgccatgttaggtgctagcaggtgt

SEQ ID NO: 175010 - DNA, 378 bp, Homo Sapiens
tgatactatgcaattgcccagcctaagcttcgaaagagtcctcgtaggcttccgttcccgcacacggatctctccacctctgtgtgaagaagtccaggctggcttgctggagacatgtggcccagctaacagccagcaccaaccagacaggtgagcaaggttctcagagcacccagctcccatcaggcgatcagatgacacataagtgatcccaggcaaggccaacggaagaacagtccagctgagccctgctccgatcattgacccacacaaacatgagcacataaaatgctgcttcaagccattaagtttgttatgcatctatagagaactgatagagtgaggaaggcatcactgagaggaaacagaaatgggggg

SEQ ID NO: 175011 - DNA, 2061 bp, Homo Sapiens
  misc_feature (1399)..(1444): n is a, c, g, or t
  misc_feature (1463)..(1604): n is a, c, g, or t
  misc_feature (1714)..(1863): n is a, c, g, or t
gggtgtttgtttggactggagaagggaggcggcgggcgaagcgcacgtcgagcgggggagcggcgctgcctgtggagatccgcggaggccgacaggattcgttggctgccgtccccgctgctgtgcattgggttaaaaacgacaaccaacatcagccatgaaagatccaagtcgcagcagtactagcccaagcatcatcaatgaagatgtgattattaacggtcattctcatgaagatgacaatccatttgcagagtacatgtggatggaaaatgaagaagaattcaacagacaaatagaagaggagttatgggaagaagaatttattgaacgctgtttccaagaaatgctggaagaggaagaagagcatgaatggtttattccagctcgagatctcccacaaactatggaccaaatccaagaccagtttaatgaccttgttatcagtgatggctcttctctggaagatcttgtggtcaagagcaatctgaatccaaatgcaaaggagtttgttcctggggtgaagtacggaaatatttgagtagacggggccctcttttggtggatgtagcacaatttccacactgtgaaggcagtattagaagacttaattgtaaaagctctcttgtcactgtgttacacttatgcattgccaaagtttttgttagtcttgcatgcttaataaaagtgctgagactgttactaagtaaaaagctgtcaaacatttactgaaaatagaattggccccatggcttgatgtgaagacagcaaggaaagaagcaccagtcaagttgtgaacaagcaccaaattaaaagacctaaaccttaccaaattgtctttttttgaggctaatctatcacttgttaatgtctaaactttaaaatcagtacatttaatttgagttccaactggtaagcatatttctcagacttaaatttgattatgtccccatcaaaaagaatctccattttctgaaggtctgttagttaatttgagataatttgttaaaggcaagtatgtcatattactgaggctacaagttagtcagcagatgagtgccagtccagccttttctggtatgttattgttagaaatattgagttctaatgttacatctgaggaagtatgtaatttgagaattgtaacttctaagggattcactgcatcatagctatgcctgtatggagtctaacatatgaccaataccaacccataatccagctgaacaaagatactgtaacattatgatttgagtggtgcttttccttgctttgttaaccatcacgagagtctgcagcacaacttttaacaaagctagaacagttttggcttcttaaacttcatatttgggtaggttaagctgccatacgtgttcagtgtgaatagtgtttaagttgnnnnnnnnnnnnnnnnnnnnnnnnnnnnnnnnnnnnnnnnnnnnnntaaataatagtagaactgnnnnnnnnnnnnnnnnnnnnnnnnnnnnnnnnnnnnnnnnnnnnnnnnnnnnnnnnnnnnnnnnnnnnnnnnnnnnnnnnnnnnnnnnnnnnnnnnnnnnnnnnnnnnnnnnnnnnnnnnnnnnnnnnnnnnnnnnnnnnnngcaggacacacgaaagagacagagacaaaggcacggaaagacaaaaggacagaacgaagcacaggaagaggggagcgagacgagacagcaacgagagaggcagacaaacnnnnnnnnnnnnnnnnnnnnnnnnnnnnnnnnnnnnnnnnnnnnnnnnnnnnnnnnnnnnnnnnnnnnnnnnnnnnnnnnnnnnnnnnnnnnnnnnnnnnnnnnnnnnnnnnnnnnnnnnnnnnnnnnnnnnnnnnnnnnnnnnnnnnnnagaaacagaggcgcgcagcagaaggaaggctggaaagaagcgcgaagggaggcacgcgacagccgaataacgcgcacgaaagagcggcagaagatagcgaggaagaggaaaagagaagagacgaccaggaggaggaggcggggagcaggagccggcagcaagccaaccggacggcagcagcggggggctgggcgcgga

SEQ ID NO: 175012 - DNA, 686 bp, Homo Sapiens
ttatgtctgaccacgtactgggctgtggacaccttcgagacaacacgggtgtatctctgatcctgccctactaggcttcaaggggcttctgtctggagaaatgccctcaaagggtaaccagtaggtgtggcattgaattggccagtgttagcatctacagccatcaccgagatgagtttgcctgcccgagggccccctaaggttatagacggtatcagcagggaggccgtcccgctggttttctaggagagcccacaggaggaagggagcctcttcaggggcactggaatcttttgtgccaggggcttcttttcatcagagccggggagtacattgcagtgacttcttaaacatttgggtgggacagacgagcgtgagggaggttttaagccaggcacaaagttagtttccaatactagttaataaatctatttttcttcatttcctttttttgcacagaagctggtaatctaggacctacgtgtgaacaactttatatgaatattttttgtacttggtttacttgggttggtatgatacattatatgtaagttccttgaacactgtggatcccctaatgtgtatgaatgactgaggctttgtgaattaagggacgtttgtgggaataaagctatttgatggggccaaaaaaccgcgccccaaaacatagaatacgcttgtcgggc

SEQ ID NO: 175013 - DNA, 325 bp, Homo Sapiens
actttggtccatcatgatctggttttcccccaacttggtcccatgagactcccagcagtgtagagtagtagacaatggaggggagcagggccgagaaggaccagagcaggagggtggggaagaactggctgatgatcgggttattcagcgcatggatgggtttggtgacattaaacttgtccatggtggacaggatgatggagggtgtggtcaggaaaaatagccccaggaagagggtgaagttgatgcccagccactgtagccaccagcggaggccctggatagagaggttcttccagcagatgtcctcagggtcagcagcaaa

SEQ ID NO: 175014 - DNA, 326 bp, Homo Sapiens
cgcggaccttatgttgaccactggtgagtaggagtgtgtgtaactgcccacctgcccaggctggttagaagcaagcgtaggcgttgggtctgcctgtcctggtccaggcacctctcctggtttggccaggttgtggtttgtatatgttcctgatgttgacgtgtaaatgatatcgttacaaagcaggtagtttgctttgctattctacgaataacccaagaacctgaggataataggacacgttaacagtctgctagttgagagttctgtttctgtgacttcaggggacatatgaccatcccgattgtggtgggtcagaacataag

SEQ ID NO: 175015 - DNA, 370 bp, Homo Sapiens
cttatgttctgacccaccagcgaagggctgaagagcacaggctgtgagccatcctgctggggtgtgaatcaggcttctctgtattcgtccttactgggagacatcagggcccggttggtgactgtttattcttgtcaggtttaagcagtggtagcgcctgtgtcacctcagggtgaaatgagtgaccacgtattgtttcaaacagtgcctagcattcattaaaaggtccctgctacagttagcgctgctgaagtcaggctgtacctggtgtagctggtcttcataggaaagcagaagcaagcttctcctcctctttattaactagcggttctatttcatatttttaaaaagaaacgggtttcactttgcc

SEQ ID NO: 175016 - DNA, 384 bp, Homo Sapiens
cttatgttctgacccacccctaccaatttaatctacattgtatacaacattctatatcaggggtcagcaaacattttctatagagggttagatagtaaatattttaagctttactagtcacatactctgtctcacgtttatttttaataatcctttaaaatttaacaacccactcacagctctggtagtataaaaacaggtcttgagccaatttggccaaagggctgtagtttgctgacccttgtttcctatcactggatacatttctgtaacatctttttaaaaatagctgtatcatacactagttctggtataataaggatacaccagaacttatttagccagtcttctattagtcatagctggttcctacataaggtcccc

SEQ ID NO: 175017 - DNA, 712 bp, Homo Sapiens
  misc_feature (35)..(35): n is a, c, g, or t
  misc_feature (42)..(42): n is a, c, g, or t
  misc_feature (50)..(50): n is a, c, g, or t
  misc_feature (175)..(417): n is a, c, g, or t
  misc_feature (432)..(477): n is a, c, g, or t
tctcatcccaagggtctcggaatcctcttatatcncaattgnaagagggntaagaaatacgtggcatttggattacaaaagtgctctggaagtcagactccgcatatacagcgttgaaaccacaagtcagcattgggtgcaaactgaacggcaagatcaagaaagcagcaggggnnnnnnnnnnnnnnnnnnnnnnnnnnnnnnnnnnnnnnnnnnnnnnnnnnnnnnnnnnnnnnnnnnnnnnnnnnnnnnnnnnnnnnnnnnnnnnnnnnnnnnnnnnnnnnnnnnnnnnnnnnnnnnnnnnnnnnnnnnnnnnnnnnnnnnnnnnnnnnnnnnnnnnnnnnnnnnnnnnnnnnnnnnnnnnnnnnnnnnnnnnnnnnnnnnnnnnnnnnnnnnnnnnnnnnnnnnnnnnnnnnnaagtgagatcctatnnnnnnnnnnnnnnnnnnnnnnnnnnnnnnnnnnnnnnnnnnnnnnttcagagaaagacagagaaaaagcagcaggaagggagaaaaacttctcttttaaattttttatactgataattttggcttgctcatcagaaaaagggaaaggctcactgaaaagggagttataaaattcaaaacatgaagctgggtgtggtggtttatgcctgtaatcccaacgctttgggatgctgcgttgggaaaatcccttgactcagcagtaaaggctgtactgtggtcaa

SEQ ID NO: 175018 - DNA, 494 bp, Homo Sapiens
tagcttaaaaccgtgtaaaactgatatttaagttttgcttagatttgtaagaagttgaagcttaaagcttcaacttaaagcaaatgttttcttaaaatagatacctctgattttggttcaagagcacttttcaggcaaactcagaatatacaaatttcttataaatagtgagtcaaatacttgaggaaactagttttactatattcttctgcttagggtgctatttgttaaataaaattcaaacaactgatgaaatattggacttgataatctatcacaggctcatgttcacacatgaactctgtaattacagtgagcaaaacacaattcttagcttctgtaccaggcattggcaaacttttttttgtaaatagccagagagtaaatatttcaggttttctggatcgtacagactctgttcagctactcaactctgccatcacagcgtaaaagcagcctttgatagttcctaggtgggtcagaacataaggggg

SEQ ID NO: 175019 - DNA, 948 bp, Homo Sapiens
gcggctcacaatgaaagacattggaaccccggaggcatggcgggtaatgatgtccctcaagtctggtctcctggcagagagcacatgggcattagataccatcaacatcctgctgtatgatgacaacagcatcatgaccttcaacctcagtcagctcccagggttgctagagctccttgtagaatatttccgacgatgcctgattgagatctttggcattttaaaggagtatgaggtgggtgacccaggacagagaacgctactggatcctgggaggttcagcaaggtgtctagtccagctcccatggagggtggggaagaagaagaagaacttctaggtcctaaactagaacgaggaagaagaagaggaagtagttgaaaatgatgaggagatagccttttcaggcaaggacaagccagcttcagagaactagtgaggagaagctgatcagtaagtttgacaagcttccagtaaagatcgtacagaagaatgatccatttgtggtggactgctcagataagcttgggcgtgtgcaggagctttgacagtggcctgctgcactggcggcattggtgggggggacaccactgagcatatccagacccacttcgagagcagacagagctgctgccttcccggcctcaacgcacctgcccaccagcccctcggaagcatgtgaccaccagcagaggggtacaccagggacaacagacccaggagggggccccacctgcatggacctccagaaaaacggatcacagccactatgcgatgacctggcagactaactcgggtctagccgccttgaacccgcggcatggagcacaagaagtccagaagcccaccaaggcacagccaccagtgcaccatgggcataaagccacgacaagcaccaccgcaacaacagcatcctagaaggacgaaccccacgcaagggaacaaaccca

SEQ ID NO: 175020 - DNA, 500 bp, Homo Sapiens
gctggtttgtagagatataagtgacataataaatagcccatatgtccagtgtgtaatttgacattgatatacacccgggaaaccatcaccagtcaagataatgaacatattcctcatccccagaagtttcctcagcctctttataatctttccctcctggccttccctatttgtccctaggcaaccactaaatctgctgtcactatgggttagtttgcattttctagaaatctatataagtggaattatacagtttgtatcctttttagtctggcttttgctcagcataattattttgagcatcctccatattttttcttgtgtcagtagttcattgccttttgttgctgagtagtatcccattgtatggatataccacaatttgttttgtttccagtttttggctattacaaataaatctgctacaaacatttgtatagatgtttttatatggacatagactttcatttctcttgggtagctaagaatagaatggctga

SEQ ID NO: 175021 - DNA, 826 bp, Homo Sapiens; identical to SEQ ID NO: 7185
  misc_feature (705)..(706): n is a, c, g, or t
  misc_feature (727)..(727): n is a, c, g, or t
  misc_feature (730)..(730): n is a, c, g, or t

SEQ ID NO: 175022 - DNA, 459 bp, Homo Sapiens
cgtgggtcttgcagaccagtgggcaaggcagctggtgccagatctcaggccagccgtttgtgcttctagcagggttgctgtgacttggccacacggagaggccctagagagcctcatggattgtaactaaagaacaaacggttccttatttgtttttttaaaatgattttataaataccgttttttacaccgttctcacggtactttccctaagctaagtcagcattgtcttccagtgttaaaggcatccctcacctctgcattgaacttacgtatccatgccaaggaatggaatttccatcctgagccagttcagttaggtgtcaattgatactattttaattttttatgcaatctgatgagatgagctcagatttaaaaatctcaaaagcacgtttattgtaacaagaattgttatgtattaatactgcagttttcaataaagattgacttgtgttg

SEQ ID NO: 175023 - DNA, 1462 bp, Homo Sapiens
  misc_feature (1444)..(1444): n is a, c, g, or t
ggggctctgcggagaccaggagtcagactgtaggacgacctcgggtcccacgtgtccccggtactcgccggccggagcccccggcttcccggggccgggggaccttagcggcacccacacacagcctactttccaagcggagccatgtctggtaacggcaatgcggctgcaacggcggaagaaaacagcccaaagatgagagtgattcgcgtgggtacccgcaagagccagcttgctcgcatacagacggacagtgtggtggcaacattgaaagcctcgtaccctggcctgcagtttgaaatcattgctatgtccaccacaggggacaagattcttgatactgcactctctaagattggagagaaaagcctgtttaccaaggagcttgaacatgccctggagaagaatgaagtggacctggttgttcactccttgaaggacctgcccactgtgcttcctcctggcttcaccatcggagccatctgcaagcgggaaaaccctcatgatgctgttgtctttcacccaaaatttgtttgggaagaccctagaaaccctgccagagaagagtgtggtgggaaccagctccctgcgaagagcagcccagctgcagagaaagttcccgcatctggagttcaggagtattcggggaaacctcaacacccggcttcggaagctggacgagcagcaggagttcagtgccatcatcctggcaacagctggcctgcagcgcatgggctggcacaaccgggtggggcagatcctgcaccctgaggaatgcatgtatgctgtgggccagggggccttgggcgtggaagtgcgagccaaggaccaggacatcttggatctggtgggtgtgctgcacgatcccgagactctgcttcgctgcatcgctgaaagggccttcctgaggcacctggaaggaggctgcagtgtgccagtagccgtgcatacagctatgaaggatgggcaactgtacctgactggaggagtctggagtctagacggctcagatagcatacaagagaccatgcaggctaccatccatgtccctgcccagcatgaagatggccctgaggatgacccacagttggtaggcatcactgctcgtaacattccacgagggccccagttggctgcccagaacttgggcatcagcctggccaacttgttgctgagcaaaggagccaaaaacatcctggatgttgcacggcagcttaacgatgcccattaactggttagtggggcacagattgcctgggttgctgctgtccagtgcctacatcccgggcctcagtgccccattctcactgctatctggggagtgattaccccgggagactgaactgcagggttcaagccttccaggggattttgccttcaccttggggccttgatggattgccttgcctcctcagtatgtggggggtttcatctctttaggagnaagttccaaggcaacagc

SEQ ID NO: 175024 - DNA, 821 bp, Homo Sapiens
  misc_feature (318)..(520): n is a, c, g, or t
  misc_feature (527)..(692): n is a, c, g, or t
  misc_feature (707)..(721): n is a, c, g, or t
  misc_feature (748)..(760): n is a, c, g, or t
tggaggcaaatgggagccaaggcacctcgggcagcgccaacgactcccagcacgaccccggtaaaatgtttatcggtggactgagctggcagacctcaccagatagccttagagactattttagcaaatttggagaaattagagaatgtatggtcatgagagatcccactacgaaacgctccagaggcttcggtttcgtcacgttcgcagacccagcaagtgtagataaagtattaggtcagccccaccatgagttagattccaagacgattgaccccaaagttgcatttcctcgtcgagcgcaacccaaggtgttcnnnnnnnnnnnnnnnnnnnnnnnnnnnnnnnnnnnnnnnnnnnnnnnnnnnnnnnnnnnnnnnnnnnnnnnnnnnnnnnnnnnnnnnnnnnnnnnnnnnnnnnnnnnnnnnnnnnnnnnnnnnnnnnnnnnnnnnnnnnnnnnnnnnnnnnnnnnnnnnnnnnnnnnnnnnnnnnnnnnnnnnnnnnnnnnnnnnnnnnnnnngtctgcnnnnnnnnnnnnnnnnnnnnnnnnnnnnnnnnnnnnnnnnnnnnnnnnnnnnnnnnnnnnnnnnnnnnnnnnnnnnnnnnnnnnnnnnnnnnnnnnnnnnnnnnnnnnnnnnnnnnnnnnnnnnnnnnnnnnnnnnnnnnnnnnnnnnnnnnnnnnnnnnnnnnnngccacattttggcgnnnnnnnnnnnnnnnaaaaaaatttttaaaaacctttctttnnnnnnnnnnnnnccccacaggagaacaagaaacccggggcaaaactttttttctcaaaagaaacacccgggcc

SEQ ID NO: 175025 - DNA, 534 bp, Homo Sapiens
gagtactgtaagaggaggagtgatgagaagagactgggattagttacaaagtggaagggtgaaaaggcctttgtagctgggtttgctttttatacatttcaaaatgtaaaccagatcacagtattcaaatgaaagctgaagtgaaagcagacattttcctcaactccccagggttgaaaagaccagtcactccccacccccagtaccagtcacagcagtggggatacagtagctgaatcagtcctccaccccctgcaggggagtgggtgggtaagcagcagagtccatctcgccatccgcggggaaaaggagctgggagtagggtagggtagtataccccagctgctaagagaatgggctggaagccgggaggggtctggaggagggaggagcaaacgagcctgaggcttctgtcatagccccacctcatgccgctgaaatgatctagtgcgtaagtgtgcgtgtgagtgtgtgggggcggtggtaatgggaggatgaacagggcgggacaagggggctcattgggttccgatg

SEQ ID NO: 175026 - DNA, 429 bp, Homo Sapiens
tgacctgtgacgtggcctgggacagagagaagcggctgagctttgcagtgccctttagagagatgaaacctgtcattttcctggatgtgttcctgcctcgagtcacagaattagcgctcacagccagtgacagacaaactaaagttgcagcctgtgaacttttacatagcatggttatgtttatgttgggcaaagccacgcagatgccagaagggggacagggagccccacccatgtaccagctctataagcggacgtttcctgtgctgcttcgacttgcgtgtgatgttgatcaggtgacaaggcaactgtatgagccactagttatgcagctgattcactggttcactaacaacaagaaatttgaaagtcaggatactgttgccttactagaagctatattggatggaattgtggaccctgttgaca

SEQ ID NO: 175027 - DNA, 492 bp, Homo Sapiens
cggagccaagtgatgctcagtaccagtcaggctaaaccttctgatttctctttaatgtccaagagcttctaacccaagagcctctatcccagtgctccaaggaaatgaagtcacatcatgacattctctctccaaaacccagttgttctctgtgacgatgccataaagtgacatctaatgactcaggtgtgtgtactgggtggcaggggcatgtcacacacaagcattctcaactgcagcctcagtctgggaacgaggtggtgcgaccctcatttccgaggggcagctgctgttttagttcccatcttatcattactggaatttcaagtgtagtaccagaaaccaaattaaaattcacaggaacgctgcactctgtactgttttcagatgttcagatatctacaaacacttgagtagaatcaagattagattttcaagtcatcagcgtgaattaagctttgaatcgatattcaactcagaactgagagagga

SEQ ID NO: 175028 - DNA, 839 bp, Homo Sapiens
agcttacacgtttgagtaaacatctggaatttttctttctctaaatgaatgtcagcttcagagagcccacctgcagacagaggcagtgactcccctaaacattttcggagtatctcttggaattggtttaaagctggtttcagagtccacaaagaaatggccctttacaggatcctttattgcttttggtggttaaagcagaatctctctggagagtaaaggtagacagccctgcaatgtctgaaggacaggccttctttctcctcacacccctgcagtccctggctgtgcctggctgtttcccgcaagtgccagacagaatgtgcactttttggctaagtatgttctattatgtgtgtaaaatcctctctcagttctgagttgaatatcgattcaaagcttaattcacgctgatgacttgaaaatctaatcttgattctactcgagtgtttgtagatatctgaacatctgaaaacagtacagagtgcagcgttcctgtgaattttaatttggtttctggtactacacttgaaattccagtaatgataagatgggaactaaaacagcagctgcccctcggaaatgagggtcgcaccacctcgttcccagactgaggctgcagttgagaatgcttgtgtgtgacatgcccctgccacccagtacacacacctgagtcattagatgtcactttatggcatcgtcacagagaacaactgggttttggagagagaatgtcatgatgtagacttcatcctccttggagcactgggataagaggctcctgggttagaagctcttggacattcaacgagaaactcagaaggtcttacgctcaggga

SEQ ID NO: 175029 - DNA, 472 bp, Homo Sapiens
gctaggtacctatcggaaccaagtgagccatgctccccaatatgtgatagcaccacatctcctccaagataaggcagaggactgtctcgcacacaagctatcacgtggctgctctgctctcccaggctggtgttgccctcgttcccacatgtgcagccttctactatctactagctcagaactggagctcacggtgggatttgcttggtgattagcttggagaatgtgtactgaaaatatccactccataatgtggcactaaacctaatctgtattcactggactgtctatcaaagacagcacagaccaatcattgatgcatctgagaaaatacaaagagctataaagaggaaagtgttagcagtggaagaggcaggcggagggtggcacagtcgtgggacactcaaatccgcatggcaaatgcctagccccattattcaccatgaccgggtctctatggaaacgcctggaa

SEQ ID NO: 175030 - DNA, 384 bp, Homo Sapiens
  misc_feature (181)..(231): n is a, c, g, or t
catcggaacccaatgagccaaggtaatgaccttgatgattcgtggaatttctgagtattacccagtaaacttctggatgaaccagcagctacccagacaccctcagagcactggtcctatccctgccgtgttaaactgaatgtgcaccctaactcccatgtgaaatcctcgccccaaggcnnnnnnnnnnnnnnnnnnnnnnnnnnnnnnnnnnnnnnnnnnnnnnnnnnngaccccaagagctttgtgcagctttctactgtgtgaaggcagcgggaaggaagtctgcagtctggaagaaaccccttaccagaacctcagcgtgctgggcaccctgattttggaggttgtgacgtacccctgcttcccctttccactttcatt

SEQ ID NO: 175031 - DNA, 534 bp, Homo Sapiens
  misc_feature (152)..(202): n is a, c, g, or t
tagatgatttgtggaagtttcgtgatattacccagtaaacttctggatgaaccagcagctacccagacaccctctagagcactggtcctatccctgccgtgttaaactgaatgtgcaccctaactcccatgtgaaatcctcaccccaaggcnnnnnnnnnnnnnnnnnnnnnnnnnnnnnnnnnnnnnnnnnnnnnnnnnnngaccccaagagcttagtgcagcttactactgtgtgaaggcagcgggaaggaagtctgcagtctggaagaaaccccttaccagaacctcagcgtgctgggcaccctgatattggaggttgtgacgtacccctgcttcccctttccactttcattcccagtgctgactgagaaacagagtcccttggccactctgtgacttcgccaactgtataatttcctctgcagacttgaacccgagccatagccatgaacgttcccaggcacagatgacagtaactaggtagtagctcaaaacacagaaagaaactggactcaggctgagccagattcta

SEQ ID NO: 175032 - DNA, 936 bp, Homo Sapiens
  misc_feature (126)..(159): n is a, c, g, or t
  misc_feature (197)..(441): n is a, c, g, or t
  misc_feature (720)..(757): n is a, c, g, or t
ctgggcctgctgtccagcttcccaggtgcagtgggttgtgggaacaagagatgactttgaggataaaaggaccaaagaaaaagctttacttagatgattgagtggggcctaggagatgaaatcacnnnnnnnnnnnnnnnnnnnnnnnnnnnnnnnnnnggaggttgcggtgcaatctttagaatatgccttaaaannnnnnnnnnnnnnnnnnnnnnnnnnnnnnnnnnnnnnnnnnnnnnnnnnnnnnnnnnnnnnnnnnnnnnnnnnnnnnnnnnnnnnnnnnnnnnnnnnnnnnnnnnnnnnnnnnnnnnnnnnnnnnnnnnnnnnnnnnnnnnnnnnnnnnnnnnnnnnnnnnnnnnnnnnnnnnnnnnnnnnnnnnnnnnnnnnnnnnnnnnnnnnnnnnnnnnnnnnnnnnnnnnnnnnnnnnnnnnnnnnnnntgatatgaatatgccttatatgctgatatgaatatgccttaaaataaagtgttccccacccctgcccaaaccgatcccctccccgacccccgaacaaaaacccctccaggcacctatgcccggctgcgggacaacaaggtaacggaactgccccatgcgccctagcccgtttcctgaccccacttttccttgacccacccgggaaaaatccggcccgcaccccctaacggcgagggcgaataaattttgcaggagccacggttccgtgtgccttaacgnnnnnnnnnnnnnnnnnnnnnnnnnnnnnnnnnnnnnntcaagaaggggccctctcttttcgggatcccaaaggaatcctcttcggaaacctcttgtcttcgcgacgctcatcccgccgcgctcgccaaaaaaagacgttcttcctaccaccgggggcgctgtttgggccggccctcacaccctccccaaccccctttctcccgaagccaaacttgg

SEQ ID NO: 175033 - DNA, 843 bp, Homo Sapiens
tcccggcaaccgcaggctcgcggcgggcgctgggcgcgggatccgactctagtcgtaatggaggcgggcggctttctggactcgctcatttacggagcatgcgtggtcttcacccttggcatgttctccgccggcctctcggacctcaggcacatgcgaatgacccggagtgtggacaacgtccagttcctgccctttctcaccacggaagtcaacgtgttgtgctcctacagactgcaaccctgctaggggtccttctcctgggttatggctacttttggctcctggtacccaaccctgaggcccggcttcagcagttgggcctcttctgcagtgtcttcaccatcagcatgtacctctcaccactggctgacttggctaaggtgattcaaactaaatcaacccaatgtctctcctacccactcaccattgctacccttctcacctctgcctcctggtgcctctatgggtttcgactcagagatccctatatcatggtgtccaactttccaggaatcgtcaccagctttatccgcttctggcttttctgggagtacccccaggagcaagacaggaactactggttcctgaaaaccttgaggtttgctcatctggacggtgggggaacctttattgcccaaccctgaaaccaaaagaaaaccctcccttgttttcaaactggggccctggttggtccaacctttccccaggtggccaccggggtttttgggggaacccagaagaatgaccttttggagggattaacaaggggcccaaaggaacaaagccttttaaccttaaaaaggattggcactggggggccttatggagatatgaaatccc

SEQ ID NO: 175034 - DNA, 906 bp, Homo Sapiens
  misc_feature (499)..(532): n is a, c, g, or t
  misc_feature (570)..(811): n is a, c, g, or t
ggacacagctcggacctcaggcacatgcgaatgacccggagtgtggacaacgtccagttcctgccctttctcaccacggaagtcaagctaaggtgattcaaactaaatcaacccaatgtctctcctacccactcaccattgctacccttctcacctctgcctcctggtgcctctatgggtttcgactcagagatccctatatcatggtgtccaactttccaggaatcgtcaccagctttatccgcttctggcttttctggaagtacccccaggagcaagacaggaactactggctcctgcaaacctgaggctgctcatctgaccactgggcaccttagtgccaacctgaaccaaagagacctccttgtttcagctgggcctgctgtccagcttcccaggtgcagtgggttgtgggaacaagagatgactttgaggataaaaggaccaaagaaaaagctttacttagatgattgattggggcctaggagatgaaatcacnnnnnnnnnnnnnnnnnnnnnnnnnnnnnnnnnnggaggttggggtgcaatctttagaatatgccttaaaannnnnnnnnnnnnnnnnnnnnnnnnnnnnnnnnnnnnnnnnnnnnnnnnnnnnnnnnnnnnnnnnnnnnnnnnnnnnnnnnnnnnnnnnnnnnnnnnnnnnnnnnnnnnnnnnnnnnnnnnnnnnnnnnnnnnnnnnnnnnnnnnnnnnnnnnnnnnnnnnnnnnnnnnnnnnnnnnnnnnnnnnnnnnnnnnnnnnnnnnnnnnnnnnnnnnnnnnnnnnnnnnnnnnnnnnnnnnnnnnntgtgtgatatgaatatgccttatatgctgatatgaatatgccttaaaataaagtgttccccaactcaaaaataaacactctaattaagaactatc

SEQ ID NO: 175035 - DNA, 780 bp, Homo Sapiens
  misc_feature (146)..(146): n is a, c, g, or t
  misc_feature (219)..(219): n is a, c, g, or t
gggagagccgcaggtctgggctgcagtaggtcccggcaaccgcaggctcgcggcgggcgctgggcgcgggatccgactctagtcgtaatggaggcgggcggctttctggactcgctcatttacggagcatgcgtggtcttcacccnttggcatgttctccgccggcctctcggacctcaggcacatgcgaatgacccggagtgtggacaacgtccagtntcctgccctttctcaccacggaagtcaacgtgttgtgctcctacagactgcaaccctgctaggggtccttctcctggggttatggctacttttggctcctgggtacccaaccctgaggcccggcttcagcagttgggcctcttcttgcagtgtcttcaccatcagcatgtacctctcaccactggctgacttggctaaggtgattcaaactaaatcaacccaatgtctctccttacccactcaccattgctacccttctcacctctgcctcctggtgcctctatgggtttcgactcaaagatccctatatcatgccgttcttgtgatttcaggggtccaactttccaggaatcgtcaccagctttatccgcttctggcttttctggaactacccccaggagccagaccgggaactactggccccttgcaaacctggagctggctcatcgtgaccactggggcacccttagtgcccaccttaaaccaaagaaaaccctcctttgtttcaccttgggccctggctggccaaccttcccccagggggcctggtggttctgtggg

SEQ ID NO: 175036 - DNA, 398 bp, Homo Sapiens
cgtgggttccttgcagagggagcactcatggagaccatgggtgtccaggggaggaaaggtgcctgagggggccagcccttcaggcccggcggattttcatctcagtgcgtttgagggagtagtagaagcccttccactgggcccagttgatgccattggcataagagaggtgggagccacctaggtagaagccattgaggttggcaaagtggcagctgcggaaccagaaggctcctgaggagagagctgcgcagttctgcacaaagaggtcctggtcccggtcgaaggtagagaacttctggccactgtggtaggacagggagtcacctgccccgccatcctcaaagcctgccacaaagagggtgtagccatcctcctcagcagaacccacgcggacg

SEQ ID NO: 175037 - DNA, 292 bp, Homo Sapiens
cgtgggttccttgcagagctgaaggatcaaggcagggtggcacccctgagagcccccttctcggctctaggatgatgcccagcccatggcaacagaaattctctgcaatgatcttgtttgtctgcctgaggctgggacatcctccagttcatctttttgatcctacagacagagttaatgcctggcatgctgcacgggcgagtgaaatgggcaggcagtttaggaaaagaaggaggagctggagaggggaggcacagatcagatgggagagtagacagagctgtctgcagaa

SEQ ID NO: 175038 - DNA, 182 bp, Homo Sapiens
  misc_feature (33)..(33): n is a, c, g, or t
gtgactctagaggacccgggtcgaccacgcgtncagtccaggcctttgataacatggtgacgtcgatgatgatacaggtgtgctgagtgagctgtgctgccagccatcgcagaggagcccgcgcacgactgtggtggggccgtcgcgtctgttcttggttgcctctctcctgacatgggacg

SEQ ID NO: 175039 - DNA, 773 bp, Homo Sapiens
  misc_feature (611)..(641): n is a, c, g, or t
gggacgtgacgcggtgcctggcgccgagcctcccaagatggcggtgtgcatcgcggtgattgccaaggagaattaccccctctacattcgcagcacccctacggagaacgagctgaagttccactacatggtgcacacatctctggacgtggtggatgagaagatctccgcaatggggaaggccctggtcgaccagagggagctgtacctgggcctgctctaccccacggaggactacaaggtatacggctacgtcaccaactccaaggtgaagtttgtcatggtggtagattcctccaacacagcccttcgagacaacgaaattcgcagcatgttccggaagctacacaactcctacacagacgtgatgtgcaaccccttctacaacccgggggaccgcatccagtccagggcctttgataacatggtgacgtcgatgatgatacaggtgtgctgagtgagctgtgctgccagccatcgcagaggagcccgcgcacgactgtggtggggccgtcggtctgttctggttgcctcttcctgaatgggacgcctggggctttcagggcaggcagctgtgcatgttctctcaactaaaggtcttgtggggagcnnnnnnnnnnnnnnnnnnnnnnnnnnnnnnncatgtcgggccgccctcgggccggtcgagaaaggctttcctagaaacctttcggtttggggggccccggggcccccgttaaggggaaagtgagaaacatgggggtcgataaacctgggtgtacccaaagaaa

SEQ ID NO: 175040 - DNA, 1008 bp, Homo Sapiens
agattcggcactaggggcttggctaaaagtaagggtgtcgtgctgatggccctgtgcgcactgacccgcgctctgctcgttctgaacctggcgcccccgaccgtcgccgcccctgccccgagtctgttccccgccgcccagatgatgaacaatggcctcctccaacagccctctgccttgatgttgctcccctgccgcccagttcttacttctgtggcccttaatgccaactttgtgtcctggaagagtcgtaccaagtacaccattacaccagtgaagatgaggaagtctgggggccgagaccacacaggccgaatccgggtgcatggtattggcgggggccacaagcaacgttatcgaatgattgactttctgcgtttccggcctgaggagaccaagtcaggaccctttgaggagaaggttatccaagtccgctatgatccctgtaggtcagcagacatagctctggttgctgggggcagccggaaacgctggatcatcgccacagaaaacatgcaggctggagatacaatcttgaactctaaccacataggccgaatggcagttgctgctcgggaaggggatgcgcatcctcttggggctctgcctgtggggaccctcatcaacaacgtggaaagtgagccaggccggggtgcccaatatatccgagctgcagggacgtgtggtgtgctactgcggaaggtgaatggcacagccattatccagctgccctctaagaggcagatgcaggtgctggaaacgtgcgtagcaacagtaggccgagtatccaacgttgatcataacaaacgggtcattggcaaggcaggtcgcaaccgctggctgggcaagaggcctaacagtgggcggtggcaccgcaaggggggctgggctggccgaaagattcggccactaccccccatgaagagttacgtgaagctgccttctgcttctgcccaaagctgatatccctgtactctaataaaatgccccccaccccgtcgggtggag

SEQ ID NO: 175041 - DNA, 431 bp, Homo Sapiens
  misc_feature (386)..(386): n is a, c, g, or t
  misc_feature (388)..(388): n is a, c, g, or t
  misc_feature (392)..(392): n is a, c, g, or t
  misc_feature (395)..(395): n is a, c, g, or t
  misc_feature (419)..(419): n is a, c, g, or t
tcgctcggtccgctcaccgacggggtgggggactcttccacggcccaaggtttgggctgactgtgcccgcgggcctggggccctggacatcttaagagaggcctcgggtacttaaccgagctgcaggagggagacccgagctttgtaacaaagcaggcctctctatgaaagggtggaccaatggcagccgtcagggagagtgaagccaggccgggagggtcaggggccctgcccgactaggacctgcccctatgaaccccaagagcatctgaagaaccaaagcgggggtgatgcctagtgaccaggctgcaaggggagactcacaggccagacccatggaccgctggtctcctcccatctttaggggcagagagtggaggtaggancnacgnagncacggtggccacctctctgctccncctgtgccgaga

SEQ ID NO: 175042 - DNA, 371 bp, Homo Sapiens
  misc_feature (15)..(15): n is a, c, g, or t
  misc_feature (22)..(22): n is a, c, g, or t
  misc_feature (68)..(68): n is a, c, g, or t
  misc_feature (134)..(134): n is a, c, g, or t
  misc_feature (303)..(303): n is a, c, g, or t
agccccctatccccnaaccaantggcccccaagtcaaagagccccaggaatcccagggaagtccatanccatgctatgcctttggatcagaaaagagaccagaaggaaatgttggaagtgagtggaatctagcnatgcctctcctgattattagtgccctgtgcttctgcaccgggcgtccctgcatctgactgctggaagaagaaccagactgaggaaaagaggctcttcaacagccccagttatcctggccccatgaccgtggccacagccctgctccagcagcacttgcccattccttanaccccttccccatccctgtccgcttcatgtcccctcctgagtagtcatgtgataataaactctcatgt

SEQ ID NO: 175043 - DNA, 333 bp, Homo Sapiens
cttgagtatcacgctcacgatggggtggggacaggatcgaagatgctggggagggggaaaagggagacttgtgaccaagatgactcctctgcctgcctggtgcaaaaattccccataaagagtgtgcgaggggtgtgccctgtggttgctgctccaaaacctgcaccaaagggaatgatgaaaggactagctggccttgtagtttcacacactttaacacgtacgccacgaaataacagaacgaaagagaaacaccatttacactgattactattatgaggccggcagtgaggtaagtgcacagtctgtgtgccgccaccccgtcgggtggag
